United States Patent Application Publication US 2019/0348154 A1 - sequence listing, part 31

SEQ ID NO: 115566 - DNA, 786 bp, Enterobacter cloacae
gtgggtctacagttaagctggggacgcgcaagcctgggggcgaaaatggcgctttacacaataggtgaagtggcactcctgtgtgatatcaatcccgttacgctacgggcgtggcagcgacggtatggattgcttaagccgcaaagaacggacggcgggcaccacctgtttaacgatgcggatattgaccggatccgcgagatcaaaagctggatcgacaatggcgtacaggtcggcaaggtaaaatcgcttctgagccaggacgatccagatacgcagcttctctggcgcgagcagcaggaaacgctgctgaggctgttgcagagtggcaatttgcagcgtttgcgcggctggatcaaagaacagggtcgagactacccggcgcaaaccttgatcacccatctttttattcccctacggcgtcggcttcagtgtcagcaaaccaccttacaggcactgctcagcatgcttgatggcgtgctgattaactatatttccgtctgtcttgcctcagcgcggaataaaaacagcaaagatgcgctggtgatcggctggaacgtacacgataccacccggctgtggctcgaagcctggattgccacccagcagggctggcgcgttgacgtgcttgcccactccctggcccagctcaggccggaactgtttgagggacagacgctgctggtctggtgcggcgaagtcccctccgcttcccagcagcagctcctgacggaatggcgcgaacatggttatcccgtttactcgctggggccaaatgcgtcgtaa

SEQ ID NO: 115567 - DNA, 738 bp, Enterobacter cloacae
gtgaagtgggtccgtgatccgttactctggctgacagggctgtttatcgccttactctacctgatgccgcacagcgcggcgctgtttaatgcgcttatccccgggctgccgcgcccggtgtaccagcaggagagctttgttaatctcaccctggcgcacttctggctggtggcggtgtcaagcgtgattgccatcgtgctgggcacaggcgccgggattgcggtgacgagacccgcgggcagggagtttcgtccgctggtggagaccatcgccgcaacggggcagaccttcccgccggtggccgtgctggcgattgccgtgccggcgattggttttgggcaggagcctgccatcattgcgctgattttgtacggcgtgttgcccattctgcaagggacgctggcggggattgcggcggtgcctgcatcggtgctgagcgtagcggaagggatggggatgagcgcctggcagcggctggtgaaggtcgaactgccgctggccgcaccggtgattatcgctggcgtgcgaacgtccgtgattatcaacattggtacggcaaccatcgcctcgacggtcggagccaatacgctgggaacgccgatcattatcgggttaagcgggtttaatacggcttacattattcagggggcggttctggttgcgctggcggcgattgtggtggatcgcctgtttgaacgcctggccggatacctcagccaacaccgccgcgaacaataa

SEQ ID NO: 115568 - DNA, 951 bp, Enterobacter cloacae
atgattgaatttcatgatgtgagtaaaacctttgcgggccgtccggcggcaagccacctcaatctgcattttgccgagggggcgttctcggtattgatcgggacgtcggggtcgggaaaatcgacgacgctgaagatgatcaaccggctggtggaacatgacagcgggacgattcgctttgccggagaggagatccgcagcctgccggtgctggaactgcggcggcgtatgggctacgccattcagtccatcggcctgtttccccactggacggtggcccagaacattgccaccgtgctacagctggaaaaatggtcccgggggaagatcaatgagcgtgtcgacgagctgatggcgctgctgggcctggacgcgtcgcttcgcgaccgctatccgcaccagctttccggcggacagcagcagcgggtcggggtggcgcgcgcgctggccgctaacccgcaggtgctgctgatggatgagcccttcggcgcgctggatccggtcacccgcggcgcacttcaggcggagatgagtcgcatccaccgtattctagggcgcaccatcgtgctggtgacgcatgatatcgacgaagcgctgcggctggccgatcgtctgatactgatggatcacggcgaagtcgtccagcagggtacgccgcttgagctgttaacctcgccggcgaatgattttgtgcgtgaattttttggccgcagcgagctgggcgtcaggctgctctcgctacgcaccgtcagggactatctgcgtccgcaggatgcgcaaatcggtggtgaaccgctgcacgatgggatgagcctgcgcgatgccctgtcggcgtttgtcgcccggcagtgcgaggtgttacccgttgcggacgggcaggggacgccatgtgggacgatccattttcgcgatctgctggcgggggaggtgacgcgtgaagtgggtccgtga

SEQ ID NO: 115569 - DNA, 1158 bp, Enterobacter cloacae
gtgccaataaaatgtcataaccgcgtcctgctgctgttggcctgtgtggccattgcagcggtcgcgttaccctttgtaaatgtcgcgccaaaccgtctggtgtcgggcgaaccgcgcgcgctctggcagatctggtcatttacgccgctactgctgggcgcggcgctggcgagtactgtagccttagccttctggccagggcgagccgccctttggctgacgcttctgctcagcgaagcactgtttatcgtgctgttctggagcgcgggacaggcagcaacgcagatggcctcggttgaaagcccgctggcgcgcacgtcgattggcagcgggctgtggctgtggctggcactttgtctgctggtctgtagcgatgccattcgccgtctcacgccgctacccgtctggcgctggctgctgaacgcgcaattctgggttatccctctgctgatcctcttcagcggcgatctgaatcaactctcgctgttaaaagagtacgccaaccgccaggaggtgtttgacaacgcgctggcgcaacatctgacgatcctgttcgggacgctgatcccggcgctgctgctgggcgtgccgctgggcatcgggtgctaccggcatcccagccgccagggcgccgtctttaccgtgctcaacgttattcagaccatcccctccgttgccctgtttggcctgttgattgcccccctggccggtctggtgaaatccttccctgcgttggccgcggcaggcattgccggaaccgggctgacgcctgcccttatcgcccttgtgctgtatgcgctgctgccgctggtgcgcggcgtggtggcggggttaagccaggttccgcctgacgtgctggaaagcgcccatgcgatggggatgagtgcgcgccagtgtttctggaaaatacagctgccgcttgcgcttccgctgctggttcgcagcctgcgggtggtgacggtgcaaaccgtggggatggcggtgattgccgcgctgatcggggcgggcggctttggggcactggtgttccaggggctgctgagcagcgcgctggatctggtgctgctgggcgttgtgcccacgattgcgctggcggtcgtactggatgcattgtttgccctgtggctcgcgctgctcaggagaagagccaatgattga

SEQ ID NO: 115570 - DNA, 918 bp, Enterobacter cloacae
atgacgattattaaggggataacaggatcggcggtgcttctggcggcgctaagcctgccgctacaggccgcagagccggttaaggtgggttccaaaattgataccgagggcgcgttgctcggcaatatcattttgcaggtactcgaaagccacggcgtgaaaacggtcaataaagtacagcttggcaccacacctgtcgtacgcggtgccatcacgtccggcgagctggatatctacccggaatacaccggcaacggggcattcttcttcaaggatgaaaacgatccggcctggaaaaatgccaaagccgggtacgaaaaagtcaaaaagctggacgcggaaaaaaataagctggtctggcttacgccggcaccggccaacaacacctggaccatcgcggtgcgtaaagatattgccgagaaaggcaagctcacctcgcttgacgatctcagccgctacctgaaagagaagggcgagtttaagctcgcggcctcggcagagtttatcgagcgcgctgatgccctgccagcgtttgaaaaagcctatgatttcaagctcgatcaggcacagctgctctcgctggcgggcggcgacacggcggtgaccattaaggcggcggcacagcaaacctccggcgtcaacgcggcgatggcctacggcaccgacggcccggtcgcggcgcttggtctgcaaaccctgaccgacccgaaaggcgttcagccaatttacgccccaaccccggtcgtgcgcgaggcggtgctgaaagcctacccggatattgcggaaaggctcaaaccggtgtttgaaaaactggatgcgaaaacgctgcaacagctgaatgccagcattgccgttgaggggctggatgccaaaaaggtggctgccgacttcctgaaacaacaagggcttgtgaagtaa

SEQ ID NO: 115571 - DNA, 2298 bp, Enterobacter cloacae
atgaaatggctatgttctgtaggtgttgccgtcagcctggcgctgcaacctgcgctggcagaggatttgtttggtaatcacccgctcacgcccgaagcccgcgacgcctttgtcacggatttactcaaaaagatgacggtcgatgagaaaatcggccagctgcgcctgatcagcgtcggtccggataacccgaaggaagccattcgcgagatgatcaaagacgggcaggtaggggccatttttaacaccgttacccgccaggatatccgcaagatgcaggatcaggtgatggagctgagccgcctgaaaattccactgttcttcgcttatgacgtggtgcacggccagcgtaccgtcttcccgattagcctcggcttagcctcctcttttaatcttgatgcggtgaaaaccgtcgggcgcgtttcggcatatgaagccgcagacgacggcctgaatatgacctgggcgccgatggttgacgtctcccgcgatccgcgctggggccgcgcttcggagggcttcggtgaagacacgtatttaaccgccacgatgggcaaaaccatggtggaagcgatgcagggcaaaagcccggcagatcgttactcggtgatgaccagcgtcaagcacttcgccgcctatggcgcggtggagggcggtaaagagtacaacaccgtcgacatgagcccacagcgcctgtttaacgactacatgccgccatacaaggcagggctggacgcggggagcggcgcggtgatggtagcgctgaactctctcaacggcacgcctgccacctccgattcgtggctgctgaaagacgtgttgcgcgaccagtggggctttaagggcattaccgtctctgaccacggcgcgattaaagagctgattaaacacggcacggcgtccgatccggaagacgcggtacgcgtggcgctcaagtccggcatcaacatgagcatgagcgacgagtactacagcaaatacctgccggggctggtgaagagcggcaaagtgacgatggcagagctggacgacgccgctcgccacgtgctgaacgtgaaatatgacatggggctgtttaacgatccttacagccatctggggccgaaggattcagacccggcggacaccaacgccgaaagccgtctgcaccgtaaagaagcccgggaagtagcgcgcgaaagcctggtgctgctgaaaaaccgtctcgacacgctgccgctgaaaaaatccggcaccattgccgtggtcggtccgctggccgacagcaagcgtgacgtcatgggcagctggtccgccgcaggcgtggcggatcagtccgttaccgtgctgaccggcattaagagcgccgtgggtgataatgcaaaagtggtttacgccaaaggcgcgaacgtcaccaacgataaagacatcgtgaccttcctcaaccagtatgaggaagcggtgaaggtggatccgcgcacgccgaaagagatgatcgacgaagcggtgaacgccgcgaagcagtccgacgtggtggtcgcggtggtgggtgaagcgcaggggatggcgcacgaagcctccagccggaccgacatcactatcccgcaaagccagcgtgatctgatcgcggccctgaaagccaccggcaagccgctggtgctggtgctgatgaacgggcgtccgctggcgctggtgaaagaagatcagcaggctgacgccattctggaaacctggttcgccggtaccgaaggcggtaatgccattgccgacgtgctgtttggcgattacaacccgtccggcaagctgccgatgtccttcccgcgctccgtcgggcagatcccggtttactacagccacctgaacaccggtcgcccgtacaacgccgacaagccgaacaagtacacgtcccgttacttcgacgaagctaacggcccgctctatccgtttggctatggcctgagctacaccaccttcaaggtgtctgacgtcaaaatgtcggcgccgaccctgaagcgtgacggcaaagtgaccgccagcgtggaggtgaccaacagcggcaaacgcgaaggcgcgacggtgatccagatgtacgttcaggacgtcacggcctccatgagccgtccggtgaaacagctgcgcggcttcgagaaggtcaacctgaaaccgggcgaaaccagaacggtcagcttcccgattgacgtgaatgcgctgaagttctggaatcagcagatgaaatacgatgccgagcctggcaaattcaacgtcttcatcggcgtggattccgcccgcgtgaacaaagccgaattcgaactgcaataa

SEQ ID NO: 115572 - DNA, 1758 bp, Enterobacter cloacae
atgtcttctgttcgaactgacgataacactacatttattaacgaactgtctcgcctggttggtcactctcacctgcttaccgacccggccaaaaccgcccgctatcgtaagggctttcgctccggccagggcgacgcgctggcggtagtcttccccggtacgttgctcgaactgtggcgcgtgctcagcgcctgcgttgcggcagacaagattattttaatgcaggctgcgaataccggcctgaccgaaggctccacgccgaacggcaacgattacgatcgtgacatcgtgattatcagcaccctgcgcctcgacaaactgcacctgctggacaagggcgaacaggtgctcgccttccccggcaccacgctttactcgctggaaaaagcgcttaagccgctgggacgcgaaccgcactcggtgatcggctcatcgtgcattggcgcctcggtgatcggcgggatctgcaataactccggcggctcgctggtgcagcgcggcccggcttacacggaaatgtcgctgttcgcccgtatcgatgaaaacggcaagctgacgctggttaaccatctggggatcgatctgggcgtaacgccagagcagatcctcagcaaactcgacgatgaccgcgtaaaggacgaagacgttcagcacgatggccgtcacgcgcatgaccacgattacatcacccgcgtgcgcgatatcaatgccgatacgccggcgcgctataatgccgatccggatcgcctgtttgaatcctccggctgcgcgggcaagctggccgtttttgcggtgcgcctcgataccttcccggcagagaaaaagcagcaggtgttttacatcggcaccaatcagccggaggtgctgacggagatccgtcgtcatattctggccgagttcactcacctgccggtggcgggcgagtatatgcaccgggacatttacgacatcgccgagcgctacggcaaagataccttcctgatgatcgacaagctcggcaccgacaaaatgccgttcttcttcactatgaagggccgcaccgacgcgatgctggagaaagtatcgttgttcaaaccgcacttcaccgaccgctttatgcagaagctgggtaacgtcttcccggcgcatttaccggagcggatgaagacctggcgcgacaagtatgagcaccatctgctgctgaaaatggccggggacggaattgccgaagcgcagagctggctcaccgaattcttcaaaaccgccgacggggatttctttgcctgtacgccggaagaaggcagcaaagccttcctgcaccgcttcgccgcggcgggtgctgccatccgttatcaggcggtgcattccgaagaggtggaggatattctggcgctggatatcgccctgcgtcgcaacgataccgagtggtttgaacatctgccgccggagatcgacagcaagctggtgcataagctctattacggccactttatgtgctatgtcttccatcaggattacatcgtcaaaaaaggggttgatgcacacgcgctgaaagaacagatgctggcgctgctgcacgagcgtggcgcgcaatatcctgccgagcacaacgtaggacacctgtacaaagcgccggagacgcttaaacagttttatcgcaaaaatgaccctacaaacagtatgaacccgggcattggtaagacaacgcggaagaaatactggaaagagagtgccgaaacagaggaacacaatacgcaagcctctgatgaactcttatag

SEQ ID NO: 115573 - DNA, 555 bp, Enterobacter cloacae
atgtcggctgtagaaattttccccgaaactgaaatcgaggtgcgcgacgcccttcctgacgatgcgcatgccatctcggcgatatacgcctggcatgtgcttcatggccgtgcgtccttcgaggaaattcctcccaccgtcgatgagatgcgtcagcggatgaagagcgtgaccgacagcggtttaccgtggctggttgcgctgtatcgcggcattgttgtcggctactgctacgccacgttttatcgtccacgccaggcctaccggtacacccttgaggaatccatctatgtggatgccagcactaccgggcgcgggtttggctcggccttactccaggcactgatcgcccgttgtgaacaaggaccctggcggcagatgattgccgtggttggtgacggaaacaataatgcgggatcgttacggctgcataaaaaacatggcttcgaggttgtcggtcaactgcgcagcgtggggtataagaagggcgactggcgggatacgttgatcatgcagcgtccactcaacgatggtgactggacgctgccggagtag

SEQ ID NO: 115574 - DNA, 924 bp, Enterobacter cloacae
atgctgaaatttcgagtgtcactccttagtcttgcgctgctgctgggcgtctccgctaccgcgccagccatcgccaaaacgaccgcagtcgccaccgctgctgcgcaaccccagattgcgtccggcagcgcgatgatcgttgacctgaataccaacaaggtgatctacgccagtcatccggatctggtgcgcccgatcgcttccataaccaaagtcatgaccgcgatggtggtgcttgatgcacgactgccgctggacgaaaagctgaaggtggatatcagccacacgccagagatgaaagggatctactctcgcgtgcgtctgaacagtgaaatcagccgtaaaaatatgctgctgctggcgctgatgtcctctgagaaccgcgcggcggcaagccttgcccaccattatcctggtggttacgacgcgtttatccgcgcgatgaacgccaaagccaaagcgctggggatgaaaaatacccatttcgtagagccaaccggtctgtcgattcataacgtctcgacggcgcgtgatttaaccaagctgctgatcgccagtaagcaatacccgctgatcggtcagctcagtaccacgcgtgaggagatggcgacattctcgaacccggcgtatacgctgccgttccgcaacactaaccatctggtgtatcgcgataactggaatattcagttaaccaagaccggattcactaatgcggcagggcactgcctggtgatgcgcaccgtgtttaacggtaagccagtggcgctggtggtgatggatgccttcggcaaatatacccactttgcggacgccagccgcctgcgcacctggattgaaaccgggaaagtgcagccggtgccggcttcagcgctggcgtataaaaagcagaaagcggaacagatggcgacggcgcagaacgactga

SEQ ID NO: 115575 - DNA, 588 bp, Enterobacter cloacae
atgaaccatgtctggggacttttctcccatcccgatcgtgaaatgcaggtgatccgtaacgagaacgaaacggtcgcgcatcactatacccaccatgtcctgctgatggcagcggtgccggtggtctgcgcgtttattggtactacgcagataggctggaactttggtgacggcaccgtggttcagctttcctggtttaccggactgtacctggccattctgttttatggcctgatgctggccggggtggcggtgatggggcgggtcatccactggatggcgcgcaactatccgcagcgcccgtcgctggcacactgtatggtcttcgccggatacgtcgcgaccccgctgtttttgagcggtattgtcgcgctctatccactggtctggctgtgcgcgctgatcggtacggttgccctcttttacaccggttatctgctgtatgtaggggtgccaaccttcctcaatatcaataaagaagagggcctgagcttctccagctctacgcttgccatcggcgtactggtccttgaggcgctactggccctgacagttattctttggggttatggataccgtctcttttaa

SEQ ID NO: 115576 - DNA, 573 bp, Enterobacter cloacae
atggatatcaacggtcttattgaacaatatggatacgccgcgctggtgatcggcagcgtcgcggaaggcgaaaccatcacgctgctgggcggggtggccgcacatcagggattgctgaaattctcgctggtggtcgccgccgtcgcgttgggcggtatgattggcgatcagctgctctactttctggggctgcgctttggcccgacgcttttgcaacgttttgctaagcatcaaaagaaaattcgccgtgctcagcggcttatccagcgacgtccctggctgtttgtgattggtacccgctttatgtacggctttcgcatcatcgggccaatactgattggcgcgagccgcttaccgccgaaaatcttcctgccgctgaacattctcggggcgattgcctgggcactgattttcaccacgcttggctacgtgggtggcgaagtaataggtccgtggctgcataatctcgatcaacatcttaaacactgggcctggttgatcctggttgttgcggtggtgattgtggtacggctgtggctcaagcatcgcgaaaagcggcgggatgaagagtga

SEQ ID NO: 115577 - DNA, 765 bp, Enterobacter cloacae
atgacgcgagtcgcaattgttaccgcatcggattcaggaattggcaaaacgacggccctgatgctggccgaacgcgggtttgatgtcggagtaacctggcattcagatgagaaaggggcgctggcaacctgccgtgaaattgaagcgcgcgggcagcgtgccgaggccattcatctcgacttaagcaatttgccggaaggcgcaaaggccattgaaaccctgattacgcgtttcgggcggctggatgtgctggttaacaatgccggggcgatgaataaagcgccatttctggacctgtcgtttgacgactggcggcacatattcaccgttgacgtggacggcgcgtttctctgcttgcaaatcgcggcgcgtcagatggtgaagcagggggaaggggggcggatcgtgaatatcacctcggtgcatgaacatacgccattgccggacgccagcgcctatacggcggccaaacatgcgctgggcgggttaacaaagtcgatggcgctggagctggttaaacataagattctggtgaacgccgttgcgcccggagcgatcgccacgccgatgaatgatatggacgacagcgaagtgaaagaaggcgcaatgccggaaatcccgctggcacggccagggcataccaaagaaattgccagcctggtggcgtggctgtgtgacagcgacgccagctacaccaccgggcagtcgtttatcgtcgacggcggttttatgctggcgaatccgcagtttaagcctgcggaataa

SEQ ID NO: 115578 - DNA, 1419 bp, Enterobacter cloacae
atgaaacgttctcttactttatctctgagtgctcctcttgtttttatgctggccgcctgcgcgccggaacatgccacggtgtctccagtaaaaacgcaagccgccgccgcagctgtaaatacccaactgcgtcatgccgactggccaaaaagcgaatggtggaaagactttaacgacccccagctcaacgcgctgatcgacaaagcgctggcggatgcgccggatatgcaaattgcccgtcagcgtatcaccctggcggaagcacaggcgaaagccgctgtcgctgctgagggtccacagctggatttttccgcagatgttgaacggcaaaaaatgtcggcagaggggctgatggggccatttgcgctgaccgacccggcggcggggacaaccggcccctggtacaccaacggcacctttggtctgacggcgggttgggatctggatttatggggtaaaaaccgcgcccaaattgaggcccgcatcggtcaggtgaatgcgcaaaaagcggagctggagcagacccgccagctgctcgccagcagcgtcgcgcggctgtactgggactggcagaccgaggccgcggtgggtgacgtactcgcgcaaatcaaacgggagcaggaaaatatcatcggtgccgatcgcgagctttatcagcacggcattacctcctcggtggaaggcgttgaaacggatatcaatgccagcaaaaccgatgaacagctcgctgacgtgcacggcaaaatgaaggtcattgaggcgcgtctgaatgcgttgacccataccccttcagtcacgctcgcccggcatgccttacctgacgcagaggcgtcgttgccatcaacgctcggttatgaactgctggctcggcgcccggatttgcaggaggcgcactggtatatcgaagcatccatgagcgaagtggatgccgccagagccgcgttctaccctgacatcaatttgatggcattcttgcagcaggatgcattgcacctgagtgacctgttccgctcatctgcgcagcaaatgggcgtaaccgccgggctgacgctgccaatttttgacagcggtcggttgaatgcgaacctggatatcgcccaggcgcaaaacaacctctccgtggcgaactacaacaaggccgtggtagatgccgtaaaccaggttgcccggacggccagcgaagtggatacgctgaccgccaaaaatcagcaccagcagcagatcgaaaaagatgcggcgcgcgtcgttgcgctggcacaggcgcgtttcagcgccgggatcattgccggctcccgggtgagtgaagcaaaaattccggcgctcaaagagcgtattgccgggttgatgctgaaaggtcaatacgtggatgccacgctccagctcacctccgcgctgggtggcggatatcatcacggctaa

SEQ ID NO: 115579 - DNA, 936 bp, Enterobacter cloacae
atgcgtgttttactggccccgatggaaggtgtgctcgactctctcgtgcgcgagctgcttaccgaggtgaacgattacgatctctgcgtgacggagtttctgcgcgtggtcgatatgttgctgccagaaaaatcattttatcgtctctgcccggaactgcatcgtcagagccgcactccgtccggtacgctggtgcgcgtccagctgctcggccagtatcctgagtggctggctgaaaacgccgcccgcgcggtagcgcttggttcgtacggcgtcgatcttaactgcggctgtccgtcaaagctggtcaacggcagcggtgggggggcgacgctacttaaagatccggagctgatttatcgcggcgcaaaggccatgcgtgaggcggttccatcgcatctgccggtgacggtcaaagtgcgtctgggatgggacagcgacgacaagcagtttgaaattgctgacgcggtgcagcaggcgggcgccaccgagctggtggtgcacgggcgaaccaaagaggatggttataaagccgagcgcattaactggcaggcgattggcgagatccgcaaacggcttacgatcccggtgattgccaacggcgaaatctgggattacgagagcgcgcaggcctgcctcaaagagaccggctgtaatgccgtgatgattggccgcggtgcgctgaacgtgccgaacctcagccgggtggtgaaatataatgagccgcggatgccgtgggcggatgtggtgaaactactgcaaaaatacacgcggctggaaaagcaaggcgataccggcttgtatcacgtcgcgcgcattaagcagtggctgagttatttgcgtaaagagtacgacgacgcgctgggattatttcaggagatccgtacgctacagacgtctgcggatattgcccgggtgatccagtcaaaatcctga

SEQ ID NO: 115580 - DNA, 396 bp, Enterobacter cloacae
atgagcaaatcactgaatactatctggcaataccttcgcgccttcgtcctgatttatgcctgcctgtacgccggcatttttatcgcttcgctgctgccgattacgatacccggcagcattatcggcatgctgatcttgtttgtgctgctggcattacaggtgctgcccgcgaaatgggtcaacccagggtgcttcgttctcattcgctatatggccctgctttttgtgcctatcggcgttggggttatgcagtattacgatgtgcttaaagcgcagttcggcccgattgtggtctcctgcgccatcagtacgctggtggttttcatggtcgtcagctggagttcacatattgtgcatggcgaacgtaaagtggtcggggagaaaacaaaaaaatga

SEQ ID NO: 115581 - DNA, 696 bp, Enterobacter cloacae
atgatggcgaatatctggtggtccctgccgttaaccctggtggtgttctttgctgcgcgtaaactagcggtgcgtttcaaaatgccgttgctgaacccgctgctggtcgccatggtggtgattattccttttctgctgctcaccggcattccttatgaacgttacttcgccgggagcaagatcctcaacgatttgttgcagcctgccgtggtggcgctggcgtttcctttatatgagcaactgcatcagatccgcgcgcgctggaaatccatcattaccatctgctttgtgggtagccttgttgcgatgatcaccggcacctcggtggccttattgatgggcgcgtcgccgcagatcgccgcctctatcctgcctaaatccgtcaccacgccgattgccatggccgtgggcggcagcatcgggggcattccggccatcagcgccgtgtgcgtgatttttgtcggtatcctgggcgcggtgtttggtcatacgctgctcaatatcatgaaaattcggaccaaagcggcacgcggtctggcgatgggtaccgcctcgcacgcgctgggcaccgcacgctgcgcggaactggattatcaggaaggggcattcagctcgctggcgctggtgatctgcgggattatcacttccctggtcgcgccgtttatcttcccgattattctggcagtcatgggctaa

SEQ ID NO: 115582 - DNA, 885 bp, Enterobacter cloacae
atgcatccacgttttcaagctgctttctctcagcttgcagagaatttgcaatcagccctggctccggttctggcggatgcgcatttccccgccctgctgacggcagatcaggtcacggcccttaaacaggcaacggggctggacgaagacgcgctggctttcgccctgctgccccttgcggctgcctgcgcccgcgctgacctttcccattttaacgtaggcgcaattgcgcgcggcgtgagcggaacttggtacttcggcggaaacatggagtttcttggtgcgaccatgcagcaaaccgtccacgcggagcagagcgccatcagtcacgcctggctgcgcggcgaaaaagccctgcgcgccatcaccgtcaactataccccttgcggccactgccgccagtttatgaatgagctgaacagcggtcttgaactgcgtatcaacctgccgggacgcgcaccgcatacgctgggtgattacctgccggatgctttcggcccgaaagatcttgagatcaaaaccctgctgatggacgagcaggaccacggttatgcgctctcgggagatgagctgagcgaagcggccattgccgccgccaataaaagccacacgccatacagcaaatctccaagcggcgtcgcccttcagtgccgcgacggccgcatcttcaccggcagctatgcagagaacgccgcatttaacccgacgctgcctccgctccagggtgccctgaacctgcttagcctgaacgggtatgactacccggatattcagcgcgcaatcctggctgaaaaggccgatgcgccgctgatccagtgggacgcgaccgcagccacgctgaaagcgctgggctgttcaaccatcgaccgcgtgctgctggcataa

SEQ ID NO: 115583 - DNA, 711 bp, Enterobacter cloacae
atgttaaagcgcgtgttttacagcctgtctgtcctggtcggcatactgctgttgatcgtgctgggtctcgaccgctggatgagctggaaaacagccccctacatttttgatgacctacaggatctcccctaccgtcaggttggcgtggtgcttggcaccgccaagtattaccgcactggcgtcataaatcagtattaccggtatcgtattcagggcgcgctgaacgcctataacagcggcaaggtgaactatctgctgctgagcggcgataacgcgctgcaaagctataacgagccggtgacgatgcgcaaagatctgattgccgcaggcgtcgacccggccgatatcgtgctcgactacgccggattccgcacgcttgattccatcgtgcgtacccgcaaggtgttcgacaccaatgatttcatcatcattacccagcgtttccactgcgagcgggcgctgtttatcgccctgcatatgggcattcaggcgcagtgttatgcggtgccatcgccaaaggatatgctgagcgtgcgcgtacgtgagtttggcgctcgttttggcgcgctggctgacctgtacctgttcaaacgtgaaccgcgctttttaggcccgctggtgccgatcccaacgatgcacgaagtgccggagaatgcacagggttacccggcggtaacgccagagcagttgctggaaattcagaagaagtaa

SEQ ID NO: 115584 - DNA, 1011 bp, Enterobacter cloacae
atgagtgcgttaaataaaaaaagttttctcacttatctgaaagaaggcggtatttacgttgttcttttagtcttgctggcgattattattttccaggaccctacgttcttaagtctgctgaacttgagtaacattctgacccagtcttccgtacgtattattatcgcgcttggcgtggcgggacttatcgttacccaggggactgacctttcggcagggcgccaggtgggtctggcggcggtcattgcggcaaccctgttgcagtcgatggaaaacgccaacaaggtgttcccggagatggcgaccatgccgattttcgtggtgatcctgatcgtgtgcgccatcggcgcggtaattggcctgattaacggcatcatcattgcttacctgaacgtgacgccattcatcaccacgcttggcacgatgatcatcgtttatggtatcaactccttgtactacgatttcgtcggcgcgtctccaatctctggcttcgacagcggcttctcgaccttcacgcaggggtttgttgcgctgggcagcttccgtctctcctacatcaccttctatgcgctgattgcggtggcgttcgtctggatcctgtggaacaaaacccgcttcggtaaaaacatctttgctatcggcggtaaccctgaagcggcgaaagtgtccggggtcaacgtggctctgaacctgctgatgatttacgccctgtccggggtcttctacgccttcggcgggatgctggaagcgggccgtatcggctctgcaaccaacaacctcggctttatgtacgaactggatgcgattgcagcctgcgtggttggcggcgtctccttcagcggcggcgtggggaccgtgctgggcgtggtgaccggtgtgatcatcttcaccgttatcaactacggcctgacctacatcggcgtgaacccctactggcagtatatcatcaagggcgccatcatcatcttcgcggttgcgctggattcactgaagtacgcgcgtaagaagtaa

SEQ ID NO: 115585 - DNA, 1521 bp, Enterobacter cloacae
atggtcagcacaactactcagtcgtccggtgaatacttgttggaaatgaccggtgtcaacaagtcattccccggtgttaaggcgctcgataatgttaatttaaaagttcgtccacactctattcatgcgttaatgggtgaaaacggtgcgggtaaatcaacattattaaaatgcctctttgggatctatcaaaaagattctggcagcattctttttcagggaaaagagatcgacttccattcagcgaaagaagcgctggagaacggtatctcgatggtacaccaggaattaaacctggttctgcaacgttcagttatggataatatgtggttgggtcgttatccaaccaaaggtgtctttgtcgatcaggataaaatgtatcgcgacaccaaagccatttttgatgagctggatattgatatcgacccgcgcgcacgcgtcgggacattatccgtttcccagatgcagatgatcgaaattgccaaagcgttctcctatgatgcgaaaatcgtgatcatggatgaaccgacatcgtcattaacggaaaaagaggttaaccacctttttaccattattcgtaagctgaaagatcgcggctgcggcattgtctatatctcacataaaatggaagagatcttccagctgtgcgatgaaatcaccatcctgcgcgacggccagtggatcgccacccagccgctagaagggctggatatggacaagatcattgccatgatggttggccgttctctgaaccagcgtttcccggataaagaaaacaagccaggcgaagtgattctggaggtgcgtaacctgacctcgctgcgtcagccgtctatccgcgatgtctctttcgatctgcacaagggggagatccttggcatcgcagggctggtgggcgccaagcgcaccgatatcgtggaaaccctgtttggtatccgtgagaaagccgaaggcaccattacgctgcacggtaagaagatcaacaaccacaacgccaacgaagccattaataatggctttgcgctggtgacggaagagcgtcgttccaccggtatttacgcttatctggatattaactttaactcgttaatttctaatattcgcaattacaaaaataaagtcgggctgctggataattcccgcatgaagagcgatacccagtgggtgattgactccatgcgcgtgaaaacgccgggccaccgcacgcaaattggctcactctcgggagggaaccagcagaaagtcattattggtcgctggttattaacccagcctgaaattctgatgctggatgaacctacgcgcggtatcgacgtgggtgcaaaatttgagatttaccagctgatcgccgagctggcaaaaaaagataaagggatcattattatttcttccgaaatgccggaattgttagggatcacagaccgtattctggttatgagcaatggtctcgttgccggtattgttgaaaccaaaacgacaacgcaaaacgaaattttgcgtcttgcgtctttgcacctttaa

SEQ ID NO: 115586 - DNA, 999 bp, Enterobacter cloacae
atgaataagaaggtgttgactctgtctgctgtcatggcaagcatgctttttggcgcagcagcacacgcagcggatacccgtattggcgtgactatctataaatacgacgacaacttcatgtccgttgtgcgtaaagcaattgaaaaagacgctaaatcagcgccagacgtgcagctgctgatgaatgactcccagaatgaccagtccaaacagaacgatcagattgacgttcttctggcaaaaggcgtgaaagcgctggctattaacctggttgacccggcggcggcaggcacggtgatcgagaaagcgcgcggccagaacgtgccaattgtcttcttcaacaaagaaccttcccgtaaggcgctggacagctacgataaagcgtattacgtgggtaccgactccaaagagtccgggattatccagggcgatctgattgcgaaacactgggcggcgaacccgaactgggatctgaacaaagatggtcagattcagttcgttctgctgaaaggcgaaccgggccatccggatgctgaagcacgtaccacctacgttattaaagagctgaacgacaagggcctgaaaacccagcagctggcgttagacaccgcaatgtgggacaccgctcaggcgaaagataagatggacgcgtggctctctggtccgaacgccaacaaaattgaagtggtcatcgccaacaacgatgcgatggcaatgggtgcggtagaagcgctgaaagcccacaacaaatccgccattcctgtattcggtgtggatgccctgccagaagcgctggcgctggtgaaatctggcgctatggccggtaccgtgctgaacgatgccaacaaccaggcgaaagccaccttcgatctggcgaaaaacctggccgacggtaaaggcgccgctgacgggactaactggaaaattgacaacaaaatcgttcgcgttccttacgtgggcgtagaccagtccaacctggctgagtttatcggtaaataa

SEQ ID NO: 115587 - DNA, 1023 bp, Enterobacter cloacae
atgatcaccattcgtgacgtcgcccgccaggcgggtgtttctgttgctactgtctcccgcgtgctgaacaacagtgcgctggtcagccctgaaacgcgtgaaaccgtaatgaaagccgtgacccaactggggtaccggccaaacgctaatgcccaggcgctggcgacgcaggtcagcgataccattggcgtagtggtgatggacgtgtctgacgccttcttcggcgcgctggtcaaagcggtagacgtcgttgcccagcagcaccagaaatatgtgttgattggcaacagctatcacgaggctgaaaaagagcgttatgccattgaggtactgatccgccagcgctgtaacgccctgattgtgcactctaaagccctgagcgatgaagagctggctgggtttatggagcaaatccccggcatggtgcttatcaatcgtatcgtccccggctacgcgcaccgctgcgtcggtctggataacatcagcggcgcgatgatggcgacgcggatgctcatcagcaacggccatcagcgcattggttatctggcctccagccacggtattgaagacgacatgatgcgccgcgagggctggcaaaacgccctgaaagagcagggcattgcgccgctggaaagctgggtaggtaccggttcgccggacatgcagggcggtgaagcggcaatggtggaactgctggggcgtaatcttcagctgacggccgtgtttgcctataacgacagcatggcggcaggtgcgcttaccgcgctgaaagacaacggcattgcggtgccacagcatttatcgctgatcggctttgacgatatcccgattgcccgttacaccgatccgcagctgacaacggtgcgttaccccattgcgtcgatggcgaaactggcgacagagctggcgttacagggggcggcagggctgttagatcctgacgcaacgcattgttttatgccgactttagtacgccgccattcggtcgctatccgacaaactgtggctccgatcactaactga

SEQ ID NO: 115588 - DNA, 1158 bp, Enterobacter cloacae
atggagcgaaacgtcacgctcgattttgttcgcggcgtcgccattctcggtatcctgctgctgaatatcagcgccttcggtctgccgaaggccgcttatctgaatcctgcgtggtatggcgacatcacgcgcagcgacgcctggacgtgggcaatcctcgatctctttgcacaggttaaattcctgaccctctttgcgcttctgtttggcgcgggacttcagcttctccttaaacgcggtacgcgctggatccagtcgcgtttaacgctgctggttatcctcggttttattcacgggctgctgttctgggacggcgatattctgctcgcgtatggtctggtggggctgatttgctggcggctgatccgcgacgcgcccggtgtgaaaagcctgtttaataccggcgtgatgctctatgtcatgggactgaccgtgttattgctgcttggcatgattgccgatgcttccaccagtcgttcatggatcccggatgcggccaacctgcaatatgagcagttctggaagctgaaaggcggcatggaagcgataggcaaccgggccgatatgctcggcgataatctgctggcgctgggcgcgcaatacggctggcaactggcggggatgatgctgatgggcgcagccctgatgcgcaccggctggctgaaaggggaatttagcctgcgacactatcgtcgtacgggagcagggctggtgctgctcggcgtgatcatcaacctcccggcggtgatgatgcagtggcatcttcagtgggattaccgctggtgtgcattcctgttgcaggtgccgcgcgaactgagcgcgccgttccagactattggctatgcggcgctgatctacggcttctggccccagctttcccgcctgtggatcgtcagtgcggtggcctgcgttgggcggatggcgttaagcaattacatcctgcaaacgctgatatgcaccacgcttttctaccgattcggcctgtttatgaaattcgaccgcctgacgctgctggcgtttgttattccggtctggattgttaacttggtgttttcggttgtctggctgcgttttttccgccaggggccgctggaatgggcatggcgacggttaaccgtccgtgcttcgggcgtgtcattgcgtaatacatccagataa

SEQ ID NO: 115589 - DNA, 669 bp, Enterobacter cloacae
atgtcatcactcagtaaagaagcagcccttgtccatgaagcgctggttgcgcgcggtcttgaaacgccactgcgcccgcccgtgcaggagctggacaatgatacccgcaagagtctgatcgccggccatatgacggagatcatgcaactgctgaatctcgatctgagcgacgacagcctgatggagacgccgcaccgcatcgcgaagatgtacgtcgacgaaattttctccggcctggattacgcgaacttcccgaaaatcaccgtcattgaaaataagatgaaggtcgatgagatggtgacggtacgcgatatcacgctgaccagcacctgcgagcatcactttgtgaccatcgatggtaaagcgacggtggcctatattccaaaagatacggtcattggcctgtccaagatcaaccgcatcgtgcagttctttgcccagcgtccgcaggtgcaggagcgtctgacgcagcagatcctgaccgcactgcaaactctgttgggtactaacaacgtggcggtgtctatcgacgcggtgcactactgcgtgaaagcgcgcggcgtgcgtgatgcaaccagcgcaaccaccaccacttcgctgggcggcctgttcaaatcgagccagaacacccgccaggagttcctgcgcgccgtgcgtcaccacaactaa

SEQ ID NO: 115590 - DNA, 1149 bp, Enterobacter cloacae
atggcgctgcgtatcgcgctcagcggatttgtggttctggtcgtggcgatggggatagggcgcttcgccttcacgcctcaggtgccgctgatgatagccgccgggcaactcacgcttaccagcgcggggctggtggcggcaatgaactatctgggctatctggtgggggcatgggatgccatgcgcgcccatcgcttcgttgaaacgtgtctctggcttggcatcaccggtgcggtggcgctaacgctgctctccgcggcggcagataatgccgttgttcacggtctgctgcgctttgtgatcggctgcatgagcggctggtcgatggtgctgattgccgcctggaccaacgagcggctggggcagctgggcaaaccgggactcagtgcggccgtctttgccggacccggggccggcatcgccctgagcggcctgctggcggtctatattcaggcgaaatccttgtccgccggggcggcatggcaaatctacggcgtactggcgctggtgctgattgtgctggtggcgcgctacctgccgcggtccgggcagctccatcggcccggtaccgcgcctgaaccgctgctgctgaccgcagatctcaagcgtctggtctggagctacagcctggcagggttcggctatatcctcccggcgacctttttatcgcaaatggcggcggtgcgttttcccggcagcctgtttgcccagtttgtctggccgatatttggcgccgcctcggtggtgggaattgcgctcagcattgccctgcggcatacatcaagcgctaaccgcaggctggcgattgttctgtggttacaggggattggcgtgctggcggcctggctgctgccgggcataggcggcttgctgacgggtgggctgctggtgggcggcgggttcctctgcgccgtgcagctctctcttttgtacggtcgcgagctggcgccagaccacacgcgttatatggcgggactgctcaccaccgggtatgccattggtcagctggtgggtccggtcacgtcggcactgtcgacctggctcacacatcggctggaacctgcgctggggctggcggggatcgcgctgttcgttggcggagcgttagtctggaaccgtcaggctgaaaggcaacagcaattgcaataa

SEQ ID NO: 115591 - DNA, 828 bp, Enterobacter cloacae
atggaactgctcgaagagcatcgttgttttgaaggtcgacagcagcgctggcggcacgactccaccgcgctgaattgtgctatgacgttcagcattttcctgccccctgtggacaatccaccggtgctgtactggctttcaggcctgacctgcaacgacgaaaacttcaccaccaaagcgggtgcccagcgtattgccgccgaactgggcattgcgctggtgatgccagataccagcccgcgtggcgatgacgtggccgacgatgccggatacgatttgggtaaaggcgccgggttctatctcaacgccacggaagaaccgtgggcgagccattaccgcatgtatgactacattcgcgatgaacttcctgccctggtgcactctcagttcgcggtcagcgagcgctgcgcgataagcggacattcgatgggtggccacggggcgctgataatggcgctgaaaaatccggggaaatacaccagcgtgtccgcatttgcgccgattgtgaacccaacgctggtgccgtgggggcaaaaagcctttacgcactatctgggtaaagatgcagaaaaatggcaggaatgggacagctgcgcgttgatgctggcgagcgattcggtgaatgcgatcccaatgcttatcgatcagggcgatgcggatcagttcctcgccggacagctacagcctgcggtgctggcggaagccgcgcgccagaaggactggccgctaacgctgcgcattcagccgggatacgaccacagctattacttcatagcgtcctttattgaggatcatctccgcttccatgcggagcatctgttcagataa

SEQ ID NO: 115592 - DNA, 1986 bp, Enterobacter cloacae
atgacaataccgcgcattaagctcctggccgtcgccattggcgctgccacatgttcccccttcgttcacgcagccgttcaggacaccgttgtcgtcaccgcgacgggttttgaacaaaagatccagaatgcccccgcctccatctctgtgatttcaaaacagcagattgaagataaagcctaccgtgatgttaccgatgccctgagagacgtcccgggcgttgtcgtcactggcggcgggagcagcagtgatattagtattcgcggcatggcctctcagtacaccttgttcctggtgaacggcaaacgcgtcagtacgcgaagcacccgccccaacagcgacaactcgggtattgaacaaggctggctgccaccgctggagtccattgagcgcatcgaggtcatccgcggcccgatgtcctcgctttacggctccgatgctatgggtggcgtaattaacgtcattaccaaaaaagtatcgaacaccaaagcctggaccggttcgttgcatggcgatgcgaccttccaggaaaaccatgattccggcgatatcttccagaccaacgcctacgcttctggtcccctgatcgacggactgctgggcgcaaaagtgacggggctgttgtcacgccgcgcagaagataaaatcgtgaacggctataacgagcagaaaatgcgtaacggtggcattacgctgaacttcaccccggacgagaagaacgatttcgacctcgactttgctcgcgagcttcaggacagaaacagcaccccggggatgtcgaaagcggctgaaacctgccggggaacaacctgtacgccaaataccaaaagcgactcgcgctatgagcacacgacctactccttaacgcacagcgggtattacgacgacttcaataccaccagctatatccagcaggaagagaccaataatccaggtcgcaaaatgcgctcctataacaccaccttcaacaaccagaaccagattttcctcggcgatcatacgttgaccctcggcgggcagtatcgttatgagaaactgcgcgacaagggtaatcagctggaagctgctgacggcctgaacaaactgacgcgctggagctgggccctgtttgccgaagatgaatgggcaatgacggaaagctttacgttgaccggcggcctgcgtatggacaaagaccaaaactacggtactaactggacgccgcgcggttacggcgtatggcacctggccgatcagtggacgttaaaaggcggggtttcggctggctatcgtgcgccggatctgcgtcagtcgtctgccagctggggccaggtaacgggtggcggccgtcttgacggtatcatcgttggcaacccggatctgaaaccagagaagagcctgagcgaagagctcgccctgctctgggataacaacgataacctgaatgccggcgtaacgctgtttaataccgacttcaaggacaagattacggaagttcgccgctgtaacagcagcgccgatcccgcctgtacgattggcgatcacagctatgatttcgtcagcgatcgcgtcaacgtggacaaagccaacatgcgcggtgtggagtcctccttcgggtggaagatcacgcgtgatgtgaactggactgcaaactacacctatacggagtccgagcagaagagcggccagttctccggcaagccactgaacaaaatgccgaaacacatgttcaacaccaccctggactggcaggcgacgccagatgtcggattctggagccgtctgaacctgcgcggtaaaacgtctgagtacctgagccgcacgtcaatgtcccagggtacgccgtcctacactcaggttgatgtaggtatgcgctacaacgccaacaaaaacctgctggttactgccggtgtgtataacgtgctcgataagcagattgattacgatacgtatgacaccgtgctggatggccgtcgctataccgtcggcatgacctacagcttctga

SEQ ID NO: 115593 - DNA, 1470 bp, Enterobacter cloacae
atggtttcagaaactaaaaccacagaagcgcccgcgctacgtcgcgcacttaaggcgcgtcacctgacgatgatcgccattggcggctccatcggtacgggtcttttcgttgcctctggcgcaacaatttcggcagccggcccgggtggggcactattctcttatatcctgattggcctgatggtctacttcctgatgaccagcctgggtgaactggcggcatacatgccggtgtctggttcgttttcgacctacggacaaaaatacgttgaggaaggcttcggcttcgcgctgggctggaactactggtacaactgggcggtgaccatcgccgttgacctcgtcgccgcacagctggtgatgacctggtggttcccggacacgccaggctggatctggagcgccctgttcctggcggtcatcttcctgctgaactacatctccgtgcgcggctttggcgaagcggaatactggttctctttgattaaagtggcaaccgtcatcatctttatcgtcgtcggtgtggcgatgatcgttggtattttcaaaggggctgaaccggcgggctggagtaactggactataggcgatgcgccgtttgccgggggcttctcggcgatgattggcgtggcgatgattgtcggcttctccttccagggtaccgagctgattggtatcgcggccggtgaatccgaaaacccggagaagaacattccgcgcgcggtgcgtcaggtgttctggcgtatcctgctgttctatgtgttcgcgatcctgattatcagcctgattattccgtataccgacccaagcctgctgcgtaatgatgtgaaagacatcagcgtcagcccgttcacgctggtcttccagcacgcgggcctgctctctgccgcggcggtgatgaacgcggtgatcctgacggcggtactgtctgcgggtaactccgggatgtacgcctccacccgcatgctctacaccctggcctgcgacggtaaagcgccgcgtattttctcgaaactgtctcgcggtggcgtgccgcgcaacgcgctgtatgcgaccacggtaattgcgggtctctgtttcctgacctccatgttcggcaatcagacggtctacctgtggctgcttaacacctctggtatgacgggcttcattgcctggctgggcattgccatcagccactaccgtttccgtcgcgggtacgtcaagcaggggcatgatctgaataatctgccgtaccggtcagggttcttcccgctggggccgatcttcgccttcgttctgtgcctgatcattaccctgggtcagaactatgaggccttccttgcggacaccattgactggggcgccgtcacggccacctatattggcattccgctgttcctgatcatctggtttggctacaaactgacgaaaggaacacgcttcgttcgctacagtgaaatggatttcccggaacgatttaaacaataa

SEQ ID NO: 115594 - DNA, 867 bp, Enterobacter cloacae
atgcacattacattgcgtcagctggaagtttttgccgaggtgctgaaaagcggctcgacaacccaggcgtcacaaatgctggcgctctcgcagtccgccgttagcgcggccttgaccgatcttgaagggcaactgggcgttcagcttttcgacagggtaggaaagcggctggtggtgaacgaacatggccgcctgctgtacccgcgtgccctggccttgctggagcaggcaacggagatcgaacagctgttccgcgaggacaacggcgctattcgcgtctacgccagcagcacgatcggtaactacatcctgccggaagtgattgcccgctaccgccgggattttccgaccctgccgctggaaatgagcgtcggcaacagccaggacgtgatcaacgcggtgatcgatttccgcgtggacatcgggcttatcgaagggccgtgccacaacgtggatatcattgcggaaccctggctggaggatgagctggtggtgtttgcctccccggcctcttctttactccagggcgaggtgacgctggagcgtctggcgcaggcgcagtggatcctgcgagagcagggctccggcacgcgtgagattgtcgattatctgctgctgtcccatctgccgcagttccagttagggatggagttaggtaactccgaggcgattaagcatgcggtgcgtcatggcctgggcattagctgtctttcccgacgggtgattgccgaacagctggaaaccggctctctggttgagatccccgttccgctgccgaagctggtgcgcacgctgtggtgcatccatcatcgtcagaaacacctttccagctcgctccagcgttttctgcgctactgcgccatttaa

SEQ ID NO: 115595 - DNA, 1047 bp, Enterobacter cloacae
atgtcagaaatcaccttacaacatcatcgtacagtgtggcacttcgtgccgggtctcgcgctcagcgccgtggttaccggcgtggctttatggggcgggagtataccggcggttgccggcgcagggttcagcgccctgacgctggccattctgctcggcatggtggtcgggaacaccgtttatccacacatctggaaatcctgcgacggcggcgtgattttcgccaagcagcatttattacgtctcgggatcatcctttatggcttccgtctcaccttttcgcagattgcggatgtcggtgtcagcgggattgccattgacgtcctgaccctttcgagcacctttttactggcgtgctttatcggccagaagatctttgggctggacaaacagaccagctggctgatcggtgcgggtagcagcatctgcggcgcggcggcggtactggcaacagaacccgtcgttaaagccgaagccagtaaagtcacggttgccgtcgcgacggtagttatcttcggtacgctggcgatcttcctgtatccggccatgtatccgctggtggcgcactggtttagtccggaaacctacggcatttatatcggctcaaccatgcacgaagtggcgcaggtggtggcggcaggtcacgccattaacccggaagcggaaaacgcggcggtcatcgccaaaatgctgcgcgtgatgatgctggccccgttcctgattttcctcgcggcgcgggttaaacagcttgctccggcaggcggcaccgagaaaagcaaaatcaccattccgtggtttgcgatcctgttcatcgtggtcgctgtcttcaactctttccacctgctgccaaaagcgatggtggatatgctggtgacgctggatacggtcctgctggcgatggcgatggcggcgctgggcgtcaccacacacgtcagcgcgctgaaaaaagccggcgcgaaaccgctgctgatggcgctggtgctgttcatctggctaatcgttggcggtggtgcgattaaccttgcggtacacagcctgttggcataa

SEQ ID NO: 115596 - DNA, 858 bp, Enterobacter cloacae
atgaaatatgttggagcgcacgtcagcgctgccggtggccttgcgaatgccgccattcgcgccgccgaaatcgaggcgaccgctttcgccctgttcaccaaaaaccagcgccagtggcgcgccgcagcgctcaccgctgaagtgattgatgatttcaaagccgcctgtgagaaatacggctacgggcctggccaaatccttccccacgacagctacctcattaacctcggtcacccggttgccgaggcgctggaaaaatcccgcgaagcgttcctggatgaggttcagcgctgtgaacagctggggctgacgctgctgaacttccatcccggcagccatctgatgcagattgacgaagacgcctgtctggcgcgcatcgccgagtccatcaacatgacgctggataaaacccagggcgtgacggcggtgattgagaataccgccggtcagggcagcaacctcggctttaagtttgagcatctggcggcgatcatcgacggcgtggaagataaatcccgcgtgggggtgtgcatcgatacctgtcacgcctttgccgccggctatgacctgcgcacaaccgaggccacgaaaaataccttcgaggagttcgagcgtattgtcggttttaaataccttcgcggtatgcacttaaacgatgcgaaaagcgcgttcggcagccgcgttgaccgccaccacagcctgggcgaaggcaacatcggccatgatgcgttccgctttatcatgcaggacgcccgcttcgacggtattccgatggtgctcgaaaccattaacccggatatctgggcggaagagattgcctggctgaaggcgcagcaaaccgctgaacaggcggcataa

SEQ ID NO: 115597 - DNA, 1686 bp, Enterobacter cloacae
atgaaaacgctgctgatcattgactccggtctcggacaggctcgtgcctatatggcgaagaccctgctgggcgcggcggcacaaaaagcgcatctggatatcattgataacccgggtgatgctgaaatggcgattgttctgggcgacaaaatccccgctgacagcgccctgaacggcaaaaaagtgtggctgggtgatattaatcgcgcggtagcccatcccgagctgttcctgagcgaagcaaaaggtcatgcgacggtttacagcgcacctgttgaggcggcgccggttgccgccgctgggccgaaacgcattgttgcggtaacggcctgcccgacaggtgtggcgcacacctttatggcggctgaagccattgaaaccgaagcgaaaaaacgtggctggtgggtgaaggttgaaacccgcggctctgttggtgcgggcaatgccatcacgccggaagaggtggcggaagccgatctggtgattgtggcggcggatatcgaagtggatctggcgaagtttgccggcaagccgatgtaccgtacctctaccggcctggcgctgaagaagaccgcgcaggagtttgataaggcgctggcagaagccaaaccgtatcaggcaaccggtgcggctaaaactgcgaccgaagggaaaaaagagtctgcgggcgcgtatcgtcacctgctgaccggcgtgtcctacatgctgccgatggtggtggcgggcggcctgtgtattgcgctctccttcgcctttggtatcgaggcgtttaaagagccgggcacactggcggccgcgttgatgcagattggcggcggctccgcgtttgcgttgatggtgccggtgctggcgggctttatcgccttctccattgctgaccgtccgggtctgacgccgggtcttatcggcggtatgctcgccgtgagcaccggttctggctttatcggcggtatcattgccggtttcctcgccggttatgtggcgaagctgatcagctcgaagctgaagctaccgcagagtatggaggcgctgaaacctatcctgatcatcccgctgatttccagcctggtggtcggtctggcgatgatttacctgattggtaagccggtcgcgggcattctggaaggtctgacccactggctgcaaaccatggggacggcgaacgcggtgctgctgggcgcaatcctcggcggtatgatgtgtaccgacatgggggggccggtgaacaaagcggcatatgcgtttggcgttggcctgctgagtacccagacctacgcgccgatggcggcgatcatggcggccggtatggtgcctccgctggcgctcggtctggcgacgattattgcccgccgtaagttcgataaagcgcagcaggaaggcggtaaagcggcgctggtgctgggcctgtgcttcatcaccgaaggcgcaatcccgtttgcggcacgcgatccaatgcgtgttctgccgtgctgtatcgtgggtggtgcggtgacgggggctatctccatggcggtaggtgcgaaactgatggcgccgcacggcggtctgttcgtcctgctcatccctggcgccatcacgccggtgctgggttatctgctggcgattgttgccggtacgctggtggcaggcctgtcttacgcggtgctgaagcgcccggaagcggaagtggtcgcaaaagcagcctaa

SEQ ID NO: 115598 - DNA, 939 bp, Enterobacter cloacae
atgagcagacgtgttgcgaccattacgctgaacccggcttacgatctggtgggcttctgcccggaaattgagcgtggcgaagttaacctggtgcggacgaccggcctgcatgccgcaggaaaagggattaacgtggcgaaggtgctgaaagatctcggcatcgacgtcaccgttggcggcttcctcggtaaagacaaccaggacggttttcagcagttgttcagtgaactgggcatcgctaaccgttttcaggttgtgcaaggccgtacccgcatcaacgttaagctgaccgagaaagacggtgaagtgaccgatctgaacttctccggcttcgaagtgaccccggctgactgggagcgctttgttgccgattccctgagctggctgggccagtttgacatggtgtgcgtcagcggcagtctgccgtccggcgtcagcccggaagcgttcaccgactggatgacgcgcctgcgcagccagtgcccgtgcattattttcgacagcagccgcgacgcgctggtcgccggtctgaaagcctcgccatggctggttaagcctaaccgccgcgaactggagatctgggcgggccgtaagctgccagaattaaaggatgtgattgacgctgcccatgcgctgcgcgagcagggtatcgctcacgtggtgatttcgctgggtgcagaaggtgccctgtgggttaacgcctccggggaatggattgccaaaccgccttcaatggaggtggtcagcaccgtgggtgccggggattcgatggttggcggcctgatctacggtctgctgatgcgcgaatccagtgaacataccttacgtcttgctaccgccgttgcggccctggccgtgagccagagcaatgtcggtattaccgatcgtacccagttagccgcgatgatggcgcgcgttgacttaaaaccttttaactaa

SEQ ID NO: 115599 - DNA, 1131 bp, Enterobacter cloacae
atgttccagttatctgttcaggatattcacccgggcgaacaggccgggaataaagaggaggctattcgccaggtcgccgctgcgctcgtgcaggctggcaacgtggctgacggctatgtcaacggcatgctggcgcgtgaacagcagacctccaccttcctcggtaacggtattgcaattccgcacggcaccacggacacccgcgatcaggtgctgaaaaccggcgtgcaggtcttccagttcccgcagggcgtgctgtggggcgaggggcaggtggcttacgtggcgattggcatcgcggccagcggtgacgaacacctgggcctgctgcgtcagctgacgcacgtgctgagtgatgatgccgtcgcggaacagcttaaatccgccaccacagctgaagagctgcgtgccctgctgatgggcgaaaaacagagcgaagcgctgaagctggataatgaaactctgacgctggacgtcgtcgcgtccgatttgctgacgctccaggcgctgaacgcggctcgcctgaaagaggtcggtgcggcggataccacttttgtgacgcgcgccatcaatgataagccattaaacctgggtcagggcatctggctgaacgacagtgctgaaggcaacctgcgtagcgctatcgcggtcagccgtgctgcggttgcctttgagacagacggcgaacgcgccgcgatgctggtaacggtcgccatggcggacgatcagccggtatccgtgctgaagcgtctgggcgatctgctgctgaacaataaagctgaaaaactgctgaacgcagacgcggcgacggtgctggccctgctgaccagcgacgatgcgctgacggatgacctgctgagcgcagagtacgtggtgcgtaacgaacacggcctgcatgcccgtccgggcaccatgctggtgaataccattaaacaatttgcaagtgagatcaccgtgaccaatctggacggttcgggtaaaccagccaacgggcgcagcctgatgaaagttgtcgcgctgggcgtgaagaaaggccatcgtctgcgctttaccgcgcagggtgcggatgctgaacaggcgctgaaagcgattggcgacgccatcgcggccggtctgggggagggcgcataa

SEQ ID NO: 115600 - DNA, 1233 bp, Enterobacter cloacae
atgacaggcggcgtaaactccgcctctctctgttactcgcaaagactgaacatgcataacacccccgctgccgcctcaccaaagccttttgatttgacgtcaacggcgtttttgatcgttgctttcctcaccggtattgccggtgcgttacaaacgcctacgctgagcctgtttctgaccaacgaagtccacgcccgcccggcgatggttggcttcttcttcaccgggagcgccatcatcggcattttcgtcagccagtttcttgccgggcgttcagaccgcaaaggcgatcgcaaaagcctgatcgttttttgctgcctgctcggggtgtttgcctgcctgctgtttgcctggaaccgtaactacttcattctgctgttcgtgggcgtcttcctgagcagtttcggctcgaccgccaacccacagatgttcgcccttgcccgcgagcatgccgaccgcaccgggcgagaagcggtgatgttcagttcgatactgcgcgcgcaggtgtcgctggcctgggtgattggccccccgctcgcctacgcgctggcgatgggttttggctttacggtgatgtacctcagcgcagccgtggccttcgtggtatgcggcgcaatggtctggttctttctgccctccatgcgcaaagagccgaaagtggcgaccggtacgctggaagctccgcgacgtaaccggcgcgacgcgctgctgttattcattatttgtacgctaatgtggggaaccaacagcctctatatcattaatatgccgctgtttattattgatgagttgcatctgccggagaagctggccgggatcatgatgggaaccgccgcggggcttgagatccccaccatgctgattgcgggctattacgcgaagcgcttcggcaagcgctttttgatgcgcgtcgccgccgtagccgggctgctgttttatgtcggtatgctgacggttcatacgccagccttgcttcttgctttacagctgctgaacgccatttacatcggtatcctggccggtatcggcatgctctacttccaggatctgatgccgggtcaggcaggctctgccaccaccctttatactaataccacccgcgtgggctggattattgcaggctcactggcgggcgttgtggctgaaatctggaactatcatacggtgttctggattgcgctggtgatgtgcgtcctgacgctgagctgcctgacgcgaatcaaagacgtttaa

SEQ ID NO: 115601 - DNA, 255 bp, Enterobacter cloacae
atggattgtcgttccgactgtggcgcgtgctgtaccgcaccgtccatctcaagccccattccaggcatgccggagggcaagcctgccaatacccgctgcgttcagctctctgacactaacctgtgcatgatctttggctcgcccctgcgcccgaaggtgtgctccgggctccagccaaccgccgaaatgtgcggcagtacgcgccagcaggccatcacttatctgcttgagctggaagcgctcaccgcgccttaa

SEQ ID NO: 115602 - DNA, 573 bp, Enterobacter cloacae
atgccaagagcgaacgaaattaagaaaggtatggtactgaattacaacggcaaactgctgattgtgaaagatatcgacattcaggcacccagcgcccgcggcgcagcaacgctgtacaaaatgcgtttctccgatgtccgcaccggcctgaaagtggaagaacgttttaaaggcgacgatatcgtcgataccgtgaccctcacccgtcgctacgttgatttctcctacatcgacggcaacgaatacgtgttcatggataaagaagattacaccccgtatatcttcactaaagatcagatcgaagaagagctgctgtttattccagaaggtgggatgccggacatgcaggtgctgacctgggatggcgtgctgctggcgctggagctgccgcagaccgttgatctggaaattgttgaaacggcgccgggcatcaaaggcgcgtctgcaagtgcgcgtaacaaaccggctaccctgactaccggtctggtcgtacaggtgccagaatacctgtcggcgggcgagaaaatccgtatccatatcgaagaaaaacgctatatgggtcgtgctgactga

SEQ ID NO: 115603 - DNA, 1191 bp, Enterobacter cloacae
atggaacaaacctggcgttggtacgggccgaacgatccggtttctcttgatgatgtgcgtcaggctggcgcaacgggtgtggtcacggcgctgcatcatattccgaacggtcaggtgtggccggtggaggaaatccaaaagcgtcaggctcagctggcagagaaggggttaacctggtctgttgtggaaagtattccggttcacgaagatatcaaaacccactccggtgagtgtgatacctggattgcgaattatcagcagagcattcgtaacctggcagcctgtggtattgataccgtctgctacaactttatgccgatcctggactggacgcgtaccgacctggaatatgaaatggccgatggttcgaaggcgctgcgtttcgatcaaatcgcttttgcggctttcgaactgcacattctgaagcgtccgggggcggaagcagactacaccgccgaagagcagcagcaggcgctggcgtggttcaatgccgccggtgaagcggacattgagaagctggttcgcaatatcatcgcgggcctgcccggtgcggaagagggctataccctcgatcagttccgcgcgcgcctggcggaatatggcgatatcgataaaaaccagctgcgtgaaaacatggcgcacttcctgcgcgctattgtgccggtggcagaagaagtcggcgtgcggctggcggttcatcctgacgatccaccgcgccctatcctcggcctgccgcgtatcgtgtctacgattgaagatatgcagtggctgaaagagacggtggacagcatctacaacggctttaccatgtgtacgggctcgtatggcgtgcgggcggataacgatctggtgcggatgatcgaaaccttcggcgatcgcattcatttcacccacctgcgtgcaacctgccgtgaagagaacccgaaaaccttccacgaagcagcccatcttggcggcgacgtgaacatggttgcggtggtggatgccattctctctgaagaggtacgtcgtaagcaggcgggggatgtgcgtcctatcccgttccgtccggatcacgggcaccagatgctggacgatctgcgcaagaaaacgaatccagggtattcggcgattggccgtctgaaagggatggcggaagtgcgcggtatcgagctggcgctgaaaatgacgaagtatcctgaacttctttaa

SEQ ID NO: 115604 - DNA, 1467 bp, Enterobacter cloacae
atgaagactattgcctccaccgcgcttcctgctcatgtccagcagccccgctacgatcgcgagcagttacgctcccgcatcgtccatttcggttttggcgcgttccaccgggcgcatcaggcgttgttaacaaaccgggtactgaatgccaaaggaggcgactggggaatttgtgagattagcctctttagcggcgatgtccttatgggccagctccgggcgcaggatcatctgtttaccgtgctggcgaaaggtgccgaaggcaatcagcccattattatcggtgcggtaaaagagtgcctgaacgcaaaactcgactcgctggcagccattattgagaaattctgcgaaccgcaggtggcaattgtctccctcaccattaccgaaaaaggctactgcatcgatccggcgacgggaaaactggatatgcggaacagccgcatcctgcacgatctcgagcacccgtctgagccgcattccgcgccgggtattctggttgaagcgcttcatcgccgccgcgagcggggcctgccggcgtttaccgtgctctcctgcgacaatattcccgacaacggccacgtggtgaaaaatgccgttctcggcatggccggaaagcgttccgcagagctggccgcatggatcgaggcgcacgtgagcttccctggcaccatggtcgaccgaatcgtgcccgccgccaccgacgcctcactcgcggaaatcacccaggaacttggcgttgaagatccctgcgccatcagctgtgaaccgttcattcagtgggtagtggaagataactttgtcgccgggcgtccggagtgggaggtcgcaggcgtacagatggttgaggatgtcctgccctgggagcagatgaagctgcggatgctgaacggcagccactccttcctcgcgtatctgggctaccttgccggctacgcgcacataaatgaatgtatgcaggacgacagtttccgcgaggcggccggcaggctgatgctgaaagagcaggcccctacgctgcgcatcaccaacgttgatctgacagcctatgctgacagcctgcttgaccgcttcgccaacccggccctacagcatcgtacatggcaaatcgccatggacggcagccagaagctgcctcagcgcatgctggaagggatccgcatgcatcttgagcgtaacaccgcctggccattactggcgctgggggtggcgggctggatgcgctacgtcagcggtacggacgaacagggcaacgccattgacgtacgcgatccgctgagcgacaagtttcaggccattgtcgctaccagcagcgacgcagaacgcgttagcgccctgctgacgctaaatgaaatctttggcgacgacctgccgcaaaaccctgtctttgtcgaggcaatcaccagcgcgtaccagcgcctcgtccggctcggcgcgcgccaggccgttatcgaaacgttaaaaatttaa

SEQ ID NO: 115605 - DNA, 987 bp, Enterobacter cloacae
gtgaccaaaaccaacctgatcaccggttttctaggcagcggtaaaactacgtccattctgcatttgctggccaataaagacccggcggaaaagtgggccgtgctggtcaacgaatttggcgaagtggggatcgacggcgcgttgctcgccgacagcggcgcgatggtgaaagagatcccgggcgggtgtatgtgctgcgtgaatggtctgccgatgcaggtcgggctgaatacgctgctgcgtcagggcaagccggaccgtctgctgattgagcccaccgggctggggcatcctaagcaaatccttgatttactgaccgccccggtatacgagccgtggcttgagctgcgtgcgacgctttgcctgctcgacccccgccagctgctggatgaaaaagcgatcaataatgacaatttccgcgaccagctcgcctcggcagatattatcgtggcgaataaatccgatcgcgcgacggctgagagtcaggccgcgttccagtcctggtggcagcaggctggcggtggacgtcagtatgtgcagacgacccagggcaacattgatggcgccttgctcgaccttccccgcctcaaccagacgcaactgcctgccagcgctgagcattcgcatagccacggcgcgaagcaaggcctggctgcactgagcctgccggagcatcagcgctggcgtcgcaacctgaatagcggccaggggcaccaggcctgcgggtggatcttcgatgccgatacggttttcgacaccattggtatactggaatgggcgagactcgcgccggttgagcgggtaaaagggatcatgcgcactccggatggtctggtgcgcattaaccgtcagggcgaggatttctttattgaaacccagaacgtcgcgccacccgacagccggatagagttaattagtgcggttaataccgactggaatgccctccagtcaagcctgttgaagcttcgtttaagtttgggcggctaa

SEQ ID NO: 115606 - DNA, 714 bp, Enterobacter cloacae
atgacgactcgacttcctgctattttattgctcaacgctgccggcctggcgatctttttctcctggtatatcccggcggatcacggtttctggttcccgctggattccgggctgttccacttctttaaccaggcgctggcgaagagtgaagccttcctgtggctggtggcgatcaccaacaaccgcgcgtttgacggctgttcgctgctggcaatgggctgtctgatgctctccttctggctgaaggaagacaaaacgggtcgtcgccgtattctgattatcggcctggtgatgctgctgacggccgtgattattaaccagctggcgcagcatctgatgccggttaaacgcgccagtccttcgctctttttcccgaatattaaccgcgtcagcgagctgcttcatattccaaccaaagatgcctcgaaggacagtttcccgggcgaccacggtatgatgctgctgatttttgcaggcttcatgctgcgctattttggtaaaaaagccttcaccatcgccctggttattgtggtggtatttgcattcccgcgggtgatgattggcgctcactggctgacagatatcgccgtaggctccctcacggcggtgttaattggtttaccgtgggtgctgatgaccccactgagcgatcgcataataggcatttttgatcgctatcttcctggcaaatttaaacaagccggaaacaaataa

SEQ ID NO: 115607 - DNA, 537 bp, Enterobacter cloacae
ttgcgggggatcccggcgattgcagtggcggttctgctttcggcatgtagtacgacgaataccgcgaagaatatgcatcctgagacgcgtgttgtgggaatggaagattcctcttcactgcaagcctctcaggatgaatttgaaaatatggtacgtaatctcgacgttaagtcgcgtattatggatcagtatgctgactggaaaggtgtgcgttaccgtctgggcggcagcaccaagaaaggcatcgattgttccgcattcgtacagcgtacgttccgtgaacagtttgggttagaccttccgcgttctacttatgaacagcaggaaatgggcaaatccatttcgcgcactaaactgcgcacgggcgatttagtcctgttcagagcgggttcaaccggtcgacacgttggcatctatatcggtaacgatcagtttgtccatgcttccaccagcaggggtgtgacgatttccagcatgaacgaaccttactggaagaagcgctacaacgaagctcgccgcgttctgagccgtagttaa

SEQ ID NO: 115608 - DNA, 1554 bp, Enterobacter cloacae
atgtttacccgctacttctccagcaaccgcaagattctgtttctcagtttccttacggggttattcactgccctgctcctgggagcattacagttttactggagttaccacaagcgagacgtcagattcgatacccttattaccgatttaagcgtctacatggagagctatttcgatgagctcaaaatgtcgattgatacactccagccactcacgctaaacagctgcgaggaagtgagtgccgccctgacctcccgggcggcctttagcatcaacgtgcgcgcctttttgctggtcagggataaaaacgcctactgctcttccgccaccggcccgatgaatgtccctctggaagcgcttattcctgaactgcacatcaataaacaggttgatatggcgctcctgccgggcacccccatgatgccggacaagcccgcgattgccatctggtatcgcaacccactggtgaaggacggcggtgtatttacctccgttaatcttaacctgactccttatctcctctacacctcaagacaggatgagtttgccggtatttccatcattattggcgattatgcgttatcaacccattccggaacgctggtctctgcgcgtgatttgcctgatatcccggtccgtaccgccacgctgaaaaatgtgcctctgaccatccatgtttatgcggaagcctggacgaccgatgaagtgctgtacgccctgtttttcggcctggtctgcggtatcgcggcgggcctgttgaatttctatattcttactatccgtcttaatccggggaaagagatcctaacggccatcaaacgcgaccagttttacgtggtctatcaacccgtcgtggatgcgcagtcgctcaaaatgaccgggctggaagtcctgatgcgctggaagcatccggtgatgggagaaattccaccggatgcctttattaatttcgctgaagcgcagaagctgattgtcccactgacgctgcatctttttgacctgattatccgcgatgcccctgtcctgcaaacggtgctcccgcctggggccaagtttgggatcaacatcgcgcccgggcatctgcatgcggaaagctttaaagaggatatgcgcgcgtttgccgccgcccttccacccgatcacttccagattgtgctggaaataaccgagcgcgatatgatcaaccaccgcgaggctaatcagctgttcgaatggctgcacgaagaaggttttgaaattgccatcgatgattttggcaccggccacagcgcgctgatctatctggaacgctttacgatggattacctgaaaattgaccgtggcttcgtgaatgccatcgggactgaaaccgtcacctcgccagtgcttgacgcggtgctgacgctggcagaacgcctgaatatgttaaccgttgccgagggtgttgaaacgccggagcaggcggcgtggctgcgcgagcatggcgtgaactatcttcagggctactggatcggccgcccgatgccgctggagcagttcaggacgtggcaacccgacatcacgctcggggaataa

SEQ ID NO: 115609 - DNA, 1830 bp, Enterobacter cloacae
gtgaacaaagggatccgccgcactatgattatgcgcgttgtgttgacgctattggcgctggtgagcctgtcgagccaggcgcagaccatcaaagagagcacggcctttgccgtcattggcgagccgaagtacgcggttaactttaaccactacgattacgttaaccccgccgccccgaaaggcggaaacgtgacgctttccgccacgggaacgtttgacaactttaaccgctttgccctgcgcggcgtggcggcagcgcgtaccgaatccctctatgacacgctgttcgtcacctccgacgacgagcccggcagctattatcccctggttgctgagaacgtgcgttacgccgatgatttcagctgggcagaaatcgcgattaatccgcgggcgcgttttcacgacggtacgccggttagcgcccgtgacgtggcattcacctttcataaatttatgaccgaaggcgtgccgcagtttcgtctggtgtacaagggcaccacggtgaaagccatcgccccgctgaccgtgcgaatcgaactccctgagccgaacaaagagaatatgctgagcctgttctccctgcccgtcatgcccgaatccttctggaaaaatcataagctgagcgatcccctctctaccccgccgctggccggagggccgtatcgcattaccgactggcgaatgggccagtacgtgatctattcccgggtgaaagattactgggcagccacgctgccggtaaaccggggccgctggaacttcgatacaatccgctacgactactacctggatgataacgtggccttcgaggcatttaaggcgggcgcgtttgatttacgtgtcgagaacagcgccaaaaattgggcgacccgctatatcggaaaaaatttcgcgaaaggctatatcgttaaagacgaacacaaaaacgaatccgcgcaggacacgcgctggctggcgtttaatattcagcgcccggttttttccgatcgtcgggtgcgtgaagccattaccctggcgtttgatttcgaatggatgaacaaagcgctgttttacggagcctacagccgggcgaacagctatttccagaatactgaatatgccgcccgtgattatccccacgcggacgagctggttttgctggcgccaatgaaagcggagctcccgccggaggtgttcacccgcgtatttgaaccgcccaaatccgacggaaacgggttcgaccgggacaacctgctgaaagccagcaacctgctggatgatgctggctgggtgctgaaaaatcggcaacgggttaatgtgcaaaccggtaaaccgctcagcttcgaactgctgattgcctccggcgcaaacgatcagtgggtgctgccatttaagaagaaccttgcccggcttggcgtcaccatgaatatccgccaggtcgatatggcccagttaaccaaccgtaagcgcagtcgcgattacgacatgatgcagaccctgtgggccgcgcagccgtggccgagttcagatctgcaaatctcctgggcatcggggtatatcgactcctcctacaacgccccgggcgtaaagagcccggtgatagatgcgctgattgcaaaaattgtcgccgctcagggcgataagaacaagcttctgccgcttggccgcgcgctcgatcgggtcttaacctggaactattacatgctgccgatgtggtatatgggcgaagatcgcgtggcccgctgggataaattctccctgcctgccgttcgcccggtctacaccctcggctttgacacctggtggtatgacgtgaataaagccgcaaaactgcccgcagagcggcgttaa

SEQ ID NO: 115610 - DNA, 1095 bp, Enterobacter cloacae
atgggcgcttatcttatccgccggctgctgttagtgatcccgacgctgtgggccatcattaccattaacttttttatcgtccagatcgcccccggcggtccggtggaccaggcaattgcggctatagaatttggtcacgctggcggcatgccgggcggcggcggtgaaggaatgggggccagccatgcccggacgggcgtgggcaacatcagcgaaagccactaccggggcggtcgcggactggatccggaggtgatcgccgagatcacccatcgctatggttttgacaagccgctgcacgagcgttatttcaggatgctctgggattatgtccgtttcgattttggcgacagcctgtttcgcagcgcctcggtgttaaccctgatcaaacaaagcctgccggtttccatcacgctcggactgtgggggacgctgattatttatctggtctccattccgctggggatccgaaaagcggtctacaacggtagccgtttcgatatctggagcagcacattcattatcatcggctacgctatcccggcgtttctgtttgccgtgctgctgattgtctttttcgccggcggcagttatttcgacctcttcccgctgcgcgggctggtctctgcggatttcagcaccctgccgtggtatcagaaaatcaccgattacttctggcacatcacgcttccggtgctggcgacggtcatcggcggttttgcggcgcttacgatgctgaccaaaaacgcctttcttgatgagatccgcaaacagtacgtcgtcaccgcgcgcgccaagggtgtcggtgaaaagcagatcatgtggaagcacgtttttcgtaacgccatgctgctggtgattgccggtttccccgccacgttcatcagtatgttttttaccggctcgctgctgatagaggtgatgttctcgctcaacggattagggctgctgggctatgaggccaccgtctcccgtgattatccggtgatgtttggcacgctctacattttcaccctgatcggcctgctgctgaacatcatcagcgatatcagctatacgctggtcgatccccgtatcgattttgagggccgctga

SEQ ID NO: 115611 - DNA, 1026 bp, Enterobacter cloacae
atgtcgcgtttaagccccgtcaatcaggcccgctgggcgcgttttcgccacaaccgtcgcggctactggtcgctgtggatcttcgccgtcctgttcgccttaagtatgtgttcggaactgattgccaacgataaacccctgctggtgcatttcaaagaccgctggtatgtgccggtgctgaccacctacagcgaaagcgattttggcggcccgtttgcgacgccagccgagtaccaggatccctggttacgtgaacagatagcgcagcacggctgggctatctgggcaccgattcgttttggcgcgaacagtattaacttcgccacgtccacccccttcccttcgccgccttccgcgcaaaactggctgggaacggacgccaacggcggcgatgtgctggcgcgcattctctatggcacccgcatctcgctcctgtttgggctactgctgacgctctttagcagcgtaatgggcgttgtggcgggcgccgtgcagggctattacgggggtaaaatagatttatggggacagcgcgtgattgaagtctggtccggtatgccgacgctgtttctgattatcctgctgtccagcgtggtacagcctggcttctggtggctgctcgggatcaccgtcctgttcggctggatggcgctggtcggcgtggtgcgcgcggagtttctgcgtacgcggaattacgactatattcgcgctgcgcaggcgttaggcgtgagcgatggcgcaataatcttccgtcacatgcttcccaatgcggtggtggcgaccctcaccttcctgccgtttattttgtgcagctccattaccaccctgacgtcgcttgattttcttggtttcggtttgccgctgggctcaccgtcccttggcgaactgctgttgcagggcaaaaacaatctccaggccccctggctgggcatcgccgcattcctctccgtggcggtgctgctttccctgctgatttttattggcgaagccgtgcgcgatgccttcgatcccaacaaggcggtatga

SEQ ID NO: 115612 - DNA, 1590 bp, Enterobacter cloacae
atgacccggcctcttctgagcatagagaatctgtcgattgcgttttcaaaacagggcgaatcacgcacggtggtgacggacttatcgttgcagatccagcgcggagagacgctggcgctggtcggggaatccggctccggtaagagcgtttcggcgctgtcggtgctgcgcctgctcccttccccgccggtcagctatccgcagggggatattctgttccatggacaatcgctgctgaacgctgacgagcaaaccctgcgcggcattcgtggcaacaacatcgccatgatttttcaggagccgatggtgtcgctcaacccactgcataccctggaaaaacagctctatgaagtgctgtcacttcatcggggaatgcgtaaagaggcagcgcggggtgaaattctggactgccttgaacgcaccggtatccgtaatgcggcgaaacggctgaacgatttcccgcaccagctttccggcggcgagcgccagcgcgtgatgattgcaatggccctgctcacgcgccccgaactgctgattgccgatgaacctactaccgcgctggacgtcacggtacaggcacaaattctgcaactgctgcgcgaactgcgcgacgagctgaacatgagcctgctgttaattacgcacaacctgagcattgtgaaaaagctcgctgacacggtggccgtgatgcaaaacggccgctgcgtggaacagaaccgggcatccgccctgctgagcgcgcctcagcacccgtatacacagcgcctgctcgatagcgaacccgctggcgacccggttccgcttaacactgacagcgcgccgttgctgagggttgaggggctgtcggtgtcattcccgatccgcaaaggcattttgcgtcgcgtggtcgatcacaatcatgttctgaaagacatgagcttcgctctgcgtccgggcgaatcgcttgggcttgtgggcgagtccggttcaggcaaaagcaccaccggcctggcgctgctgcgcctgatcgcctctcagggaagcattgtttttgacggcatgccgctgcaaaaactgaatcgccggatgatgcttcccgtgcgtccgcggatgcaggtggtatttcaggatccaaactcttcgcttaacccgcgcctgagcgtattacagattattgaggagggcctgcgcgtccaccagccgacaatgacggcgcaacagcgtgaaatcgacgtgatgcgggtgatggcggaagtgggtttagatcccgagacccggcaccggtatccggctgagttttccggcggacagcgccagcgtatagcgattgcccgcgcgctgatcctgaaaccggagctgatcgtgctggacgagccaacctcttccctggaccgcaccgtgcaggcgcaaattctggcgctgctgaaggggctacaggaaaagcatcggctggcctatatctttatcagccacgatttacaggtggtgcgtgcgctttgccatcaggtggtggtattgcggcagggagaagtcgttgagcagggagagtgccagcgcgtattcaccgcgccgacgcaggattacacgcgccagctattgtccgctgactaa

SEQ ID NO: 115613 - DNA, 345 bp, Enterobacter cloacae
gtgaatacattacaactctccattgtccatcgcttgccccagagctatcgctggtcgacgggttttgcaggttcgaaagttgaaccgattccgcaaagcgttaccggggaggataattgtctggtggcgcttaagctgctcagcccgagcgatgaaaatgcgtggccggtcatggaacgtctcagccaggcgctgacggacatcgaagtggacagctccgtgctggaatgcgaaggtgagccgtgcctgtttgttaacagccaggatgagtttgccgccacctgtcggctgaaaaacttcggcgtggccattgccgagccgttctctggtcaatatcctttctga

SEQ ID NO: 115614 - DNA, 1200 bp, Enterobacter cloacae
gtgaccaccaggccacactcgtcgtttaaaattgtatttatccttggcctgctggccatgctgatgccgctgtctatcgatatgtatctgcccgcgctgccggtgatttccgctcagtttggcgtaccggcaggcagcgcgcagatgacgctcagcacctacattcttggttttgccctcggtcagctcttttatggcccaatggccgacagcctggggcgtaaaccggttatcctgggcgggacattgatatttgccgcggcggcggtggcctgcgcgctggcgcagagtatcgatcagctgattgtgatgcgcttcttccatggcctggcggcggctgcggcaagcgtggtgattaacgcgctgatgcgcgacgtctacccgaaggaagagttctcacgcatgatgtcgttcgtcatgctggtcacgacaattgcgccgctggtcgcccccatggtgggcggggcggtcctggtgtggttcagctggcatgcgattttctggatcctggcgattgccgcgctgctggcctcggtgatgatcttcgtctttatcgatgaaacgctgccggtcgagcgacgtcagaagttccacgttcgcaccacgcttggcaactttgcctcgctgtttcgccataagcgtgtgctcagctatatgctggccagcggcttcagctttgccggaatgttctcgttcctgagcgcggggccgtttgtgtacatcgaactgaaccatgtgtcaccccagcattttggttactacttcgcgctgaatattgtgttcctgtttgtgatgaccattatcaacagccgctttgtccggcgggttggggcgctgaatatgttccgcgccgggctgtggatccagttcgtgatggctatctggctggtattgagcgcgttgctgggcgtcggtttctgggcgctggtggtgggcgtggcggcgtttgtcggctgcgtgtcgatggtttcatccaacgcgatggcggtgatcctcgacgaatttccgcatatggcgggcaccgcctcgtcgctggcaggaacgttccgtttcggaattggcgcgatagtcggggcgctgctctcgacggcgacgtttaataccgcctggccgatgctgtgggcgattgccctctgcgcgacctgctccatactcttctatctttacgccagccggccgcgaaagacggcgcataaatga

SEQ ID NO: 115615 - DNA, 708 bp, Enterobacter cloacae
atgcgacttgataagtttatcgctcagcaactcggcgtaagccgggctattgccgggcgtgaaattcgcgccagccgcgtaaccgtggacggcgacattgtgaaagacagcgcttttaaactccagcctgagcaccaggtggagtatgacggcaacccgctgacccagcagaatggcccgcgctacttcatgctcaacaaaccggaaggttacgtctgttcaacggacgatccggatcacccgacggtgctctatttcctcgacgaacctgtggcgcacaagctgcatgcggcagggcgactggatatcgataccaccggcctggtgctgatgaccgatgatggccagtggtcgcaccgcatcacctccccgcgccatcactgtgagaaaacctatcgggtgatgcttgagtctccggtctcggatgacacggcagagcaattcgcgaaaggcgttcagctgcataatgagaaggatctgaccaaaccggcggtgctggaaatcctcacccccacggacgtccgtctgaccatcagtgaaggccgctaccatcaggtgaagcggatgtttgccgccgtgggcaaccacgttgtggggctgcatcgtgaacgtatcggcgcgattgaactcgatccagacctggccccaggggaatatcgcccgctgacggaagaagagattgccagcgtcgggctgccttcacgctaa

SEQ ID NO: 115616 - DNA, 1761 bp, Enterobacter cloacae
atgacgttcacattacgcccctatcagcaggaagccgttgatgccaccctcgcctggtttcgcaagcatcgggagcccgccgccatcgttctcccgaccggagccggtaaaagcctggtgattgccgaactggcgcgcctggcccgcggacgcgtgctggtgctggcgcacgtcaaagagctggtggcgcaaaaccacgccaaatattgcgcgctcggcctggaggccgacatttttgccgccggactgaagcgcaaagagagccacggaaaagtggtgtttggcagcgtacaatccgttgcgcgcaacctggaactgtttcgcagcgagttttccctgctgattgtcgatgagtgtcaccgcatcagcgatgacgacgacagccagtatcagcaaatcctcactcatttgaaaaaggtgaatcctcacctccgtctgcttggcctcaccgccacgccgtttcgtctgggcaagggctggatttatcagtttcattatcacggcatggtgcgtggcgatgaaaaggccctgttccgcgactgtatctatgagcttccgctgcgctacatgatcaagcatggctacctgacgccgccggagcggctggatatgcccgtcgtgcagtacgatttcagccgcttacaggcgcagagcaacgggctgttcagcgaggcagatcttaaccatgagctgaaaaaacagaagcggatcacgccgcatatcatcagccagattgaagagttcgcacaaacgcgcaaaggggtgatgatttttgctgccactgtcgaacacgcgcgcgaaattacggggctgctgcccgccgacgacgcggcgttaattaccggtgaaacccccggcccggagcgcgacagcctgattgaggacttcaaagctcagcggttccgctatctggtgaatgtctccgtactaaccaccggctttgacgccccgcacgtcgacctgattgcgattcttcgcccgacggaatccgtcagcctgtatcagcagattgttggccgcgggctgcgtctggcgccgggcaaaaccgactgtctgatccttgattacgccggtaacccgcacgatctctattcgccggaagtcggcacgccaaaaggcaagagcgacaacgtgcccgttcaggttttttgccctgcctgcgggtttgccaacaccttctgggggaaaaccaccgccgacggcacgctgatcgaacattttggccgccgctgtcagggctggtttgaagacgatgaaggccatcgcgaacagtgtgatttccgcttccgcttcaaaaactgcccgcagtgcaatgccgaaaacgacattgccgcccgccgctgtcgggagtgcgacacggtcctggtcgacccggacgacatgctgaaagcggcgctgaagctgaaagatgcgctggtgctgcgctgttccggcatggccttacagcccggcgcggatgaaaaaggcgagtggctaaaaattacctactacgacgaggatggcgcagacgtcagcgagcggttccgggtccagacgcccgcccagcgcaccgcgttcgagcagctctttatccgcccgcatacccgcacgcctggcgtgccgctgcgctggataaccgtggccgatatcgtgcgccagcaggcgttactgcgccatcctgattttgttgtcgcccgtaaaaaagggcagttctggcaggtgcgtgagaaggtctttgactatgaaggacgctttcgccgggcaaacgaattgcgcggttaa

SEQ ID NO: 115617 - DNA, 285 bp, Enterobacter cloacae
atgttcactatcgaagcagaagtacgtaacgtgcagggtaagggtgcgagccgccgcctgcgtaccgcaaacaagttcccggctatcgtttacggtggcgaagctgctccagttgctattgaactggatcacgacaaagtatggaacatgcagaacaaagctgaattctacagcgaagttctgaccatcgttgttgacggtaaagaagaaaaagtgaaagttcaggctgttcagcgtcacgcgttcaagccaaaactgactcacatcgacttcgttcgcgcgtaa

SEQ ID NO: 115618 - DNA, 1008 bp, Enterobacter cloacae
atgagtctggaaatcaaccagattgccttgcaccagcttatcaagcgtgatgagcaaacccttgaagtggtgctgcgcgattcgttactggaaccaacgcctaccgttgtcgagatgatggcggagttgcatcgcgtctacagcgcgaaaaataaagcctatggcttgttcagcgaagagagcgaactggcggatagcctgcgcctgcaacgtcagggcgaagaggatttcctggcattcagccgcgctgctactggccgtctgcgtgacgagctggcgaaatatcccttcgccgatggcggtatcgtcctgttctgccactaccgctatctggcggtagagtatctgctggtcaccgtgctgaataacttaagcagtatgcgcgtgaacgagcagctggatatcagctcaacgcactacctggatatcaaccatgcggatattgtggcgcgtatcgatttaaccgaatgggaaaccaacccggaatcaacgcgctatctgaccttccttaaaggccgcgtgggccgcaaagtggcggatttctttatggacttcctcggcgccagcgaagggctgaatgccaaagcgcagaacaaaggtctcctccaggcggtggatgactttacggctgaggcgcagcttgataaatctgagcgtcagaccgtgcgtcagcaggtttacagctactgcaacgagcagctacaggctggagaagagattgagctggagtcgctgtccaaagagctggcaggcgtcagcgaagtcagcttccaggaatttactgcggaaaaaggctatgagctggaagagagcttcccggcggatcgcagtacgctgcgtcagctgacgaaatttgccggtagcggcggtgggttaaccattaactttgatgccatgctgctcggggaacgtatcttctgggacccggccaccgacacgctgaccattaaaggcacaccgccgaatctgcgcgaccagcttcagcgtcgcacttcaggcggtaagtaa

SEQ ID NO: 115619 - DNA, 228 bp, Enterobacter cloacae
atgccacaacattcccgctacagtgacgaacacgttgaacaattgctcagtgagctggtcaacgtactggaaaaacataaaacgccaaccgatctctccctgatggttttgggaaatatggttaccaacctgatcaataccagcgttgctccggctcagcgtcaggcgatcgccaaatctttcgcccaggctttgcagtcctccgttagcgacgaccaggcacactaa

SEQ ID NO: 115620 - DNA, 1761 bp, Enterobacter cloacae
atggtgacgaatcgtcagcgctaccgtgaaaaagtctcccagatggtcagctgggggcactggtttgccctgttcaacattctgttggcgatggtgctcggctgccgttatctgtttgtggcggactggccaaccacgttaaccgggcgcatctactcgtggatgagccttgttggtcactttagctttctggtcttcgccacctatctgctgatcctgttcccactgacgtttatcgtcatgtcgcagcggctgatgcgcttcctgtccgccattcttgcgacggcgggcatgacactgttgctgatcgacagcgaagtctttactcgcttccacctgcacctgaatcctgtcgtctgggagctggtgattaacccggatcagaacgagaccgcgcgcgactggcagctgatgtttatcagcgtgccgattatcctgctgatcgaaatgctgttcgccacgtggagctggcaaaaactccgcagtctgacccgacgccgccattatgcgaagcccgtcgcggcgctctttttcgcctcatttatcggttcgcacctgatgtatatctgggcagatgcgaacttctaccgcccgattaccatgcagcgcgcgaacctgccgctctcctatccgatgacggcgcgtcgtttcctcgaaaaacacggcctgctggacgcgcaggagtatcagcgtcgtctggtcgaacagggtaatccggaagcggtcagcgtgcagtatcccctgagcgatctgaaatatcgcgacatgggccgcggtcagaacgtgctgctgattaccgtcgatggcctgaactattcccgctatgagaagcagatgccagcgctggctgaattcgctgagaacaacatcgtattcactcagcatatgagctccggtaattcgaccgacgcgggtattttcggcctgttctacggcatttcaccgagctatatggacggcgtgctgtcggcccgtattccggcggcattaattaccgggcttaatcagcagggctaccagctggggctgttcgcctctgatggtttcaacagctcgctgtaccgccaggcgctgctgtctgatttctcactgcccgccgcgcagagccagtctgacgatcggaccgctgaccagtggatagactggctgaagcgctatgcgcaggaagataaccgctggttctcctgggttgcgtttaacggcacaacgcttgatgacagcaatcagaaaggcttcgcgcgccgctatagccgtgcggcgggcgatgtcgatgcgcagatcggccgcgtgctgaccgccctgcgcgacgcgggcaagctggataatacggtcgtgattatcacggcggggcatggcgtgccgctcggcgacgaggcgaagggcatggagtggtcgcgtccgaacctgcatgttccccttgtgatccactggccgggcactcccgcgcagcgcatcaacatgctcaccgaccataaagacgtcatgaccacgttaatgcaacggctgctgcacgtcagcacaccggcaattgagtactcgcagggacaagacctctttagcgccacgcggcgtcataactgggtcacggctgctggcggaaacacgctggtggtgaccacgccaacgttgtccctggtgctgaacagcaatggcaattaccagacgtataacctcgaaggtgagaagctgaaagaccagaagccgcagctcagtttgctgttgcaggtgctgacagacgagaagcgctttatcgctaactga

SEQ ID NO: 115621 - DNA, 261 bp, Enterobacter cloacae
atggtacgggaaaaactgaagacacctaaaggccgcaagttcctgctggcgttactggttgtgtttatgattgctgctgcatgcgtggggcgagcaaccattgtcggtgtgattgagcagtacaacatcccgctctctgcctggacaaccagcatgtttgtcctgcaatcggcgatgatctttgtttacagcctggtgttcaccgtcctgctggcgattccgctggggattttctttctcggtgggcgtgaaaaacactaa

SEQ ID NO: 115622 - DNA, 504 bp, Enterobacter cloacae
gtgaaaaacgcacctaaatttgccatcgccctcatcgccgctgcgtgcgccagcaccagtgctttcgccagcgaaacccggaaagagcagccgctggaaaaagttgctccgtatccgcaagcggacaaagggatgaagcgccaggttattcagctcccggctcagcaggatgaagcaaatttcaaagttgagctgttaatcggccagacgctggaagtggattgcaaccagcatcgcctgggcggccagctggaaagcaaaacgctggaaggctggggctatgactactatgtcttcgacaaagtaacctcgccagtctccaccatgatggcgtgcccggacggcaagaaagagaagaaatttattaccgcgtatctgggtgataacagtctgctgcgctataacagcaagctgccgatcgtcgtatacacgccggaaaacgtggatgtgaaatatcgcgtatggaaggcggatgagacggtaggacaagcggtagttcgttaa

SEQ ID NO: 115623 - DNA, 1653 bp, Enterobacter cloacae
atgatgaaaaaaatgactgccgtgctcttttctctggccgtggggctgaacgtcgtctcgctggcggcgaaggctgacgcaccaaaagagcaggaaacggatgtccttttaattggtggcggcatcatgagcgccacgctgggaacgtatcttcaggaattagagccgaactggtccatgaccatggtcgagcgcctcgatggcgtggcacaggaaagctctaacggctggaacaacgccgggacggggcactcggcactcatggaactgaactatacgccgcagaaaaaggacggttccattagtatcgagaaggcggtagagatcaacgaagcgttccagatctcacgtcagttctggtctcaccaggtgaacagcggtgtgttgcacaatccgcactccttcatcaacaccgtaccgcacatgagctttgtgtggggcgatcaaaacgtcaacttcctgcgcgcgcgctacgctgccctgcaacagagcacgcttttccgcgggatgaaatactctgaagatcacgctcaaatcaaagagtgggcgccgctggtcatggaaggccgcgatccgaaccagaaagtagcggcgacccgcactgaaattggtactgacgttaactacggtgaaatcacccgtcagctggtgtcctctctgaagaaaaaagagaactttaacctgcaactcagctccgaagtgcgtggtttcaagcgcaacgcggataatagctggagcgtgaccgttgccgatctgaaaaacaacgaagccgagcatgtgattaaggcgaagttcgtgtttatcggtgcgggcggcgcggcgctgaaactgttgcaggagtccggcattccggaagcagacgactacgcgggcttcccggttggcggccagttcctggtgtcggaaaacccggaagtggttaaccgtcatctggcgaaagtgtacggtcaggcctctgtgggcgcaccaccgatgtccgttccgcatatcgacacccgcatgctggacggtaagcgcgtagtgctgttcgggccgtttgccacattctccaccaaattcctgaaaaacggttccctgtgggatctgctgagcgcgaccacgacgtcaaacgttaagccaatgatggacgtggggttggataacttcgatctggtgaaatacctgattagccaggtgatgctctctgatgaagaacgcttcgaggcgctgaaagagtactatccgcaggcgaagaaagaagactggcgtctgtggcaggcaggtcagcgcgtgcagattatcaaacgcgatccgaaagagggcggcgtgctgcgtctgggcaccgaagtggtaagcgataaggatggcaccattgccgcgctgctgggggcatctccgggggcgtctaccgctgcgccaatcatgctgcacctgatggaaaaagtgtttaaggacaaagtatccagcccggaatggcaggcgaagctgaaaaccattattccatcctacggtacgaagctgaacggtaacgttgaagccacggaacaagagctggaatacaccagccgcgttctgcaactgcaatacgtcaaaccgcaggctgcggatgctgcgcctaaggcagagctgaagcctcaggcggaaagcaagccggtagcggatatcgcgctgtaa

SEQ ID NO: 115624 - DNA, 1398 bp, Enterobacter cloacae
ttgtttaaaggttacgaaattattgtaattgtgaaatttaatgatggattgtttgtagggatttggcagacaggctggcacccgacgattttcctggctatcatgctgcactttgtgatcgcgcgcacggaagcctgcccctaccagcgaattgttatgtcattaccccactcgtctgtacctcaagaaggccatgtcgccactgttttacgttcgcctcaccgtctgatgcgcgaaaccctggccggtgtgattaccgcgctggcgctgatcccggaagtgatttcgttttccgtggtcgcgggcgtggatccgaaagtgagccttatcgcctccgtggtgctctgtttcgccctttccctgctcggcgggcgtccggccatggtgacggcggcggcaggttccgtcgcgctggtgattgggccgatggtccatcaacacggcgtacagtacattctgcccgcggtggtgatggcaggcgtgattcagatcctgttcggcgcgctgggtatggcgcggctgatgcgctttattccccagtcggtgatgaccgggtttgttaacgcccttggcattttgattttctttgcccaggtgccccatttctggagccgaagcccgctgattgtgggcctgttcgtgctgacgctgctgattgtgctctgggtgccacgctatatcaaaagcgtgccctccccgctgattgccattgtgctgctgactttgttcaccgtcaccagcgggcaaatcctgccgacggtaggggatgaaggttccatgggcggcggtttgccgggctttacgcaactgctggtgccgctcaatctggaaaccctgagcatcatctggccgtgcgcgctaagtatcgctttcgttggcctgctggaatccttgttgacggcaaaactggtggacgagctgaccgctaccccctccagtaagcgccgcgagagcatcggactgggcgtgggcaatattatggccgggttctacggcggcattgcgggctgcgcgatgattgggcagaccatcgttaacgtggagatggggaaaggcagaagccgtatctccacccttgcggcgggcatcgtattgctggtgctggttacggcgctcagcgaggtgatggccaaaattccgatggcggtactggcgggaattatggccattgtggccgtcaagacctttagctggcatagcgttcagcccggaacgctgaaaaacgcgccggtggctgaaaccgtcgtgatgctggtgacggttgtggcaacggttttcaccggcaacctggcgattggcgtgctgggcgggattgtgatgatgttcatcctccctgcccgacttaagcaaaaagcgctggctacagaagaaaaatcgtcgccagtccaagaaaaataa

SEQ ID NO: 115625 - DNA, 1437 bp, Enterobacter cloacae
atgtcggtattaaagaaaaacagcgccaggcagcgtgaccaggagcgtgcgcggctcatctggctcctgacgaccgataaagcggtcacgtcaacgttattgggtaagctaaccctggctgagcaatatgatgtcggcacgctggccgacgatattgctgaggtaggtgcgctggttgcacatttaccgcccccggacctggcggacaccctggaggcattgccttccgaggagcgccacgccctgtggcggctggtgcaggatcacgagcgcggtcaggtattgcttgaagcctcggaaaacgtctgggatgaccttatcgatgagatgagcgaccgggacatccttgacgccctgcaaacgctggatatcgatgagcagatttacctcgttcagcatcttccgcgcaacctgaccggacgcctgctggcttccctgcctgctgaagagcgggcgcgcgtgcgtcaggtgatgcactacgagaaaaacagcgtcggcgcgatcatggagtttggcgtcatcaccgtgcgcccggacgtcaccctgggtacggtgcagcgctatcttcgtcgcctgggcagtatgccggacaacaccgataaactgttcgtcacctcgcgggataaaaccctgctcggggagctggagctgaaaacgatcctgctgaacagcacccagcagcgggtgagtgaggtcatggaaaccgagccgatggtcttctcgccggaagacgatgccgaaaaagcggcgcgtaccttcgaacgtgatgacctggtgagcgcggcggtggtggattcggtgggcaagctgatggggcgtctgaccatcgatgagatcgttgacgtggtctatgaagagaccgataacgacctgcgtgcccttggcgggatcagtgccgaagatgacgttcatgcctccgtcggcaaggccgtcaaaacgcgctgggcgtggctcgccatcaatttatgcaccgcgttcgtggcgtcccgcgttattgacggcttcgaacataccatttcccagctggtggccctggcgtcgctgatgccgattgtggcggggatcggcgggaacaccggtaaccagactatcaccatgatcgttcgcgccctggcgctggaaaacatacagccgggtaatttctcgtggctgattttcagggagatgggcgttgcgctgattaatggcctggtctggggcggcatcatgggcggcattacctggtggctgtatgatgatatggcgctgggcggggtcatgatgctggcgatggtgctgaacctgctggtggcggcgatgatgggcgtgattatcccgttgaccatgacccggctggggcgcgaccccgcggtggggtcgagcgtgatgatcaccgccattaccgataccggcggtttctttatttttcttggactggcgacgatttttcttctgtag

SEQ ID NO: 115626 - DNA, 1644 bp, Enterobacter cloacae
atgcaactacttcttcttgtctggcggcagtatcgctggccttttatcgcggtgatggcgttaagccttgccagcgcggcgctggggatcggcctgattgccttcattaacgtgcgtttgatcgaaatggtcgacacgtcactctccgtcctgccggaatttctgggtttactgctgctgctgatggcagtcacgctcgggtcacagctggcgctgaccgccctcggccaccatttcgttttccgtctgcgcagtgagttcatcaaacggatccttgatactcaggtggaacgcatcgagcagctgggaagtgcctctctgctggcggggctgaccagcgatgtgcgcgccattaccatcgcctttgtgcgcctgccggagctggtgcaggggatcatcctgacatttggctcggcagcctatctcgcctggctctccagcaaaatgctggcggttacggcgctgtggattgttattaccatctggggcgggttcctgctggtatcacgcgtctataagcacatggcggtgctgcgcgaaacggaagacaagctctataacgattatcagacggtgctggaagggcgcaaagagctgacactgaaccgcgagcgtgccgagcatatcttcaaccatctctatatcccggatgcgcacgaatatcgtcatcacattatccgcgccgatacgttccacctgagcgccgtgaactggtccaatatcatgatgctgggcgcgattggcctggtgttctggatggcgaacagcctggggtgggccgataccaacgtggcggcaacctactccctgacgctgctgtttttacgcacgccgctgctgtcggccgttggcgcactgccgacgctgctgagcgctcaggtggccttcaacaagctgaagaaattcgaccttgcgccgtttaaggctgagttcccgcgcccgcaggccttcccgaactggcaaacgctggagctgcgtaacgttaccttccgctatcaggataacgccttctccgtagggccgataaacctgaccattcaccgcggcgaactgctgttccttatcggcggcaacggcagcggcaaatctacgctggcgatgctgctgacgggcctctaccagccgcaggcgggtgaaattttgctggatggtaaagcgctgagcgcggagaaaccggaggactaccgcaagctcttctcggcggtatttaccgacgtctggctgttcgaccggctgctgggaccggaagggcagcaggcggatccggcgctggtggagaagtggcttgcgcacctgcaaatgtcgcacaagctggagctccaggatggcaaaatcctgaatctgaagctgtcgaaagggcagaagaagcgcgtggcgttgctgctggccctggccgaggagcgtgacatcatcctgctggatgagtgggccgccgatcaggacccgcacttccgtcgcgagttttatcaggtcctgctgccgctgatgcaggcgatgggaaaaaccatttttgccatcagccatgacgatcactacttcattcacgccgaccgtctgctggagatgcgcgacggcaagctgagcgagctgaccggcgatgagcgcgatgcggcgtcacgggacgcggtggcgcgtacggcctga

SEQ ID NO: 115627 - DNA, 651 bp, Enterobacter cloacae
atgctcgatctttttgctgatgctgaaccctggcacgagccgctcgcgccgggggcgacgatcctgagacgcttcgcgctttcccgcgcggcggcgctgttcgacggtattgatgccgttaccgcttgttcaccgtttcgccatatggttacgccgggcgggtataccatgtccgtggcgatgaccaactgcggcgaactgggatgggcgacgaatgagcggggctatgtatatgccgcgaacgatccgctgacggatcagccgtggccgccgatgccggaggcgtttcaggcgctgtgtcatgacgccgccgtggcggccggctatcctgattttcgacccgatgcctgtcttatcaaccgttatgccgttggggcaaagctctccttgcatcaggataaggacgagccagacctgcgcgcgccgattgtctcggtatcccttgggctgcccgctgtctttcagtttggcggcctgcggcgcaacgacccgctcaaacggctgatgctggagcatggtgatgtggtggtctggggcggtgaatcacggcttttttaccacggtattcagccgcttaaacctggcgatcacccggtggcgggggcatttcgctacaacctcacgttccgtcaggcggcatacagagaataa

SEQ ID NO: 115628 - DNA, 1059 bp, Enterobacter cloacae
atgaaaaacacaacctatcttaccgatgaggatcgctggcaggccgtactggcccgcgatccgcgtgcggataaccagtttgtctttgccgtgcagacgaccggcatttattgtcgtccgtcctgccgcgcccgccacgcgctgcgtaaaaatgtctgcttttatcctgatgctcaccaggccgcgcaggcgggtttccgcccctgtaagcgctgtaggccggaccaggtcgaccctatggcgcagaaaaaggccaacattgcgctggcctgtcgactgcttgaacaggatgccgcgctgaacctggaggcactggcgcagcaggttgccatgagtccgttccatttccaccgcttgtttaaatccgtcaccggcatgacgccgaaagcatggcagcaggccgcgcgtgaacaacgcctgcgcaccctgcttgcacagggcggtaaaatcaccgacgccgtactggccgctggctttccggacggcagcagctactaccgtaaagccaacggcgcgctgggcatgacggcaaaacagtaccgcaacggagaggctgcggtccgctatgccatcagtgactgctcgctgggccgctgtctggtggcggaaagcgagcgcgggatctgcgcaatactgctgggtgatgacgacgccgggctgacggctgagctgctgtcactgtttccgcttgccgtccgtgaaccgatggaaggcgcgtttgccgggcgtgttcggcaggttattgcctctgtcgacagccgcgcgacgccgctgatgctgccgctggatatccgtggtaccgccttccagcagcaggtctggcaggcgctgcgggatatcccctgcggtgaaacggcaagctatcagcaggtggcgaaggccattggtaaacccaatgccgtacgtgccgtggcgggggcctgcggtgccaacaaactggcgatagtcatcccctgtcaccgcgtggtgcgtaacgacggtgcgctgtcgggttatcgctggggcgcagcgcgtaagatgctattgttgaaacgtgaggcgaacaacccggagggataa

SEQ ID NO: 115629 - DNA, 1056 bp, Enterobacter cloacae
atggatatgacttttttacgcgccagcgttctggcgacttttttactcctgaccgcgtgtgactcttccacacagcccgcaaaaatcgacgcacccgccgcgacggtgctggaagggaaaaccatggggaccttctggcgcgtcagcgtgatggatattgataaatcccgcgctgaagaattacgcggtaaaattcaggcgcagctggatgccgacgatcagctactctctacctataaaaatgactcagcgctgatgcgtttcaatcgctccagcagcacctcgctgtggccggtgagcgaagcgatggccgatatcgtcacggaatccatgcgcgtgggctacaaaaccaacggcgcaatggatgtgaccgtggggccgctggtgaacctgtggggatttggccccaacaagcagccggtgactacacccgatcaagccgccatcgacgacgcccgcgcccgtacggggttacagcatctggcggtgatctcccagtacggtcagcaatacctgcaaaaagatattcccgacctgtttgtcgatctctccacggtaggcgaggggtatgctgcggatcatctcgcggccctgatggcgcaggaaggcattccccgttatctggtttccgtcgggggcgcgctcgtcagccggggcatgaacgccagcggcaggccgtggcgagtggccatccaaaaaccaaccgatcagcagaacgcggtgcaggcgattgtcgacatcaacgggcatggtatcagcacctccggaagctaccgcaactattacgagctggatggcaaacgtatctcgcacgtgattgatccgcaaaccggacgcccgattacccacaacctggtgtccgtgacggtgatagccccaaccgcgctggaagcggatgcctgggataccggattgatggtgctcggcacggagaaggccaaagaggtggtgcgtcaggaagggctggccgtctatatgatcaccaaagaggctgacggatttaaaacctggagttcgccgcagttcaatagcttcctggtgagcgaaaaaaattaa

SEQ ID NO: 115630 - DNA, 1095 bp, Enterobacter cloacae
atgaaagttaaagtactgtccctcctggtaccagctctgctggtggcaggcgcagcaaatgcggctgaaatttataacaaagacggcaacaaattagatctgtacggtaaagtggatggtctgcactatttctctgatgacgacagtgcagacggcgaccagacctacatgcgtctgggcttcaaaggcgaaactcaggttaacgaccagctgaccggttacggccagtgggaataccagatccagggtaactctggtgagaacgaaaacaactcatggacgcgtgtggcgttcgcaggtctgaaattcgctgatgcgggttcattcgactacggtcgtaactacggcgttgtttacgatgtgacttcctggaccgacgttctgccggaattcggcggcgatacctacggttctgacaacttcatgcagcagcgtggtaacggcttcgcgacctaccgtaaccaggacttcttcggtctggttgatggtctgaacttcgcgttgcagtaccagggtaaaaacggcagcgcaagcggcgaaggccagaccaacaacggtcgtgacgcgctgcgtcagaacggtgatggctacggcggctctctgacctacgatctgggcgaaggcttcgctatcggtacggcagtcaccagttctaaacgtactgctgaccagaacgctgcgggctactacggtgaaggcgatcgcgcagagacctataccggtggtctgaaatacgacgcgaacaacatctacctggctgcacagtatactcagacttacaacgcgacccgtgcgggcgacctgggctgggctaacaaagcgcagaacttcgaagtggttgcgcagtatcagttcgacttcggtctgcgtccatccgtggcgtacctgcaatctaaaggtaaggacctggaaaacggctacggcgaccaggatctgctgaaatatgttgatgttggcgcgacttactacttcaacaaaaacatgtccacctacgttgattacaaaatcaacctggttgatgagaacgacttcactcgcgcagcaggtatcggtactgacgatatcgtcgcgctgggtctggtttaccagttctaa

SEQ ID NO: 115631 - DNA, 2673 bp, Enterobacter cloacae
atgagtcagactgaaactaccgccccgagcaaattctcccttctaccgggcagcatcacccgtttctttcttctgttgatcgttgtgctgttagtcacaatgggggtgatggttcagagcgccgttaatacctggcttaaagataaaagctatcaaatcgtcgatatcacccatgcggtgcacaagcgcattgatacgtggcgctatgcgacctggcaaatctacgacaatatcgctgccgcgcctgccacctcgtcaggcgaagggttgcaggaaacgcgccttaagcaggatgtgtattaccttgaaaaaccgcagcgcaagacggaagccctgattttcggctcgcacgacagcgcaacgcttgagatgacgcagcggatctcctcgtatctggacaccctgtggggcgccgagaccgtaccgtggtcaatgtattacctgaacggtcaggacaacagcatgatcctgatctcgaccctgccgcttaaggatctctcgtccggctttaaagagaccaccgttggcagtattgtggattcccgtcgggcagaaatgctgcaacaggccaacgcgctggacgagcgagaaagtttctcgtcattacgccgtcttgcctggcagaatggccactactttacgctgcgaaccacctttaaccagccgggccatctggcgaccgtggttgccttcgacctgccgattaacgatctcatcccaccggatatgccgctggacagtttccgtctggagccagacaacagcacccaaaatatgcgcacgccgtcggataaagaaggcgcggacagcgtagcgatctcctttaatggctcaaagattgagattgcctcatcgctcaactcaaccggtatgcgtctggtgtggcaggtgccttttggcaccctgatgcttgatactctgcaaaacattctgctgccgctgttgctgaatattggcctgctggcgctggcgctgtttggctacagcaccttccgtttccagtcgggccgccagagcgactcgacgtcggtatcagccgggaccagcaacgagttgcgcattcttcgtgccctgaatgaagagattatttccgtgctgccgcttggggtgctcgttcacgaccaggaggctaaccgcacggtaatgagcaataaaattgccgatcaccttctgccgcatcttaacctgcaaaatattacggccatggcggaccagcaccagggcgttattcaggccaccgttaataatgaactgtatgagatccgtcagttccgcagtcaggtcgcctcgcgcacgcaaatcttcatcattcgcgatcaggatcgcgaagtgctggtgaataaaaagctcaagcaggcgcaaaggctgtacgagaaaaaccaacatggccgcgcggcgtttatgcaaaatattggcgatgcctttaaacaaccgttgaagtcactcgccacgcagattgctgatctgagcacgccggaaagccgacagctcagcagccaggccgactccctggttcgtctggtggacgaaatccagcttgcgaacatgctggaaaatgacatctggaagggcacccctacgctcttctccattcaggacctgattgatgaggtggtgccggaagtcctgccggtgatcaagcgcaagggactccagctgctgatcaacaaccatttaccggccaacgacgaacgtcacggcgatcgcgatgccctgcgtcgcatcctgatgatgttgatacagtatgccgtcaccacgacgcagatcggcaagatcacccttgaagtcagcaccgatgagtccaccgacgatcgtctgacgttccgtattctggatacgggcgaaggcgtcaccgtgagcgaaattgataacctgcacttcccgttcctgaacgatacccagcgcgaccactacggtaaggcgaatgccctcaccttctggctctgcgatcagctggcgcgtaagctgggcggtcatctgaacatcaaggcgcgcgaatccctcggcacccgctactctttacacgtgaaaatggcggcgaatccccaggaagaggatgaagagcgtctgctggacgatgtggtggtgatggtggatgtgacctccagtgagatccgtaatatcgtcgttcgtcagctggaaaactggggggcgtcctgcattaccccggacgaaaggctcgcgagtcaagaatttgatctatttttaactgataatccgtctaatcttactgcctcaggcttgcttttaagcgatgatgagccaggcgtgcggaaaatcggccctgggcagctgcgcgtcaactttaatatgagcaatgcaatgcaggaagctgtattacaactgattgaagagaatctggcgcaggaagagatcctggagtcaccgttaggcggcgatgaaaatgccgaactccatgccagcggatattattcgctcttcgttgatacagtaccagatgatgttaagcggttgtatactgagtccgctgcgcaggattttgcagcgctggcacagacagcacaccggcttaaaggggtgtttgccatgcttaatctggttcccggcaagcagttatgtgaaacgctggaacatctaattcgtgagaaagatgcctctggcattgaaaaatacatcagcgacattgacgcttacgtcaagagcttgctgtag

SEQ ID NO: 115632 - DNA, 651 bp, Enterobacter cloacae
atgaacaatatgaacgtaattattgccgatgaccatccgattgtactgttcggtattcgcaaatcacttgaacagatcgagtgggtgaatgtagtcggtgaatttgaagattccacagccctcattaacaatctgcctaaacttgatgcgcacgtgctcattaccgatctctccatgcctggagataagtacggtgatgggatcacgctcatcaaatacattaaacgccacttcccggacatttcgatcattgttctgaccatgaacaataacccggcgatcctgagcgccgttctggatctcgatattgaagggattgtgctgaaacaaggcgcacctaccgatctgccaaaagcgctggcggcgctacagaaagggaagaaattcactcctgagagcgtctcacgcctgcttgaaaaaatcagcgcgggtggttatggcgacaagcgtctctcgcctaaagagagtgaagttctgcgtctgttcgctgaaggtttcctggtcactgaaatcgccaaaaagctgaaccgcagtattaaaaccatcagtagccagaaaaaatccgcgatgatgaagctgggtgtggataacgatatcgccctgctgaactatctctcttccgtgacgctgagcgcaacggacaaagattga

SEQ ID NO: 115633 - DNA, 2847 bp, Enterobacter cloacae
ttgaaatacctcgtctcctttcgtaccacgttaaaagtctctcgctatctgtttcgggcgcttgcgctactgctatggttgctggtggcactgctctcggtgttttacatcgttaacgcgttacaccagaaagaagcggagatccgccaggagtttaacttaagctcggatcaggctcagcgctatatccagcgcacgtctgacgtgatgaaagagcttaagtatattgctgagaatcgactcacggcggagaacggcattcttgctatccgcggtcgggatgaaaaaaccgaagtacctgatttcgaaccgctcttcccggactccgattgttccgccatgagcaaagcctggcgtggttcactggagtccctctcatggtttatgcgctactggcgcgataatttctcggccgcctacgatctgaaccgtgtctacctgattggcaacgaaaatctctgcatggcggatttcggcctgcgggatatgcccgtcgaacgcgaagacgcgctgaaaagcctgcatgagcgtatagtgaaataccgcaatgcgcctcaggaagagcgcgggaacaacatcttctggataagccaggggccgcgcatgggcgtcggctatttctatgccctgactccggtttacctcggaaaccgcctgcaagcgctgctggggattgaacaaaccatccgcatggaaaacttcttcacaccgggcagtctgccgatgggcgtgaccattctggatgaaaacggccatccgctcatctcccttactgggcctgaaaaccgcctgaaggtggaacccagctggatgcaggagcggtcatggtttggctatacctccgggttccgcgagctggtgctgaagaaaagtttaccgccatcgtcgctgagcattgtctactcgctgccggtggacaaggtcctggagcgcattcgcatcctgatccttaacgccattttgctgaacatcgcggtaggcgtcgcgctgtttatgctggcgagaatgtatgagcggcggatctttattccggcagaagcggatgctcagcgtctggaagagcatgagcagtttaaccgtaaaattgtcgcctcggcgccggtagggatctgcatcctgcgtactcaggacgggacaaatatcctcagtaacgagcttgcccataactacctgaacatgctcacgcatgaagaccgccagcggttaacgcagatcatctgcggtcagcaggttaactttgtggatgtgctgaccagcacccacaccaacctgcaaatcagcttcgtccattctcgctaccgcaatgaaaacgtggccatttgcgtgctggtggacgtctctgcgcgcgtgaaaatggaagagtcgttgcaggatatggcgcaggcggcggagcaggccagtcagtcgaaatcgatgttcctcgcgaccgtcagccatgagctgcgtacgccgctgtacggcattatcggtaacctcgatctgctccagaccaaagagctgccgaaaggggtcgaccggctggtgacggccatgaacaactcgtccagcctgctgctgaaaatcatcagcgatattctcgacttctctaaaattgaatccgagcagttgaaaatagagccgcgcgagttctccccgcgcgaagtgatgaaccatatctgcgctaactacctgccgctggtggtgcgtaaacagcttgggctgtactgctttatcgagccggatgtgccgctgacgctgcatggcgatccgatgcgtctgcaacaggtcatctcaaacctgctgagcaacgccatcaaattcaccgatatcggctgtattgtgctgcacgtctgtcgggcaggggagtacctgaccattcgcgtgcgcgacacgggtgttggcattccggcgaaagaggtcgttcgcctgttcgatccgttcttccaggtgggaaccggcgtccagcgtaatttccaggggaccgggctaggtctggcgatttgcgagaagcttatcagtatgatggatggagatatctccgtcgatacagagccaggcatgggcagccagttcaccattcgtattccgctctattcggcgcactatccggcgaaaaccaccgtcgacgggctgagcgataagcactgctggctggcggtgcacaacgcctccttacatgatttcctgacctcgatgctgaccagcagcggcgtgcgggtttcacgctacgaaggccagacgccggacgcggatgacatgctgatcaccgacgttgagccggagcaggcgtgggcggggcgcggcgtagtgatgttctgccgccgtcatatcggtattccgcttgagcgttcgcctggggtatgggtgcacagcgtggcgacaccgcacgagctgctgggcttgctggcgcgtatttacagcgtgcagcttgaggacagcgacggcgcgaccgtgctggcttcccctgatgaactggcgtcggtgaacgacgatatgatgattctggtcgtcgacgatcatccaattaaccgtcgtctgctcgcagatcagcttggctctctgggctatcagtgtaaaacggccaatgatggcgtggatgccctgaatgtcttaagtaagaaccatattgatattgtgctcagcgatgtgaacatgcctaacatggacggctatcgtctgacgcagcgtatccgacagctggggctgacgctgccggtggtaggggtgacagccaacgcgctggcggaggaaaagcagcgctgtctggagtcgggaatggacagctgcctgtcgaagccggtcacgctggatgtactgaagcagacgctatccgtgtatgcggagcgtgtacgaaaagcgagacaataa

SEQ ID NO: 115634 - DNA, 2637 bp, Enterobacter cloacae
atgagcgaccttgcgagagaaattacaccggttaacatcgaggaagagctgaaaagctcctatctggactatgcgatgtcggtcattgttggccgtgcgctgccggacgtccgcgatggcctgaagccggtacaccgtcgcgtactatacgccatgaacgtattgggcaatgactggaataaagcctacaaaaaatctgcccgtgtcgttggtgacgtaatcggtaaataccatcctcatggtgattacgcggtgtacgacaccattgtccgtatggcgcagcccttctcgctgcgttacatgctggtagatggtcagggtaactttggttctatcgacggcgactccgccgcggcaatgcgttatacggaaatccgtctggcgaagattgcccatgagctgatggctgacctggaaaaagagacggttgatttcgttgataactacgacggcacggaaaaaattcctgacgttatgccaacgaagatcccaaacctgctggtgaacggttcgtccggtatcgccgtcggtatggcaaccaacattccaccgcacaatatcacggaagtgatcaacggctgcctggcctacattgacgatgaagacatcagcattgaagggctgatggaacacatcccgggcccggacttcccgacggcggcaatcatcaatggccgtcgcggtattgaagaagcgtaccgcaccggtcgcggcaagatttacatccgtgcccgcgccgaagtggaagcggacgctaaaaccggccgtgaaaccattattgttcacgagatcccgtatcaggtgaacaaagcgcgactgattgaaaaaatcgccgagctggtaaaagaaaaacgcgttgaaggcatcagcgcgctgcgtgacgagtctgataaagacggtatgcgcatcgtgattgaaatcaagcgcgacgcggtgggtgaagttgtgttgaacaacctttactcccagactcagcttcaggtctccttcggtatcaacatggttgcgctgcaccatggccagccgaagatcatgaacctgaaagagatcctgagcgcgttcgtgcgtcaccgccgtgaagtggtgacccgtcgtaccatcttcgaactgcgcaaagcgcgcgaccgtgcccatatccttgaagcactggccgttgcgctggcgaacatcgacccgatcatcgagctgatccgccgtgcgccgacgccggcagaagcgaaggcgtcgctggttgcgcgtccatgggatctgggcaacgtggcggcaatgctggaacgtgccggtgatgacgccgcgcgtcctgagtggctggaaccggaattcggcgtgcgtgacggtcagtactacctgactgaacagcaggcccaggcgattctggatctgcgtttgcagaaactgaccggccttgagcatgaaaaactgctcgacgagtacaaagagctgctggagcagattgccgagctgctgcatatcctgggtagcgcagagcgcctgatggaagtgatccgtgaagagctggagctggttcgcgatcagttcggcgacgagcgtcgcaccgaaatcacagccaacagctctgatatcaacattgaagatctgatcaaccgcgaagacgtggtagtgacgctgtctcaccagggctacgtgaagtatcagccgttgaccgactacgaagcacagcgtcgtggcggtaaaggcaaatctgcggcgcgtattaaagaagaagactttattgaccgtctgctggtggccaacacccacgacacgatcctctgcttctccagccggggccgtctgtactggatgaaagtctatcagctgccggaagcgagccgtggcgcgcggggtcgaccaatcgtcaacctgctgccgctggaagcgaacgaacgtatcaccgccattctgccggtacgcgagtacgaagagggcgtgaacgtctttatggcgaccgcgagcggtaccgtgaagaaaactgcgctgaccgagttcagccgtccacgttctgccgggatcatcgcggtgaacctgaacgaaggcgatgagctgattggcgtggatctgacctccggttccgatgaagtgatgctgttctctgccgccggtaaagtggtgcgctttaaagagaacgccgtgcgcgcaatgggtcgtacggcgaccggcgtgcgtggtatcaagctggcgggtgaagacagcgtggtttccctgatcgttccgcgtggcgaaggcgcaatcctgaccgtcacccagaacggctacggtaaacgtacggcggaaagcgaatacccgaccaagtcacgcggcacgcagggcgttatctccatcaaagtgaccgagcgcaacggttccgttgttggcgcggtgcaggtggacgacgcggaccagatcatgatgatcaccgatgccggtacgctggtgcgtacccgcgtgtctgagatcagcgtggtgggtcgtaacacccagggcgttatcctcatccgcactgcggaagatgaaaacgtcgtcggtctgcaacgcgttgctgagccggtggatgacgaagagctcgactctatcgacggcagcgttgcggaaggggatgatgaaatcgccccggaagcggacaccgatgatgaagtagcggatgacgctgacgagtaa

SEQ ID NO: 115635 - DNA, 729 bp, Enterobacter cloacae
atgaatgccgaaaaatccccggtggctcacaacgttgaccacgaagagattgccaaatttgaagcggtggcgtcccgctggtgggatctcgaaggtgagttcaaacctctgcatcgtattaacccgctgcgtctgggctatatcgcggagcgttccggcggtctgttcggtaagaaagtgctcgacgtcggctgcggcggcggcatcctggcggaaagtatggcgcgtgaaggagccacggtcaccggtctggacatgggcttcgaacctctacaggttgcgcgtcttcatgcgctggagtccggcgtacaggtagaatatgtccaggaaaccgtggaagagcacgcggcaaaacatgcgcaccagtatgacgtggtgacctgcatggagatgctggagcacgttcccgatccgcagtcggtggtcagcgcctgtgcaaaactggtgaaaccgggtggacaggtcttcttctcgaccatcaaccgcaacggcaaagcctggctgatggccgtggtaggcgcggaatacgtgctgcgcatggtgccgaaagggacgcacgacgtgaagaagttcatcaagcctgccgaactgctgggctgggttgaccagacatggcttaaggagcagcacatgacgggtctgcactacaatccgctgacggataaattcaaacttgccccaggtgtggatgttaactatatgttgcacacaaccgccaaaaacgactaa

SEQ ID NO: 115636 - DNA, 2286 bp, Enterobacter cloacae
atgaatcagagtctgctggtgacaaagcgcgacggtaccaccgagcgtatcaatctggacaaaatccatcgagttctcgactgggcagcagaaggactgaacaacgtatctatctcccaggttgaactgcgttctcacattcagttctacgacggcatcaaaacgtctgatatccacgaaaccattatcaaagccgcggcagatctgatctcccgcgacgcaccggattatcagtacctcgctgcgcgtctggcgattttccacctgcgtaaaaaagcctacggccagttcgagccgccgaagctttacgatcacgtagtgaaaatggtcgagctgggcaaatacgacacgcatctgctggaagactatacggaagaagagttcgagcagatgaacgggtttatcgatcactggcgcgacatgaacttctcctacgcggcggtgaagcagctcgaaggcaaatacctggttcagaaccgtgtgacgggcgaaatctacgagagcgcccagttcctctatattctggtggccgcctgcctgttctctaattacccgcgtgaaacccgtctggactacgtgaagcgtttctacgatgcggtctctacgttcaagatttctctgcctacgccaatcatgtctggcgtgcgtacccctacccgtcagttcagctcctgcgtactgatcgagtgtggtgacagcctggattctatcaacgcgacctccagcgccatcgtgaaatacgtctcccagcgtgccggtatcggcatcaacgccggccgtatccgtgcgctgggcagcccgatccgcggcggtgaagcgttccacaccggctgtattccgttctacaagcacttccagacggcagtaaaatcctgctctcagggcggcgtgcgtggtggtgcagcgaccctgttctacccgatgtggcacctggaagtggaaagcctgctggttctgaaaaacaaccgcggcgtggaaggcaaccgcgtgcgtcacatggactacggcgtgcagatcaacaagctgatgtacacccgtctgctgaaaggggaagacatcaccctgttcagcccgtccgacgtcccgggtctgtacgacgcgttcttcgccgatcaggacgaattcgagcgtctgtacaccaaatatgaaaaagacgacagcatccgcaagcagcgcgtgaaagcggtcgatctgttctccctgatgatgcaggaacgtgcttctaccggccgtatctacatccagaacgttgaccactgcaacacccacagcccgttcgatccggtggttgccccagtgcgccagtccaacctgtgcctggagatcgccctgccgaccaaaccgctggaagacgtgaacgacgaaaacggtgaaatcgcgctctgtacgctgtccgcgttcaacctgggtgcgattaagagcctggacgagctggaagagctggcggtgctggcggttcgtgcgctcgacgccctgctggattaccaggattacccaatcccggcggcaaaacgcggcgcaatgggccgtcgcactttaggtatcggcgtgatcaacttcgcctactggctggcgaaaaacggcaagcgttactccgacggcagcgccaacaatctgacgcaccagacgttcgaagcgatccaatactacctgatgaaagcctctaacgagctggcgaaagagcaaggcgcgtgtccgtggttcaacgaaaccacctacgcgaaaggcattctgccgatcgacacctacaaaaaagacctggatgcgatcgtcagcgagccgctgcacctcgactgggaaggcctgcgcgagtccattaaaactcacggcctgcgtaactccacgctctctgccctgatgccgtccgagacctcttcgcagatctccaacgccaccaacggtattgagccaccgcgcggccacgtcagcatcaaagcgtcgaaagacggcgtgctgcgtcaggtggtgccggattacgaaacgctgggtgacaactacgagctgctgtgggaaatgccaaacaacgacggctatctgcaactggtgggtatcatgcagaagtttatcgaccagtcgatctctgccaataccaactacgacccaacgcgcttcccgtctggcaaggttccgatgcagcaactgctgaaagacctgctcaccgcctacaaatttggcgtgaaaacgctgtactatcacaacacccgtgatggtgcggaagacgcccaggacgacctggtgccgtcaattcaggacgatggctgcgaaagcggcgcatgtaagatctaa

SEQ ID NO: 115637 - DNA, 1131 bp, Enterobacter cloacae
atggcatataccaccttttcacagacgaaaaacgaccagctcaaagagccgatgttcttcggccagccggtcaacgtggcacgctacgatcagcaaaaatatgacatcttcgaaaagctgattgaaaagcaactctccttcttctggcgtccggaagaagttgacgtttcccgcgaccgtatcgatttccaggcgctaccggaacacgaaaagcacatcttcctcagcaacctgaagtaccagacgctgctggactccatccagggccgtagtccaaacgtggcgctgctgccgctgatctcgattcctgagctggaaacctgggtagagacctgggcgttctccgagacgatccactcccgctcttacacccacatcatccgcaacatcgtgaacgatccggcggtggtgtttgacgatatcgtcaccaatgagcagatccagaagcgcgcggaaggcattgcgcactactacgacgagctgatcgagatgaccagctactggcatctgatgggcgaaggcacgcataacgtgaacggcaaaaccattaccgtaaacctgcgggccctgaaaaagcagctgtacctgtgcctgatgagcgtcaacgcgctggaagcaatccgcttctacgtaagcttcgcctgctccttcgcttttgccgagcgcaagctgatggaaggtaacgccaaaattatccgcctgatcgcccgtgacgaagccctgcacctgaccggcacccagcatatgctgaacctgctgcgcagcggcgcggacgacccggaaatggctgcgattgccgaagagtgcaagcaggaatgctacgatctgttcgtgctggccgcccagcaggagaaagagtgggcagactacctgttccgcgacggctccatgattggcctgaacaaagacattctgtgccagtacgtggagtacatcactaacatccgcatgcaggctgtgggtctcgatctgccattccagacgcgctctaacccgattccgtggatcaacacctggctggtgtccgataacgtgcaggttgcgccgcaggaagtggaagtgagttcttatctggtcggtcagattgattctgaagtcaacaccgacgacctgagcgatttccagctctga

SEQ ID NO: 115638 - DNA, 255 bp, Enterobacter cloacae
atgagccgcgtaacgctgagcctttctggtacagaggtgttgtgccaggaagagcacccttctctgctggtggcgcttgaagcgcatcaggtagaagtagagtaccagtgtcgtgaaggctactgcggctcctgccgctgccgtctggtcgcaggccaggtagactggctgaccgaaccgctggcctttatcagtgaaggggagattttgccctgctgctgccgggcaaaaggcgatattgagatcgagatgtaa

SEQ ID NO: 115639 - DNA, 1062 bp, Enterobacter cloacae
atgaaattaactcagttagcgacaggtctgctgctggcgggcctgatgacaggctccgcgctggcggcggataagatcgtgatcgcccaccgtggcgccagcggttatctgccggagcatacgctgccggcaaaagcgatggcctatgcccagggcgcggattatctggaacaggatctggtgatgacgaaggacgaccagctggtcgttctgcatgaccactatcttgaccgcgtgacggacgtggcggagcgtttcccggatcgcgcccgtaaagatggtcgctactacgccatcgacttcacgctggcggagatccgctcgctgaagtttaccgagggcttcgagattgaaaacggtaagaaggtacaggtctatccgggacgtttcccgatgggcaagtctgacttccgtattcacaccttcgaagaggagatcgagtttgttcaggggctgaaccactcgacaggaaaaaatatcggtatctacccggaaatcaaagcgccgtggttccaccatcaggaagggaaggacattgccgcgaagacgctggaggtactgaaaaagtacggctacaccagcaagcaggataaggttttcctgcaatgtttcgacgccgcggaactgaagcgcatcaaaaccgagctggagccgaaaatggggatggatctcaatctggtgcagctgattgcgtataccgactggaatgaaacccaggaaaaacagccggacgggaagtgggtgaactacacctacgactggatgtttaagccgggcgcgatgaagcagattgcgcagtacgccgacggcatcgggccggattaccacatgctggtggcggaaggctcaacgccgggtcacgtgaagctgacggcgatggtgaaagaggcgcatgcgagcaagatgcaggtgcatccgtataccgtacgcgcagaccagctgccggagtatgcgacggacgtgaatcagctttacgacgtactgtataaccaggaggatgtggacggggtgtttacggatttcccggataaagcggtgagctttttgaaggataaacgctga

SEQ ID NO: 115640 - DNA, 1353 bp, Enterobacter cloacae
atgctcagtatctttaaacctgcgccacatcgggcgcgactgccagaggcagagattgatcctctctaccgccgtctgcgttggcaaatcttcctcgggatcttcttcgggtatgcggcgtactatctggtacgtaaaaactttgcgctcgccatgccgtacctggtggagcagggcttctctcgcggcgatctgggatttgcgctgtcggggatctccatcgcgtacggtttttcgaagttcattatggggtcggtgtcggatcgttcgaatccgcgcgtgttcctgcccgccggtctgatcctcgcggcagcggtgatgctgttcatgggctttgtgccgtgggcgacctccagcattgccatcatgttcgtgctgctgttcctctgcggctggttccaggggatgggatggccgccatgcggacgcaccatggttcactggtggtcacagaaagagcgtggtggaattgtatctgtgtggaactgcgcacataacgtcgggggcgggcttccgccgctgctgttcctgctggggatggcctggttcaacgactggcatgccgcgctctatatgccagcctttggcgccattctggtggcgattatcgccttcgctctgatgcgcgacaccccacagtcctgcggcctgccgccgattgaagagtacaaaaacgactacccggatgattacagcgagaagcacgaagaagagctgacggcaaagcagatcttcatgaagtacgtgctgccgaacaagctgctgtggtacatcgcggtggcaaacgtatttgtctacctgctgcgctacggcatcctcgactggtcgccaacctacctgaaagaggtgaagcacttcgcgctggataaatcctcctgggcctatttcctgtatgaatacgcgggcattcccggcacgctgatctgcggctggatgtcggacaaagtgtttaagggcaaccgtggggcgacgggcgtgttctttatgacgctggtcaccatcgcgacggtcgtttactggcttaacccgccggggaatccgggtgtggatatggcctgtatgatcgtcatcggcttcctgatttatggtccggttatgctgattggtctgcatgccctggagctggcgccgaagaaagcggcaggcacggcggcaggctttaccggtctgtttggctacctcggcggttcggtcgctgcgagcgccatcgtcggctacaccgtcgacttcttcggctgggatggcggctttatggtgatgattggcggcagcgtgctggctgttctgctgctggttgttgtgatgattggtgaaaaacgtcaccacgccgaagtgctggcgcgtcgtcaataa

SEQ ID NO: 115641 - DNA, 1629 bp, Enterobacter cloacae
atgacaattcacgatccacgcttcagcgatgtgattatcattggcggtggcgcgacgggtgccggcatcgcacgcgactgcgccctgcggggattgagcgtcacgcttctggaacgccacgatatcgccaccggcgcgacgggacgtaatcacggtctgttgcacagcggcgcccgctatgcggtcactgacgctgagtcagcacgcgagtgtatcgctgaaaaccagatcctcaggcgcatcgcccgccactgcgttgaaccgaccaacggtctttttatcacccttccagaagatgacctcggctttcagcaaacctttatcaccgcctgcacggcggcaggcattcaggccgaggcgatcgatcctgcgcaggcgcgccgtcttgaaccctcggtaaacccggcgttactgggcgcggtaaaagtaccggacggaaccgttgatcctttccgcctgaccgccgccaatatgctcgacgcgcgggaacatggcgcccagatcctgaccgggcatcacgtcaccgggcttattcgtgaaggtaataccgtgcgcggggtgcgcgtgtttgatgcgcagtacaacgaacaccgcgagctgtatgccgccgtcgtggtcaacgcggcggggatctggggccagcgcatcgcggaatacgcggacctgtcggtgcgcatgttcccggcgaaaggctcgctgctgatcctcgaccaccgcatcaataaccatgtcatcaaccgctgccgtaaaccgtctgacgccgatatcctcgtgccgggggacaccatttcgttaatcggcacgacctcaatgcatgtggactacagcgaaattgattacaaccgcgtcaccgctgaagaggtggatatcctgctgcgcgaaggggaaaagctggccccggtgatggcgcagacgcgtattctgcgtgcctacgcgggcgtgcgtcccctcgtcgccagcgataacgatccgagcgggcgtaacgtcagccgcggcatcgtgctgctcgatcacgccgaacgcgacggcatggacgggtttatcaccattaccggcggcaagctgatgacctaccggctgatggcccagtgggccaccgatgccgtctgccgtaagctcggcaacaccgcaccgtgcgtgacggcggaacaggctctgcccggctcgcagcaatcgacagaaaaaacgctgcacaaaatcatttcactccctgccccgcttcgcggttcggcgatttaccgtcacggcgaccgcaccccaacctggctcggtgaagggcgactcagccgcagcctggtgtgcgaatgcgaagccgtgaccgcaggcgaggtgcagtatgccgtggaaaacctgacggtgaacaacctgctcgatttacgccgccgcacgcgcgtcgggatgggcacctgtcagggggagctgtgcgcctgccgtgccgccgggctgctgcaacgttttcacgccaccacgtcaacccagtcgcttgcccagctcagcgattttttaaacgagcgctggaaaggcattcagcccgtcgcctggggcgatgccctgcgcgaaagcgagtttacccgctgggtctatcaggggctttgcggtctggagaaggagcacaaccatgaaatttga

SEQ ID NO: 115642 - DNA, 1218 bp, Enterobacter cloacae
atgaaatttgataccgtgattgtgggtggggggctggcgggcctgctgtgcggcctcaaactgacgcagcggggtctgcgctgcgccattgtcactcgcggtcagagtgccctgcacttctcttccggctcgctggatttactgggcgcgctatcgttcgccgatctgccgcctgaacatccctaccgcctgacgggcgcagagaatatggcccgctttgcctgcgaaaccgaacacctgctcaccacctgcggcgcacgcatgcagggtgacgccgagcaaaatcatcagcgcgtcacgccgctcggcaccctgcgcgccgcctggcttagcccggaagaggtgcctgtcgcccccatcgctgccgagcgcgtgcgggtggtggggatcagcggcttcctcgatttccagccacatctggccgccgcgtctctcagacagcagggtgttcaggtggatacggcggagattgatctccccgaactcgacgtgctgcgcgaaaaccccagcgagtttcgtgcggtgaacattgcccgcctgctggataatgaaagttattggccgcagctgtacgcggcgcttcaaccgctcggcaagacctgcgacgccctgtttatgcccgcctgttttggcttaacggacaaccggctctggcgctggctctcggcgcgcctgccctgtacgctcggtttactgccggcgctccccccttccgtgcccggcattcgtctgcacacccagcttcagcgtcagtttgttgcccagggtggcgtctggatggcaggcgacgaggtgaaaaaaatcaccctggctgagggcgcggtaagcgaaatctggacccgcaaccacggcgacatcccgcttcgcgcacgctttacggtgctggcaagtggcagtttcttcagtaacggtctgctgagcagccgggatggcgtgcgtgaggcgatcctcggtctggacgtccggcaaagcgcttcccgcgcggactggtatcaaagcgatttcttcaccccgcagccctggcagcagttcggcgtgatcgtcgacagccaactgcgcccgcggctgggcggggaaccggttgaaaatctttacgccatcggctcggttctgggcgggtacgatcccgtggcgcagggctgcggtggcggcgtctgcgccgtcactgcgctgcatgtcgcggagcagattatccagcgcagggagggagcacaatga

SEQ ID NO: 115643 - DNA, 1191 bp, Enterobacter cloacae
atgaacgacacccaatttgaaagctgtatcaaatgcacggtctgcaccacggtttgcccggtcagcggcgtcgatccgcgctatcccggcccgaaacaggccggtcccgacggggagcgtctgcgcctgaaggatggcgcgctctacgacgaggcgctgaaatactgcatcaactgcaaacgctgcgaagttgcctgcccgtcggacgtgaaaataggcgatatcatccagcgcgcccgcgcccgctacagtacgcaaaaaccgacgctgcgtgacgcgatactgagccacaccgatctgatgggtagcctctcgacgcctttcgcgccggtcgtcaatgccgccaccgccctgaagccggtgcgcaggctgctggatgcgacgctcaaaatcgaccatcaccgcagtctgccgaaatattctcacggcaccttccgccgctggtttaaatccgtggcggcagaacaggcgcagttctctgagcaggtcgccttcttccacggctgctacgtgaactacaaccatccgcagctgggaaaagacctgctgaaagtgctgaacgccatgggaacgggcgttcagctgctgagcaaagaaaagtgctgcggcgttccgctgattgccaacggtttcatcgacaaagcgcgcaagcaggcgagcagcaacgtcacctttttacgcgaggcgatcgtcgacaaaggcataccggtactggcgacgtcgtcaacctgtaccttcacgctgcgcgatgaatatccgcatctgctggatgtagataacaccggcctgcgcgagcacattgagctggcgacccgttttctctggcgcaaactggacagcgggcagacgttaccgctgggcaaattgccgctgaaggtggtgtatcacacgccatgtcatatggagaagatgggctggtcgatctatacgcttgagctgctgcggctgataccggggctggagctgacggtgctggactcacgctgctgcggcatcgcaggcacgtacggcttcaagcgtgaaaactacccaacgtcacaggccattggcgcgccgctgttccggcagattgaagagagcggcgcagatatcgtggtgacggactgcgaaacctgcaagtggcagatcgagatgtccaccagcaaacgctgtgaacatcccattaccttgctggcaaaagctctggcgtaa

SEQ ID NO: 115644 - DNA, 1200 bp, Enterobacter cloacae
atgataaatgtggaaatgttatccactggcgacgaagtgctgcatgggcaaatcattgataccaatgccgcctggctcgccgatctcttctttgagcaaggattaccgttaacgcgccgcaacaccgtaggtgacaatcttgagtcgctggtcaacgttctgcgcgagcgcagcgaacgctgcgacgtgctgattgtgaacggcgggctgggacccaccagcgacgatctcagcgcgctggccgccgccacggccaaaggcgaaggcctggttctgcacgaggcgtggctggcacagatggagcgctttttctccgggcgtggccgcgtgatggcccccagcaaccgcaagcaggctgaaattcccgccagcgcggaactgattgataacccggtcggcaccgcctgcgggtttgccgttcagctgaaccgctgcctgatgttcttcaccccgggcgtcccgtcggaatttaaagtgatggtcgagcagcagatcctgccgcgcctgcgcgcgcgctttacgctgcctgaaccgccgctgtgcctgcgtctgaccacctttggtcgctcggaaagcgatctggcccagagcctcgatcacctgcaactgcctcctggcgtgtcgatgggctatcgctcctccatgccgattattgaactgaagctgaccggaccggcgtcagagaaagccgccatgctggcgctgtggccggaagtgcagcgcgtcgccggggaaagcctgattttcgaaggaacggaagggctgccggcgcagatcgcagcgcatttgcagtcccgccagttgagcgtgacgttaagcgagcagtttaccggtgggcttctggcgcttcagcttacccgggcgggtgcgccgctgctggccagtgaagtggtgccgttccagcaggagacgctggcgcagacggcgcgctgggcgtccgagcgcagagtgaagcatttcgccgggctggcgctgtttgtgggcgggctggatgaggagcacctcaactttgccctggcaacgccggaagggacgcacgccctgcgggtcaggatgagcattacccgccacagcctggccgtgcgtcaggaggtgtgcgcgatgatggcgctgaacatgctgcgccgctggctgaacgggaaagaggtcgccagcgagcacggctggatcaacgtcgtcgaatcgctgttcgtggagtga

SEQ ID NO: 115645 - DNA, 543 bp, Enterobacter cloacae
atgaaaaaagtggcattaatgggcttaagcggcctgatgtttgtttcagcagcggcaaacgcaatttccttcaacggctcggcgggacaagattatacccatctgggctttggtcttggcacggatagcgcaggcctggcaatgaccggcggctggacgcacaacgacgacgatggggatgcggcaagcctgggcctcggcttcaacgtgccgttgggtcccttcctggcgaccgtcggcggtaaaggcatttacaccaacccgaacgacggcgacgaaggctacgcggcggcagtgggcggcggcttgcagtggaaaattggcgacagctttggcctgttcggtgagtactactactccccggattccctctccagcggtatcgacagctatcaggaagctaatgccggcgcgcgctggaccatcatgcgtccgatcaccatcgaagcgggctatcgctatctgaacctggccggtaaagacggcaaccgcgacaacgccctggcagacggcccgtacattggcgtgagcgccggtttctaa

SEQ ID NO: 115646 - DNA, 1410 bp, Enterobacter cloacae
atgaggtgggttaagccgcagtcgctttacctgcaacttttgctttttctgggtttgccgctgctgctgttatgggggctgtcagcctttaacagctacgttagcgcgctacaggcggcgacgcaggcctatgaccgcacgctgttatcctcggcgcgcacggtgtcagagcggctggtggtgcacaacggtaaactccaggtgaacgtgccctgggtcgtgctcgacagcttcgagctgaacatgaacgatcgcctctattacaaggtcgtggaccctgacgggcggacgatctccggctacgacgatctgccgaatatgcctccctccacgtcgcgcactacacactatccggcgctggcttggttttatcataccgagtatcgcgggcaggcgatccgcgtggcgaagctgctccagccggttaacgaggacagtgtgttcgggatggcggagatctacgtcgccgaaacgttgcagtcgcggcgctatctggccactcagctgctgttttcctcgctcgtgtcgcaggggctgctggtgctgctgacgctggtcctgaccgcgtggctgctgcgtcgcgtgctgcgcccgatgcggcagctctcgtccctgatggtgcgccgtgagccggggctgctggctccgctgccggagctgctgccctggtcggaaacgcggctgctgattgtggcatttaaccgctatatcgacaggttgcgcggcgtactttcgcggcaggcgcgctttaacgccgacgcctcacaccagctcaaaacgccgctggcggtgctgaaaacccaggtatcggttgccctgacgcgtaacgatccggcgctgtggcaggagagcttacgggcgatgaacgtcacgctggataacaccatcgtgctgacggaaaggctgttgcagctttcggcggtgaagcgaaaagagcagggggagcgacagtttgcgcctgtcgatctggtacaggtggtgcaaaactgctgcttttcccggctggcgcaggcgcgcagcaagggtatcgatctcggttatgacggcgtacagcagccggtaatgattgagggggatgacgtgttgctgggcgaactttgcgccaacctgctggagaacgcgatcaaatacacaccggagcagggcgtcgtgacggtgtacctgcgcacggctaacgatgccgttgagctgagcgtggaggacagcggaccgggcattgctgaagaccagatctcccaggccatgctgccgtttcatcggttggataacgtgggcgatgccgccgggtccggcattggcctggcgctggctaacgatattgcccgcctgcaccgcagccatcttcagctgatgcccagtgaaaatctgggtgggctgagcgtgaaaatgcgctttctgatgcaggtataa

SEQ ID NO: 115647 - DNA, 675 bp, Enterobacter cloacae
atgcgtctcttactggcggaagataatcgtgagctggctcactggctggaaaaagcgctggtacaaaacggatttgccgtggattgcgtcaacgatggacgggcggccgatcatcttttgcagggagaaaactatgccgtcgcgatccttgatatcggcatgcccggcttcgacgggctggaggtggtgcatcgcctgagaaaacgcgggcagacgctgccggtgctgtttcttaccgcccgcagcaacgtggcagacagggtgaaggggttgaatgccggggcggatgactacctgccgaaaccgttcgagctggaggagcttgatgcccgcctgcgcgcgctgctgcgccgcagcgaaggacgaacccaggagcgccagcggctgggagagctggagtacgatgatgaaggcttttttctgctgcgcgatgaacccctttccctcacgccgcgcgaactctctttgctgaaggtgctgatgcaccgccggacccgtcccgtctcccggcaacagcttttcgaccaggtattcagcctgaacgacgacgtcagccccgagagcatcgatctctatattcaccgcctgcgtaagaagctgaccggcagcggggtgcggatcattaccctccgggggctgggctacgtgctggagtgcggcgatgaggtgggttaa

SEQ ID NO: 115648 - DNA, 981 bp, Enterobacter cloacae
atgaaaaaacaattactttctacccttgctgcaagcgtattgctgttgagtgcctctgtcgtccaggcgcaagacgcgccatcccgtaccgaatgtatcgccccggccaaacccggcggcggcttcgacctgacctgtaagctgattcaggtcagcctgctggagacgaaggccatcgagaaaccgatgcgcgtcacctacatgcccggcggcgtgggcgcggtagcctataacgccatcgtcgcgcagcgccctgccgaagcgggcaccgtggtggccttctccggcggttcgctgctgaacctgtcgcaggggaaatttggtcgttatgacgtgaatgacgtgcgctggctcgccaccgtaggcactgattacggcatgatcgccgtgcgcgcggactccccgtggaaatccctgaaagatctgctgaccgccatggaaaaagatccgaacagcgtggtcattggcgcgggcgcctctatcggcagccaggactggatgaaagccgcgctgctggcgcagcaggccaaagtggatccgcacaagatgcgttacgtggcctttgaaggcggcggcgagccggtgacggcgctgatgggcaatcacgtccaggcggtatcgggcgatctcagcgaaatggtgccctacctgagcggggataagatccgcgtgctggcggtcttctcggaaaaccgtctgccgggcccgctggcagacgtcccaaccgccaaagagcagggttataacctggtctggccgatcatccgcggcttcttcgtcgggccaaaagtgaccgacgccgagtaccagtggtgggtggataccttcgcaaaacttcagcaaaccgaggagttcaaaaaacagcgcgatctgcgcgggctgtttgagttcaacctgaacggcaagcagctggacgagtatgtcaaaaaacaggtgaatgactaccgcgaacaggcgaaagcctttggtctggcgaaataa

SEQ ID NO: 115649 - DNA, 402 bp, Enterobacter cloacae
atgagcgatcgcatttttgccgggatatggctgctgctctgcattggtggcatgttcgtcgcctggcagatccacagcgaatacagctatgaacccgtggggccacgccccttccccgtcggcattgtcggcctgatgctgctctgctcggtggcgctgctgctgcgccatccggataccgtggagtggccgccacgccgtacgctgcaacgtctgctggtaatggtaattgtcctgctaatgtacgcgtggggctttgagtggctcggcttcccgattgccaccgccctgctgacgatggtgattggcatactgtttaacgcctcctgcctgcggcggggatctccggggtcgtactgggcattttactctggtacgccttcgaccgcctgctggacgtga

SEQ ID NO: 115650 - DNA, 1515 bp, Enterobacter cloacae
atggatacctggatctatctctctcaggggttcgcggtagcgatgaccccggaaaacctggtgatcgccctgatcggctgtttcgtcgggaccatcgtcggcctgctgccgggccttgggcctatcaacggggtggcgattttactgccgctggcctttgcgctgcacctgcctgcggaatcggcgctgatcctgctggcgacggtttatatcggctgcgaatacggggggcgtatttcctcgatactgcttaacgtgcccggcgatgccgccgccattatgaccgcgctggatggctacccgatggcgcagcagggacgcggcggcgtggcgctctctatttccgccgtcagctcgttttttggctccctgatcgccattggcggcatcatcctcttcgccccggcgctggcccagtggtcgctggcgtttggtccggccgagtattttgccctgatggtgttcgccatcgcctgtctcggcagcatgatggcgcagaatccgctgaagtcgtttttgtctgcgttgattggcctcagtctggccaccgtcggcgtggatgccaacaccggggtttatcgttttaccttcgacagcgttcacctctccgacggcgtgcagtttatcgtcgtggtgattggtctgttctctgtctcagaaatcttactgatgctggagcataccagcagcgggcagacgctggtgcgtaaaaccggacgtatgctctttaatgccaaagagggggcgcagtgtattggtgccaccctgcgttcgtcggtgatcggtttcttcgtcggcattctgcccggcgcgggggcgactatcgccagcgccatcacctacatgaccgagaaaaagctgagcggtaacagcgacagcttcggcaaaggcgatatccgcggcgtggcggcgccggaggcggcgaataacgcctcggcctgcggctcgtttatcccgatgctgaccctcggcgtgccgggctccggcaccacggcggtaatgatgggcgcgctgacgctctataacatcaccccgggtccggcgatgtttactgaacagcccgatatcgtctggggtttgattgccgccctgctgatcgccaacgtgatgctgctggtaatgaacatcccgctgatcggcctgttcacccgtatgctgaccattcccctgtggttcctggtcccggccatcgccgccgtctctgcggttggggtgtacgcggtgcacagcaccaccttcgacctggtgttgatggtgctgctcggcgtgctgggctacattctgcgcaagatgcacttcccgatgtcgccgctgattttagggtttgtgctgggggaaatgctggagcagaacctgcgccgcgccctctccatcagcaacggcaacatggggatcctgtgggagagcagcgtgacgaagatcctgctggcaatggcggttatggtgattgtcgtgccgccggtgctgcgctgggtccgccgacgccagcacaaaccgcagccggatatcggctga

SEQ ID NO: 115651 - DNA, 1362 bp, Enterobacter cloacae
atgagttttaccgactggccgtggcggcactggcgcacccggcgtgccgataaacctgcgctgcgtttagacgatataacgctcagctggtctcagctgggcgagcgtatcgatcgtctcgcagccggttttcagtctcagggcgttacggacggtgacggcgtcatgctgctcgcccacaaccatccgcagaccctgctggcctggctggccctgcttcagtgcggcgcccgcattttgccggtgaaccctcagcttccccgtccgctgctggacgtcctcctgccgcagatgaccctgcgctttgcgctggtgcttaacggtgagtatgacggtctgcccgcgctggcattaagagagcgcgaggggcagggcggcgtgacgtggcgggcagaacggctggcttcaatgacgctcacctctggctccaccggcttgccgaaagcggcggtgcacacctgtgccgcccaccttgccagcgcaaaaggggtgctggcgctgatgccttacggcgatagcgacgactggctgctctctctgccgctgtttcacgtctccggtcaggggattttgtggcgctggttgcagggcggaggccgtctcaccgtgcgtgaaaaacagccgctggagcaggcactacagggttgtacccacgcctcgctggtgccaacgcagctgtggcggctgcttaattcacaccatcccgtcgcgctgaaagccgtgctgctcggcggggcggaaatccccgttgcgctgaccgaacaggcgcgcgagcaggggatccgtacgttctgcggctacggtctgaccgagttcgcctccaccgtctgcgccaaagaggccgacggcgcgccggacgtgggcagcgcgctgccgggcagagacgttcaggtggtgaacggtgaagtctggctccgggcggaaagcatggcggcgggctactggcgagacggcgcattattgccgctggtcaatgagcagggctggtttgccacccgcgatcgcggcgagtggcatgacggacgcctgaccattctgggccgaatggacaatctctttttcagcggcggagaagggatccagccggaagcgctggagcgcgttatcgccacgcatccgcaggtaagccaggcgtttgtcgttccgctggatgatgccgagtacgggcaacgtccggtggcggtagtggaatgcgacccgggcacggatatcacgctgttgccggagtgggttcagggcaggctggcgcgctttgagcagccggtacactggctggcgctgccgtcagaactgaaaaatggcgggattaaaatctcccgccaggcgttaaagcagtgggtcaatgccctgttgaggggctaa

SEQ ID NO: 115652 - DNA, 966 bp, Enterobacter cloacae
atgcgtcgcgcgcaggtttaccgctggcagataccgatggacgcgggcgtggtgctgcgtgaacggcggttaaaaacccgtgacggctttttcgtgcatcttcggcagggggagcgggaagggtggggcgaaatcgccccgcttccgggctttagcctggaaacgctggacgaggcgcaggctgcgctgatggcctggacgtacgaatggcatgagggagcagctccggcgctgccggacgttccttccgccgcgttcggcatcagctgtgcgctggcagagctggacggcagtttaccggacgcggcgaactattgcgccgcgccgctctgtaccggcgatccggatgaacttttcgcgctcctttccgcgatgcctggcgagaaggtggcgaaaataaaggttggcctgtacgaagcagtgcgcgacggaatggtggttaacctgttactggaagccattcccgatctacacctgcgcctggacgccaaccgcgcctggacgccgctcagggcgcaacagtttgcgaagtacgtcaacccggcgtaccgcagccgcatcgcgtttctcgaagagccgtgcaaaacgcgcgacgactcgcgcgcctttgcccgggaaaccggcattgccattgcctgggatgagagcctgcgcgaagccgatttcgcgtttgccgccgagccgggcgtcagggcagtggtgattaagccaacgctgaccggcagcctcgacaaggtgcgcgagcaggttgcggcggctcacgccgcagggctgacggcggtgatcagttcatccatcgaatccagcctcgggctgacgcagctggcgcgcattgctgcatggttaacgccggacaccgttcccggtctcgatacgctaaacctgatgcaggcccagctgattcgccagtggcctggcagcaccttgccgtgcctcgatgtcggggcgctggagccactgcgatga

SEQ ID NO: 115653 - DNA, 858 bp, Enterobacter cloacae
atgatctatcctgatgaacacatgctttacgcgccggttgaatggcaggactgctccgaaggctacaccgacattcgttaccacaaatccgccgctggtatcgccaaaatcaccatcaaccgtccacaggtgcgcaacgcatttcgtccgctgaccgtaaaagagatgatccaggcgctggcggatgcccgctacgacgacactatcggcgtcatcatcctcaccggggaaggggagaaagccttctgctccggcggcgatcagaaagtgcgcggtgactacggcggataccaggatgatgcgggtacgcaccacctgaacgtgctggatttccagcgccagatccgcacctgtccaaaaccggtggtcgcgatggtggcagggtattccatcggcggcggtcacgtgctgcacatgatgtgtgacctgacgatcgcggcggaaaatgccatcttcggtcagaccggcccgaaagtcggctccttcgacggcggctggggcgcgtcctatatggcgcgcatagtcggccagaaaaaagcccgcgaaatctggttcctgtgccgtcagtacaacgcccaggaagcgctggatatggggctggttaacaccgttgtgccgatcgccgatctggaaaaagagaccgtgcgctggtgtcgcgaaatgctgcaaaacagcccaatggcgctgcgctgcctgaaagcggccctcaacgccgactgtgacggtcaggcgggccttcaggagctggcgggtaacgccaccatgctgttctacatgaccgaagagggtcaggaagggcgcaacgcgttcaacgaaaaacgccagccagacttcagcaaatacaaacggaacccgtaa

SEQ ID NO: 115654 - DNA, 777 bp, Enterobacter cloacae
gtgatcctcgcaggcttctcccagccaggaaaaccaggctacccctggctggttttcctgcacggtttttccggcgactgtcgcgagtggcaggctgtcggggcgtcgctgcatgactacccccggctctaccttgacctgcccgggcacggtggttcagcggatacgggcgtgacggggtttgcagaggtaagtgaattgctctcgcatacccttgttagttacaacatactaagatactggctcgtggggtactccctcggcggccgcattgcgatgttccatgcctgccagcatcctgcggggttagacggggtgattgtggaaggtggacacccgggcctgcaagacgccgatgcgcgccaggcgcggctgatcgctgaccgccgctgggcgtcacgctttcgcagtgagccgctggaggccgtctttgccgactggtatcaacagccggtctttgcctcccttacggatgatcagcgcagggcgctgatcgcgctgcgctgccggaacaacggcccgaggctggcagagatgctggaagccacctcgcttgccgttcagcctgatttacgtcccgcgctcaccgcgcgtgatttttcttttgactatctctatggcgaacgtgacgggaagtttgcagccatcgccgctgaacttaacgtcacgcgtcatgctatccctcacgccggacacaacgctcaccgggacaccccggaagctgttgccgcgagtctggctcagatactgcgttatcgaacaaaggacacgctatga

SEQ ID NO: 115655 - DNA, 1671 bp, Enterobacter cloacae
atgtcagtaagttcttttaaccgacgctgggcggcggtgatccttgaagccctgacccgtcatggtgtcaggcatgtgtgtattgccccgggctctcgctccacgccgctcacccttgctgccgcggaaaaccgggcttttattcaccacacccattttgatgagcggggtctgggccatctggcgctcgggctggcgaaagtcagcaaagcgcccgtggcggtgatagtcacctccggcacggcggtggcgaacctgtatccggcgctgattgaagcgggattaaccggcgaaaagctgatattactcaccgccgaccgtcccccggaacttattgactgcggcgctaaccaggcgattcgtcagcctggcatttttgcctcgcatccttcacagacggtctcgttgccgcgccccactcaggacattcccgccagctggctggtctcaactctcgaccacgccatgaacgcactgcgcagcggcgggctgcacattaactgcccgtttgccgagccgctgtacggcgaaatgaacgatactggcctcgtctggcaacagcagctgggagactggtgggagagcgaaaaaccctggctgcgcgagcagacgcatctggaaagcgcaaaacagcgcgactggttcttctggcgccagaagcgcggcgtggtgattgccgggcggatgagtgcggcggaaggcaagctggcggcggagtgggcacaaacgcttggctggccgctgattggtgacgtgctttcccagacgggccagccgctgccctgcgccgacctctggctgggtaacgcgaaagcggttaccgaactggcgcaggcgcagattgtcgtccagctgggatcgagcctgacggggaagcgtctgctccagtggcaggccacctgtaccccagaagagtactggctggtggatccgctcgaaggacgccttgacccggcgcaccatcgcggccgccgcctggtgagcaacattgacagctggctggaattgcatccggcggaaaaacgcaaaccctgggcggtggagatcccggcgctgtcacgtcaggcgtgggaactcaccaaagcgcagtgcgaggcgttcagtgaagccgggctggcgcaccgtatccgcaaatatcttcccgagcagggacaactttttgtcggtaacagcctggtggtgcgcctgattgacgccttttcgcagctgccggcgggttatccggtgtacagcaaccggggcgcgagcggcattgacggcctgatctccaccgccgctggcgtacagcgggccagcgcgaaatccacgctggcgattgtgggggatctctcagccctctacgatctcaacgcgctggcgctcctgcgtcgggcgtcggccccgttcgtgctgattgttgtgaacaataacggcgggcagattttctcgttgctgccgacgccgcaaagcgagcgtgagcgcttctatctgatgccgcaaaacgtgcagttcgaacacgccgccgccatgttcagcctgaagtaccatcgcccggaaaactgggacgcgctggagacggcgctgaacaccgcctggcggcagcctggcgcgacgctgattgagctggtggtaaacgatgctgacggcgcgcagaagctgcaacatctgcttgcgcaggtgagtcacctgtga

SEQ ID NO: 115656 - DNA, 1296 bp, Enterobacter cloacae
gtgcactcgattttcctcgcgctgcaaagcctgcgtactcagcttgcgcaagcattgccagctacacccggtttacgccatttcgatgtctctttcccgttaaacgacgccttcgatccgctggcctggctcggtgtgcagcgatgctatcctcagttttactggcaacagcgcagcggtgatgaagaacttgccgcgctcggaagcctcgcccatttcgattctctggcctcggcctcgcggtttttgcacacccacgacgtagccaatgacacccgtatctgcggcctgaacgccttcaacccggcgcagggcaagctgtttttaccgcgccttctctggcgacggtctggcggggtcgccacgctgcgtctgcaactgtggagcgaaacgtcgctgcgggaagatgcccgtgaggcgctgaattttgtcgataacctgcgcgacgccgcgccgatccgcccgttgtccgtgcagattgtgcaggaaacccatcatccggaaaaaccggaatggctggcgttgattcgtcaggcgacggatacccttgctcgcggcgattttgagaaagtggtcctcgcacgtgctacagacgtgcattgccagcagcccgtgaacgccatcgcgctgatggctgccagccgcgcgctaaacctcaactgctatcatttttgtatggtctttgacgccagcaacgcgttcctcggctcgacgcctgaacgcctgtggcggcgacgcggcacgctgctgcgcactgaagcgctggcaggcaccgtcgccagccattctgacgataagcaggctcagcgtctgggcgactggctgatgaacgacgacaaaaatcagcgggaaaatatgctggtggtggaagatatctgccagcgtcttcagcaccatacccggacgctggagatcctgcctgcgcaggtgctgcgtctgcgcaaggtgcagcatttacgtcgctgtatctggaccgaacttaaacagcctgacgacgagcagtgcctgcatattctgcaaccgacggcggcggtggccgggctgccgcgacaggcggcgcgagaatttattgcgaaagtggagccgtttgaccgggagtggtacgccggatcggcgggctatttatcgcgcgatcaaagcgaattctgtgtggcattacgctccgcccgcgttcacgacgctgcgctgcgtctttatgcgggggcgggcatcgtcagcggctccgatccggagcaggagtggcaggagatcgaaaacaaggcagccgggctgcgttcccttctcctaagggattaa

SEQ ID NO: 115657 - DNA, 306 bp, Enterobacter cloacae
atgtcatttcaatcctgggatacccgagtcgacgacgacctgacgctgctaagcgaaacgctggaagaagtgctgcgctcttcaggcgatcctgccgatcagaagtacattgagctcaaagcccgcgccgagcaggcgctgcatgacgtgaaaaaccgcgtcagtaacgcatccgacaattactactaccgcgccaagcaggcggtttatcgtgccgacgattatgtgcatgaaaaaccgtggcagggcattggggtcggtgcggccgtagggctggtgctgggtctgctgttagcccgtcgttaa

SEQ ID NO: 115658 - DNA, 465 bp, Enterobacter cloacae
atgatccagtggcaagatctacaccacagcgaactgaccgtgcattcactctacgccctgctcaagctgcgctgcgaagtctttgtggttgaacaaacctgcccgtatcaggatatcgacggcgatgacctgatcggcgagaaccggcacatcctcggctggcgcgataacgagctggtggcgtatgcgaggattctgaaaagcgaagaggattttgaccctgtcgtcattggccgcgtcattatcagcggccgcgcgcgcggtgaaaagctgggctatcagctgatggaaaaaacgctgggcgcatgccagaaacagtggccggacaaggcgttatacctgggcgcgcaggcgcatttgcaatcattctatggccattttggttttaccccggtcacggacatttacgacgaagacggcatcccacacatcggcatggcacgcgaagcgaaacaggcgcaatag

SEQ ID NO: 115659 - DNA, 918 bp, Enterobacter cloacae
atggaactgatttttctgggtacgtccgccggggtgccaacccgctcacgaaacgtgacggcgattctgctggatcttaagcatcctacccgcggtgggctgtggctgtttgactgcggcgagggtacgcaacatcagctgctgcatacctcataccacccggggaaagtggataaaatatttatcacccatctgcacggcgaccatctgtttggcctgccgggcctgctgtgcagccgttcgatggccggtaacgctaacccgctgaccatttatggccccgcgggtattcaggaattcgttgaaaccacgctgcgcctgagcggctcgtggaccgattatccgctggaggtgttagagatcggcgagggtctggtgttcgatgacggagattacctggtgcgcgcttacccgcttaaccatccggtggaatgctacggctatcgcgttgaggagcatgacaagcccggggcgctgaacgccgccgcgttgcaggctgatggggtgaaaccaggcccgctgttccagcgtctgaagcacggcgagaccgtcacgctggaagacgggcgcgtcatcaacggtcaggattacctcgccccaccgcagccgggcaaaaaactggctatttttggggataccgccccctgcccttcggcgctcaggcttgccgggggtgtggatgtgatggtgcatgaggcgacgctggaagcggcgatggaagaaaaagccaacagccgggggcacagctctacgcgtcaggcggcgcagctggcacgtgaggccggcgtccggaaactgattgttactcacgtcagctcacgctatgacgtccgcggcgctgaaagcctgctggcagagtgccgggaagtatttccggcatgcgagctggcggaagattttgctcaggtcagcgtttag

SEQ ID NO: 115660 - DNA, 1005 bp, Enterobacter cloacae
atggataatttccagaaagatattgatgacagggcaaacctgaccctgtccaaccgttttgaactgttgctgttccgtcttggcacctctctgaacgaaaataaatccgagctgttcggcatcaacgtattcaaattgcgcgaaattgtgccgatgccgaccttcaccaaaccggcgggaatgaagtctccgctgatggggatggtgaacattcgtgaccaggtgatcccggtgatcgatctggccgccgtcgccggctgcaaaccagccaccgggctgaacatcctgctgatcaccgaatatgcccgcagcgtgcaggcgtttgccgtagaatcggtggaaaacatcatgcgtctggactggaagcaggtgcacgccgcggaaaccgccgtcagcggtcgctacatcaccagcattgcctgtctggacgagaagaccgataccaacgatctggcgatggtgctggacgtggagcagatcctgtacgacatcaccccggcgaaccacgatctgcacgccacccatctggaaaccaccaaattcaacatcaagcctggctctgtcgcgattgttgcagaagattcaaaagtagcgcgctcaatgctggagaagggattgcaggcgatggagatcccggcccagctgcatatcaccggcaaagacgcgtgggagaaaatcactcagctggccgcgcaggcacaggccgagggcgttcccgttaccgataagattgccctggtattaaccgacctcgaaatgccggagatggacggatttacgctgacgcgaaaaatcaaatccgacccggtactgaaagatattccggtggtgatccactcgtctctttccggcaacgcgaacgaagatcatattcgcaaagtgaaggcggacggctatgtggcgaagtttgagctgaacgagctgtcgtcggtgattgaagaggtgctggaccgctcgatgaagaagattgacgggccgttgattagccgcaagcagctggcttag

SEQ ID NO: 115661 - DNA, 1458 bp, Enterobacter cloacae
atgacaataactccacaacaactgatcgcgctgctaccgctgctgatcgtcggattgacggtggtggttgtgatgctctccattgcgtggcgacgcaatcacttcctgaatgcgaccctgtccgttctgggtctgaacgctgcgttagtttccctctggtttgttggccaggcgggagcgatggacgtcacgccgctgatgcgcgttgacggttacgccatgctctacaccggtctggtgctgctggcgagcctggcaacctgtacctttgcgtacccgtggctcgaaggttacaacgacaacaaagaagagttttacctgctggtactgattgccgcactgggcggtattctgctggcgaacgcgaaccacctggccgcgctgttcctcggtattgagctgatctcactcccgctgttcggcctgattggttacgctttccgccagaagcgctctctggaagcggcaatcaagtacacgatcctgtctgctgccgcgtcgtcgttcctgctgtttggtatcgcgctgctgtacgcacagacgggtaatctctccttcatggcgctcggtaagagccttggcgacggcatgatgcatgagccgctgctgctggcgggtctgggcatgatgattgttggccttggctttaaactctcactggttccgttccacctgtggacgccagacgtataccagggtgcccctgcaccggtctcgaccttcctggcgacggcgagcaaaatcgctatcttcggtgtggtcatgcgtctgttcctgtacgccccggtgggcgacagcgaagcggtccgcgtggtgctgggcattatcgcgttcgtgtccatcatcttcggtaacctgatggcgctgagccagaccaacatcaagcgtctgctgggctactcctctatctcccatctgggttacctgctggtggcgctgattgcgctgcaaagcggtgagatgtcgatggaaactgtgggcgtctatctggccggttacctgtttagcagcctcggcgcgttcggcgtggtgagcctgatgtccagcccgtaccgtggcccggatgcggattccctgttctcctaccgtggtctgttctggcaccgtccgattctgtctgcggtaatgaccgtgatgatgctctctcttgcgggtatcccgatgacgctgggctttatcggtaagttctacgtgctggccgtcggtgtgcaggcgggtctgtggtggctgacggcgggtgtcgttatcggctccgcgattggtctctactactacctgcgcgtagcggtgagcctgtacctgagcgcgcctcagcagctcaaccgcgatgcgccgtctaactggcagtacagcgcggggggcattgtggtgctcatctccgcgctgctggtgctgatcttcggtatctatccgcagccgctgattgatatcgtgcagcgcgcgatgccgctgatgtaa

SEQ ID NO: 115662 - DNA, 1530 bp, Enterobacter cloacae
atgttactaccctggctaatattaattcccttcatcggcggcttcctgtgctggcagaccgaacgctttggcgtgaagatgccgcgctggatcgcgctgatcaccatgggattgacgctcgcgcttggtctgcaactctggttgcagggtggctactcactgacccagtccgcgggccttccgcagtggcagtctgagttcattctgccgtggatcccacgtttcggtattacgatccacctcgcgattgacggtctgtcgctgctgatggtggtgctgaccggtctgctcggcgttctggcggtactctgctcctggcgagaaatcgaaaaataccagggcttcttccacctgaacctgatgtggatcctgggcggcgtgatcggcgtgttcctggccatcgacatgttcctgttcttcttcttctgggagatgatgctggtgccgatgtacttcctgatcgcgctgtggggccacaaggcatccgacggtaaaacgcgtatcacggcggccaccaagttcttcatctacacccaggcgagtggtctggtgatgttgattgccatcctggcgctggtatttgtgcattacaatgcgaccggcgtgtggaccttcaactacgaagacctgctgaagaccccgatgtctcacggtgtggaatacctgctgatgctcggcttcttcatcgccttcgcggtgaaaatgccggtcgtaccgctgcacggctggctgccggacgcgcactctcaggcgccaacggcgggttccgttgacctggcgggtatcttgctgaaaacggcggcctacggtctgctgcgtttctccctgccgctgttcccgaacgcctccgcagagttcgcgccgattgccatgtggctgggcgtgatcggtatcttctacggtgcatggatggccttcacgcagtacgacatcaaacgtctgattgcttacacctccgtttcccacatgggcttcgtgctgattgccatctacaccggcagccagctggcataccagggcgcggtgatccagatgattgcgcacggcctgtctgctgccggtctcttcatcctgtgtggtcagctgtacgaacgtctgcatacccgcgacatgcgtatgatgggcggcctgtggggcaaaatgaaatggctgccggcgctctccatgttcttcgcggtggcgactctgggtatgccgggtaccggtaacttcgtcggcgagtttatgatcctgttcggcagcttcaacgtggtaccgacgatcaccgtcatctccacctttggtctggtatttgcctccgtgtactcgctggcgatgctgcaccgcgcttacttcggtaaagcgaagagtgaaattgctgcacaagaactgccggggatgtcgctgcgtgagctgttcatcatcctgctgctggtcgtactgctggtgctgttgggcttctatccgcagccgattctggatacctcgcactccgcgatgggtaacatccagcagtggtttgttaattctgcttctactacaaggccgtaa

SEQ ID NO: 115663 - DNA, 1842 bp, Enterobacter cloacae
atgaacatgcttgccttaaccattatttttccgctgattggcttcgtgctgctggcgttttctcgcggccgctggtctgagaatctgtctgccaccgtgggcattggctctatcggcctggctgcgctggtcacagcgtatgcgggtatcgacttctttaacaatggacgtcaggcctacagcgtaccgctgtggaactggatgtcggtcggtaacttcaacatcggtttcaacctggtgctggatggtctgtctctgaccatgctctccgtagttaccggcgtcggcttcctgatccacatgttcgcctcctggtacatgcgcggtgaagagggatactcccgcttcttcgcctacaccaacctgtttatcgccagcatggtggttctggtgctggccgataacctgctgctgatgtatctgggctgggaaggcgtgggtctgtgttcttacctgctgatcggtttctactacaccgatccgaagaatggcgcagcggccatgaaagcgttcgtcgtgacccgtgtgggtgacgtgttcctcgctttcgcgctgttcattctttacaacgaactgggcacgctaaacttccgcgaaatggtggaactggcgccggcgcacttcgaagcaggcaacaacatgctgtggtgggcaacgctgatgctgctgggtggcgctgtgggtaaatccgcgcagctgccgttgcagacatggctggccgacgcgatggcgggtccaacccctgtctccgcgttgattcacgccgcgaccatggtcaccgccggtgtctacctgattgcgcgtacccatggcctgttcctgatgaccccggaaattctgcatctggtgggtattgtcggtgcggttacgctggtgctggcaggctttgccgcgctggtgcagaccgacatcaaacgcgtgctcgcgtactccaccatgagccagattggttacatgttcctggcgctgggcgttcaggcgtgggacgcggccattttccacctgatgacgcacgcgttctttaaagcgctgctgttcctctcatccggttcggtgattctggcctgccaccacgagcagaacatcttcaaaatgggcggactgcgtaagtccatcccgctggtttatgtctgcttcctggtaggcggcgcggcgctggcggcactgccgctgatcaccgcgggcttcttcagtaaggacgaaatcctggcgggcgccatggcgaatggtcatatcaatctgatggttgcgggtctggtcggtgcgtttatgacctccctgtacaccttccgtatgattttcatcgtcttccacggtaaagaacaaattcacgctcacgcagggaaggggattacccaccacctgccgctgattgtgctgctggtcctgtccaccttcgttggcgcgatgattgtgccaccgttgcagggcgtactgccggcgacaaccgagcttgagcacggtcgcgttctgacgcttgaaatcacctccggcgtagtggctatcgcgggcatcctgattgccgcatggctgtggctgggcaaacgcacgctggtgactgccgttgccaacagcgcgccgggccgtctgctgggcacctggtggtacaacgcatggggcttcgactggctgtacgacatgatcttcgtgaagccgttcctgggcattgcgtggctgctgaagcgcgatccactgaacagcctgatgaatatcccggcgatcctctctcgctttgcaggtaaaggcctgctgttcagcgagaacggttatctgcgctggtatgtggcgtccatgagcatcggtgcggttgtcgtactggcgctgctgatggtgttgcgttga

SEQ ID NO: 115664 - DNA, 303 bp, Enterobacter cloacae
atgatccccttaacacatggactgatcctcgctgcgattttattcgttctgggcttaaccggtctggttatccgccgcaatctgctgtttatgctgatcggtctggaaatcatgatcaacgcttccgcgctggcctttgtggtcgccggtagctactggggccagaccgatggtcaggtgatgtacattctcgccatcagcctcgcggctgctgaagcgagtattggcctggcgctgttgctacagctccatcgtcgccgccagaacctgaacatcgattcagtaagtgagttgcgtggatga

SEQ ID NO: 115665 - DNA, 555 bp, Enterobacter cloacae
atggaattcgctttttatatctgtggccttatcgccatcctggctacgctgcgagtgatcacgcacaccaatccggtgcatgcgctgctgtatttaatcatttcgctgctggctatttccggggtgttctttgcgctgggcgcgcacttcgctggtgcgctggaaatcatcgtctacgccggggccatcatggtgctgtttgtgttcgtggtgatgatgctgaacctgggcggctctgaaattgagcaggaacgtcagtggttaaaaccgcaggtgtggattggtccggcaattttgtcggccatcatgctggcggtgattgtttacgccattctgggcgtcaacgaccagggtatcgacgggacgccaatcagcgcgaaagctgtgggtatcaccctgtttggtccgtacgttctggcggttgagctggcctcaatgctgctgctggcgggtctggttgtggccttccacgttggccgcgaagagcgtgtcggcgaggtgctgagcaaccgcactgacgaccgcgcgaaaagaaaaacggaggaacgcgcatga

SEQ ID NO: 115666 - DNA, 543 bp, Enterobacter cloacae
atgaccttaaaagaattattggtaggtttcggcacccaggtacgcagtatctggatgatcggcctgcatgcgtttgccaaacgcgaaacccggatgtacccggaagagccggtatatctgccgccgcgctaccgtggacgtatcgtgctgacgcgcgacccggacggttccgagcgttgcgttgcctgtaacctgtgtgcggtagcgtgtccggtgggctgtatctctctgcaaaaagcagagacggtagacggccgctggtaccctgagttcttccgcatcaacttctcacgctgcattttctgcggtctgtgtgaagaagcgtgcccaaccacggcgattcagctgactccagacttcgagctgggtgagtacaagcgtcaggatctggtgtacgagaaagaggatctgctgatttccggtccgggcaaatacccggaatataacttctaccggatggcgggtatggcaatcgacggcaaagataaaggcgaagcagagaacgaagctaagcctatcgacgtcaagagcctgttaccgtaa

SEQ ID NO: 115667 - DNA, 978 bp, Enterobacter cloacae
atgagttggttaacgccggatcttatcgacatcctgctgagcattctgaaagcggttgtgattctgctggtggtcgtcacctgcggcgcgttcatgagctttggtgaacgtcgtctgctcggtctgttccagaaccgttacggaccgaaccgcgtgggctggggtggttcactccagctggtcgcggacatgatcaagatgttctttaaagaggactgggttccacgcttctcggaccgcgtgatctttacgctggcgccgatgatcgccttcacctcgctgctgctggcgtttgcgatcgttccggtcagcccgacctgggtggtggctgacctgaacatcggcattctgttcttcctgatgatggcaggcctcgcggtttacgcggtgctgttcgcaggctggtccagtaacaacaaatactcgctgctgggtgcgatgcgtgcttccgcgcagacgctgagctacgaagtgttcctgggtctctccctgatgggcgtggtggcgcaggccggttcatttaacatgaccgacatcgtcaacaaccaggccgacatctggaacgttatcccgcagttctttgggtttattacctttgccatcgcgggcgtggcggtgtgtcaccgtcacccgtttgaccagccagaagccgaacaggaactggccgacggttaccacattgaatattccggtatgaagttcggtctgttcttcgtgggcgagtacatcggtatcgtcaccatttccgcgttgatggtaacgctgttctttggtggctggcatggcccgttcttaccgccgttcatctggttcgcgctgaaaaccgcgttcttcatgatgatgttcattttgattcgcgcagcgttaccgcgtccgcgttatgaccaggtaatgtccttcggctggaaagtgtgcctgccgctgacgctcgtcaacttgttggtaacggcggctgtcattctctggcagcagccataa

SEQ ID NO: 115668 - DNA, 2724 bp, Enterobacter cloacae
atggctacgattcatgtagacggcaaagaatacgaagtcaacggggcggacaacctgctggaagcttgtctgtctcttggcctcgatattccgtacttttgctggcatccggcgctgggcagcgtcggtgcttgccgccagtgtgcggtgaagcaatatcaaaacgcggaagacacgcgtggtcgcctggtgatgtcctgtatgacgccagccgccgaaggcacctttatttcgattgatgacgaagaagccaaacagttccgcgaaagcgtggtggagtggttgatgaccaaccacccgcacgactgtccggtgtgtgaggagggcggtaactgccaccttcaggatatgaccgtcatgaccggtcacagcttccgtcgctatcgctttaccaagcgtacccaccgtaaccaggatctggggccgttcatctctcacgaaatgaaccgctgcatcgcctgctaccgctgcgtgcgttactacaaagattatgcagacggacaggatctgggcgtatatggcgcgcatgacaacgtctacttcggtcgtccggaagacggtacgctggaaagcgaattctccggtaacctggtagaaatctgtccgaccggcgtattcacggataaaacccactctgaacgttacaaccgtaaatgggacatgcagtttgcgccaagcatctgccagcagtgctcccttggctgtaacaccagcccgggtgaacgttacggcgaactgcgtcgtatcgaaaaccgttacaacggtacagttaaccactacttcctctgcgaccgcggtcgtttcggctatggctatgtgaacctgaaagaccgtccgcgtcagccggttcagcgccgtggcgatgacgtcattaccctgaacgctgagcaggcgatgcagggcgcggcagatattctgcgtcagtcgaagaaagtgatcggcatcggttccccgcgcgccagcatcgaaagcaacttcgcgctgcgcgagctggttggggcggaaaacttctataccggtatcgcccagggcgagcaggaacgtctccagctggtgctgaaagtgctgcgtgaaggcggcattcatacgcctgcgctgcgcgaaatcgaatcttatgatgcggttctggtgctgggtgaagacctgacgcagactggtgcacgcgcggctctggcggttcgtcaggcggtgaaaggcaaagcacgtgaaatggcagcggcgcagaaagtggctgactggcagattgcggccattcttaacatcggccagcgcgcgaagcatcctctgtttgtgactaacgtcgacaacacccgtctggacgatatcgccgcgtggacctactgcgcgccggttgaagatcaggcgcgcctcggctttgccattgcccacgcgctggacagcagctcgccggccgttgaactggatcgtgacctgcaaaacaaggtcgacgtgattgttcaggcgctggcgggggcgaagaaacctctgattatttccggtaccaacgccggtagcgctgaaatcattcaggccgcagcgaacgttgccaaagccctgaagggccgcggcgctgacgtcggtgtgactatgattgcccgtgcggtgaacagcatcggtctgggtatgattggcggcggctcgctggaagacgcgttaagcgaactggaatccggtgccgctgacgccgttgtggtgctggaaaacgacctgcatcgccatgcttctgccgctcgcgttgacgccgcgctctccagagcgccgctggtgatggttatcgaccatcagcgcaccgcgatcatggacaaagcgcacctggtgctctctgcggcaagcttcgcagaaagcgacgggacggtgatcaacaacgaaggccgcgcccagcgtttcttccaggtttatgacccggcctactacgacagcaacaccgtgatgctggaaagctggcgctggctgcactctctgcacagcaccgtgcagagccgtgaagtggactggacgcagctcgaccacgttattgacgcggttgttgagaaactgcctcagctggcgggcattaaagacgccgcgcctgacgcaagcttccgcattcgcggccagaaactggcgcgtgagccgcaccgctacagcggtcgtaccgcgatgcgcgccaacatcagcgtgcacgaaccgcgtcagccgcaggataaagacaccatgtttgccttctcgatggaagggaacaaccagccgtctgcgccgcgttcgcaaatcccgtttgcatgggcaccgggctggaactccccgcaggcatggaacaagttccaggctgaagtgggcggtcacctgcgccacggcgatccgggcgtgcgtctgattgaagcctccgaaaccggtctggacttcttcaccaccgttccggcgagcttccaggcgcaggaaggtcactggcgtattgcaccgtactaccatctgttcggtagcgacgaaatgtcccagcgttctccggtattccagcagcgtatgccgcagccgtacatcaagctcaacccggcggatgccgcgaagcttggcgttaacgcgggtgcgaacattgcctttagctacgacggccagacaatcagcctgccgctgattatttctgaacgcctgtcagcagggcaggtgggtctgccgatgggtatgcctggcatcgcgccggtcctggcgggtgcgcatcttgataaccttcaggaggcaaaagcatga

SEQ ID NO: 115669 - DNA, 1338 bp, Enterobacter cloacae
atgaaaactgtaattcgtactgctgagacgcatccgctgacctggcgtctgcgtgatgacaaacagccggtctggctcgacgaatatcagagcaaaaacggctatgccggcgcgcgtaaagcccttggcggcatggcgccggacgacatcgttaacgcggtgaaagagtctggcctgaaaggccgcgggggcgcgggcttctccaccggtctgaagtggagtctgatgccgaaagatgaatccatgaacatccgttacctgctgtgtaacgccgatgaaatggagccgggtacctataaagaccgcctgctgatggaacagctgccgcacctgctggtggaaggcatgctgatctccgcgttcgcgctgaaagcgtaccgtggctatatcttcctgcgcggtgaatacatcgaagcggctgaaaacctgcgtcgcgcgattgccgaagccactgaagccggtctgctgggtaaaaacatcctgggcaccgggtttgacttcgagctgttcgtgcacaccggtgccgggcgttatatctgcggtgaagaaaccgcgctgattaactccctggaaggccgccgcgcgaacccgcgctccaagccaccgttcccggcaagctccggcgtgtggggtaaaccgacctgcgtcaacaacgtcgaaaccctgtgcaacgtcccggcgatcctcgcgaacggcgtggagtggtatcagggcatctcctcaagcaaagatgccggtaccaagctgatgggcttctccggtcgcgtgaagaaccctggcgtctgggagctgccgttcggcaccaccgcacgcgaaattcttgaagactacgccggcggcatgcgcgatggcctgaaattcaaagcctggcagccgggtggggcagggacggacttcctgaccgaagcccaccttgacctgccaatggagttcgaaagcattggtaaagcaggcagccgtctgggtacggcgctggcgatggccgtcgaccatgagatcggcatggtatccctggtgcgtaacctggaagagttcttcgcccgcgagtcctgcggctggtgtacaccgtgccgtgatggtctgccgtggagcgtgaagatcctgcgtgctatcgaacgtggcgaaggccagcctggcgatatcgagacacttgagcaactgtgtcgattcttagggccgggtaaaaccttctgtgcccacgcaccgggcgccgtcgagccgctgcaaagcgcgattaaatatttccgcgacgaattcgaagcaggcatcaagcagccgttcagcaatacccattcgatcaatggtattcagccgaacctgctgaaagcgcgctggtaa

SEQ ID NO: 115670 - DNA, 501 bp, Enterobacter cloacae
atgcacgagaatcaacaaccacaaaccgaggcttttgagctgagtgaagcagagcgtgccgccattgagcacgagatgcaccactacgaagacccgcgtgcggcgtccattgaagcgctgaaaatcgtacagaaacagcgtggttgggtgccggatggggcgatctacgagatcgcaaaagtgctgggcattccggcaagtgacgtagaaggcgtagccacgttctacagccagatcttccgtcagccggtaggccgccatgtgatccgctactgtgacagcgtggtctgccacatcaccggttatcagggcattcaggctgcgattgagaagaaactcaatatcaagccgggccagaccaccttcgacggacgctttactctgctgccaacctgctgcctgggtaactgcgacaaggggccgaccatgatgattgatgaggacactcacagccatctgacgccggaagcgattcctgacctgctggagcagtacaaatga

SEQ ID NO: 115671 - DNA, 1803 bp, Enterobacter cloacae
atggtgaacaatatgaccgacttaaccgcgcaagaagccgcctggcagacccgggatcatctcgatgaccccgtcattggcgaactgcgcaaccgttttgggccggatgcttttactgttcaggccacccgcaccggggtacccgttgtttgggtgaagcgtgagcaattactggaagttgtcgatttcctcaagaaattgccaaaaccttacgtcatgctgtttgacttacacggcatggacgaacgtctgagaacgcaccgccagggtctccctgctgcggatttttccgttttctaccacctgatctcaatagaccgcaacacggatatcatgctcaaggtggcattgtctgaaaacgacatgcatctgccgacgatcaccaaacttttcccgaacgccaactggtacgagcgtgaaacctgggaaatgttcggcatgaccttcgacggtcacccgcatctgacgcgcatcatgatgccgcagacctggaccggccacccgctgcgtaaagactacccggcacgcgccaccgaatttgacccgtttgagctgaccaaagccaagcaggatctggagatggaagcgctgaccttcaaaccggaagactggggcatgaagcgcggcaccgaaaacgaggacttcatgttcctcaacctcggtccaaaccacccgtctgcgcacggtgcattccgtattattcttcagcttgatggcgaagagattgtcgactgcgtgcctgacatcggctaccaccaccgtggtgccgagaagatgggcgagcgtcagtcctggcacagctacattccgtacaccgaccgtatcgaatacctcggcggctgcgtgaacgaaatgccatacgtgctggccgttgagaagctggcaggcatcaccgtcccggatcgcgttaacgtgattcgcgtgatgctgtctgaactgttccgtattaacagccacctgctgtacatctccacgttcattcaggacgtcggcgcgatgacgccggtcttcttcgcctttaccgaccgtcagaaaatctacgatctggtggaagcgattaccggtttccgtatgcacccggcctggttccgcatcggcggtgtggcgcacgatctgccgcgcggctgggaccgtctgctgcgtgaattcctcgactggatgccaaaacgtctggcgtcttacgagaaagccgcgctgcgtaactccatcctgaaaggccgttcccagggcgttgctgcctacggcgcgaaagaagcgctggagtggggaaccacaggtgcaggtctgcgtgcgaccgggattgatttcgacgtgcgtaaagcccgtccttactctggttacgagaacttcgactttgaagtcccggtgggcggcggcgtatccgactgctatacccgcgtgatgctgaaagtggaagagctgcgccagagcctgcgcatcctagagcagtgcctcaacaacatgccggaaggcccgttcaaggcggatcacccgctgacgacgccgccaccgaaagagcgcacgctgcaacatatcgaaaccctgatcacccacttcctgcaagtttcctggggcccggtcatgccggcacaggaatccttccagatgattgaagcgaccaagggtatcaacagctactacctcaccagcgacggcagcaccatgagctaccgcacccgcgtgcgtacgccaagcttcgcacacttgcagcagatcccggccgccattcgcggcagtctggtctccgacctgattgtgtatctgggtagtatcgattttgttatgtcagatgtggaccgctaa

SEQ ID NO: 115672 - DNA, 675 bp, Enterobacter cloacae
atggattatacgctcacccgcatagatcctaacggtgagaatgaccgttaccccctgcaaaaacaggagatcgtaaccgaccccctggagcaagaagtcaacaaaagcgtgtacatgggcaagctcgaacatgccatgcacgacatggtcaactggggtcgtaagaactccatctggccatacaactttggcctttcttgctgctacgttgaaatggtgacgtcattcactgcggtgcatgacgttgcgcgttttggggccgaggtactgcgtgcttctccacgtcaggctgacctgatggtggtggccgggacctgctttaccaagatggcaccggttattcagcgtctttatgaccagatgctggagccaaaatgggttatctccatgggcgcatgtgcaaactccggcggtatgtacgacatttattccgttgtgcagggcgttgataagttcattccggtggatgtgtacatcccgggctgcccgccgcgtccagaggcctatatgcaggcgctgatgctgctccaggagtcaattggtaaagaacgccgcccgctttcatgggttgttggcgatcagggtgtctatcgcgcgaacatgcagtctgagcgcgagcgtaaacgtggtgaacgtattgccgtcaccaacctgcgtacgcctgacgaaatttaa

SEQ ID NO: 115673 - DNA, 441 bp, Enterobacter cloacae
atgagtatgtcaacatccacagaagtcatcgctcatcactgggcattcgcaatctttcttattgtagccattggcctgtgctgcctgatgttagtcggcggctggttcctgggcggtcgcgcccgcgcaaggcacaaaaacacacctttcgaatcaggtattgattcagtaggtaccgctcgcttacgcctgtctgccaagttctacctggtagccatgttcttcgtcatttttgacgtggaagcgctttacctcttcgcgtggtctacctccattcgcgaaagtggttgggtgggctttgtcgaggccgcaattttcattttagtgttactggccggtctggtttatctggtgcgtattggcgcgctggactggacacctgtgcgttcacgccgtgaacacatcaacccggaaaacagtatctctaatcgtcagcagtaa

SEQ ID NO: 115674 - DNA, 915 bp, Enterobacter cloacae
atgaatctcgacctcgatctgctgagaacgtttgttgcggtcgccgatctcaacacttttgcagcagctgctgccgccgtttgccgtacccagtccgccgtgagtcagcaaatgcagcggctggaacaactggttggtaaagagctttttgcgcgtcatggacgtaataagcttttaacagaacatggtattcagcttctgggttatgccagaaagatactgcgctttaatgatgaagcctgtatgtcattaatgtttagcaaccttcagggagtgttaacattaggggcgtcagatgaatcagcagataccattttacccttccttctcaaccgaattagctcggtttatccgaagcttgccctggacgttagcgttaaacgcaatgctttcatggttgagatgctgaaagaaaacgaggttgacctggtggtcacgacgcatcgacctggccagtttgacagcctgacgctgcgtacttctccaacgcactggtactgtgccgcggagtatgtattgcagaaaggtgagccgatacccctggtcctgctggacgatccgagtccgttccgcgatatggtgctggctgcgctcaacgaagccggtattccatggcgcctggcgtacgtggcgtcaaccttgcccgcagtgcgagcggcggtgaaggccgggcttggcgtaacggcccgtccggtggagatgatgagccccgatctgcgtgtgctgggtcaatccgagggactcccgtcgttgccggatacggagtacctgctgtgccataacgccgccagcaacaacgagctggcaaaagtggtgttcgaggcaatggaaaactaccacaatccatggcagtacgcgcctgttactcccgaaggaggggacgactccctgatcgtggaaggggattttgagtga

SEQ ID NO: 115675 - DNA, 1215 bp, Enterobacter cloacae
atgtcccctatcgaaaaatccagcaagctcgacaacgtctgttacgacatccgtggcccggtactcaaagaggcaaaacgccttgaagaggaaggcaataaggttctgaaactcaacatcggcaaccccgcgccatttggttttgaagcgccggatgagatcctggtggatgtgatccgtaacctgcccactgcacaaggctactgcgattcaaaagggctttattccgcccgtaaagccatcatgcagcactatcaggctcgcggtatgcgcgacgtcaccgttgaagatatctacattggcaacggtgtctcggagctgatcgttcaggcgatgcaggcgctcctgaacagcggcgatgaaatgctggttcctgccccggattatccgctgtggacggctgcggtgtccctgtccagcggtaaagcggtgcactacctgtgcgacgaatcctctgactggttcccggatctggatgatattcgcgccaaaattaccccgcgcacccggggtatcgtgatcattaacccgaataacccgacgggtgcggtctattcaaaagagctgctgatggagatcgtcgagatcgcccgccagcacaacctgatcatctttgccgacgagatttacgacaagatcctgtacgacgcggcgcagcaccactctatcgccgcgctggcgcccgatctgctgacggtcacctttaacggactgtctaaaacttaccgcgttgccggtttccgtcagggctggatggtactgaacggtccgaaaaaacatgcgaaaggctacattgaagggctggagatgctggcatccatgcgtctgtgcgccaacgtaccggcgcaacatgcgatccagacagcactcggcggctatcaaagcatcagcgagtttatcgttccaggcggccgcctgtatgaacagcgcaaccgcgcatgggaattgattaatgatattccgggcgtctcctgcgtgaagcctaacggcgcgctgtacatgttcccgaaaatcgacgcgaagcgcttcaatattcacgacgaccagaaaatggtgctcgacttcctgttgcaggaaaaagtgctgctggttcaggggacggcgtttaactggccgtggccggatcacgtgcgtatcgtcaccctgccgcgcgaagacgatctcgagatggccatcagccgcttcgggcgcttcctctccgggtaccatcagtaa

SEQ ID NO: 115676 - DNA, 600 bp, Enterobacter cloacae
atgagtcagagtcatttctttgcccacctctcccgcctgaaactcatcaaccgctggccgctgatgcgcaatgtgcgtactgaaaatgtgtctgagcacagtttgcaggttgccatggtcgcgcacgcgctggccgcgattaaaaaccgcaaattcaacgggcaggtgaatgccgaacgtatcgccctgctggcgatgtatcacgatgcatcggaagtgctgaccggggatctgcctacgccggtgaaatatttcaactcgcagattgcccaggaatataaggccattgagaagattgcccagcagaagctgatcgacatggtgcctgaagagctgcgcgatatcttcgggccgctgatcgatgagcatcagtatacggaagaggagaaatccctggttaagcaggccgatgcgctgtgcgcctacctgaagtgtctggaagaactgtccgccgggaataacgaatttttactggcaaaaacgcgtctggaaaaaacgctggaatctcgtcgcagcgaagagatggactactttatgcgcgtgtttgtgccgagcttccatttgtcgctggatgagattagccaggattcgccactctga

SEQ ID NO: 115677 - DNA, 1833 bp, Enterobacter cloacae
gtgaacggtgaactgatttgggtcctgagcctgctgttaatcgccatcattctttttgccacgggcaaggtgcgcatggatgccgtcgccctgtttgtgattgtcgcattcgttctgagcggtaccctttccctgccggaagccttttccgggtttagcgatcccaacgttattttgattgccgccctgtttattattggcgacgggctggtacgcaccggcgtggcgacgatgatggggtcgtggttggttaaggtggcgggcagcagcgaaaccaaaatgctgatttacctgatgctgacggtcgccgggctgggcgcgtttatgagctctacgggcgtcgtggccatctttattccggtcgtgctgagcgtctgcatgaggatgcagatctccccgtcgcggctgatgatgccgttgagcttcgccgggctcatcagcggcatgatgacgctggtcgcaacgccgccgaacctcgtcgtgaacagcgaactgatccgtgaggggcttgaggggtttagctttttcagcgttacgccgatcgggctggtggtactggtgatgggcattatctatatgctattgacccgtttcgcgctgaaaggggagaagcaggataaagccaaagagggctggaagcggcgctctttccgcgatctgattaaagagtatcgtctgaccgggcgtgcccgacgtctggctatccgcccgggatcgcctatggtggggcagcggctggatgaccttaagctacgcgaacgctatggcgcgaacgtcatcggggttgagcgctggcgtcgttttcgccgggtgatcgttaacgtgaacggggtgtcagagtttcgcgcgcgtgacgtcctgctgattgatatgtccaccgcggacgtggatctgcgcgagttttgtagcgaacagctgctggagccgatggtgctgcgcggtgagtatttctccgaccaggcgctggatgtgggaatggccgaggtgtccctgatcccggaatcggagttattgggtaaaaccgtgcgtgaaatcggctttcgtacccgctatggcctcaacgtggtgggcctgaagcgcgatggcgtagcccttgaaggggcggtggtggatgagccgatcctgctgggggatatcttcctcgtggtcggcaactggaaactgattagccagctcgggcagaaaggccgcgattttgtggtgctgaatatgccgattgaagagaacgatgcatcaccggcgcacagccaggcgccccatgcgattttttgcctggtattgatggtcgcgctgatgctgacggacgagatccctaacccggtggcggcgataatcgcctgtctgttaatgggcaaattccgctgtattgacgccgaaagcgcttacaaagcgattcactggccgagcatcattctcatcgtcgggatgatgcccttcgccctggcgctacagaaaaccggcggggtggatttgatcgtgaaaggcctaatggacgcgggcgggggatatggtccgtacctgatgatggtttgcctgttcgtcatgtgtgccaccatcggtttgttcatctccaataccgcaacggcggtgctgatggcgcccattgcgctggcgatggcaaaatcgatgggcgtttcgccgtatccgtttgcgatgatcgttgcgatggcggcgtccgcggcatttatgacgccggtctcttccccggtcaatacgctggtgctggggcccgggaattataggttcagtgatttcgtgaagctgggtgtgccgttcaccgtgctggtgatggtggtgtgcgtggtattgataccggtcctgtttccgttctga

SEQ ID NO: 115678 - DNA, 660 bp, Enterobacter cloacae
gtgcagtgtaaaggttttctgtttgatctggacggtacgctggtggattcgctaccggtggtggagcgctcgtggtgccactgggccgaccggcatggcatcgaccatcaggacgtactgaatttcatccatggcaaacaggccattacctcattgcggcacttccttgcgggacgttctgaggaagagattcaggcggagttccgctatcttgagcagattgaagctaccgataccgaaggcatcaccgcgctgcccggtgcgcgtgaactgcttgagcacctgaatgaagcgcagatcccgtgggctatcgtcacctccggctcggttcccgtcgcgcatgcccgtcataaggcggcaggtttaccgacgccggacgtcttcattaccgctgagcgcgtgaagcgcggcaagcctgaaccggatgcgtttctgctcggcgcagaactgcttggccttgcgccagcggagtgcgtggtggtggaagacgcggcggcaggcgtgctggccgggctgaacgccggaagccacgtcattgccgttaacgtcccggcgggttccccccggctggaagaggcggatttcgtgcttaacaccctgaccgccatcgacgtctcgaaggcgtcagacggagttgtaaccgtctcgctaaaaatgtaa

SEQ ID NO: 115679 - DNA, 495 bp, Enterobacter cloacae
atggaaatgacccatgctcaacgtctgattttgtctaaccagtacaagatgatgactatgcttgatcccgataacgctgcgcgctacagccgcctgcaaaccattgttgaacgtggttttggcttgcagatgcgcgaactggatcgcgaatttggcgaactgaaagaggaaacctgccgtatcgttatcgacatcatggagatgtaccatgcgctgcatgtgtcctggaccaatctgaaggaccagcagaccattgacgagcgccgcgtgacgttcctgggctttgatgctgcgacggaagcgcgctatctgagctatgtacgctttatggtgaataccgaagggcgttacacccattttgatgcgggtacgcacggcttcaacgcccagaccccgatgtgggataagtatcaacgtatgctgagcgcgtggcacgcctgtccgcgtcagtaccatttaagcagcaacgaaattcaacaaatcattaatgcctga

SEQ ID NO: 115680 - DNA, 456 bp, Enterobacter cloacae
atgtcgacacccgaaatcccgtccgtgaacttttttagtctgtttcgtcggggacagcattacgcaaagacatggccgatggaaaagcgcctcgcgcccatgtttattgaaaatcgcactattcgcgccacgcgctatgcgattcgctttatgcccccgattgccgtttttaccctgtgctggcagatagcgttaggtggacagcttggccctgccgtcgcgacggcgctttttgcgttaagcctgccgatgcaggggctatggtggttaggcaaacgttccgtcacgccacttccgccttctgttttacactggttttatgaagtgcgtggaaaactggaggaggcgggccaggcgctggcaccggttgaaggcaagccagactatcaggcgctggcggataccctcaagcgtgcgtttaaacagcttgataaaacattcctcgatgacttgtga

SEQ ID NO: 115681 - DNA, 1203 bp, Enterobacter cloacae
atgtcgagtaagttagtactggttctgaactgcggtagctcctcactgaaattcgccatcatcgatgcgctcaacggtgacgagtacctctctggtttggccgaatgtttccatctgcctgaagcacgtatcaagtggaagatggacggcagcaaacaagaagcggctttaggtgcaggcgccgctcacagtgaagcgctgaactttatcgttaacactattctggcacaaaaaccagaactgtctgctcagctgaccgcaattggtcaccgtatcgtccacggcggcgaaaaatacaccagttccgtggtaatcgacgactccgtgatccagggtatcaaagactctgcgtctttcgcaccgctgcataacccggctcacctgatcggtatcgctgaagcactgaaatccttcccgagtctgaaagataaaaacgtggccgtgtttgataccgcgttccatcagaccatgccggaagagtcttacctctatgccctgccatacagcctgtacaaagagcacggcgtccgtcgttacggcgctcacggtaccagccacttctatgtgactcaggaagccgcaaaagtgctgaacaagccggttgaagaagtcaacatcatcacctgccacctgggcaacggtggttctgtttccgctatccgcaacgggaagtgtgttgacacctctatgggtctgaccccgctggaaggtctggtgatgggtacccgttccggtgatatcgacccggcgatcatcttccacctgcacgacaccctgggcatgagcgttgacgacatcaacaaaatgctgaccaaagagtctggcctgctgggcctgaccgaggtcaccagcgactgccgttacgttgaagacaactacgcagaaaaagctgacgctaaacgtgcaatggacgtttattgccaccgtctggcgaagtacatcggttcttacaccgcgctgatggaaggccgtctggatgctgttatcttcaccggcggtatcggtgagaacgcggcaatggtacgtgaactgtccctgggcaaactgggcgttctgggcttcgaagttgatcatgagcgtaacctggctgcccgcttcggcaagtctggcttcatcaacaaagaaggcacccgccctgctatcgttatcccaactaacgaagagctggtcatcgcgcaagacgcgcaccgcctgactgcctga

SEQ ID NO: 115682 - DNA, 2142 bp, Enterobacter cloacae
gtgtcccgtactattatgctgatccctaccggaaccagcgtcggcctgaccagcgtcagcctcggcgtgatccgcgctatggaacgcaaaggcgttcgtctgagcgtctttaagcctatcgcccagccacgtgccggtggcgatgcgccagaccagaccaccaccatcgttcgcaagaactccaatctgccagcggctgaaccgctgaagatgagccacgttgaatctctgctctccagcaaccagaaagacgtgctgatggaagagatcattgccaactaccacgcaaacgcgcaggacgcggaagtggtgctggttgaaggcctggtcccgacccgtaaacaccagtttgcccagtctctgaactttgaaatcgcgaaaaccctcaacgcagagattgttttcgtgatgtctcagggcacggataccccagagcagctgaaagagcgtatcgaactgacgcgcagcagcttcggcggtgcgaaaaacaccagcatcaccggcgtgattgttaacaagctgaacgcgccagtagatgagcagggccgtacgcgtcctgacctgtccgaaatttttgacgactcttccaaagcgaaagtcattaaagttgacccggctaagttgcaggattccagcccgctgccagttctgggcgcggtgccatggagcttcgatctgattgccacccgtgcaatcgatatggcgcgccacctgaacgccaccgtgatcaacgaaggcgatatcaacacccgccgcgtgaagtccgtaactttctgcgcacgtagcattccacacatgctggagcacttccgtgcaggttccctgctggtaacctccgcagaccgtccggacgtgctggttgcagcctgtctggccgcgatgaacggcgtggagatcggcgcgatcctgctgaccggtgcctacgagatggacccacgcgtaagcaagctgtgcgaacgtgcgttcgccactggcctgccagtcttcatggtgaacactaacacctggcagacctccctgagcctgcaaagcttcaacctcgaagtgccggttgatgaccacgagcgtatcgagaaagttcaggaatacgttgcgggctacatcaacgcagactggatcgaatccctgacggcgacctccgagcgcagccgtcgtctgtctcctccagccttccgttaccagctgaccgagctggcgcgtaaagcgggcaaacgcgtggttctgccagaaggcgacgaaccacgtaccgttaaagcggcagccatctgtgcagagcgcggtatcgcgacctgtgtgctgctgggtaacccggatgagatcaaccgcgttgcggcgtctcagggcgttgagctcggcgcgggcatcgaaatcgttgatcctgacgtggtccgcgaaagctacgttgcccgtctggttgagctgcgtaagaacaaaggcatgaccgaagccgttgcgcgcgagcagctggaagacaacgtggtgctgggtacgctgatgctggagcaggacgaagttgacggtctggtttccggtgcggttcacaccaccgcgaacaccatccgtccaccgttgcagctgatcaaaactgcaccgggcagctctctggtctcctccgtgttcttcatgctgctgcctgaacaggtttacgtttacggcgactgcgcgatcaacccggacccaaccgcagagcagctggcagaaatcgctatccagtctgcggactccgcgattgccttcggtatcgaaccacgcgtcgcgatgctctcctactccaccggcacctctggtgcaggtagtgacgtagagaaagtccgtgaagcgacccgcattgcacaggaaaaacgtccggatctgatgatcgacggcccgctccagtacgatgccgcggtaatggctgacgtggcgaaatccaaagcgccgaactcgccggttgcaggtcgcgctaccgtgttcatcttcccggatctgaacaccggtaacaccacctataaagcggtacagcgttcagcagacctgatctccatcgggccaatgctgcaaggcatgcgcaaacctgtgaacgacctgtcccgtggtgcgctggttgacgatatcgtctacaccatcgcgctgaccgcgatccagtcttcgcagcagcagtaa

SEQ ID NO: 115683 - DNA, 954 bp, Enterobacter cloacae
atgattaaggttgcaccgacaggacagaaagatgccgttgagatgcgtaaggtctacgcgggttttgtggcaaaacagattgaggccgggagcgagatcattgcgctcgaagcggatctgatgagttcgatggcgatggacggcgtagcgcgtgattatccacagcacgttatcaactgcggcattatggaggccaacgtgattgggacggccgccgggctgtcgctcaccggacgtaagccgttcgtccatacctttaccgcctttgccagccgtcgctgcttcgaccagctgtttatgtccctggactaccagcgcaataacgtgaaggtgattgcctcggatgcgggcgtgacggcctgccacaacggcgggacgcatatgtcttttgaggatatgggcatcgtgcgcggtctggcgcattcagtggtgcttgaggtgaccgatgcggtgatgttcgaagatgtgctgcgtcagcttatcgacctggaaggcttttactgggtaaggaccatccgtaaacaggcgccgagcgtgtatgccccggggtcaaccttcaccatcggcaagggcaacgtgctgcgcgagggaaccgatattaccctgattgctaacggcattatggtggcggaagcgctggaggcggcgcgccagctggagcaggagggggtaagcgcagcggtcatcgacatgtttaccctgaagcccatcgatcggatgctggtgaaaaactatgccgagaaaaccgggcgtattgtgacctgcgaaaatcacagcattcacaacgggctggggtcggcggtggcggaagtgctggtggaaacctgtccggtgcctatgcggcgggtgggggtgaaggaacggtatggtcaggtgggtacgcaggacttcttgcagaaggagtatggcctgacggcacatgacattgtgtcggcggcgcgggagctgctgtaa

SEQ ID NO: 115684 - DNA, 831 bp, Enterobacter cloacae
atgaatgagaatgaaataaccgacctggcgcgtcagatccgccttgagacgctgaaatcccttacgcagctgggttttggtcactacggcggcagcatgtcagtcgttgaaacgctggccgttctgtacggcgcggtaatgaaaattgacccggccgatccggactggccagagcgcgattactttgtgctgtcgaaaggccatgcggggccggcgctgtacagcacgctggcgattaagggctacttcccgattgaagagttgagcacgctgaaccagaacgggacgcgtctgccaagtcacccggatcgcctgaaaacacgcggcgtggatgccaccaccggttcactggggcaggggatctccatcgctggcggcatggcgctgtcgcacaagctggcaggaaggccaaaccgggtgttttgcatcgttggcgacggagaactgaatgaagggcagtgctgggaagccttccagtttatcgctcaccatcgactgaacaacctgacggtattcgtggactggaacaaacagcagctcgacggcgagctggacgaaatcatcagcgccttcgacctggaaggcaaattccgcgcctttggttttgacgtggtgacggtgaaaggggatgacattccggcgctgctggaggtgaccgcgccgatccctgaggccgatgcgcgtccgcgggtggtgatcctcgacagcatcaaagggcagggggtgccatatctggaacagctcagcaactcgcatcacctgcgattaaccgaggagagcaaagcggcgcttaacgagacgattcgccaactggaggcttcacatgattaa

SEQ ID NO: 115685 - DNA, 1392 bp, Enterobacter cloacae
atgtttatccttgaaacgctgaatttcgttgttgatattttaaaagtcccttcagtgctggtcgggttaattgctctgattggtcttgtggcgcagaaaaaagccttttcggatgtggtaaaaggcacaattaaaaccattctcggctttattgtactgggcggcggcgcaactgtgctggtgggctctttaaatccgctcggcggtatgtttgagcacgcctttaatattcagggcattattcccaacaatgaagctattgtctcgattgccctggagaaatatggcgcttccaccgcgctcattatggccttcgggatggtggcgaatattattgttgcgcgctttacccgcctgaaatacatcttcctcaccgggcatcacaccttctacatggcatgcatgatcggcgtgatcctgacggttgcaggcttcgagggggtcgggctggtctttaccggttcgttgatcctcggcctgattatggccttcttcccggcgattgcgcagcgctatatgaagcgtattaccggcaacgatgagatcgccttcggtcatttcggcacgctgggctacgtgctgtccggctggattggcagcaaggtcgggaaaggctcgcgctccaccgaagagatgaacctgccgaagaaccttagcttcctgcgtgacagttcaatctccatctcccttaccatgatgattatctacctgatcatggcggtgagcgccggacgtgagtacgtggaggccaccttcagcggcggccagaactacctggtgtacgccatcattatggccatcaccttcgcggcaggcgtgttcatcatcttgcagggcgtgcgcctgattctggcggaaatcgtcccggcctttaccggcttctcggaaaaactggtgcccaatgcgcggcctgcgctggactgcccggtggtctacccgtatgcgccaaacgcggtgctgattggcttcctgtttagcttcctcggcgggattgtgggcttgttcatctgcggtcagtttagctgggtgctgatcctcccgggcgtcgttccgcacttcttcaccggcgcaacggcgggcgtgttcggtaacgccaccggtggacgccgcggggcaatgattggcgcctttgctaacggcctgctgatcaccttcctcccggtcctgctgctgcctgttctgggcgcaattggctttgcgaatacgaccttctcggacgctgattttggtgcggtcgggattgtgctgggcaacctggcacgcttcctgtcgccgcttgccatcaccggactggttgttgtgttgttcgcgctgctggtggcctacaacgtcttcgctaaaaacaaacctgccagcggtaacgcgcaggaaaaccccggagccaaatcatga

SEQ ID NO: 115686 - DNA, 273 bp, Enterobacter cloacae
atgaaaatcatggctatttgcggctccggcctgggcagcagttttatggtcgaaatgaatattaaaaaggtgctcaaaaaactggaaattgaggccgaagttgaacactccgatctctcctcggccacgccgggcgcggcggacctgtttgtaatggcgaaagacattgccgccagcgccagcgtgccggaaagccagctggtggtaatcaacaatatcatcgatatcaacgaactcgaagcgcagctgcgcgcctggttcgaaagacaataa

SEQ ID NO: 115687 - DNA, 444 bp, Enterobacter cloacae
atgctcaaaaagtggatatatgatacaaccatcatcctacaggatagcgttgaaagctggccccaggcgctggaactgtgcgcgaaaccgctgctggatttgcaggtcattgcgccggaatatgtcacggctatcatcgagcagcaccagacgttaggtccctactatgtgctggctccagggctggcaatgccacatgcgcgaccggaagaaggggcgaaaggacttggcctgtcattattaaaactaaaacagggcgtctcttttggtgccggtgagtttgaccccgtcgatgtgattgtgatgctggcggcaccggacaagcatagccatatcgaaatgatctcagccttagcggaattattttccagcgacgaagatatggctgaattacatcgggcgaatacgctggaggagataaaaaccgttatcgatcgcttctga

SEQ ID NO: 115688 - DNA, 1020 bp, Enterobacter cloacae
atgtctttaacccgaaaacggcgcagtaccggaaaagtaacgctcgcggatgtcgcacagcttgccggcgtaggcacgatgactgtttcccgtgccctccgcacgcccgaacaggtttccgataaactgcgtgaaaaaattgaagccgcggtgcaggagctgggttatatgcccaatcttgccgccagcgcactggcatcggcgtcgtcatggacgatcgcgatggtagttcccaatctttccgaagctggctgttccgagatgttcgccgggctacagcaggtgctccagccagccggatatcagatcatgctggcggaatctcagcatcgtcttgaacaggaagagaaactgctcgaaacgctgctggcctcgaatatcgccgcggcgatactgctcagcgtcgagcactccgataccgtacgccactggctgaaaaacgcctctatcccggtgatggaaatgggtgcaatgcgtgccgatccgattgatatgaatatcgggattgataacgtcgccgccatgtatgaacttaccgagatggtgattcagcgtggctaccagaatatcggcctgctgtgcgctaaccaggagcagtggatttttcagcagcatttgcagggctggtacaaggcgatgctgcgccaccacctgtcgccgaacagagtgattaatgccgccatgccgccgaacttctccaccggcgcggcacaactgccagagttcctgctggcgtggccggaactggatgcgctggtgtgcgtatcagatgaactggcctgcggcgcgctgtatgagtgccagcgtcgacgcatcaaagtgccggacgatttagcggtcgtgggctttggtgacagcgacgtcagccgcgtctgtcagccgccgctgacaacgatggcagtaccgcatcgcaagattgggattgaagccgggaaagcgttactggaacgtctgaatgacggagactggcgcgatcataaacccatcgcgtccagcctgtgtatgcgggaaagctgttaa

SEQ ID NO: 115689 - DNA, 567 bp, Enterobacter cloacae
atggtggagcagaatcatttggcaagtactgagtgggttgacattgtcagcgaagagaatgaagtgatcgcgcaggccagccgcgaacaaatgcgtgcggagcgtctgcgtcaccgcgcgacgtacatcgttgttcatgatggcatgggcaagattctggtccagcgtcgcaccgacaccaaagattttcttcctggtatgctggatgccacagcaggtggcgttgtgcaggccgatgaagtattgctggattccgcgcgtcgtgaagcggaagaagagttaggtatcgctggcgtgccgtttgccgagcacgggcaattttatttcgaagatgaacattgtcgcgtctggggcgggctgtttagctgcgtttcccacggacctttcgccttgcaggaagaggaagtgagcgaagtgtgctggatgacgccggaagagatcaccgcgcgttgcgacgagttcacgccagattcccttaaagcactggcgctgtggatgacccgcaacgccaaaaacgaatccgctaaaccggaaaataaggcggaaaaagaggaagaggctgagtaa

SEQ ID NO: 115690 - DNA, 552 bp, Enterobacter cloacae
atgaaactgatgtttgcgtcggatattcatggatcgctgcccgcgaccgaacgcgtgctttctctgttcgcccaaagcggagcgcaatggctggtgatcctgggcgacgtgttaaaccacggcccacgcaatgcgttgccggaaggctacgctcccgcgcaggtggcggaaaaacttaatcattttgcctcgcgcattatcgccgttcgcggcaactgtgacagcgaagttgaccagatgctgctgcattttcccatcaccgctccctggcaacaggtgttgatggaaaacagccgtttgttcctgacccacgggcacctgttcggcccggataacctgccgtcactcgccgctggcgatgtcctggtttatggtcatactcatattccggtggcggaaaaacgcggggcgttttatcactttaatcccgggtctgtcagcattcctaaaggcggcaatccggcaagctacggcatgtatgaagacgggacattaagcgttatcgcacttaatgatcagcaagttattgcgcagatagcgattaatccgtaa

SEQ ID NO: 115691 - DNA, 645 bp, Enterobacter cloacae
atgagccagcctgtaataacgttgtggtccgatgcgaactttttttctccttatgtcatgagcgtttatgtggcgctggcagaaaaggggcttacttttagtctgaaaaccgtcgacctggacagcggcgaacatctgaagccccagtggcagggctacgcgctcactcgccgagtccctgtgctggagatcgacggttttgagttgagtgaatcctcggcgattgacgagtatcttgaggaccgctttgccccgccagagtgggaacgcatctatcctcacgatctgcaaaagcgcgcccgcgctcgccagatccaggcatggctgcgtagcgacctggtgccgattcgcacagaacgctctacggacgtggtgttcgctggcgtcaaaaagcccgccctcagcgaggaaggcttatccagcgcccggaagctgatcgaaactgcctcatcgctgctggcgcagggtaaccccaacctgtttggcgagtggtgtattgccgacaccgatctggcgctgatgctcaatcgcttgatcctcaatggcgatgacgtcccacagctgctggtggattacgccacattccagtggcaacgcgcgtcggtacagcgctatctggcactctctgctaagcgcgcgggctga

SEQ ID NO: 115692 - DNA, 630 bp, Enterobacter cloacae
atgatagatctctattatgcccccacccctaatggccataagatcaccctctttctcgaagaagccgaagtggactaccggatcattcgcgtggatatcagtaaaggcgaccagttccgccccgtttttctggccatatcgcccaacaataaaattccggccatcattgataacctgccttctgacggcggcaaaccgttaagcctgtttgagtctggagagattttgctctatctggcagagaaaaccggcaagctcctgagcggtgagttgcgcgagcgtcatcacacgctgcaatggttattctggcagtcgagcggcctggggccaatgctggggcagaatcaccactttaccgcctatgcgccgcagacgatcccttacgccattgagcgatatcaggtcgaaacccagcgcctgtacggggtcctgaaccgtcggctggaaaaatcaccgtggctgggaggtgagcattacagcattgcagatatcgcctgctggccgtggattaacacccatgaacgccaccggatcgatctggccacttatccggcagtgaacaactggtttgagcgcatccggacgcgcccggccaccgaacgcgccatgcaaaaaatccatcagatttga

SEQ ID NO: 115693 - DNA, 369 bp, Enterobacter cloacae
atgtcccagcatgacgctattattcgtataaaaaacttacgcttacgcacgttcattggtatcaaagaggaggagatcgcgaatcgccaggatatcgtggtgaatgtagtgatccactacccggcagacaaggcgcgtgccagcgaggacatcaatgacgcgctgaactatcgcacgatcaccaaaagcatcatccagtacgttgagaacaaccgttttgcgctactggaaaaattaactcaggatgtgctcgacatcgcacgcgaacaccactgggtcacttatgctgaagtggagatcgataaacttcacgccctgcgctacgccgactccgtctccatgacgttaagctggcagcgccaggcgtaa

SEQ ID NO: 115694 - DNA, 894 bp, Enterobacter cloacae
atgaagatcctgctcaccggcggtacgggcctgattggtcgccatctcattccacgtttgcaggcgttgcatcacgacattaccgtggtcacgcgcagcccggagaaagcgcgccaggtgctgggcgtcggcgttgagatctggaaaggcctggcggaaaggcaggatctgaacggctttgacgccgtcatcaaccttgctggcgaacctatcgccgataaacgctggaccgaagagcaaaaacagcgtttatgcagcagccgctggaacatgaccgaaaggctggttgagctgattcgcaatagcgagacgccgccttcggtgctgatttccggctctgctacaggctactatggcgatctcggtgaagtggtggtgaccgaagaggagccgccgcacaacgagtttacccataaactctgcgcccagtgggagcgcatcgcctgcgcggcgcaaagcgatcgtacccgcgtctgcctgctgcgcaccggcgtggtacttgcgccgaagggtggtattctcggtaaaatgctgccgccgtttaaaatggggcttggcgggcccatcggcaacggtcgtcagtatctggcgtggatccatatcgacgatatggtcaacggcattctctggctgctggataacgatctgcgcgggccatttaacatggtatccccttaccccgtacgtaatgaacaatttgctcacgccctggggcatgccctgcatcgcccggcggtgctgcgcgtgcctgcaacggcgattcgtctgttgatgggtgagtcttcggtgctggcgctgggcgggcaacgcgcgctgccaaaacggctggaagcggccgggttcacgttccgctggtatgacctggaagaggcgctgggggatgtggtgcagtga

SEQ ID NO: 115695 - DNA, 501 bp, Enterobacter cloacae
atggcaaccattaccacaacccggcttcacctcacccctttcgaaccttctgactgggcgttcttccgctctctgcgtgaagaccccgccatcatgcgctatatggccgctatcacgccggaaaaagagacgcgccgcgtatttgccgcgcgcctgatggcggagcatgtctttgtgatccgtctgcataacgacgttacgccgctcggggatatcggcctgcaaatcagtgcggcgaaccgtgaagaggcggatattggctacacggttgtgactgccgcgcagggaaaaggcattgccagcgaggcgctgcacgcggtgtgcgagtatgcatttaaccagacgggcgtgaaggcgataaacgcgtacgtgctggcagataacgttgggtcggtgcgggtccttgagaaagcgggttttgtgcgcacgcaggtgctggagaaggcgtacgagattaacggcgtacggtatgacgactgggtgtatcggctggagtgttga

SEQ ID NO: 115696 - DNA, 213 bp, Enterobacter cloacae
atgccgggcggcactgcgtttgcccggcctacgggttttgtaggcccggtaagcgaagcgccaccgggcaattgggcggctctgcggcctgatgccctcaccccggccctctcccacagggagagggagaaaggccaaacctacttcaacgagcctttcaggaactgctgcaaccgcgggctttgcgggttcgccagcacctcattcggatga

SEQ ID NO: 115697 - DNA, 777 bp, Enterobacter cloacae
atgatggctgagaacaaattaaacgtaattgatttgcacaagcgctacggcgaacatgaagtgctgaaaggggtgtcgctggaggctaacgcgggcgacgtgatcagtattatcggctcatcaggttcgggtaaaagtaccttcctgcgctgcatcaacttcctcgaaaagccgagcgaaggatcgattgtggtgagcggacagaacatcaacatggtccgtgataaagacggccagcttaaagtggcggataaaaaccagctgcgcctgctgcgtacacgcctgacgatggtgttccagcacttcaacctctggagccacatgacggtgctggagaacgtgatggaagcgccggttcaggtgctcggcttaagcaagcaggaagcccgcgagcgtgcggtcaaatacctggcgaaagtgggtatcgacgagcggcagcagatcaaatatccggtgcacctgtcaggggggcagcagcagcgtgtttccatcgcccgtgcgctggcgatggagccggaagtgttgctgtttgacgaaccgacttccgcgctggatcctgaactcgttggcgaagtgctgcgcatcatgcaaaagctggcggaagagggcaaaacgatggtggtggtgacgcacgagatgggcttcgcccgtaacgtttctaaccacgttatcttcctgcatcaggggaaaattgaagagcagggtcatccgaatgaggtgctggcgaacccgcaaagcccgcggttgcagcagttcctgaaaggctcgttgaagtag

SEQ ID NO: 115698 - DNA, 714 bp, Enterobacter cloacae
gtgattgagattattcaggagtactggaaatccctgctgtggacggatggctaccgctttactggcgtggccatcacgctgtggctgctgatctcctcggtggtaatgggcggcattctggcggtgtttcttgccattggccgcgtgtcgaacaataaatttatccagttccctatatggctattcacctacgtgtttcgcggtacgccgctgtacgtgcagctactggtgttctattccgggatgtacacgctggagatcgtgaaaggcaccgagatgctgaacgcgttcttccgcagcggtctgaactgtacggtgctggcgctgaccctcaatacctgcgcctataccaccgagatcttcgccggggccatccgttctgtgccgcacggtgagatcgaggcggcgcgcgcgtacggcttctcgtccgtgaagctctaccgctgtattattctgccttcggcgctgcgtattgcgctgccggcctacagcaacgaagtgattttaatgctgcattcgacggcactggcgtttaccgccacggtacctgatctgttaaagattgcccgcgatattaactctgccacctaccagccgtttacggcgtttggcattgcggcagtgctctatttgatcatttcttacgtcctgatcagcctgttccgtaaggctgaaaaacgctggttgcagcatataaaaccgtcgacgcactga

SEQ ID NO: 115699 - DNA, 687 bp, Enterobacter cloacae
atgctgtacggattttctggcgttattttacagggcgcgcttgtcacccttgagctggctatcagctccgtggtgctggcggtgctgataggcctggcgggcgcgggggcaaaattatccgccaacagaccgctggcgctgatatttgaaggctataccacgctgattcgcggcgtgcctgacctggtgctgatgctgctgatcttttacggcctgcaaatcgcacttaacggcgtgacggatgccatcggcatggagcagatcgatatcgacccgatggtggccggtattattacccttggttttatctacggtgcctatttcactgagactttccgcggcgcttacatggccgtgccgaaagggcatattgaagcggcgaccgcctacggttttacctcctcacaaacgtttcgccggatcatgttcccggccatgatgcgctacgcgctgccgggtatcggtaacaactggcaggttattctcaaggcaacggcgctggtctccctgctgggcctggaagatgtggtgaaggccacgcagctggcgggtaaaagcacctgggaaccgttctattttgcggtggtttgcggcgtaatttatctggtctttacgaccgtctccaatggtgtgctgcttctgctcgaacgtcgctactccgtgggtgtgaagagggctgacctgtga

SEQ ID NO: 115700 - DNA, 783 bp, Enterobacter cloacae
atgaaaaaactggtgttgtcactttctctggtactggctttttccagcaccaccgcggcattcgcagcaattccgcagaaaattcgtattggaactgacccaacctatgcacctttcgaatcgaagaatgcgaagggggaactggtcggttttgacatcgatctggctaacgagctgtgcaaacgcattaaagcgcaatgtacctacgttgaaaacccgctggatgcgctgatcccgtccctgaaagcgaagaaaattgacgtgatcatgtcctccctgtccatcacagagaaacgtcagcaggagattgcctttacggacaaactctacgcggcagattcccgtctggtggtggccaaatcctctgacattcagccaaccctcgaatctctgaaaggcaaacgcgtgggcgtgttgcagggtacgacgcaggaaacctacggcaacgagcactgggcgccaaaggggattgaaattgtctcttaccagggccaggaaaacatttacgcagacctcacggcaggccgtattgacgcggcattccaggatgaagtggcggcaagcgaaggcttcctgaaacagcctgtgggtaaagattacaagttcggcggtccgtccattaaggacgaaaaactctttggcgtcggtaccggtatgggcctgcgtaaagaagacaacgaactgcgtgaagccctgaacaaagcgttcgccgagatgcgcgcggacggcacctatgacaagctggctaaaaagtacttcgattttaatgtttacggcggctaa

SEQ ID NO: 115701 - DNA, 783 bp, Enterobacter cloacae
atgaagaagacggttctggctctgtctttgctcgtgggcttgagtgcagcagcaagtagctatgcagcgcttccacagacagttcgtatcggtacagacgcaacttacgcgccattctcctccaaggatgcgaaaggcgacttcgtggggtttgatatcgatctgggaaatgagatgtgcaaacgcatggaagtgaaatgcacatgggtgggcagtgactttgatgcgctgatcccgtcgctgaaagccaagaaaattgatgccattatctcttctctttccatcacggaaaaacgtcagcaggagatcgccttctctgagaagctctacgctgccgactcacgtctgattgccgcgaaaggctcgccaatccagccgaccatcgactcgctgaaaggcaaacatgttggcgtgcttcagggctcgacccaggaaggttacgccaatgctaactggcgcgagaagggcgtcgatgttgtggcttaccagaaccaggatctgatctactctgacctggcggcaggccgtctggatgccgcgtttcaggatgaagtcgccgcgagcgaaggcttcctgaaacagcctgcgggtaaagagtacgcctttgctggcccgtcggtaaaagacaaaaaatactttggcgacggtaccggtattggcctgcgtaaggatgataccgagctgaaagccgccttcgacaaagcgtttaatgagctgcgtaaagacggtacctacgacaaactggcgaagaaatacttcgatttcaacgtctacggtgattaa

SEQ ID NO: 115702 - DNA, 570 bp, Enterobacter cloacae
atgaaacgactcattgtagggatcagcggtgccagcggcgcgatttatggcgtccggctgttacaggtgctgcgtgacgttgcaggcgtagaaacccatctggtgatgagccaggcggcgcgtcagaccctctctcttgaaaccgatctctctctgcgcgacgttcaggccctggctgacgttgtccacgatgcccgcgatatcgccgccagcatctcttcgggctcgtttaaaacggccggcatggttattttgccctgttcgattaaaaccctttccggcattgtaaacagctataccgacacgctggtgacgcgtgcagcggatgtggtgctaaaagagcgtcgtcctctggtgctctgcgtgcgggaaacgccgctgcacctgggacatctgcgtttaatgacgcaggcagccgaactgggggccgtgattatgccgccggtccccgcgttctatcatcgtccgcaaacgctggacgatgtcatcaaccagaccgttaaccgcgtactggatcagttcgatatcgacctgccggaagatctctttacccgctggcagggggcgtga

SEQ ID NO: 115703 - DNA, 1518 bp, Enterobacter cloacae
atgtgcggtattgtcggtatcgccggtttcatgccggtaaaccagtcgatttatgacgcgttaacggtgcttcagcaccgtgggcaggatgctgcgggtatcatcaccattgatgcaaacaactgcttccgtttacgcaaggcgaatggcctggtaaacgatgtgtttgaagcccgccatatgcagcgtctgcaaggtaatatggggatcggtcacgttcgttatcctactgctggcagttccagcgcctctgaggctcagcctttttacgttaactccccgtatggcatcacgcttgcccacaatggcaatctgaccaatgcccacgagctgcgtaaaaagctgttcgaagagaaacgtcgccacattaacaccacctctgattctgaaatcctgctcaatatctttgccagcgaactggataacttccgccattatccgctggaagcagacaacatttttgccgccgttgccgcgactaaccgcctgatccgtggcgcgtatgcttgcgtggcgatgatcatcggtcacggcatggtggccttccgcgatccaaacggcattcgcccgctggtgctcggcaaacgtgacctcggcgatggccgttccgagtacatggttgcctccgaaagcgtggcgctggacactctgggcttcgaattcctgcgtgatgtcgcgccaggcgaagcggtctacatcactgagaagggccagctgtttacccgtcagtgcgccgacaacccggtgagcaacccgtgcctgttcgaatacgtttacttcgcgcgtccggactcgttcatcgacaagatttccgtttacagcgcgcgcgtcaacatggggacgaagctgggtgagaagattgcccgcgagtgggacgatctcgacatcgacgtcgtcatcccaatccctgaaacctcctgtgatatcgcgctggaaattgcccgtattctggacaagccgtaccgtcagggcttcgtgaaaaaccgctacgtgggccgcacctttatcatgccgggccagcagctgcgtcgtaagtccgtacgtcgtaagctgaacgctaaccgtgccgagttccgcgacaagaacgtgctgctggtggacgactccattgtgcgcggcacgacgtctgagcagatcatcgagatggcgcgtgaggccggggcgaagaaagtgtatctcgcctccgcagcgccggaaattcgcttcccgaacgtgtatggcattgatatgccaaccgctaacgagctgattgctcacggtcgtgaagtagacgaaattcggcagatcatcggtgccgacggcctgattttccaggatctgaacgatctgatcgacgcggtgcgcgccgagaacccggatattcagcagttcgaatgctcggtattcaatgggatctacgtaacgaaagacgttgaccagcagtatctcgactatctggattcgctgcgtaacgacgatgcgaaagccgtccagctgcaaaacgatctcgaaagcttagagatgcacaacgaaggttga

SEQ ID NO: 115704 - DNA, 489 bp, Enterobacter cloacae
atggtctggattgattacgccatcattgcggtgattggtttttcctgtctggttagcctgatccgtggctttgttcgtgaagcgttatcgctggtaacctggggttgtgctttctttgttgccagtcattactacacttacctgtctgtctggttcacgggctttgaagatgaactggtccgaaacggaatcgccatcgcggtgctgtttatcgcgacgctgattgtcggcgctatcgtcaattacgtgataggtcagctggtcgagaaaaccggtctgtcaggaacggacagggtactcggcatctgtttcggcgcgttgcgaggcgtgctcattgtggccgcgatcctgttcttcctggatacctttaccgggttctccaaaagtgaagactggcaacaatcgcagctcattccggagttcagcttcatcatcagatggttctttgactatctgcaaagctcgtcgagtttcttgcccagggcataa

SEQ ID NO: 115705 - DNA, 696 bp, Enterobacter cloacae
gtggcgagtaagtttcagaaccgtttaacaggaaccattgtgctggtcgcgctcggggtgattattctcccgggactgctcgacgggcaaaaaaagcattaccaggatgaatttgcggccattcctctggtacccaaaccgggcgatcgcgacgagcccgatatgctgccagcggcaacgcaggcgctgcctgcccagccgccagaaggtgcagcggaagaggtgcgcgcaggtgatgcagccgcgccgtctcttgatccgtcgcgtctggccgcgaataacaacgttgaaatcgatcctgtaccggtagagcaacccaaaccggttgaaaaaccgaagccggtagagaaaacgcagcctaaaccgcagcgtgacaaagccgacgagcagctggctgcggcaacggaaacgccgccaccggccaaacagacccagcaggaggccgcccctacgggtaaagcctatgtcgttcagctcggtgcgttgaaaaatgcagataaggtcaatgagatcgtgagtaaactgcgcggcgcgggataccgtgtttatacttcacccaccacgccggtacagggtaaaattacccgtatcctcgtggggccggatgcgtctaaagataagctcaaaggttcgcttggcgagctgaagcaaatctccggcctgagcggtgtggtgatgaactacagcgcaaactga

SEQ ID NO: 115706 - DNA, 1269 bp, Enterobacter cloacae
atggaaaataaaagcattcctcaagccacgtcgcccctggccgcgtggctttcttatctggaaaacctgcacagtaaaactatcgacatgggccttgagcgcgtaagccaggttgccgcgcgtcttgacgtgttgaaacccgcgcctttcgtatttaccgtggccggcactaacggtaaaggcaccacctgccgcacgctggaatctgtcctgatggctgcggggtacaaggttggcgtttacagctcgccgcatctggtgcgctataccgagcgcgtgcgcgtgcaaaacaccgagctggcggaatccgcccatacggcgtcgtttgccgctatcgaagctgcgcgcggcgaaacctcattaacctatttcgaatacggcaccctgtcggcgctgtggctgtttaagcaggcgcagctggacgtggtgatcctggaagtgggattgggcgggcgtctggatgccaccaatatggtggatgcggatgtcgccgtcgtcaccagcatcgcgctggatcacaccgactggctgggcccggaccgcgagagcattggccgtgagaaggccggtattttccgggccaataagcctgccgtggtaggcgaaccggacatgccgcataccattgctgaggtagcgaaagagaagggcgctcgtctgctgcgtcgcggcgtggactggcagtatgaggtgcaggacaaaggctggcgcttcagcgatgcgcagggcgtgctggagaatctgcccctgccgcaggtgccacagcctaacgcggcgactgcgctggcagccctgcgcgccagcggattagcggtaagcgagcaggcaatccgcgacggcattcagaacgcactgttaccgggacgttttcagattgtgagtgagtcaccgcgtctgattctggatgttgcacataacccgcatgcggcggcgtacctcgcaggacgtctcaaatcgttaccaaaaaccgggcgcgtgctggcggttatcggtatgcttcatgataaagatatcggcggcacgctggcctgcatggagagtgtggtcgatagctggtattgtgctcctctggaagggccgcgcggcgcgactgctgagcagttgatggaacatctcggcaaaggcgaaatctacagcagtgtggtttcggcctggcgtgccgcgatggcggaggctaaaccagaagataccgtgctggtgtgtgggtcattccacacggtggcacatgtcatggaagtgatggacgcggggagaaccggtggcgagtaa

SEQ ID NO: 115707 - DNA, 906 bp, Enterobacter cloacae
atgagctggattgaacgaattaaaagcaacattaccccaacgcgtaaagcgagcattcctgaaggggtatggacgaagtgtgatagctgcggccaggttctgtatcgcgcagagctggaacgcaatcttgaggtgtgtccgaagtgtgaccaccatatgcgtatgtcggcgcgcaaccgcctgcatagcctgctggacgaaggttctctggtagaactgggcagcgaactggagccaaaagatgtgcttaagttccgcgactccaaaaaatacaaagatcgtctggcctctgcacagaaagagaccggcgagaaagacgcgctgatcgtcatgaaaggcaccctgcacgagatgccggtggttgctgccgcgtttgagttctcctttatgggcggctcaatgggctctgtggttggcgcgcgcttcgtgcgtgccgttgagcaggcgctggaagacaactgcccgctgatctgcttctccgcctccggtggcgcacgtatgcaggaagcgctgatgtccctgatgcagatggcgaaaacctctgcggcgctggcgaaaatgcaggagcgcggtctgccgtacatctcggtactgaccgatccaaccatgggcggcgtttctgcaagcttcgcgatgctgggcgacctgaacatcgctgagccaaaagcgctgatcggctttgcgggtcctcgcgttattgagcagaccgtacgtgagaaactgccgccgggcttccagcgcagtgagttcctcattgagaagggcgccatcgacatgatcgtccgccgtccggaaatgcgcctgaaactggcaagcgtcctggcgaagctgatgaatctgccggcgccgaacccggacgagccgcgcgaaggcgtggtggtaccggatcaggaacccgaggcctga

SEQ ID NO: 115708 - DNA, 660 bp, Enterobacter cloacae
atggacgtaatacgttttctgattgatttcatcctgcatattgatgttcacctggcggagctggtcgcgcagtacggcgtctgggtgtacgccattctgttcctcattctgttctgtgaaaccggccttgtggttaccccgttcctgccgggagattcactgctgttcgtggcgggcgcgttatccgcactgccaacgaatgacctgaatgtccatctgatggtggtcctgatgatcatcgccgcgattgttggtgatgcggtcaactacaccatcgggcgggtgtttggcgagcggttgttcagtaatccggactcgaagattttccgccgcagttatttagataagacccatgcgttctatgagcgccatggcggtaagaccattatcctggcccgttttgtgcctattgtacgtacatttgcaccgtttgtggcgggaatgggtcacatgtcctatcgtcattttgccatgtataacgtggtgggcgcgctgctgtgggtgctgctgttcacctatgcaggctacctgtttggcgatctgccggtggttcaggaaaaccttaagttactgattgtagcgattattgtgctttccgtactgcctggcgtcatcgaaattatccgtcacaaacgcgcggcggcaaagcaagcgaagtaa

SEQ ID NO: 115709 - DNA, 813 bp, Enterobacter cloacae
atgtcagatgtggaacaaaagccggtccacagaattgccctcggcattgaatacgatggcagtaaatactatggctggcagcggcagaatgaggtgcgcagcgtccaggagaagctggagaaagcgctctctcaggtggcgaatgaaccgataagcgtcttctgtgcgggccgcaccgatgccggcgttcacggcacggggcaggtggtgcattttgacaccaccgccgtgcgcaaagccgcggcctggacgctgggtgtaaatgcgaatttgcctggtgacattgccgtgcgttgggtgaaagctgtgccggatgattttcacgcgcgtttcagcgcgacggcgcggcgctaccgttatgtcatctataaccagcgcctgcgcccggcggtgttaagccagggcgtgacgcatttttatgaaccgctggatgcagaatgtatgcagcgtgcggcgcagtgtctgattggagagaatgattttacgtcgtttcgtgcggtgcagtgtcagtcccgtacgccgtggcgtaacgtcatgcacattaacgtcagtcgttatggcgcgtatgtggtggtggatatcaaagccaatgcctttgtacatcatatggtgcggaatattgtaggcagcctgatggaagtgggcgccggacaccagccggagagctggattgcagaactgctggcagcgaaggacagaacgcttgcggcagcaacggcgaaagcggaaggtctgtatctggtttcggtggattatccggaccggttcgacctgccaaaaccgccaatgggcccgctgtttttagcggactaa

SEQ ID NO: 115710 - DNA, 1014 bp, Enterobacter cloacae
atgtctgaaggctggaacattgccattttgggtgccactggcgccgtgggcgaagccctgcttgaaacccttgctgagcgtcagttcccggtgggtgagatttacgcactggcgcgtaccgacagcgcaggagaacatctgcgtttcggcggcaaatccgtgatggtgcaggatgccgccgcgtttgactggacgcaggctcagctggcgttttttgccgcaggtgcggaagccacggcgtcttacattgaagaagcgaccagttcaggctgtctggtgatcgacctgagcggcctgttctccctggagccggatgtgccgctggtggtgccggacgtcaacccgtttgtgctggctgactaccgcaaccgcaacatcattgcagtaccgaacagcctcaccagccagctgctgaccgcgctgaagccgctgatcgacgacggtggcctgtcgcgtgtttccgtgaccagcctgctttcagcctccgctaacggtaaaaaagccgtagacgcactggcagggcagagcgcgaagctgttgaacggtatcccgatcgacgaagatgatttctttggccgccagctggcgttcaacatgctgccgctgctgccggatcgtgaaggttcggtgcgggaagagcgtcgtatcgtcgatgaagcacgcaaaattttgcaggatgacgggctgatgatctccgcgaatgtcgtgcagtctccggtcttttacggccacgcgcagatggtcgggtttgaagccctgcgtccgctggcggctgaagaagcccgcgacgcgtttggccgcggtgaggacattgtcctgtccgaagagagcgaattcccgacgcaggtgggcgacgccaccggcagcgcgcatctctctgtgggctgcgtgcgtaacgattacggtatgccggagcaggtgcagttctggtccgttgccgacaacgtgcgttttggcggcgcgctgatggcggtcaaaatcgcggaaaaactggtgcaggagtatctgtactga

SEQ ID NO: 115711 - DNA, 1137 bp, Enterobacter cloacae
gtgaaaatcctcgttgatgaaaatatgccttacgcccgtgagctgttcagccgcctgggtgaggttaaggctgtccctggtcgcccgattccggtcagcgaactggacgatgcagacgccctgatggtgcgctcggtgaccaaagtaaatgaggcactgctcaccggcaaaggggttaaatttgtcgggacggcaacggccgggaccgatcatgtggatgaccagtggcttaagcaggcggggattggtttttccgcggcgccaggctgtaacgccattgccgtcgtggaatatgttttctcctcgctattgatgctggccgagcgcgatggttttgcgctgaaagaccgcaccgtcgggattgtgggtgtgggcaacgtgggcggacgtctgcaaaagcgtctggaagcctggggtatccgcaccctgctgtgcgatccgccgcgtaaggataacggcgatgaaggcgacttccgcacgctggatgagctggtcgacgagtgcgacgtcatcaccttccatacaccgctctttaaagaggggccgtacaagactctgcacctggccgacgaaaaactgatccgccgtctgaaggctggcactattctgataaatgcctgccggggaccggtggtggataacgcggcgctgctggcatgtctcgacgaaggacaagagcttagcgtcgtgctggacgtctgggaaccagagccggatctcaacgtcgccttgctgaataaggtggacgtgggtaccgcgcatatcgcgggttatacccttgaaggcaaagcgcgtggcacaacccaggtgtttgaggcttacagcgcctttatcggccatccgcagcaggtggcgctggatacgctgctgcccgccccggaattcggccgcattacccttcatggcccgctggatgaggcaacgctgaaaagactggtgcatttggtgtatgatgtgcgccgcgatgacgcgctgctgcgtaaagtggcgggtattccgggtgagtttgacaagctgcgcaaaaattaccttgagcgccgcgagtggtcttccctgtatgtcatgtgcgatgacgcgtcagcggcggggctgctgcataaactgggatttaacgccgttcaccacccggcacgttaa

SEQ ID NO: 115712 - DNA, 1005 bp, Enterobacter cloacae
atgcagcccatttcaggtacgcctccgcgccctccgggtgaaggccccgtaacgcccaacacgccaggcgaacaaccgctctccacgcagcaacgcaccgtactggagcgtctgatcacgcgtcttattgcgttaacctcacagcaaaacgcagaggtatgggccggcgttaagcacgatttgggcgtcagaaacgatgcgccgctacagtcgcgccatttccctgccgccgaacaaaaccttaaccagcgtcttaccagcgcacagcagcaacatactacccgccagattatctcgcagctgaccgagctattgggccaggggaataatcgccaggcggtgagtgattttatccgtcaacagtacggtcataccgccctgagccagctttctccggaacagctgaaaaccgtgttgaccctgctgcaaagcaatcagctttctatcccgcagccgcaacagcgcccgtctacagagcggccattgcagcctgcggagcataatacgctcaagcagatggtcactaagctggctgccgctaccggcgaacccacaaagcttatctggcaatccatgctggaactttccggtgtgaaagcgggcgagatgatcccggcaaaacagtttacccatctggtcacctggctccaggcgcgtcagacgctcagcacccagagcgccccgaccctgcacagcgtacaggcggcgctgaaacaaccgctggaaccgcacgagttcgatatgattcgggattacgctcagcagagctggcaggctacgccgcaaacggtgctgaccaccgcgcaggtgcaggatgtgctcaatcagatcttcattcgccgcgccgagcgggaaggcggcgtgccggaggtaagaaacattcagccgatctacagcccgctgtttgcccccgtagttgatacgttcaaaacgctttctgcccgtccgggattgatgtttatcgcgttggtgattgcgctggcgattttctggctggttgcttaa

SEQ ID NO: 115713 - DNA, 1179 bp, Enterobacter cloacae
atgaaggctgttacccctgagaagagcgctccttccgggaacctttcccttttccgcatcgcctttgcggtgtttctgacctatatgaccgttggcctgccgctgccggtgatccccttgttcgttcaccaggagctgggctatggcaacaccatggtcggcattgcggtgggcattcagtttttagcgacggtattaacccggggctacgccggtcgcctggcggatcagcacggcgcaaaacgctcggcgttgcagggcatgtttgcctgcgggctggcggggggagcctggctgctggcggcgctgttgccgatagatgcagcgtataaattcgcgctgctggtggcagggcgtctgatcctcggctttggcgaaagccagctgctgaccggcacccttacctggggaatggggctggtggggcctgcgcgttccggaaaagtgatgtcctggaacgggatggcgatttacggcgcgctggcggcaggcgcaccgctggggctgctgatccacagccagtttggttttgcggcgctggcaggcaccaccatggtattgccgctgctggcgtgggcgtttaacggttcggtgcgtaaggtgcccgcccataaaggcgagcgtccttcgctgtggagcgtggtggggcaaatctggcagccggggcttgggctggcgcttcagggggtgggcttcgcggttattggtacctttgtctccctctatttcatgagccgcggctgggcgatggcgggctttacgctgacggcctttggcggcgcgtttgtattgatgcgcgtgctgtttggctggatgccggatcgctttggcggcgtgaaggtggccgtggcgtcacttgtcattgagaccgtgggtctggtactgctctggcaggcaacctctgcatccgttgcgctgctgggtgcggcgttaaccggctgcggctgctcgctgatcttcccggcgctgggcgttgaagtggtgaagcgcgtggctccgcaggtgcgcggcacggcgctgggcggctatgcggcgtttcaggatatctcatacggggtcaccgggccgctggcggggctgcttgcaacgtcgtttggctatccttccgtcttcctggccggtgcggtgtcagcggtggtgggaattgtggtgacgctggtggcgtttcgcaggtcgtag

SEQ ID NO: 115714 - DNA, 1218 bp, Enterobacter cloacae
atgaaacgtgcagtgattactggcctgggcatcgtttccagcatcggtaataaccagcaggaagtcctggcatctctgcgtgaaggacgctccgggatcactttctctgaagagtttaaagattctggaatgcgtagccacgtatggggtaacgttaaactggacaccaccggtttaattgaccgtaaagtggttcgtttcatgaacgatgcctctatctacgcctatctttccatgcaggaagcgatcaaggattctggtctgagcgaagacgcttaccagaacaacccacgcgtgggcctgattgcaggctccggcggttcctctaaagctcaggtgttcggtgctgacgccatgcgcagcccgcgcggcctgaaagcggtcggtccatatgttgtgaccaaagccatgggttcagcggtttccgcgtgcctggcaacgccgttcaaaatccacggtgtgaactactccatcagctccgcatgtgcgacctccgcacactgtatcggtaatgcggttgagcagatccagctgggcaaacaggacatcgtatttgctggcggcggcgaagagctgggctgggaaatggcctgtgagtttgacgcaatgggcgcactgtccaccaaatacaacgaaacgccagacaaagcgtcccgtacttatgacgcacaccgcgacggttttgttatcgctggcggcggcggtatggttgtggttgaagagctggaacacgcgctggcgcgtggcgcgcacatctatgctgagatcgtgggctacggcgcaacgtctgacggcgctgacatggttgctccatccggtgaaggcgcggtgcgctgcatgaagatggcgatgcacggtgttgatactccaatcgactacctgaactcccacggcacctcaacgccggtaggcgacgtgaaagagctgggtgcgatccgtgaagtgttcggcgacaatagcccggctatctctgcaaccaaagccatgaccggtcactctctgggagcggcgggcgtgcaggaagcgatctactctctgctgatgctggaaaacggctttatcgcgccaagcatcaacatcgaagagatggacgagcaggcggctggcctgaacatcgtgaccgaaaccaccgaacgtgagctgacgaccgttatgtccaacagcttcggtttcggcggcaccaacgccacgctggtgatgcgtaagctgaaagcgtaa

SEQ ID NO: 115715 - DNA, 1998 bp, Enterobacter cloacae
gtgaaacaaaacgccatacaacctgccaacctcgaattcaacactgagggtacacctgtttcccgagattttgatgacgtctacttttctaatgataacggactggaagagacgcgctatgtcttcctcgaaggaaatcatctcagcacccgcttccctgagcatccgcgcagcctgtttgtcgtagcggagagcggtttcggcaccgggctgaattttctgaccctctggcaggcgttcgaccagtttcgcgctgcacaccccgaggctaccttacaaagattacatttcatcagtttcgaaaaatttccgcttaccgcgcacgatctgcggcttgcccatcagcgctggccggagcttacccactgggcggaacagcttcaggcccagtggcctccggctatcggtggctgtcatcgtctgattctggacgacggacgcgtcacgctcgacctgtggcttggcgacattaatgacctgaccgataagcttgatgactcaatgaatcagaaggtggacgcctggttcctggacggttttgcgcccgccaaaaacccggacatgtggagcccgcacctgttcagcgccatggcacgtctggcgcgcccgggcgcgacgcttgctaccttcacctcggcgggatttgttcgccgtgggttgcaggaggcggggtttaccatgcggaaaaccaaaggctttggccgcaaacgcgacatgctggtcggggtgatggaacaggatctggcgatcccggcgcaggccccctggtttgcccgtcgcgccagcacctcgcgtgaggtcgccattgtgggcgggggtatcgccagcgccctgctctcgctggcgctgctgcaccgtggctggcaggtgacgctctactgcgctgacgaggcgccggcgacgggcgcatcaggcaaccgtcagggcgcgctttatcccttattaagttcacacgatccggcactgttccagttcttcccggcggcgtttacgtttgctcgccgcctttacgatagcctgccggttgcgttcgaccacaactggtgcggcgtgacgcagctcggctgggacgagaagagccagctgaaaatcacacaaatgctgtcgctgggtctgccggaggccatcgcccatgcagtgacggcacagcaggttgctgagaccgctggcgtcgacaccggctgcgggggtattcagtatccactcggcggctggctgtgtccggctgaactgacttctgcggcgatagccctcgggcagtcgtgtgggttgacagtgcattatgcccataaggttcaatcgctaagccgcactgcgcactggaaactgcgtttcgctgacggcaaagaggcccagcatgccagcgttgtgctggccaacgggcatcatatcagcaagtttacccagacagcatcattgccggtttatccggtcggcggccaggtgagccatattcctgccgccccccaactgagcaaactgcgtcaggtgctgtgttacgacggctacctgacgccgcaaaatccgtccaacggccatcactgcatcggtgccagctaccatcgcggtgaaacagatatgcagtacagcgaagcggatcagcagcaaaaccgccagcgcctgctcgactgtttcccggatgcgtcgtgggcaaaagaggtggatgtcagtgagggtcaggcgcgctgcggcgtacgctgcgcgacccgcgatcacctgccgatggcgggaaacgtgccggactatgacgccacgcttgaagtctatcaggatcttgctgacaataaagaaacggcggtaagcgcgcccgttcatcccgagctgtttatgctgggtggcttaggctcgcggggattgtgctccgcgccgctgctggctgaagcgttagccgcgcaaatgagcgacgagccggttccgctggacagggttacgctcgcggggctgaatccaaaccgactgtgggtgcggaaattgctgaaggggaaaatggtcaagtag

SEQ ID NO: 115716 - DNA, 279 bp, Enterobacter cloacae
atgatcgcagaatttgaatcacgcattctggcgttaattgatgacatggtggaacacgccagtgatgatgagctgttcgccagcggttatctgcgtggtcacctgacgctggctgtagccgcgctggaagccggggacgatcactctgccgacgccgttcacgcggaagtcactcgcagcctggaaaaagccattctggccggggaactctctccgcgcgaccagtctttagtgctgggcatgtgggacaatttgttccagcaggcgaaagcgaagtaa

SEQ ID NO: 115717 - DNA, 546 bp, Enterobacter cloacae
atgaacagtacgcataactacgaacagctgattgagatcttcgatagctgttttgctgatgattttaatacccgtctgattaaaggcgacgacgaaccgatctatcttcctgctgatgacgaggttccgtataaccgcatcatctttgcccacggcttttacgccagcggtttgcacgaaatttcgcactggtgtatcgccgggaaagcgcgtcgcgagctggtggactttggttactggtactgcccggacgggcgcgacgccaccacccaggggcagttcgaagatgtggaggtgaaacctcaggcgctggaatggctgttctgcgtagcggcgggtttcccgttcaacgtaagttgtgacaacctcgaaggcgacttcgagccagaccgtatcgtcttccagcgccgcgttcatgcgcaggtgatggaatatcttgagaaaggcatcccggcacgtccggcacgcctgatcgaggctttacagaattattaccacacgccggagatcacggcggaatgcttcccttggccggaagatctttaa

SEQ ID NO: 115718 - DNA, 810 bp, Enterobacter cloacae
atggataatttcgtcgatctgttcatggtgtcaccgctgctgctggcggtgctcttttttgttgcgatgttagccggatttatcgatgccctggcgggcggcggcgggttgctcaccgttccggcgctgctggcggcaggcatgagccctgcccaggcgcttgccaccaacaaactccaggcgtgtggcggttcgctctcctcgtcgctctatttcatccggcgcaaagtggtgaatctcgccgatcagaagctcaatatcctgatgacgtttattggctcaacggcgggtgcgctgctggtccagcacgtacagtccgacattctgcgccagatcctgccgctgctggttatctgtatcggcctctatttcctgctgatgccaaagctcggggaagaagatcgacagcgtcgtcttcacggcctgccgtttgcgctgattgccggtggctgcgtcggtttttacgatggcttctttggcccgggggcaggttcgttttatgcgctggcattcgtgacgctggccgggtttaacctcgccaaatccaccgcccacgccaaagtcctcaacgcgacctccaacgttggcggtctgctgctgtttatcattggcggcaaggttatctgggcaaccgggtttgtgatgatggcagggcagtttttgggcgcgcgcgcaggctcgcgtctggtattaagcaaagggcaaaagctgatccgcccgatgattgttgtcgtctctgcggtgatgagcgccaaacttctttatgacagccatggacaggagatcctcacctggttggggatgaactaa

SEQ ID NO: 115719 - DNA, 825 bp, Enterobacter cloacae
atgaaaaaaaccgcaatcgctctgctggcgctgctggccagtggagcaagcctggccgctacgccgtggcagaaaatcacccacccggtagcggggagtgcgcagtccattggcgctttctccaacgggtgtatcgtaggtgcgcaggcgctgccgttgcagtcggatacttatcaggtgatgcgtaccgatcagcgccgttatttcggccatcctgacctgctgctgtttattcagcgtcttggcaaccaggtgcataacctggggctggggacggtgctgattggcgatatggggatgcctgccggtggtcgcttcaacggcggtcacgccagccaccagaccggactggatgtggatatcttcctgcaattgccgaaaacgcgctggagctcagcgcagctgctgaaaccgcaggcgctggatctggtctcggccgacggtaaacgggtcgtcgcctcgcgctggtcgccggaaatttccagcatgattaagctggcggcagaggataacgacgtcacgcggatctttgttaatccggccatcaagcagcagctttgcctggatgcgggaacggatcgcgactggttgcgtaaagtgcgcccgtggttccagcaccgggcgcatatgcatgttcgcctgcgctgtccggcgaacagcctggaatgtgaagatcagccgctgccaccgcctggcgatggttgtggttacgaactgcaaagctggtttgaaccagccaagcctggaacctctaagcctgagaagaagacaccgcctccgctgccgccttcctgccaggcgctactggatgagcatgtactttaa

SEQ ID NO: 115720 - DNA, 1086 bp, Enterobacter cloacae
atggcaggaaacagtattggacaggtattccgtgtgaccacctttggcgagtcgcacggtctggcactgggttgtatcgttgatggcgtcccgccaggcatcgaactgaccgaagccgatttacagcatgaccttgaccgtcgtcgtccgggtacctctcgctacaccacgcagcgtcgcgagccggaccaggtcaaaattctctccggcgtatttgaaggccgtaccacaggaaccagcattggtctgctgattgaaaacaccgatcagcgttctcaggactacggcgcgattaaggacgttttccgtcctggtcacgccgactatacctacgaacaaaaatatggctttcgcgactatcgcggcggcggacgttcttccgcgcgtgaaaccgcgatgcgcgtggcggcaggggcaattgccaaaaaatatctccagcagaaattcggcatcgttatccgcggctgtctgtcccagatgggcgacattccgctggcaatcaaagactgggatcaggtagagctcaacccgttcttctgcgccgatgccgacaagctggacgcgctggatgagctgatgcgtagcctgaaaaaagagggcgactccattggtgcgaaagtcaccgtggtggccgaccgcgtgccggctggctggggcgagccggtatttgaccgccttgacgccgacatcgcccacgcgctgatgagcatcaacgcggtgaaaggcgttgaaatcggcgacggttttgacgtggtcaagcttcgcggcagccagaaccgcgacgaaatcacgaaggcgggtttccagagcaaccatgcgggcggcattctgggtggcatcagcagcgggcagcaaattattgccaatattgcgctgaagccaacgtccagcattaccgtcccgggccacacgattaaccgcgctggcgatgaagttgagatgatcaccaaagggcgtcacgatccgtgcgtggggatccgcgcggtgccgatcgcagaagcgatgctggcgatcgtgctgatggatcacttcctgcgccagcgcgcgcagaatgcggatgtgacgaccaccattccacgctggtaa

SEQ ID NO: 115721 - DNA, 933 bp, Enterobacter cloacae
gtggataaaatttttgtcgatgaagcagtaaacgagctgcataccatacaggacatgttgcgctggtcggttagccgcttcagcgccgccaatatctggtacggacacggtaccgacaatccgtgggatgaggccgtgcagctggtgctgccgtctctctacctgccgctggatattccggaagacatgcgcaccgcgcgcctgacctccagtgaaaaacaccgcatcgttgagcgcgtgatccgtcgcgtaaacgagcgcattccggtggcttacctgaccaacaaagcctggttctgcggccacgaattctacgttgatgagcgcgtgctggtgccgcgttcgccgattggcgagctgatcaacaaccattttgacggcctgattaaccatcagccgcagcacattcttgatatgtgcaccggcagcggctgcatcgccattgcctgcgcgtacgccttcccggaagcggaagtggacgccgtcgatatctccaccgacgcgctggccgtcaccgaacacaacattgaagagcacgggctgattcatcacgtcacgcctatccgctctgacctgttccgcgacctgccgacgctgcaatacgacctgatcgtcaccaatccgccgtacgtggatgcagaagatatgtccgacctgccgaacgagtaccgtcacgagccggagctgggcctggcgtcaggctctgacgggctgaagctgacccgccgcatcctggcctgcgcgccggattatctgaccgacgacggctttctgatttgtgaagtaggcaacagcatggtacatctgatagagcagtacccggatgtgccgttcacctggcttgagttcgacaacggcggtgacggcgtctttatgctgaccaaggcgcaactgcttgatgcacgcgaatacttcagcatttacaaagattaa

SEQ ID NO: 115722 - DNA, 552 bp, Enterobacter cloacae
atgaaaaagaaaacatcgctcagtgaggaggatcaggctctattccgccagctgatgaccgggacgcgtcaaatcacgcacgacaccattgtccatcgcccgcagcgtaaaaaagtcagcgaggtaccggtcaaacggttgctccaggagcaggccgataacagccactatttttcagatgagtttcagccgctgctaaatacgcagggtgcggtgaaatacgtgcgcgaagacgtcagccattttgaactgaaaaaattacgccggggagattactcgccggagctgttcctcgatctgcatgggttgacccagatgcaggcgaaacaggagctgggggcgttgatcgcggcatgtcgtcgcgagcatgttttttgcgcctgcgtgatgcacggccacggcaaacatattcttaagcaacagacaccgctgtggctggctcagcatccacacgtgatggcttttcatcaggcgccaaaagagtacggcggagatgccgcattgctggtattgattgaggtggaggagtggcagccgccagaattgccctga

SEQ ID NO: 115723 - DNA, 486 bp, Enterobacter cloacae
atgcaagtttttatcatgcgtcacggcgacgcggcactcgatgccgccagtgactcagtacgtcctttaaccgtctgtggctgtgacgaatcccgtcagatggcgacgtggcttaaaggtcaaaaagtggacattgaacgcgttctggtgagtccgttcctgcgggcagaacagacgctggatgtggtaggggagtgtatgaacctgccatccagtgtggatgttctccctgaactcacgccgtgtggcgatgtcggtcttgtcagtgcttatcttcaggcgctgtgcaatgaaggtgtcgcttccgcactggtcatttcccacctgccgctggtcggctatctggtatctgagctgtgcccgggcgaaacgccaccgatgttcacgacgtccgccattgccaacgtcaccctcgacgaaaccggcaaaggggtctttaactggcaaatgagtccgtgcaacctgaagatggcaaaagccatctga

SEQ ID NO: 115724 - DNA, 2148 bp, Enterobacter cloacae
atggaaacgacatctgcatttaatctggctgttcgccttgataacgtggctgttatcaccattgatgtacccgacgaaaagatgaacaccctgaaggccgagttcggcgttcaggtgcgtgcgatgctcagacagatccgcgaaaacaaagcgatacgtggcctggtatttatctcggcaaagccggataactttattgccggggccgatatcaacatgattgcccgggcgaaaagcgctcaggaagcagaagacctggcgcgtcaggggcagcaggtaatggcggagatccatgcgctgtcgatacccgttgtcgctgcgatccacggggcctgcctgggcggtgggcttgagctggcgctggcctgtcacagccgcatttgtaccgacgatgcgaaaacggtactcggactgccggaggttcagcttggattgctgcccggttcagggggcacgcagcgcctgccgcgtctggtgggcgtcagtacggcgctggagatgattttaaccggtaaacagctgcgcgcccgtcaggcgttaaaggcgggtctggttgatgaggtcgttccgcacgccatcttgcttgaagccgctgttgagcgggcgctgaaaggtcgtcaggcgaaacgccctctgccggtgcgcgagcgtatcctcgccgggccgctggggcgcacgctgctgttcaatatggtgggtaaaaaaaccgagcaaaaaaccaaagggaactatccggcagcgacgcgcattctgaaggtgattgaaaccggtttatcgcagggcagcagcagcggttatgctgcggaagcgaaagcctttggcgagctggcgatgacgccgcagtcgcaggcgctgcgcggcattttctttgccagcacggaggttaaaaaagatccgggcagtgaagctgaaccggctccgctgcgcgccgttggcgttctgggtggtgggctgatgggcggcggcatcgcatttgtcaccgccagcaaaggcaaattgcccgtacgtatcaaagatatcaaccctaagggtatcaaccacgcgttgcagtacagctggcagaaccttgatcgcaaagtgaaacgccgccatatcaaggccagtgagcgtgataaaaccctcgcgatgatcactggcgccaccgactacagtgggtttgcacaccgcgatctggtgattgaagccgtgttcgaagatctcgcccttaagcagcagatggtggcggacgttgaacagcattgcgcgccgcacaccattttcgcgtcaaacacctcgtctttgccgatcggcgacatcgcggcgaaagccgtgcgcccggagcaggtgatagggctgcactatttcagccctgtcgaaaaaatgccgctggtggaggttattccacatgccacaaccagcccgcaaactattgccaccgtggtgaaactggcgaaaaaacagggcaaaaccccgattgtggtcgcggacaaagccggcttctacgtcaaccgcattctggcgccttacattaacgaagcgatgcggttgctgacggaaggggagaaaattgagcacgtcgatgacgctctggtgaagtttggtttccccgtcggcccaatccaacttttggatgaggtaggaattgatacggggactaaaattatccctgtgctggaagcggcttatggcgatcgttttgcgccgcctgcaaacgttgtttctgcaattttgaaggacgatcgcaaaggcagaaaaaatgaacgcggtttctatctttacgccgcgaaagggcgtaaaagcaagaaacagatcgacccttcagtttatgcgcttattcctgttacggggcagggaaaactgtcggcggttcagtgtgctgagcgctgtgtgatgatgatgctcaatgaagcggcgcgctgctttggtgagcaggttatcaaaagcgcgcgcgacggcgacatcggcgccgtgtttggtatcggttttccgccattccttggcggcccgttccggtatatggataccctcggggcgggtgaagtggttgcgatcctgcaacgtctggcctcgcaatacggtccacggtttactccgtgtgacgaattattgcagatggcggaacggggtcagacattctggcccgcaagggaaactgattgcgtaaactga

SEQ ID NO: 115725 - DNA, 1311 bp, Enterobacter cloacae
atgagtcaggcattaccgcttatcacccgacacggtgaccgcattgccattgtcagcgggttacgtacgccgtttgcgcgtcaggcaaccgcgtttcacggtataccggctgtcgatctgggaaaaatggtggtgggggagatgctggctcgcagcgagatcccgccagaggttattgagcaactggttttcggccaggtggtgcaaatgccggaagcgcccaatatcgcacgtgaaatcgtgctgggcaccggcatgaatgttcacaccgacgcatacagtgtcagccgcgcctgcgccaccagtttccaggcggtggcgaacgtggcggaaagcctgatggcggggaccattcgcgcggggatcgccggcggcgcggattcctcatccgtactgcccatcggcgtcagcaaacagctggcccgcatcctcgtggatgccaacaaagcccggaccaccggtgcgaagctcaaactcttctcgcgtttacgtctgcgcgacctcatgcccgtgccacctgccgttgctgaatactccaccggcctgcgtatgggcgacactgccgagcagatggcaaaaacctacggtattacccgcgaacagcaggatgcactggcgcatcgctcgcatcagctcgctgcgaaagcctggtcggaaggcaaacttgccgacgaggtgatgacggcttacatcccgcctttccgcgaaccgctggtggaagataacaatatccgtggcacctcgacgctggaggattacgcaaaactgcgcccggcgtttgatcgtaaacatggcaccgttacggcggcgaacagtacgccactgacggacggtgccgccgccgtgatcctgatgacggaatcccgggcgaaagagcttggcatcacaccgctgggctatttgcgtagctacgcctttaccgccattgatgtctggcaggacatgctgctcggtccggcctggtccacgccgctggcgctggaccgcgcagggctgacgctctccgatctcacgctgattgatatgcatgaagcctttgccgcacaaacgctggcaaacgtgcagcttatggcgagcgaacgttttgcccgcgacgtgctgggccgtacgcatgccacaggcgaagtggatcagagtaaattcaacgtgctgggtggctctattgcctacggtcatccgtttgcggcgaccggcgcgagaatgataactcagactttgcatgagctgcgtcgccgcggcggcggttttggtctcgttaccgcctgtgcggcgggcggcttgggtgcagcaatggttctggaggctgaataa

SEQ ID NO: 115726 - DNA, 285 bp, Enterobacter cloacae
atgagtaaatgcagtgctgatgaaaccccggtttgctgctgtatggatgttggcaccattatggacaacaccgattgcaccgcctcttacagccgcgtattccctaaccgcgctgaagcggaagagacgctggccgcgctgggccagcgcgcgcgtgaagtcgaatctgatccgtgtgaaatcaaatccaccttcacggaagtggaaggcggcgtgcggctggatatcgactttgtgttcgcctgcgaagcagaaacgctgatcttccagctgggcctgcgttaa

SEQ ID NO: 115727 - DNA, 1284 bp, Enterobacter cloacae
atgagccagaaaaccctgttcaaacaaactgctttagcagttgcagtggcaatcgtctcaacgtccgcctggtcagcgggcttccagttaaacgaattttcttcctctggccttggccgtgcgtattccggggaaggtgcgattgccgatgacgcaggcaacgcgagtcgtaacccggcactgatcatgatgtttgatcgccctaccttctctgccggtgcggtttacatcgatcctgatgtcaacatttctggcaaatctcagttcaccggcgcagatctgaaggcggataacattgcgccgaccgcgtgggtgcctaacctgcactttgttgcgccaatcaatgaacagtttggttggggtgcctctgtcacctctaactatggcctggcaacggagttcaataacaactatccggccggggaatacggcggtaaaaccgacctgacgaccctgaacctcaacctgagcggcgcatatcgtctgaacgataactggagctttggtctgggctttgatgctgtctacgccgatgcaaaaatcgagcgttactccggggagcaaactgctgcactgccgaaaaacagcaataaaattgccagcctgaaaggtgatgaatggggttacggctggaacgccggtatcctgtatgaactggataaaaacaaccgctggggtctgacctatcgctcagaagtgaaaattgatttcgatggcgattacaaaagcggcatcctgagcccagtcaacggtatggtcccaggcgcgggcaccaccattccatggggtacctcgaatcaaaccgtaccgggttcactgtcgctgcatctgccagaaatgtgggaagtgtcaggttataaccgcgttgcgccgcagtgggcaattcactacagcctcgcgtataccagctggagccagttcgaggagcttaaagccaccggcagcaacggccagacgctgttctataaagacgaaagcttccacgatgcttaccgtatcgcgcttggtacgacctattatatggatgacaactggacgttccgtaccggcgtggcatttgatgacagcccggtaccggccgataaacgttctatctccattccggatcaggaccgtttctgggtgagtgcgggggcaacctacgcgttcaacgagaatgcctctatcgacgcgggcgtgtcgtacatgcatggccagaaggtgaccttccaggaaggcccgtacgagttttcctctgaaggtaaagcctggctgtttggtaccaacttcaactacgcgttctaa

SEQ ID NO: 115728 - DNA, 753 bp, Enterobacter cloacae
atgaagcttcggctgtcggcgcttgcgctgggcgtaacaatgcttgtgggctgcgccagctctggcgagcaaacgggacgctccgatcctctcgaaggatttaaccgttcaatgtacagctttaactataatgtgctggatccatatctggttcgtccggttgccgtggcatggcgtgactatgttccgcagccggcgcgtaacgggctgagcaactttaccagtaacctggaagagccagcggttatggtcaactacttccttcagggcgacccgtatcaggggatggtgcatttcacccgcttcttcctgaactccctgctgggtatgggcggcttaattgatgtcgcaggcatggcgaacccgaaattacagcgtgaacagccgcaccgtttcggcagcacgctgggtcattatggcgtaggttatggtccgtatgtgcacctgccattctacggcagctttaccgtgcgtgatgatggcggcgacatggtggatacgctgtatcccgtactgtcatggctcacctggccgctgtcgattggtaaatggaccgtggaaggaattgaaacgcgtgcgcaactgctggattctgatggtctgctgcgtcagtcttccgatccgtacatcatggtgcgcgaggcctacttccagaaccatgactttattgccaacggcggtaagctgaagccggaagataatccgaacgcgaaagccatcgagaacgaattaaaagatatcgattcggaataa

SEQ ID NO: 115729 - DNA, 930 bp, Enterobacter cloacae
atgaaagacattagcgaagagaaaattggtgaaagcaaagaggaacatgagattgaaagcgaggagaaagaccggggagaagagatagaagtcgatgaagagcgcctgccgtcgcgcgccatggctattcatgagcatattcgccaggacggggaaaaagagatggagcgcgacgcgatggccctgctgtggtcagccattgcagccggtctgtcgatgggtgcctctctgctcgccaaagggatatttcacgttcagctggaaggcgtaccgggcgggtttttgcttgaaaatttaggctacacgttcggctttattatcgtcattatggcgcgacagcagctttttacggagaataccgtcactgccgtactgcccgtcatgcaaaatccgaccctcggtaatttcggtttactgatgcgcctgtggagcgtcgtgctgctggggaacctgatcggtacgggcatagccgcctgggcattcgagtatatgccaatatttgatgaaccgacccgcgacgcatttgtgaaaattggcatggatgtgatgaaaaacacgccggttgaaatgttctctaatgccataatttccggctggatcatcgccactatggtctggatgttcccgtcagcgggtagcgcgaaaatcgtggtaattatcctgatgacctggcttatcgcactcgccgataccacacacattgttgtcggaactgttgaaatcctttatctggtatttaacggcacactccactggagcgactttttctggccgttcgccctgcctaccctcgcaggcaacatttgtggcgggacctttatctttgcgctgctgagccatgcgcaaatccgtaacgacatgtccaacaagcgtaaggccgagcttaaggctcaggaaaaaaaggataaaactgccgaaaaatcggcgtga

SEQ ID NO: 115730 - DNA, 1380 bp, Enterobacter cloacae
atggaaacctacctgcaaacggtgaaagaagagtgggtgaagctgattaatgaaaccgatcccgatgtgcatcggcttgcgactgagcttgccagggataatgcaatgccactggtcgctgaattctatcgtgttgtgctggcagatccatcggcagctgaattcctgaccaccgaacaggtggagaggcagcttcaggaggcgcttcgtcgctggcttattgatgtgctctcatgccgtgtggagcaggttgaagagcagatgcgggcgcagcagcgcgctgcggatgttcatgcccgtattggtatttcggttgatttagttgaaatgggcttccgtgttctgaaaaagctgctgttacctgtcattactaccagcgcccattcgcctgaggtgaagctgcatatttatcactacgcgataaacagtatcgatctggccatggaagtgatgtcgcgggcctatgtatttagcgagaacaatgcggcgaaagaggacgaaaattatcgcatcttttccttaatggagaacgcagaagaggagaaggagagacagaccgcggcgctgctgtcatgggaaatggtgcttctgtataagatcacgcttaattccagtatcggcaacagtctgccgctggggcagtctgaatttggactgtggtttagccataaaggtcggcactatttcagcggcatcgctgaggccggtcatatctctcgtctgattcaggaattcgatgacctttttaacgaggtccgtcttgcagggcagggtctgagtgataaagcgcagcgggataaattcttgcagcgaatgcgtaataccctctcgcaaatcatcacgcttttgcgcgaactgtttgacgaagtgtcgcgacacgaggtgggggttgatgtcctgacccgcctgttgaatcgccgtttcctgccaaccatcttcaaacgcgaaatcctgcacgccacccgggcgggaacaaagctctcgacgctgctgattgacgtcgacaaatttaaacaaatcaacgatacctgggggcacaataccggggacgagatcctgcgaaaagtctccggcgcgttctacgacaacgtgcgaacctgtgattacgtttttcgctacggcggcgatgaatttctgattgtgctaacggaaatctcagaggtggacgcgctgcgaattgccgagcgtatccgcaggcgggtggaaaaaatcaaggttaactccccaaccggcgatattatcccgctctccctctcgataggcgttgcgatgttcaacgggcatcccgattacgagcgattgattcaggcggcggatgaagccttatacggcgcgaaacggcgtggccgaaactgcgtggagctttggaagggggcgtaa

SEQ ID NO: 115731 - DNA, 918 bp, Enterobacter cloacae
ttgtctcaatccaaatttcagcgggcgtttctgcacccgcgctactggtttacatggttcggccttggcgtgctttggctgctggttcaacttccatatcccgtgatccgtttcctgggttctaagctcggcagcgcatcgcgttactttcttaagcgccgtgaatccattgcccgaaaaaatctcgaactttgctttccgcattacaatgcccagcagcgcgaaacgctgattgcggaaaactttaaatctatcggtatggcgctgcttgaaaccggtatggcctggttctggccagatgagcgtgtccgtaaatggtttgacgtggaaggcctggataacctgaaacgtgcccagatgcaaaaccgcggcgtgatggttgtgggtgtgcattttatgtcgcttgagctgggcggccgcgttatgggtctttgtcagccgatgatggcaacctatcgcccgcataacagcgcgctgatggaatgggtacaaacgcggggccgcatgcgttcaaataaggcgatgatcagccgtaacaatctgcgcggtatggttggcgccctgaaaaaaggggaagccgtctggtttgccccggaccaggactacggtcctaaaggcagcagttttgcccctttctttgcggttaaagatgtcgctacgacgaacggtacctttgtgatttcacgtctctcaggcgccgcgatgttgacggtgaccatggtcagaaaagcggataagtcaggctatcgtctgcatatctccccagagatggcgaactatcctgaagatgagagtgaagccgcgacctttatcaataaggtgattgagtttgagattatgcgtgcacctgagcagtatctgtggatgcaccgccgctttaaaacccgtcccctgggcgaagcctcactctatatctga

SEQ ID NO: 115732 - DNA, 1236 bp, Enterobacter cloacae
atggctgaattcagtcctgaacgccgttttacgcgtatcgatcgtctccccccttatgttttcaatatcactgctgaactgaaaatggctgcgcgtcggcgcggcgaagacattatcgatttcagtatgggtaaccctgacggcccaacgccgccgcatatcgttgagaaactctgcacggttgcgcagcgtcctgatacccatgggtattccacctcacgcggcattccacgcttacgtcgggcgatctcccgctggtatcaggatcgttatcaggtcgatatcgatcctgaaagtgaagcgattgtgaccattggctccaaagaggggctggcccacctgatgctggcgacgctggatcacggcgataccgtactggtgccgaatccgagctaccccattcacatctatggggcggtgattgccggcgcgcaggtgcgttctgtcccgctggtggaaggcgtcgacttctttaacgagctggaacgggcgattcgtgaaagctatccgaagccgaaaatgatgatcctcggtttcccgtcaaacccaacggcacaatgcgttgaactcgaattcttcgagagagtggtcgcgctggctaagcgttacgacgtgctggtggtacacgatctcgcctacgccgatatcgtttatgatggctggaaagcgccgtcaattatgcaggtaccgggtgcccgtgatgtggcggttgagtttttcaccctgtcgaaaagctacaacatggcgggctggcgaattggttttatggtgggaaacaaaacgctggtgagcgccctggcgcgtattaaaagctaccatgactatggcacctttacgccgttacaggtcgcggccatcgcggcgctggaaggggatcagcaatgcgtgctcgatattgccgctcagtacaaacgccgccgtgatgtgctggtaaaagggcttcatgaagcaggctggatggtggaaatgccaaaagcctctatgtacgtctgggcgaaaatccctgagccgtatgcggcgatgggttctctggaatttgccaaaaaactgcttcaggacgccaaggtttgcgtctctccaggcattggctttggtgactacggtgacacgcacgtgcgtttcgcgctgattgaaaacagcgaccgtatccgtcaggcagtgcggggcattaaaagcatgttccgcgcggatggcctgcttgcagcgaagagcgttgcggaacaacccgagtcgtaa

SEQ ID NO: 115733 - DNA, 1698 bp, Enterobacter cloacae
gtgcacgaaatcttcaatatgctcctggcggtgttcgaccgcgcggcattaatgctgatctgtctctttttccttatccgcatccgcttgttccgcgaactgttgcataaatctgcccattcgccaaaagagctgctggccgtcacgtttatcttttcgatgtttgccctgttcagcacctggtccggggtgccggtagaaggctcgctggtgaacgtgcgcatcatcgccgtcatgtcgggcgggatcctctttggtccctgggtagggattatcacaggcatcatcgccggcacccatcgatacctgattgatattggcggcgtgacggcagtcccctgctttatcaccagcattattgccgggctgctctcgggctggattaaccgcaaaatcccgaaaaagcagcactggcgtgcagggattatcgcggggatggtctgcgaaacgctgaccatgatcctggtcatcgtctgggcgccaaccgttgcgctggggctggatatcgtctcgaagatcggtattcctatgatcctcgggagcgtctgtatcggttttatcgtgctactggtgcaaagcgtggagggcgaaaaagaggccagcgccgcgcgtcaggccaagctggcgctggatatcgccaacaagacgctgccgcttttccgacacgttaacgccgaatctttacgtcaggtttgcgatatcatccgccgtgatattcacgccgatgcggtcgccatcaccaatattgaccacgtgctggcttacgttggcgtcggggagcacaattatcgcgacagcgacgataccatcagcccgaccaccagacaggcgattaactacggaaaaatcatcattaaaaacaatgatgaagcccaccggacgccagagatccactcaatgctggtgatcccgctgtgggaaaaaggcgtggtcacggggacgctgaaaatttactactgccatgcgcaccaaatcacctcctcgctccaggagatggcgattggcctgtcgcagattatctccactcaacttgaggtttcgcgtgcagagcagctgcgcgagatggcaaataaggcagagctgcgcgccctgcaaagcaagatcaatccccatttcctgtttaacgcgctgaacgctatctcctcttccatccgtctgaatccggataccgcgcggcagctgatatttaatctgtcacgctatctgcgctacaacattgagctaaatgacgacgagcagatcgacatcaaaaaagagctgtatcaaatcaaggattacatcgccatcgagcaggcacgctttggcgataagctcacggtcatttacgatattgatgaagaggtcagctgcgtgatcccaagcctgctgatccagcctctggtggaaaacgccattgttcacggtattcagccgtgtaaaggcaaaggcgtagtaacgattagcgtgacggaaagcggtaaccgcgtgcgcatcgccgtgcgcgataccgggcacggcatcgatccgaaagtcatcgagcgcgtcaaatcaaacgaaatgccgggcaacaagatcggactgctgaatgtgcatcaccgggtcaaactgctgtacggtgacgggctgcatattcaccgtcttgagccgggcaccgaaattgccttttatgttccgaatgagcgaacgcccgtgaatgcccccatatccttgttgccgtag

SEQ ID NO: 115734 - DNA, 732 bp, Enterobacter cloacae
atgaaagtcatcatcgtagaagatgaatttctggctcaacaggagttgagctggcttatcaaaacccacagccagatggagattgttggctgttttgaggatggtctggacgtgctgaaatttttacagcataaccgggtcgacgcgatattcctcgatattaatattccgtcgctggacggcgtcctgctggcgcaaaatatcaatcagttcgcccacaagccgtttattgtgtttgtcaccgcgtggaaagagcatgccgtggaagccttcgagcttgaggcgtttgactatattctgaagccgtaccaggagtcgcgtattatcagcatgctgcataagctggaagccgcgtggcagcagcaagcattacccgccagtgccagcccggtagcgcgggaaaacgacaccattaatctggtgaaggacgaacggatcatcgtcacgcctgtcgacgatatttactatgccgaagcgcatgaaaaaatgacgtttgtctatacgcggcgtgaatcctacgtcatggcgatgaacatcaccgaattctgcaataaactcccggccgctcacttcttccgctgccaccgctcgttctgcgtcaacctgaacaagatccgcgaaatcgaaccctggtttaataacacctatattttgcggctgaaggatctggattttcaggtgccggtaagccgcagcagggtgaaagagttccgccagctcatgcacctgtag

SEQ ID NO: 115735 - DNA, 966 bp, Enterobacter cloacae
atgacaaagtatgctttggtaggtgatgtaggcggcaccaacgcgcgccttgccctgtgcgatgtgaacagcggtaaaatttctcaggcgaaaacctattcagggctggattacccaagcctggaagcggtggttcgcgtctatctggaagagcataaagtgagcgttgaagacggttgtatcgctatcgcctgtccgatcaccggcgactgggtggcgatgaccaaccacacgtgggccttctcaattgccgaaatgcggaaaaacctcggcttctcgcaccttgaaattatcaacgacttcactgcggtttccatggctatcccaatgcttaaaccagagcatctgattcagttcggcggtacggccccggttgaaggcaaaccgattgccgtttacggcgcgggaaccggtctgggggtggcgcacctggtccacgtcgacaaacgctgggtcagcctgccgggcgaaggcggtcacgtggattttgcgccgaacagcgaagaagagggcattattcttgaggagctacgcgccgagatcggtcatgtgtcggccgagcgggtgctttctggtccgggcctggtgaacctgtatcgggcgattgtaaaatcagacggtcgtctgccggaaaatctgcaacctaaagatgtgaccgaacgcgcgctggccgacagctgtattgactgccgccgcgcgttgtcgctgttctgcgtcatcatggggcgtttcggcggcaacctggcgctgaaccttggcacctttggcggggtctatattgcgggcgggatcgtaccgcgcttcctcgatttctttaccgcctccggcttccgtggcggcttcgaagacaaaggccgcttcaggagctatgtccaggacattcctgtttacctgattgtccacgacaacccaggcttactgggctccggggcgcatctgcgtcaggtactgggtcagatcctctga

SEQ ID NO: 115736 - DNA, 1236 bp, Enterobacter cloacae
atgctccatccgcgagccagaaccatgctgttattggctgtcccggcgctgattattggcgtggcgtcgagcctggtgctcatcgtcgtcatgaaagtggcggcggtgctgcaaacgattttatggaccgcgcttccggtaaaactcggcatcagcattgactcgccgggctggatcatgatgatgctgaccctgaccgggattgccgtagggctggtgatccgctatagcccgggtcatgccgggccggacccggcactggaacccttgattggcgcgcctgtctctccctctgctctgccggggcttattatcgcgctgattatcggtcttgcgggcggcgtaagcctcgggcctgaacatcccattatggcggttaatatcgcgctggcggtctttctgggggcgcgtcttttcccgcgcgttggcgcgctggactggacgatcctggcgtcagcaggcaccatcggggcgctgtttggcactccggtcgcggctgcgctcattttttcgcaaaccctcagcagtgatcatgaagtaccgctgtgggataaactcttcgcgccgctaatggccgccgctgcgggagccctcaccaccagcctgtttttccatccccatttttcactcaccatcccccactacggccagatgcaactcaccgatattttcagcggtgccgtcgtcgtcgcgatcgccattgcgctggggatggtcgcggtgtggtgtctccctcgcctgcatcgcctgatgcacaggctgaagcatccggtgctgattctgggcatggggggttttattctgggcgttttaggcgccatcggcgggacggttacgctgtttaagggtctggacgagatgcagcagctggccttcagccaggtctttagcgtctccgattatctgctgttcgcgctggtaaaactggcggcgctggtggtcgctgcggcctgtggtttccggggaggtcgaatcttcccggcggtatttgttggcgtcgcgctggggctgatgctgcatgagcacgttgacgctgtccctgcggcgattaccgtctcctgttccattctggggctggtactggtggtcacgcgcgatgcgtggctgagcctgtttatggcggccgttgtcgtgccggataccacgcttctgccgctgctctgtatcgtgatgttgcccgcctggctcctgctggcgggcaaaccgatgctgatgggatggcgaaacgacaggtaa

SEQ ID NO: 115737 - DNA, 1659 bp, Enterobacter cloacae
atgcgtaccccctattgcgtcgccgattacctgctggaccgactaacagattgtggtgccgatcatctgtttggcgtgccgggcgactataacctgcaatttctcgatcacgtgatagacagcccggacatctgctgggtgggctgtgccaatgaactgaacgcgtcttacgccgcagacggctatgcccgctgtaagggctttgccgcgctcctgacgacattcggcgttggggagttaagcgccatgaacggtgtggcgggcagctttgccgaacatgttcccgtcctccatattgtgggggccccgggtatggcggcgcagcagcgaggagagttattgcaccatacgttgggcgacggcgagttccgccatttctatcatatgagcgaacccatcaccgttgcacaggcggtgcttaccgaacaaaacgcctgctatgaaattgacagagtcctgaccactatgctgcgggagcgccgtccgggctacctgatgctgcccgctgatgtggcgaaaaaagccgctacgccccctgtaagcgctctcactgttaaccccgcaccggctgattcagcctgcttgcaggcgttccgtgaggctgccgaaaagcgcttgtccacgagcaaacgcaccgcgctgttagcggacttcctcgtactccgccatggtctgcgcacggcccttcagacgtgggtgaaagaggtgccgatggcacacgccaccatgctgatgggcaagggcatttttgacgaacgacagagcggttttgacggcacctacagcggatcggcgagcgccgcgccggtcaaagaggccatcgagggggctgatacggtgctgtgtattggcacgcgctttaccgatacgctcactgccgggtttacccaccagctgacgccggaccagacgatagaggttcagccccacgcgtcccgcgtcggcgacgtctggtttacgggtatcccgatgagggaggccattgaaacgctgacagcgctgtgtaaaacctatgttcgtgatacgcgagcgccattggatcacagcggcttttcgttcccgactatcgaaggggcgctgactcaggagagcttctggcgtaccctgcaaacgtttatccgccccggagacattattctggctgaccagggaacgtctgctttcggcgctatcgatctgcgtttaccggcggacgtgaactttatcgtccagccgctgtggggatcgattggctacacgctggcggcagcatttggcgcgcaaacggcgtgtccgaaccgacgcgtgattgtcctgacgggtgacggcgccgcgcagttgaccattcaggagctgggatcgatgctgcgcgacaaacagcgcccgattattctggtgcttaacaacgaaggatacacggtggaaagggccatccacgggccggagcagcgctataacgatattgccctctggaactggacgcagatcccgcaggcgctgagcctggcgcctcaggcagagtgctggcgcgtcagcgaagcggaagcgctggcggaggtgctggataaagtggcacaccatgagcggctttcgctgatcgaggtgatgctgccgaaagccgatattccgccgctgctgagcgcgctgaccaaagcgctggaggcgcgcaataacgcctga

SEQ ID NO: 115738 - DNA, 999 bp, Enterobacter cloacae
atgggttatcagcctgacaaaaatcgttaccagacaatgcaatatcgccgctgtggacaaagcggtcttaagcttcccgccatctcgctggggctttggcataattttggcgacgcgacgttactcgaaaacagccgtcaacttttacagcgtgctttcgatttgggtattacgcattttgaccttgccaataattacggccctcctcctggttcggccgaacgtaattttgggcgcattttgcaggaggatttcctgccctggcgcgatgagctgatcatctccactaaagcgggctacaccatgtgggacgggccttatggcgactggggctcacgtaaatatctgatcgccagcctggaccagagcctcaagcgtatggggctggagtacgtcgatattttctatcaccaccgcccggatccacaaacgccgctacgtgaaaccatgaaagcgcttgaccatgtggtgcgtcagggcaaggcgctgtacatcggtctgtccaactacccggcagaacgggcaagacaggcgattgaaatactggaggatctgggcacgccatgtctgatccaccagccgaagtactccatgtttgaacgtgcgcctgaagaggggttgctggacgtgttgcagcaaaaaggggtgggatgtatccccttctcccccctggcgggcggacagttgaccgatcgctatctgaacggtatcccggcggattctcgcgcagcaagcggcagtaagttccttaacccggagcagatcaccgacaaaaagctggaaaaggtacgcaagctgaatgcgctggcggaaaaccgggggcaaaagctatcgcaaatggcactggcctggatcctgcgccacgatgcggtgacatccgtgctcatcggcgcaagcaagaccggacaaattgaagatgcagcaggcgtgcttgagaattgtcggttcacggcagaagagctgaagacgatagatacgatcctgtccagttcagattaa

SEQ ID NO: 115739 - DNA, 348 bp, Enterobacter cloacae
atgttcaggtcactgattcttgcagcggtattactggcttcggccccgctggtcgccagtgcgggcgaaatcaccctgttgccatcgattaaattacaaattggcgatcgtgatgactacggcagatactgggacggtggctactggcgcgaccgtgactactggcatcgccattatgaatggcgtcaaaaccgctggtggaaacacgataacggctatcaccgtggctgggataagcgtaaggcttacgaacgcggctaccgcgaaggctggaacgatcgcgacgaccgccgtggcggctggggtcacggaaaaggcagaggccacggtcacggccatcaccattaa

SEQ ID NO: 115740 - DNA, 1239 bp, Enterobacter cloacae
atgacgaatagtcgcgtagagagtagcagcggcagagcggcacgcaagctgcggttcgcattaatgggaccagcattcattgccgcgattggctacatcgatccgggtaattttgcgaccaatattcaggccggggccagtttcggctataaactgctgtgggttgtggtatgggccaatctgatggcgatgctgattcagatgctctccgcgaagctgggtattgctaccggaaaaaacctggcggagcaaatccgcgatcattatccacgtccggcagtttggttttactgggttcaggcggagattatcgccatggctaccgatctcgccgagtttatcggggcggcgatcggctttaagcttatcctgggcgtctccctgcttcagggggccgtgctgaccggtatcgccactttcctgattctgatgctccagcggcgggggcaaaaaccgctggagaaagtcatcggcggcctgctgctgttcgtcgctgccgcctatattgttgagctgattttctcccaaccgaatctggcgcagctgacgaaagggatggtgatcccgtcgttacccacttctgaagccgtttttctggctgccggggtgctgggggcgaccattatgccgcacgtcatttatctgcactcttcattaacccagaatctgcatggcgggacgagtaaagagcgctactccgcctcgaaatgggatgtgactatcgcgatgaccattgccggatttgtgaatctggcgatgatggcaaccgccgccgccgcgttccactttaacgggcataccggggttgccgatctcgaccaggcttacctgacgctggagccgttgctgagccatgccgcagccactatttttggtttaagcctggttgctgcgggtctttcatctacggttgtggggacactggccgggcaggtggtgatgcaggggttcgtacgtttccatattccgctgtgggttcgccgctcggttacgatgctgccttcctttgttgtgatcctgatggggctggatccgacccgcattctggtgatgagtcaggtactgctgagtttcgggattgcgctggcgctggtgccgctgctgatcttcaccagcaacaaatcgctgatgggcgatctggtgaattcgacgtgggtgaagcgcgccgggtgggccattgtggtcgtggtggtggcgttaaacttgtggttgctgataggcacagccgcaggcctgtaa

SEQ ID NO: 115741 - DNA, 1188 bp, Enterobacter cloacae
atggaccgcgtccttcattttgtcctggcactcgttgtcgttactgcacttgcattgctggtcagcacagaccgcaaaaaaattcgtattcgctatgttgtccaactgctggtcattgaagttttacttgcgtggttcttcctgaactccaacgtaggcctgggcttcgtgaaaggcttctccgaaatgttcgaaaaactgctcggatttgccaacgaagggacaaacttcgtctttggcagcatgaacgatcagggtctggccttcttcttcctgaaggtgctctgccctatcgtcttcatctctgccctgatcggtatccttcagcacatccgcgttctgccggtggttatccgtgcgatcggcttcctgttatcgaaagttaacggcatgggcaaactggaatcctttaacgcagtcagctcgctgatcctgggtcagtctgagaacttcattgcgtataaagatattctcggcaagatgtcccgtaaccgcatgtacaccatggcggcaaccgcaatgtctaccgtttccatgtctatcgtgggcgcgtatatgaccatgctggaaccaaaatacgtagttgcggcgctggttctgaacatgttcagcacctttatcgtgctttcgctgattaacccgtaccgcgtggatgccagcgaagagaacattcagatgtcaaacctgcacgagggacagagcttcttcgaaatgctgggtgaatacattctggcgggtttcaaggttgcaattatcgtcgccgcgatgctgattggctttatcgcgctgatcgctgcgctgaacgccctgtttgcggccgtactcggtatctcctttcagggtattctgggctacatcttctacccgattgcctgggtgatgggcgtgcccgctcacgaagcgttgcaggtgggcagtatcatggcaacgaaactggtttccaatgagttcgtggcgatgatggatctccagaagattgccagcacactctcccctcgtgcggaagggatcctgtccgtcttcctggtctccttcgcgaacttctcttccatcggtattatcgctggtgcgattaaaggcctgaacgaagagcaaggtaacgtcgtttctcgctttggcctgaagctggtttacggttcaacgctggtgagcgtcctgtctgcctctattgcagcactggttctgtaa

SEQ ID NO: 115742 - DNA, 2154 bp, Enterobacter cloacae
atgattgccctggcgctaagcctgattgcgattcctttttctcgttatatctctccacgggccatcgtcagcgaaaatgatgtttatctggcgtggttgcccttaagtgccatgctcgccatcgtgttgttatttggacggcgggcaatcattcctttgctgttaagttttagtattactaatatttataatcttgatttagcgccactacaatctgccgtattattatgttgtcagacgtttaccgtcttcgccgcctgtggcgtcatccgtctggtgctgggcaagcgctggcgacacagcataccgaataagtacattggcatacgtattttctggctcggatttatggtgcctgtgggcatcaaattatcgatgtatctggcgggatatttatttgattttccggtgacaatctcctcctatttcggcgaaggctctgcaatttataacgttatcgatattcagagtctgatttgtgccgccctgattttcaccatgatgttctattacccgttaagaatgattattaatcctcgctatgcccgaacattctggcggcgaagcgtgaagcccctcttttgtcacaaaaaagcgttatttatcgttgtttggctgatgctgttgacttcgatgatcgctattttatgcgcgccttttgagtcgcagtttattgcgggttatttgatgccaatcgttttcattctttttaccctggggattggtcgtctgagctatgcgctcatctctttattctgggcggcctcggcgctcatgctgttgacctataattataattttcttaatggcgttgaatcgggccactcgctctcctttatcctgtcggtgcttatctctttcgccatctgcctgctttacatgtcgcggatctatcagaaaagtgaatggctgaaacaggggtggcaggagagggcgcttaccgatccgctcaccggtctgcctaacattcgtgcgctggaagtgtttttacagcaccatcccgaggccaaagtctgctgcctgcgcctggataatctcgaattcctgagccgtcactacggcatcctcatgcgtgtacattgtaaaaagatgatcaccgcgtcgctgcaaccgttattgcaaaaagacgagaagctcttccagttgccgggcagtgagctggtggtggtcttgctgggtccgggcacggctgaacgtttgcaatatatggtcgatcatctgaacagccgtaagattatctggaacaagactgagctcgacattgagtttggcgcctcctggggggaagtgccggatggagaaagcctgcatcacacgttgggtcagctgagctggctttccgagcagtcctgtgccgggcacaacgtcctggcgttaaccaacagtctggatgatgtctccggtcagacgacggacagagtgctgatgctggcccgcataaaacgcgcccttgatatcggtgggcttcacctttacgcccagccaatccataacgcgcgtggggaagggtactttgaaatcctctcaaggcttgaaagcgagggggagatcatcacgcctgatcgctttattccgctgattgctcagtttaacctgagccaccgatttgacctgaacgtggtggaaaaattgctgatgtggatgcgcagccatccgtccgaacgggccggaacgcggttctccgtaaatctgatgccgctgacgctgatgcaaaatgagattgcggctgagatcatcgcgctttttgaacgctacgccattgcgccgcaagatatcgtcattgagatcaccgaggaacaggctttctctgactcgggaagcagcatcaacaatatccagcagctgcgggattacggcttccgcattgctattgatgactttggtaccggctatgccaactttgagcgcctgaagcggctggaggccgatatcattaagatcgatggctgcttcgtgaaagatatctgcaccgacagcatggatgcgatgatcgtgcagtccatttgcaacatggccaaaacgaaatcgctttgtgtggtggctgaatatgtggaatcggctgaacaacgcgagatgttgctgcgattcggcgtggactatttgcagggctatttgattggtaaaccactgcccctgacggcgctggaggcataa

SEQ ID NO: 115743 - DNA, 363 bp, Enterobacter cloacae
atgatcaaggaacgaatgacgccagaagagttagccctgctcactggctatagccgacagaccatcaataaatgggtacgcaaagagggttggattacatcgccaaagccaggcgttcagggtggcaaagcgcgtctggtacacgtcaatgaaaaagtgcgcgactttattcgcagcgcgcgcagggcaacagagacgccggaactgccagataaggcgtaccacgagggctcgcttcatgccctgctcctgacgctggcgaatgaaatgacgccggaagagcaaaagcagatgacatcgctgttactgcgggaagggattaccggcttgttacaacgtttagggattcgcgaccaacgctga

SEQ ID NO: 115744 - DNA, 366 bp, Enterobacter cloacae
atgaccacggaagagctggcggacagtctgggcgtagcccgacaaaccgttaatcgctggatacgacagaaaggatggaaaacggagggtatcaacggtgtaaaaggcggaagagcgagggtgatatgtattgatgcgcacgttaaggagcacatcattagtcttcccgccattcgtaaccgtcgggctgtttaccatgtggcggaaagcccttcccactacggcgtggcaacctcatccagcctgcttccacaaattatcgactcgctggaaaacatgacgactgtcgaacaggaacgtttgcacaagttgctcgctcgtgaagggttgcagggttttctcacgcgtcttggtattgctgaataa

SEQ ID NO: 115745 - DNA, 1416 bp, Enterobacter cloacae
atgaaaatcaaaactcgcttcgcgccgagcccgacaggctatctgcatgtcggtggtgcacgtaccgctctctactcctggcttttcgcacgtcacaacaacggtgagtttgtgctgcgtattgaagacaccgatctggagcgctcaacgccggaagcaattgaagccattatggatgggatgaactggctgaatctggcgtgggacgaaggcccatacttccagaccaaacgttttgaccgctataacgccgtaattgacgagatgctggtggcaggcacggcctataagtgctactgctccagggagcgtctggatgcgctgcgcgaagagcaaatggcaaaaggcgaaaaaccgcgttatgacggtcgttgccgccatgaccacagcgagcatgctgcggatgagccttgcgtagtgcgttttgctaacccacaggatggctctgttatctttgatgaccagatccgcggcccgatcgaatttagcaaccaggagctggatgaccttatcattcgtcgtactgacggatcgccaacctataatttctgcgtagtagtggacgactgggatatggaaatcactcacgtgatccgtggtgaagaccatatcaataacaccccgcgtcagatcaacattctgaaagcgctgaacgcgcctgtaccggtgtatgcgcacgtatcaatgatcaacggtgacgacggtaaaaagctgtccaaacgtcatggcgcggtgagcgtgatgcagtaccgtgatgacggctatctgccggaagcgctgctgaactacctggtgcgtctgggctgggctcatggtgaccaggagatcttcagccgcgaagagatgatcgagctgttctctctgaactcggtcagcaaatcagccagcgcgttcaacactgacaaactgctgtggctgaaccatcactacatcaataccatgcagccagaatatgtggcgacttatctgcaatggcacattgaacaggcaaacatcgatacccgtacgggccctgaactggcggatctggtgaagctgcttggcgagcgttgcaaaacgctgaaagaaattgctgaaagctgccgttacttctatgaagagtttgacgcgttcgacgccgacgcggccaagaaacacctgcgtccggttgcgcgtcagccgctggaagtggtgcgtgataaactcgaagccattaccgaatggactgcggaaaatgttcaccacgcgattcaggctaccgctgatgagctggaaattggcatgggtaaagccggtatgccgctgcgcgttgcggtgacgggggcaggccagtctccggcgctggatgtgaccgttcatgccatcggcaaatcacgtagcgttgcgcgtatcaacaaagcgctgggctttattgctgagcgtgaaagccagcagtaa

SEQ ID NO: 115746 - DNA, 1254 bp, Enterobacter cloacae
atgtcgggatccaattcagcaataagccgccgccgcctgttaaaaggggccggggcgatgtggttgcttagcgtcagccaggtgggtcttgccgccacaagccaggtagtcgcggtgcgcgtctggccgtcgtcgacctatacgcgcgtgacggtcgagtccaatcgcgtgctgaactacaagcaatttgccctcagcaatcctgaacgtgtggtggttgatctcgaaggtgtgaacctcaactccgtgcttaaaggcatggcagctcagatccgtggcgacgatccgtttattaaatcggcgcgcgtcgggcagttcgatccgcaaaccgtgcgcatggtgtttgagctgaagcagaacgtgaaacctcagctctttgcccttgcgcctgtagccgcctttaaggagcgtctggtgatggatctctatccggcgaatgcgacggatattcaggatccgctcctggcattacttgaggattacaacaaaggcgatctcgacagccaggttccgccagcgcaaagtggcccacagccgggcaaggcggggcgcgatcgcccgattgtgatcatgctcgatcctggccacggcggagaagattccggcgccgtcgggaaatatcgcacccgcgaaaaagatgtggtgctgcaaattgcccgtcgtctgaaggcgttgatcgacaaagagggcaatatgcgcgcctacatgacgcgcaacgaagatgtctttatcccgctgaaggtccgcgtggcaaaagcgcaaaagcagcgcgcggatctgtttgtctctattcacgcggatgccttcaccagccgccagccgagcggatcttcagtgtttgccctgtcaacgaaaggggcgaccagtaccgccgcgagatacctggcggacacgcagaacgcctcggatttaattggtggcgtgagcaaaagtggcgaccgttacgtcgaccatacgatgtttgatatggtgcagtcgctgaccattaccgacagcctgaagtttggtaaagcggtgctgggcaagctgggccgggtcaacaagctgcacaaaaacagcgtcgagcaggccggatttgcggtactgaaagcgccagatattccatccattctggtcgaaaccgcgtttatcagtaacgtggaagaggaacgtaagctcaagacggctaaattccagcaggaagtggcggagtcgattctggcggggatccgggcctacttctcagacggggaaacgctggcgcggcgggggtag

SEQ ID NO: 115747 - DNA, 1332 bp, Enterobacter cloacae
atggttaaggaacgcagaaccgaactggtccagggattccgccattctgttccctatatcaacacccatcggggaaaaacgtttgtcatcatgcttggcggcgaagccattgagcatgaaaacttttccagcatcgtcaatgatatcggcctgctgcacagcctcggcatccgtctggtggtggtgtatggcgcacgtccgcaaattgaagccaacctggccgcccatcaccatgagccgatctaccacaaacacacgcgcgtgacggatgcgaaaaccctcgagctggtcaaacaggcggcgggtctgttgcagctcgatatcaccgcccgcctgtcgatgagcctgaataatacgccgttgcagggcgcgcacatcaacgtggtgagcggcaactttatcatcgctcagccgctcggcgtggacgatggcgtggattactgccacagcggccgcatccgccgtattgatgaagaagccattcaccgccagttagacaatggcgcgatcgttctgatgggccctgttgccgtctccgtaacgggtgaaagttttaatctgacctcagaagagattgccacccagttggccatcaagctgaaagcggaaaaaatgatcggcttttgctcctcacagggtgtcgtgaacgatgagggcgtgattgtgccagaactttttccgaatgaagcccaggcgcgcgtcgaagcgctggaagcagaaggcgattactattccggtaccgtgcgttttctgcgcggcgccgttaaagcgtgccgtagcggggtgcgccgcagccacctgatcagctatcaggaagacggcgcgctgttgcaggagctgttctcccgtgacgggatcggtacgcagatcgtcatggagagcgccgagcagatccgccgtgccaccatcaacgatatcggcggcattctggagctgatccgtccgctggaacaacagggcattctggttcgccgatcccgcgagcagctggagatggagatcgacaagttcaccatcattcagcgggataacctgaccattgcctgtgcggcgctttatccgttcccggaagagcagattggcgaaatggcgtgcgtcgccgtgcatcctgattaccgtagctcctcacggggggaactgctgcttgaacgcgtggcggcacaggcgcgccagatgggtctgagcaagctgttcgtgcttaccacgcgcagcattcactggttccaggagcgcggcttcacgccggtggatattgattccctgccggaaagtaagaaagagatgtacaactaccagcgccgctcgaaggtgttaatggcggacctgggataa

SEQ ID NO: 115748 - DNA, 1821 bp, Enterobacter cloacae
atgacgatgcaggacttattgctggatgcggtagagcaacgcgtgctgcgtcagctggacgtgcagtttgccatgatgattgccgctgaccagcccgccgtgatgcttgccgctgccctgttgagtaaagatgccggagaggggcatgtgtgtctgccgctctcgcgtctggtggttgacgagaaaatgccgcctgtcctccagtcctgctttgcgctgctgggagataaggtggactggcagaaaatcttgcgtgaatcgtcagccgtcgggccgggagacaaccaggcaccgctgatccttacgggggagcgcttatacctgaaccgcctgtggcgaaacgaactgacggtagcgcgtttctttagtgagaccaatgcgccgcttccctgcgacgaagcacagcttcgccagacgctggacaggctgtttgactccggtgaggccacagactggcagaaagtggcggcagccgtcgccctgacgcggcggatctcggtgatatccggcggcccgggaaccgggaaaacaacgaccgtcgcaaagctgctggcagccctgatacagctttcaggcgagcagcgatgccgtattcgtctggcggcgcccaccgggaaggccgcggcgcgtctgaccgaatcactgggcggtgcgatgcaacggctgccgctcacccaggagcagcttgcgcttttcccgggtgaagcaagtactctgcaccgtctgctcggcgcgcagccgggtagccagcggctgcgctaccatgcgggcaatccgctgcatctggacgtgctggtggtggatgaagcctccatgatcgacctgaccatgatgtcgcgcctgatcgatgcgctaccaccccatgcgcgcgtggttttcctgggcgatcgcgaccagctcgcctctgtagaagccggggcggtgctgggagatatctgtacctacgccagttacggttataccgccgcgcgggcgcaggagctcgcccgtctgaccggttgctcgcttgaacccgatcacacgccgatcgcgggcgcactgcgtgacagcctgtgcctgctgcaaaaaagctaccgtttcggtagcgactccggcatcggccagctggctgcggcggtcaaccgtggcgacaggcacgccacgcgcacggtgtttgacggttccttcactgacattgaaaagaaatcgctgcaaagcggggaagagtatcaggctatgcttgaggaggctctccagggataccagcattttctgagctgcgtgcagcagcgcagtcagcccgggcaggtcatcgccgcatttggcgaataccagcttctgtgcgcattgcgggaagggccgtttggcgtcgcgggcctgaacgacaggctggagcagctgctggtgcagaagcgcaaaattaaccgtcagctgcattcgcgatggtatgagggccggccagtgatgatctcccgcaacgacagtgcgctggggctgttcaacggggatatcggcattgcgctcgatcgcggtaacggtctgcgcgtctggttccagctaccggacggtagcgtgaagtccgtccagcccagccgcctgccagagcatgaaacggcatgggcgatgacggtacataaatctcagggctccgagttcaaccatgcggcgctgatcctgccgacacagctgtcgccggttgtgacccgcgagctggtctacaccgccattacccgtgcgcgccagcgtctttcactgtatgcggaagagcgcgtgttgagtcaggcgattgccactcgtaccgagcgcagaagcggattaagcgcgatatttgaatctgtctga

SEQ ID NO: 115749 - DNA, 3543 bp, Enterobacter cloacae
atgacccataccgctgagccgcttgatcccctaagtttacctctacagggtgagcgactgattgaagcctcagcgggaacgggaaaaacctataccatcgccgcgctctatctgcgtctgctgttggggctcggcggcaacgccgctttttcgcgcccgttaagcgtggaagagctgctggtggtaaccttcaccgaagcggccactgccgagctgcgtggccgtattcgcagcaacattcatgagctgcgcatcgcctgtttgcgtcagacaacggataaccccctctacgcgagcctgctggacgagattgcggataagcaacaggctgcgcactggctgctgctggccgagcggcaaatggatgaagcgtccgtcttcaccattcacggtttttgtcagcgcatgttaagcctgaatgcgtttgaatccggcatgctctttgagcagcagcttattgaagatgaatccgagcttcgctatcaggcctgtgcggatttctggcgtcgtcactgttatccattgcagcgcgacattgccgaagcggttcacgccctgtggaaaggtccggaagagcttcttcgcgccatcgaccgttacctgcaaggcgaagcgccggtcattaaatctccgccgcctgccgatgaaacgctggcctcgcgccatgaaaagatcgtcgccaaaattgcggcgcttaagcagaagtggaatgagtcggttggtgaaattgatgcaatcatcgaaaactcaggcatcgacagacgcaagttcaaccgtgggaaccaggggaagtggatcgaaaagatcagcgcctgggcccaggaggagacgcggggctaccagcttccggacgcgctggaaaaattttcgcagcgctttttgaccgagcgaaccaaagccgacggcattgtgcctgagcattccctgtttgtggcgattgatgcgctgcttgcggagccattaacgctcaatgacctgatgatcacccgcgctatgacggagatccgccaggccgtcgcgcgcgaaaaacgtcgccggggcgagctggggtttgatgacatgctgagccgcctggacgaggcgctatccagcgaaaatggtgaagcgctcgccagcgcgatccgtacccgttttccggtggcgatgattgacgaatttcaggacaccgaccctcagcagtaccgcatttttcgccgcatctggcgacagcagcccgacactgccctgttgttgataggcgaccctaaacaggcgatttacgccttccgtggggcagatatcttcacctatatgaaagcccgtagtgaggttgtcgcgcattacacgttagacactaactggcgttccgcgccggggatggttgagagcgtcaatgcgctgttcagccgtatggagacggcgttcatgttcaatgaaatccctttcctgccggtgaaatccgccccaaaaaacgcatccctgcgcttcgaagtcagtagcgcggtgcaacccgccatgaccttctggctgctggaaggggaaggctatggggttgccgactatcaggcggcgatggcccagcactgcgccgcacaaatccgtgactggctgagcgcaggcgcgcgcggcgaggcgctgctttggcagggggaacaggcaaatcctgttaaagcctctgatattaccgtgctggtgcgcagtcgtcaggaagcggcgctaatccgcgatgcgctaacgctgctggatattccgtcagtgtatctctctaaccgcgacagcgtgttcgacacgctggaagcccaggaaatgctctggctgcttcaggcggtgctggccccggagcgcgaaaatacgcttcgaagcgcgctggccagctctatgctggggttgaacgcgcgcgatatagatgagctcaaccatgacgaaaacgcatgggatgcggtggtggaagagtttgtccattaccgtgaacgctggcaaaaacgcggcgtcatggcgatgctgcgcgaattgatgacgcggcgccagattgccgaaaatatgctggcgtcatcgggcggtgaaaggcgtcttaccgatattttacacatcagcgaactgttgcaggaagccggcacccagcttgaaagtgaacatgccctcgtgcgctggctggcgcagcaaatcgcggatccaaacagtaacgccgcaagccagcagatgcgtcttgagagcgataagcatctggtgcaaatcgtcaccattcacaaatcgaaaggtctcgagtatccgctggtctggctgccctttatcgccaactaccgcgttcaggatcaggcctattatcatgaccgcgagactttcgatgcggtgctcgatctcagcaaggcggaaaccagcgttgagctggcggaagcggagcgtctggcggaggatttgcgcctgctttacgtggcgctgacccgttctgtctggcattgcagcctgggcgtcgcgccggttttccgccgtcgcggggagaaaacaggggagagcgatttccatttaagcgccttagggcggcttgttcagcgtggtgagccgaaagatgcggcggggttgcgcctctgtattgagtcgctttgcggagacgatatcgccctgcatatcccttctctgccagacaacagccgctgggaaatggcgcaagagcccgcgaccgatcttaacgcgcgccagatcacacgggtgcttgccgacgactggcgcgtcaccagctactctggcctgcaacagcacgggcaaagtattgcgcaggatctcatgccgaagctggacgtggatgccgcaggggtgggcgatgttccggttgaaccgacgttaactccacatcagttcccacgcggcgcgtcgccgggcacctttttgcacagcctctttgaagagcttgatttcacccagcctgtcagtgaggagtgggtgctgaagatgttgcagagcggaggctatgacgcgcactggcagcccgttctcactgactggatcaacgccattttgcaggcgccgctgacgacgcagggcttctctcttcgccagttaacggccaaaaataagcaggttgagatggagttttatctgcccgtcgcaggcccgcttaaggccgacgcgctcgatgcgcttatccgtcagtacgatccgctgtcagccggttgcccgccgctgaacttccgtcaggtgcagggcatgctgaaagggtttatcgacctggtcttccgtcacgaaggacggtactacctgctggattacaaatcgaactggctgggcgagaacagcgaagcctatacccagcaggcgatggcggcagccatgcaaatgcatcgctacgatctgcaatatcagctctataccctggcgctgcaccgctatttgcgccaccgtattgcggattatcgctacgacgatcattttggcggtgtcatctatctgttcctgcgcggggttgatgctgccgatccgcgctccgggatcttcagcactcgtccggatgcggaattgattaataaaatggataacctgtttgcagcaaacacggaggagatggcatga

SEQ ID NO: 115750 - DNA, 2883 bp, Enterobacter cloacae
atgccaggcagcaccttgttcaaagcgtttgttttgtttatcgccctttgggctcccgtcactcaggccgattccggttggcaacctgtcaaggaaacaatccgtaagagcgataaggacacccgtgagtatcaggcgattcgtcttgataacgggatgaccgtgctgctggtttccgatcctcaggcggtgaaatcgctctccgcgctggttgtgccggtgggttcgctggaagatcctgacgcccatcctggactggctcactaccttgagcacatgacgctgatgggctctaaaaaatacccacagcctgacagcctgtccgaatttctgaaaatgcatggcggcagccacaacgccagtaccgcgccgtatcgcaccgcgttttacctggaagtggaaaatgatgcgcttgatggggcggtggaccgtctggcggatgccattgccgcaccgctgctggataaaaaatacgctgaccgtgaacgtaatgccgtgaacgccgaactgacgatggcgcgcacgcgagacggtatgcgcatggcgcaggttagcgctgaaaccatcaatccggcgcacccgggttcgcgcttctcaggcggcaaccttgaaacgctgagcgacaagccaggtagcccggtgctcgatgcgctgcatgcgtttcgtgaaaaatactattccgccaatctgatgaaagcggttatctacagcaataaaccgttgccgacgctggcaaacatggccgcgcagacctacggcagggtgccaaataaaaatatcgatctgccgcagattaacgtgccggttgtcacggacgcgcaaaaaggcattgttattcactatgtgccggccttgccgcgcaaggtgttacgcgttgaattccgtattgataacaacacggcgcagttccgcagcaaaaccgacgagctggtgacgtatcttatcggcaaccgcagcccgggtacgctctccgactggctgcaaaagcaggggctggtggaaggtattcgcgctgactccgatcccgttgtaaatgggaatagcggcgtgctggccatctccgcgacgctgaccgataaagggctggctcaccgggacgacgtcgttgcggccattttcagttacctctctctgctgcgcgataaaggcgtcgataagcgctactttgacgagctggcgcacgtgctggatctcgatttccgctatccctctatcacgcgtgatatggactacgttgagtggctggcagataccatgatccgcgtgccggtggaacatacgctggatgcggtaaatattgccgaccagtatgacgccggagcgctcaaagcgcgtctggcgatgatgactccgcagaatgcccgcgtctggtatatcagcccgaacgaaccgcataacaaaatggcctacttcgttgatgccccgtatcaggttgaaaaaatcagcgaacagaccttcgcgggctggcagaaaaaggcgggggaaattgcgctgacgttaccggaacttaacccctacatcccggacgatttctcgctgatcaaacccgcaaaggcgtatccgcacccggagctgattgttgatgagccgacgctgcgcgtggtctacaccccaagccgctatttcgccgacgagccaaaagcggatgttagcgtggtgctgcgtaaccccaaagcaatggacagcgccagaaaccaggtgctgtttgcgcttaacgattatctggccggtattgctctcgatcagctcagcaaccaggctgccgttggtggtatcagtttctccaccaacgccaataacggcctgatggtgaatgccaacggctatacccagcgtttgccgcagctgttccaggcgctgctggacggttatttcagctatacgcctacggaagaacagctcgagcaggctaagtcctggtatgcccagatgatggattctgccgagaagggtaaagcctacgatcaggcgattatgccagcacagatgctgtcgcaaattccgtacttccagcgcgaagatcgccgcgcgttattgccctcagtcaccttaaaagaggtgctggcttaccgtgatgcgctgaaaaccaatacccgtccggagttcctggttgtagggaatatgagcgaagatcaggctaaaacgctggcgcaaaacgtccgtgcgcaactgggttcaaaaggcgatgagtggtgccgtaaccaggatgtgctggtagagaaaaagcagaacgtgatcttcgaaaaagcgggaagcagcacggattccgcgctggccgcggtgtttgtccctgtcggttatgacgaatttaccagctctgcccagagtgcggtgctcggtcaaattattcagccgtggttttacaaccagctgcgcaccgaagagcagctgggctatgcggtattcgctttctctatgaatgtgggccgtcagtgggggctgggcttccttctgcaaagcagcgacaagcaacccgcttacctgtggcagcgttatcaggcgttcttcccgcaggcggaagcaaaactgcgcgccatgaagccggaagagtttgcccagatccagcaggcggttatcgcccaggtgatgcagccgccgcagacgctgggtgaagaggcctcgcagctgagcaaagattttgatcgcggtaatatgaaatttgattcgcgtgataaaatagtggccgaaataaaacagctgacgccacaaaaggttgccgatttcttccatcaggcggtagtaaaaccgcagggtatggccatcctgtctcaggtttctggcagccagaacgggaaaacggactacgtaaaatcaaaagagtggaccgtctggaagagcgtcagcgcgctgcaacaaactatgccctggagtaagaaagaatga

SEQ ID NO: 115751 - DNA, 3375 bp, Enterobacter cloacae
atgctaagggtttaccactcaaatcgtctggatgtgctggaagcactgatggagtatatcgttgagcaagagcgtcttgacgatccgtttgagccagaaatggtgctggtgcagagcaccggtatggcgcagtggctgcaaatgtccctttcgcagaaatttggcattgcggccaacatcgattttccgctgcccgcgagctttatctgggagatgtttgttcgcgtcctgccggatattcctgagcagagcgccttcaacaaacaaagtatggcctggaaactgatgacgctgctgccggacatgctggcgcatgatgagtttgccatgctgcgccactacctgaatgacgacaccgacaagcgtaaacttttccagcttgcctcacgtactgccgacctttatgaccagtatctggtttaccgtgcagaatggctgattcgctgggaagcgggagaattagtcgatgggttaccggaagcgcaaatctggcaggcgccgctctggaaagcgctggtcgagcataccgggaaactcggtcagcctaagtggcaccgtgctaacctgtacgatcgctttatctcaatacttgagaacagcgcagaacggccaacccgtttgccgtcacgcgtgttcatttgcggtatctccgcgctgccgcctgtctacctgaacgcgctaaaagcgctcggtaagcacactgatatccatatcctctttaccaacccgtgtcggcactattggggggatattcaggatccgcgctggctatcacggctggtcacccgtcagagaaaacgcctctttgaggaacgcgccgtgccgctgtttaaagacagtgaaaatgcggcgcagctttttgatgaagaggggattcagaacctgccgaacccgctgcttgcctcgtggggcaagctcggacgcgactatatttatctgctttctgaaatcacctcttcgggagaaggggatgtggatgcgtttgcggatattacgccggacagcctgctgcacaatattcagcttgatattctggatttagaaaaccgtgccgttgccgggatcactgccgaagagtttgcgcgaagcgataagaagcgaaaactggatcctgacgatcgcagtatcgcgatccacgtttgccacagcccacagcgtgaagttgaaattcttcatgaccgcctgctggccatgttacaggacgatccaaccctgacaccgcgcgatatcgtggtgatggtggcggatatcgacagctacagcccgtttattcaggcggtatttggcagcgcaacgggcgaccgctatctgccctacgcaatctctgaccgtcgcgctcgtcagtcacacccggcgctacaggcctttctcagcctgctttcgctgcctgatagccggtttatctctgaggatgtgctggcactgctggatgtgccagttctggccgcacgtttcaacattaacgaagaggggttgcgctatctgcgccagtgggtcaacgaatctggtgtccgctggggtatcgacgatgataacgtccaggagttcgaactccctgcgaccggccagcatacctggcagtttggcctgacgcgcatgctgctggggtatgcgatggagagcatccacggcgaatggaatgacgtgctgccgtacgatgaatccagtgggttgatcgcggaactggttggtcacttagcctcgctgcttatgcagctcaaccgctggcgccgtgcgttgatgcagccccgcccgctcgaagagtggctgccgatttgccgcgaaatgctgaatgatttctttctgccggacagcgaaactgaagccgccatggcgcttatcgagaagcagtggcaggccatcgttgatgagggggttaattcgcactatcacgaggcggttcctctttcgcttctgcgtgatgagctgacgcaacgtctcgatcaggagcgcatcagccagcgcttccttgcggggccggtgaatatttgtaccctgatgccaatgcgttcaatcccgttcaaagtggtctgtctgcttggcatgaacgacggtatttatccgcgtgcgcttccacctctgggttttgatctcatgagcgcacaaccgaagcggggcgaccgcagccgccgcgatgatgaccgttatctctttcttgaggcgctgatgtctgcgcaaagcaggctgtatatcagctatatcggtcgttcaattcaggacaacagcgagcgtttcccgtctgtgctggtgcaggagctggtggattacatcggacagagtcactatctgccgggcgatgaagcctgcaactgcgacgaaagcgaacgtcgggtgatagcgcatatcacctgtcaccatagccgtatgccgtttgatcctgtcaattacgttcctgatgaactgcaaagctacgcccgcgagtggcttcccgccgcgaagaaagcggggacgccgcaaaccgattttattcagacgctcgaaccgcgcgtcatagataccctctcgtttgagcagctacagcgtttttgggcgcacccggtccgggcttttttccagcaacgcttgcaggtgaatttccgctctgaagagagcgaaatccccgatgcggaaccgtttattcttgatgggctggagcgttttaagcttaattcccagcttctgaatgcgctggttgacgaagaagacgccagtaaactgttccgacgttacagggcgtcgggattacttccgtatggtgcattcggcgaaatcgtctgggatgcccagtgcgaggagatgcgagcgcttgctgaccgcgttatcgcgtgtcggcagccggcgagcagcattgaaatcgatctcgattgtaacggtatgcacctcagcggctggctcacgcacgtgcagtctgacgggctgctgcgctggcggccatccatgctcagcgtttcacatggcctgcaactctggctcgaacatcttgtctacagtgcgagtggtcacgaaggtgaaagccggttgtttgtacgtaaggacggcgaatggcgtttcccgccgatggagcctgagcaggcgttgacgtatctgtcgctttatattgaaggttaccgtcagggcatgaacaaacctctgcttttgctgcctgaaagtgggggggcgtggataaaagcctgttacgacgcgcagaatgatgccatgttaacggatgaggcttcgctccagaaagcgcgcagcaagtttttgcaggcctacgaagggaacatgatggtacgtggcgaaggtgacgatgtctggtatcaacgtttatggcgaacgctggagccagaatatttcgacattatcacccaggaggcgcaacgctacctgttaccgttgttcaaatttaatcagtcctga

SEQ ID NO: 115752 - DNA, 324 bp, Enterobacter cloacae
atgtcagttaccctgagcagacaaaaaggatttagcatggttgaggttttgctggcaatgatgttgctggttgtggttgtgatggcgttatccggctatcatcgcgcgctggcagcccggtatgcggcgcttagccagtatcgtcagctatggcatcatgcgtggaatcagtcgcagatctcaacattaacgctcccgccgggctggcaggtcagccgggggcagacaacacagtccggatgtgtcagcatcacggtcacacttatttctcctatggggcggcagggcgcgttgacgcgtctgcattgcccggttagccgctag

SEQ ID NO: 115753 - DNA, 399 bp, Enterobacter cloacae
gtgaatcgtcagcggggcatgtcatcgctggcgctggtcctgctgttgcaggtgctcggcacgctgatcctcaccggattaaatcagcagctgcaaacctttagcacgctggtaagtggcgagagtttgtctgttcgccagcaggctgccgtgcaatctgcactggagtgggggcgcgttcaggaatgggctttacagccagaggttcagtgcaaacagacacaacgtttgcgggtctgtataaggctgtttggggcgcgtgtgttgcttattgccggcaatgacaatctattgctatggcgaggcggggacatctcggaggggcagatacgcttttccgcccacggctggagtgatttctgcccccttaaggaaagtacgctatgtcagttaccctga

SEQ ID NO: 115754 - DNA, 561 bp, Enterobacter cloacae
atgccagtaaatcgaaaagggttttccctgctggaagtgcttattgcgatgacgataagcagcattctgttactcagcacgtcacgttttttaccggggctacagcggggtgttttactgcaatccggacagcaggagctggaggatgaggtctggcaacgtctgttcgcgatcggtaaacagtttcagagggcaggatattgtgcagggcattgccaggggcaggggatgatcatcggcaggcaaggacgatgtgcgattgtgctatgggatgcgaacagcaacggccagtgggatagcaccgcgtcagaaaacgacagtacgggattccggcttgagtccggatcgcttgaaacgctgcggggcgccacatcctgtgacggtaagggatgggataagctcaccgacccggatcgggtcctgatagagcaatttatggtcactaaaaccgatcatgatggctttgcgccggtcatcagtatcgagctgcgtgcccgccgtaaaggtgaactgaccgcacccttttcggctcgccataccgtaacggggtttaatctgtga

SEQ ID NO: 115755 - DNA, 465 bp, Enterobacter cloacae
atgaaaaacgaacaaggctttacgcttatcgaaacccttatcgccgtttcgctgacagtgatcctcagcgccacagggctctatggctgggacagctggcagcagcggcagcggctttggcaaaccgcctgccaggtgcgggattacctggtgtttttgcgcaatgacgccaaccgtcacaacagcgagcacaggatcgcgttgcataacgacggtgaaaaggagtgtctggccagttcagcggtgaccggttgtgacagaggcggaccgttcgtaatgaagccgatgtggcccgaggtcacgataagcgacataacccctgcgctgggattttacggtttaagggataccgcatgggccggacatatccgcgtgcagagccgcgctggtgggtggtgggttattgtctcaaatggcggacgtatcaggctgtgtaatgccgcaggagaaggtgcatgccagtaa

SEQ ID NO: 115756 - DNA, 795 bp, Enterobacter cloacae
atgaaacagtatcttgaattgatgaaaaaagtgctcgacgagggcacgccgaaaaacgaccgtaccggcaccggtacgctctccatttttggccaccagatgcgcttcaatctgcaagaaggctttcctctggtgacaacgaagcgctgccatctgcgctcgatcattcatgaactgctctggttcctgcaaggcgataccaacgttgcttatctgcatgaaaacaatgtctccatctgggacgagtgggcagatgagaacggcgacctggggccggtctacggcaagcaatggcgcgcctggcctaccccggacggccgccatattgaccagatcacgaccgtcatgaaccagctgaaaaatgacccggactcgcgccgtatcattgtctctgcctggaacgtgggggaactggataaaatggcgctggcgccttgccacgcgtttttccagttctatgtggcggacggcaagctctcctgccagctctatcaacgctcctgcgacgtgttcctcggcttgccgtttaacatcgccagctacgcgctgttggtgcacatgatggcgcagcagtgcgatcttgaagtgggcgattttgtctggacgggcggtgatacccacctctacagcaatcatatggaacagacgcatctccagctgacgcgcgaaccgcgtgcattgccgaagctggtgatcaaacgtaaaccggaatcgatcttcgattaccgttttgatgatttcgagattgagggttacgacccgcatcccggcattaaagctcctgtcgccatctga

SEQ ID NO: 115757 - DNA, 876 bp, Enterobacter cloacae
atgaacagtggttatctgcattttccggaattcgatccggttattttctcaataggacctgtagcgctgcactggtacggtctgatgtacctggtgggcttcgtctttgccatgtggcttgctggccgtcgcgccagtcgtccaggcagcggctggacgaagaacgaagtggaaaacctgctttatgccggcttcctcggcgtgttcctgggcggtcgcatcggttatgtcctgttctataatttcccggtattcctgaacgacccgctctatctgttccgcgtctgggacggtggcatgtctttccacggcgggctgattggtgtgatcctggtcatggtgatcttcgccagacgcaccaaacgcaacttcttccaggtggctgattttattgcgccgttaatcccgtttgggctgggcgcagggcgtcttggcaacttcatcaacggtgaactgtgggggcgtgtcgatccgagcgtgccgtttactatgctgttcccgggttcccgcgcggaggacatcgcgctgctgccttcgcatcctgagtggcagtccattttcgatacctacggcgttctgccgcgccatatgtcacagctctatgagctggcgctggaaggcgtggtgctgttcatcatcctgaatctgtatatccgcaaaccgcgcccaatgggggctgtctccggtctgttcctgattggctacggcgcgtttcgtatcatcgtcgagttcttccgccagccggatgcgcagtttaccggggaatgggtacagtacatcagcatggggcagatcctctccattccgatgattgtcgcgggtgccattatgatgatttgggcgtatcgtcgtcgtccacagcaacaactttcctga

SEQ ID NO: 115758 - DNA, 2247 bp, Enterobacter cloacae
atgctcacccgcttgcgagaaatagttgaaaaggttgccagtgcgcctcgcctcaacgaggcgctgaatattctggtgacggacatctgtcttgcgatggaaaccgaggtctgttcggtctacctggccgaccatgaccgacgttgctactacctgatggcaacccgcggtttaaaaaaaccacggggacgcaccgtcacgctcgcgtttgatgaaggtattgttggcctggtcgggcgactggcggagccaatcaaccttgccgatgcgcaaaaacatcccagcttcaaatatatcccttccgtcaaagaggagcggttccgcgctttccttggcgtgccgattattcagcgccgtcaactgcttggcgtgcttgttgtccagcaacgagagttgcggcagtacgacgaaagcgaggagtctttcctcgtcacgctggcaacgcagatggctgcgatcctctcccagtctcagctggcagccctttttgggcagtatcgtcatacccgcatccgcgcgcttccggcctcgccgggcgtcgcgattgccgaaggctggatggatgccacgctccccctgatggagcaggtctatgaagcctcgacgctggatgaagcgcttgagcgcgaacggcttaccgctgcgctggaagaggcggcgaatgagtttcgtcgctacagcaaacgctttgccgctggcgctcaaaaagagacggcggccattttcgacctctactcacacctgctttccgatgcgcgtttgcgtcgtgagttatttgccgaggtcgataaaggttcggtggcagagtgggcggttaaaaaggtcattgaaaaatttgccgagcagtttgcggtgctgactgacggttatctgaaagagcgcgccggcgatttacgcgcgcttgggcaacgtctgctgttccaccttgatgatactattcagggggcgaatgcctggccgagccggtttgtactggtggccgatgaactctcggcgacgacgctggcggaattaccgcaggacaggctggcgggcgtagtggtgcgcgatggcgcagctaactcccatgccgccattatggtgcgcgcgctcggtattccgaccgtgatgggggcggatattcagccctccgtactgcaccgccgtacgctggtggtggacggataccgcggtgagttgctggtggatcctgagccggttctccttcaggagtaccagcgtcttatcagcgaagagaatgaattaagcaagctggcggaagatgacgtcaacctgcccgcgcagctcaagagcggtgagcgtgtgaaggtgatgctcaatgctggcttaagccccgagcatgaagagaagctcggcagccgcatcgatggcatcggcctctaccgcaccgaaataccgtttatgctgcaaagcggcttcccgtcagaagaggagcaggtggcgcagtatcaaggcatgttgcagatgtttaacgacaaacccgtcacgttgcgcaccctggacgtcggcgcggataagcaactgccctatatgcccatcagtgaagagaatccctgcctcggctggcgtgggatccgcataaccctcgatcagccggaaatcttccttatccaggttcgtgcgatgctgcgtgccaacgcggccacggggaatctcagcattttgctgccgatggtcaccagtattgacgagatcgacgaagcgcggcggttgatagaacgtgcagggcgcgaagtggaagagatgatcggctatgcgatccctaaaccccgtattggcgtgatgcttgaagtgccttcgatggtctttatgttgccgcagctggcgacccgcgttgattttatctccgttggcaccaacgacttaacgcaatacattctggcggtcgatcgcaacaatacgcgcgttgccagcatctacgatagcctgcatccggcgatgcttcgtgccctggcgatgatcgcccgcgaagccgagcagcataatatcgacctgcgcctgtgcggtgaaatggccggcgatccgatgtgcgtggcgatcctgattggtctcggtttccgtcacctgtcaatgaacggacgttccgttgcgcgtgtgaaatacctgttacgtcacatcgaacaagatgaggcgcgcgaactggccgcgcgtagcctggaagcacagctggcagccgaagtgcgccatcaggtggctgcgtttatggagcgacgcggcatgggcggtttgatccggggcggccgctga

SEQ ID NO: 115759 - DNA, 465 bp, Enterobacter cloacae
atgtgggcccggcgatatggtcagcactcctggcagttcccgcaaggcgggatcaatcccggagagtccccagaacaagcgatgtaccgggagctgtttgaagaggttggtttaagccgaaaagatgttcgcatcctggcttcgacccgcaactggttgcgttacaagttaccgaaacgtttggtgcgttgggacacaaagccggtttgtatcggccagaaacagaagtggtttcttttgcagttggtgggcaacgattcagatatcaatatgcaaaccagcagcacgccagagtttgatggctggcgctgggtaagctactggtatccggttcgtcaggtcgtgtcatttaagcgcgatgtatatcgtagggtgatgaaagagttcgcaagtgtcgtgatgcagcttcaggagacgcctccgaagccacagagcgcacctgcctggcgacgtaaaagaggttaa

SEQ ID NO: 115760 - DNA, 693 bp, Enterobacter cloacae
atgcattctctcgccccactgctctctcctcccgtcagtgaagcccagttgctccagcaggcgcaacgtctggcaggctattcactgggcgagctggccgtgatggcggggttgacgatacccaacgatctaaagcgtgataagggctggatcggcgtgttgctggaacgctggctgggcgcaagcgcgggcagtaaacccgagcaagattttgcggcgctgggggtggaactgaagacgatccccatcgatagccagggacggccgctggaaaccacctttgtctgcgttgcgccgctcacaggtaacagcggagtgacatgggaaaccagccacgtcaggcataagctgaagcgggtgttgtgggtacccgttgagggcgacaggcagatcccgctggctgagcgtcgcgttggcgccccgctgctctggagcccgaatgaagaagaggagagacagctttcccaggactgggaagagctgatggacatgattgtgctgggacaggttgagcgtatcaccgcccggcatggcgaagtgctgcaacttcgtcccaaagccgccaacagcaaagcgctcactgaagcggtaggcgcacagggcgaagcgatcctgacgctgccgcgcggtttctatcttaaaaagaatttcaccggggcgctgctggcacgccacttcctgttgaaaacatag

SEQ ID NO: 115761 - DNA, 219 bp, Enterobacter cloacae
atgaaaaaatgggcagtaattatctcagcagtcggtttagcgtttgcggtatcgggttgcagcagcgactatgtcatgtcaacgaaagatggtcgtatgatcctgaccgatggcaaacccgaagtcgacgacgataccggtctggtgagttaccgcgatcgcgaaggcaatcaaatgcagattaatcgcgacgaagtctcccagatcatcgagcgttaa

SEQ ID NO: 115762 - DNA, 1041 bp, Enterobacter cloacae
atgcattatcaccgtatcccccacagcgctctggagatcagccaactggggttgggcaccatgacatttggtgaacaaaacagcgaagccgatgcccatgcacaactcgattacgccgtcagccagggcattaacctgattgacgtggcggagatgtaccccgttcctccccgcccggaaacacaaggtcttactgaaacgtatgtcggcaactggctggcgaaacgcggcaatcgcgaaaagctggtcatcgcctccaaagtcagcggcccttcccgtaataacgatgccgggatccgccctaaccagatccttgatcgcaagaatatccgtgccgcgctggatgccagcctcaagcgcctgcaaaccgactatctcgatctttatcaggtgcactggccgcagcgtccgacgaactgcttcggtaagcttggctacacctggaacgaaagtgctccggccgttaccctgctggaaacgctggaagcgctcacggagtgccagcgggcgggtaagatccgctacattggcgtttccaacgagacggcttttggcgtgatgcgctatctgcatctggccgataaacacgatctgccgcgcatagtgaccattcagaacccgtacagcctgctgaaccgcagttatgaagtgggtctggcggaggtgacgcagtacgaagaggtggaactgctcgcctactcctgtctgggcttcggtaccctgacgggcaaatacctgaacggcgcgaaaccggctggtgcgcgtaacacgcttttcagccgcttcacccgctatagcggcgagcagacgcaaaaagccgttgcggcctacgtggatatcgcgaaacgccacggactcgatccggcgcagatggcgctggccttcgtgcgtcgtcagccgtttgtggcgagtaccctgctcggcgcaacgacgatggatcagttgaaaacaaatattgagagtttccatctgaacctgagtgaagaggtattagcggagattgaagcggtgcatcaggtttatacctacccggcaccgtaa

SEQ ID NO: 115763 - DNA, 1194 bp, Enterobacter cloacae
atgcgtgagtcagtgcacactaacacttcaatctggtcgaaaggcatgatggcggttatcgccgcccagtttctttccgcgttcggcgataacgcgttgctgtttgccacgctggcgttgctgaaagctgagttttatcccgactggagccagccgatccttcagatggtgtttgtgggtgcttacatcgtatttgcgccgtttgtcggccaggtggcggacagcttcccgaaaggtcgggtcatgatgtttgccaacagccttaagcttctgggcgcggcaagtatctgctttggtatcaatccgttcgtcggctacacgctggtgggcattggcgcggcagcctactctccggcgaagtacggcattctgggtgaacttaccaccggtgataagctggtgaaggccaacggcctgatggagtcctccaccattgcggctattctgctgggttcggtggcgggtggcgtactggcagactggcatgtgctcgccgcgcttggcatctgcgccctgatgtacggtggcgcggtgatcgccaacctgtttatccccaaactggccgtggcgcgtccggggcaatcatggcgcttcaggcccatgaccggcagcttcttcaacgcctgccgcgtactgtggcgtaacggtgaaacacgcttctcgctgatgggcaccagcatgttctggggggccggcgttacgctgcgtttcctgctggtgctgtgggtgccggtggcgctgggcattactgacaacgccacgccgacttatctgaatgccatggtcgccgtcgggattgttgtcggggccggggctgcggcaaaactggtgacgctggaaaccgtcgcgcgctgcatgccggcggggatcctgattggcgtcggcgttctgttcttctccctgcaacatgccctattgcctgcctatgccctgctgttgctgatcggcatgttaggcggtttctttgtggtgccgctaaacgcgctgttgcaggagcgcggcaagcagaccgttggggcgggtaacgccattgcggtgcaaaaccttggtgaaaacatggcgatgttactgatgctggggatttactcgctggcggtaaaagcaggggcgccggtcgtggcaatcggggtgggattcggcgcgctgttcgcgctggcgattagcgggctgtgggtctggcagcgtcgtcgttga

SEQ ID NO: 115764 - DNA, 2160 bp, Enterobacter cloacae
atgctttttgggttcttccgcacactgtttcgtgtcctgtttcgcatccgcgtgactggcgatacgcaggcactctatggcgagcgtgtgcttatcacaccgaatcacgtctcttttcttgatggcgtattgctggcgctgtttttgcccgtgcggcccgtcttcgcggtttacagctccatcagtgaaaaatggtacatgcgctggctcaaaccgctgattgattttgtcccgctcgacccaactaaaccgatgatgattaaacatctggtgcgtctggttgggcaggggcgcccggtggttatcttcccggaagggcgtatttcagtgacgggctccctgatgaaaatttacgacggggccggttttgtcgcggcgaagtctcaggccaccgtcgtgccgctacgcatcgacagggctgagctgacctttttcagccgtctgaaagggctggtgaagcagcgtctgttcccgaaaattacgctgcatatattaccgccgacgtcactgccgatgcccgaggcgccgcgcgcgcgcgaccgccgtaaaatcgccggggaaatgctgcaccagattatgatggaagcgcgcatggccgttcgcccgcgcgaaacgctgtatgaatcgttgctgtcggcgcagtatcgctacggtgcgaagaaaaactgcatcgaagacatcaactttacgccggatacctaccgtaaactgttgaccaaaacgctgtttgtcgggcgtatcctggagaagtacagcaaacagggcgaaaagatcggcctgatgctgccaaatgcgggtatcagcgcggcggtgatctttggtgccgtctcccggggccgcattccggcgatgatgaactacacggcgggcgtgaaagggctctccagcgcgattaccgcggcgcaaatcaacaccgtctttacctcccgccagttcctggataaaggcaagctgtggcacctgccggaacagctgacgcaggtgcgctgggtgttcctggaagatctgaaagcagacgtcacgaccgccgacaagctgtggattttcgcacacctgctgatgccgcgtctggcgcaggttaagcagcagccggaagatgatgccattatcctctttacctctggctctgaaggtaacccgaaaggtgtggttcacagtcacaaaagcattctggcgaacgtcgaacagattaaaaccatcgctgactttaccgccaacgatcgctttatgtcggcgctgccgctattccactcctttggcctgaccgtggggctctttacgccgctgctgaccggtgccgaggtgttcctctacccaagcccgctgcactaccgcattgtgccggagctggtctatgaccgtaactgcacggtgctgttcgggacgtccaccttcctcggaaactacgcgcgcttcgctaacccgtatgatttcttccgcgtgcgctacgtggtggcgggggcggaaaaactccaggacagcacgcgccagatctggcaggacaagtttggcctgcgcattctggaaggctatggcgtgacggagtgcgcgccggtggtctccatcaacgttccgatggcggcaaaaccgggaacggttggccgcattctgccggggctggacgcacgtctgctggcggtgccgggtattgaagacggcggacgtcttcagttgaaagggccgaacgtcatgaacggctatctgcgtgtggaaaacccgggcgtgcttgaggcgccgacggccgagaacgtcaatggcgaggttgaaacgggctggtacgacacgggcgatatcgtgcgcttcgacgatcagggcttcgtgcagatccagggacgtgcaaaacgcttcgccaagatcgccggggaaatggtctctcttgaaatggtcgagacgctggcgaccgcagtctcggcggagaaaatgcatgcgaccgtggtgaaaagtgatgccagtaaaggcgaggcgctggtgctcttcacgacagacggtgaactgaaacgtgacgcgctgctcaggtatgcacgcgaacacggtatccccgagctggcggttccccgcgatattcgttacctcaaacagttaccggtgctgggcagcggtaaacccgatttcgtgaccctgaagggcatggttgaagaggcggaacagcaaaatgcgtga

SEQ ID NO: 115765 - DNA, 1023 bp, Enterobacter cloacae
atggcgacaattaaggatgtggctcgtctggccggtgtttccgtcgcgaccgtctcccgcgtgatcaacaactcccctaaagcgagtgatgcatcgcgccaggccgtgcaggacgccatggaaaacctgaattatcaccctaacgccaacgcgcgcgcccttgcccagcagtcgacagaaaccatcgggctggtggtcggggatgtatccgatccgtttttcggtgcaatggtcaaagccgtagaacaagtttcttatcacaccggaaatttcctgctgattggtaatggctaccacaatgaacagaaagagcgccaggccattgagcagctgatccgtcatcgctgtgcggcgctggtggtccatgcaaaaatgatccccgacgccgagctgatccatctgatgaaacagatgccggggatggtgattatcaaccgcattattcccggttttgaaacccgctgcgtggcgctcgacgaccgttacggcgcatggctcgcaacccgtcatctgatccagcagggccatacccgaattggttatctgtgctccaaccacccaatttccgatgcggaagatcgccttcagggctattacgacgcgctgcgcgaagccggtctgccgtgcaacgatcgtcttgtggcgtacggagaaccggatgagagtggcggcgagcaggcgatgacggagctgctgggccgcgggcggaatttcaccgccgtggccagctataacgactccatggccgccggcgcaatgggcgtgctgaatgataacgggattgacgtcccggcagaaatttcgctgattggctttgatgatgtgctggtgtcgcgctacgtgcgccctcgcctgaccaccgtgcgctacccgattgtgaccatggcaacgcaggcggcagaactggcgttagcgctggccgagcatcgcccgccaccggaaattacccacctgttcagcccaaccttagtgcgccgtcactcggtggtatcgcccgcggaagccgtgagcgaacagcgatag

SEQ ID NO: 115766 - DNA, 477 bp, Enterobacter cloacae
gtgaatatactgccgcttcacgctgcgccgcagtttacacagcgggtgatcgactggatctggaacgcgtttggtgaaggtatgccgcgtgcctttttccagagcattgttgagcacagcctgacgccgggcgagttaccgctcacctttattgccgttgaggatgaccagctgctgggcaccgttgggttgtggcgttgcgatttaatttcccggcaggatctccacccctggctggctgcgctgtatgtcgatgaagccgcccggggaaacgggctggcgggaaaacttcagcagcatgttatcggctacgcgcgacgcgccgggtatcacgagcttcatctctggtctgcctgccgcgacttctacgaacgttacggctggcactacatcggcgatgcgctggaatacccggataaaaccgtccatctctatcgctgttcgctcacggcttccgcgggcgataccaccgagtga

SEQ ID NO: 115767 - DNA, 774 bp, Enterobacter cloacae
gtggataaggctgtcatcctgccggaaaaaaaacagtaccaggagattggcgaggatttacgggcgcagattatccaggggcattatcccgtgggatcgcgtctgccgccggagcgcaacatcgccgagacgtatggcgtgagccgcactatcgtgcgcgaggcgctgctgatgcttgagctacaggggacggtggatattcgccaggggtctggcgtgtacgtgatgcgcattccggaggagcatgaaaacgaggaagaacgttttctgaacagtgacgtgggtccgtttgaaattctccaggcgcgtcagctgcttgaaagcaatattgccgcctttgccgcaaaaatggcgacgcgggcggatatcgacaacctgcgccgcatcatcgagcaggagcaacgggctattgccgccgacgatcgcagccaggacaacaacaaaatgttccacctggtactggcgggggccacacaaaaccagatgctgctggcgaccgttgaaagcgtctggcatcacatggacagcagcccactgtggcagcaattcaacggccacatcgccagccgcgcatggcggctgaaatggctcggcgacaggcaaaccattctcgctgcgctccgccgccgcgacgtgatgggggcgtggcaggcgatgttccagcatcttgaaaacgtcaaaaagagcctgcttgagctgtcagacgaagacgcgcccgattttgacggctatctctttgaatcggtcccccttttccaggggaaactggtgtga

SEQ ID NO: 115768 - DNA, 1428 bp, Enterobacter cloacae
atgagcataaaacagataaccataccgccagattttatgctgggcgcggcggcatcggcctggcagaccgagggctggagcggcaaaaagccggggcaggattcgtggatcgatctctggtacaagaacgatcgtcacgtctggcacaacggctacggcccggcggtggcaaccgactttatcaatcgctttcgcgaagacgtggcgctgatgaagcaggcgggactgacgcactatcgcacctcgatcaactggtcgcgctttttgaccgactatgaaaacgccaccgtagatgaagagtacgccgcctattacgacgcgctgttcgatgaaatgcaccgtcagggcattgagccgatgatctgcctggaacactacgaattgccgggcgtgctgctggagacctacggcggctgggcgtcgaagcacgtcgtcgagctgttcgttcgctatgcggaaaaggtgtttgagcgctttcacggcaaagtcacccgctggtttaccttcaacgagccgattgtggtccagacgcgcgtctacctcgacgcgctgcgctggccctatgagcagaacaccagcacctggatgcagtggaaccaccataaggtgctggcgacggcgaaagtggtgaagctgtttcgcgagaaagggtatgacggctcggtgggctgtattcttaacccggaagtgacctatccgcgctcgcgcgcgccgcatgacgtgcgggcggcagagatgtacgatctgttctataaccgcgtctttctcgacccgctggtgcacgggcgctatccgcaggcgctttttaccctgctggcgcagcatcaggtgcagtgggaatacacggctgacgagctggcgctgattgccgacaacaccgtcgacgagctgggcattaacctctattacccgcatcgcgtcaaagccccgtcccgcgcctggcacctggagacgccgttccacccggcgtactactacgagccgttcgagctgccggggcggaggatgaacacctcccgcggctgggagatcttcccgcgcattatttacgatatggcgatgcggattaaaaacgagtatcgcaacattgactggtttgtggcggaaagcgggatgggcgtggagaacgaagcggagtttcgcaatcgcgacggcattatcgatgacgcataccgcatcgcgtttatcagcgaacatctttattacacgctgctggcgcgggaggcgggggctaactgccacggctatatgctgtgggccttcaccgacaacgtctccccgatgaacgcgtttaaaaaccgctacgggcttattgagatcgaccttgaaaaccatcgcgcacggcgggcaaagaaatcggcatcctggtttcgccagctgcgcgatgagcgtgtgatgacgctcagggttgacgatgaatggaagtaa

SEQ ID NO: 115769 - DNA, 1326 bp, Enterobacter cloacae
atggcatttcaggaaaaactgatcgacgctctgggcagttttgccaccaccttcaacagctatcgctatatccaggcgattaagtctgcgtttattaccttaatgccggtcatcattgtgggggcgttctcggtactgatctccaatatggtgctggatccgaaaaacggcctggcgagctttcagtcgctgtcgtttctggcggcgttaaagccgatcaccagcgcgctgaactatgccacgctcaactttcttaacatcggcgcggtgtttttaatcggcattgaactggggcgtattaacggcattaagtctctgttccccggcctgctggcggtgatctgctttatctgcgtaacgccgacgacggtggaaatgctggtggacggcgagatgcacgtggtgaaagacgtgctgctgcgccagttctcggatacccgcagcctgttcctcggcatgtttatcgccatcctgtcagtggagatttactgctggctggaaaaccgtaaggggctgaaaatcaggatgccggacacggtgccgccgaacgtcgccgcgtcgttctctgcgctgatcccggccattatcaccaccaccgccatcgccacctttggcttcgtgtttcatcagattaccggtatgtatctctacgacgcggtttaccaggtggtgcaacagccgctggagcgggtggtgcaaagcctgccggggatcctgctgctgatgtttgtcgcccagctgttctgggtgattggtatccacggcaaccagatgatcaagccgatccgcgagccgctgctgctgggggcaatcaccgttaacatgagcgcgttcgagcagggcaaagaggtgccaaacatcatcaccatgccgttctgggacgtctatatgagcatcggcggctccggcctgaccatcggcctgctgatagccgtcatgattgccaccaaacgtaaagagatgaaggagatcgccaagctctccatcggcccgggtatttttaacatcaacgagccggtgatcttcgggatgccagtcatgctcaacccgatcctggctatcccgttcatcatcacgccgctggtgacgggctcgattggctactttgccaccgtgaccggatttgccgggaaagccgtggtgatggtgccctggaccacgccgccgctgatcaacgcctggctgtcaaccgcgggctccatgggggcggtgatcacccagtttatctgcatcgtgaccgcggtgattatctatctgccgtttgtgaaaattgcctcacgccgcgcagatcaggccgcactgcaacaagccaccgataacgcatga

SEQ ID NO: 115770 - DNA, 1038 bp, Enterobacter cloacae
atggcaacaatgctggatgtctcactgcgtgcgggcgtgtcgaaggccaccgtttcgcgcgtgctgaacggcacaggtcaggttaaagagagcacgcgtcagcaggtatttcgcgcgatggaggagctgggctatcgtccgaactttctcgcgcgttcgctggctaaccagaccagcaacagcattggtctggtcgtctcgacgttcgacggtttttactttggtcgtttgctacagcaggcgtcacggcagaccgaaaagcacggaaaacagctgattgttaccgacggtcacgacgcccctgaacaggaagaacaggcggtgcagatgctcgccgatcgcaagtgcgacgccatcgtgctgtatacgcgttacatgagcgaaaagacgatcctgaagctgatcaacagcgtgcagacgccgctggtgatcattaaccgtgaagtgagccaggcggcggatcgctgcgtgttctttgaacagcaggacgcggccttcaaagcggtggattacctgataagccagggccaccgggagatcgcctgtatcaccgtcccgatccacacgccaacgggtaaagcgcgactgatgggctaccgtaaggcgctggagaagcacggtattcgtctcgacgagcggcggattaaatacggcgatgcaggcatgacgcggggttacgagctgtgcaaggagctgattgcggaaaagacatcgttcagcgccctgtttgcctgtaacgatgatatggccctgggtgcctccaaagcattacaccaggccgggctgaagatcccgcaggatatttcgctgtttggttttgacgatgcccccagcgcaaagtggctggagcctgccctgtcgtcggtgtatctgccgatcgacaacatgatcatcacggcgatcgatcaggcgatccggctggcaaaaaaccagccggttgaagcgatcccgccgttcaccggcaccctggtgttacgcgattcggtgacaacagggccctggtttaatcagaccagctctaacgccagcagctcctga

SEQ ID NO: 115771 - DNA, 1263 bp, Enterobacter cloacae
atgccacgcccactcaaccagactgagaccgatttaaacgccgataacctgctgcgcctgcctgccgaattcggctgcccggtgtgggtctacgatgcgcagattgtccgcgagaagatcgccgcgctgcatcagtttgatgtggtgcgttttgcgcagaaggcctgctccaatattcatattctgcgcctgatgcgcgagcagggcgtgaaggttgactccgtatcgctgggtgaaatcgaacgtgcgctggcggccgggtttgatccgaaagccgacagcgacgcgatcgtcttcaccgctgacctgattgacgacgccacgctggcgcgcgtgcacgagctgcaaatcccggtcaatgccggttcggtggatatgctggaacagcttgggcaggtctctcctggccatcgcgtctggctgcgcatcaacccgggctttggtcacggtcacagtcagaaaaccaacaccgggggcgaaaacagcaagcacgggatctggtatgccgatatgcctgcggcgctggaggttttacaacgctacaacctcaagctggtgggcattcacatgcatatcgggtccggcgtggattacggccatcttgagcaggtctgtggcgccatggtgcgtcaggttatcgattttggtcaggatctggaggcgatctccgccgggggagggctttcgattccttaccgcgaaggggaagaggcgatcgacacggatcactattacggcctgtggagcgccgcgcgtgacagcatcgccgcccatctgggccatgcggtgaagctggagattgagccgggtcgtttcctggtcgccgaagctggcgtgctggtggcgcaggtgcggagcgtgaaggagatgggaagccgtcactttgtgctgattgatgctggcttcaacgacctgatgcgcccgtccatgtacggcagttatcatcacatcaccgcgcttgccgccgatggcagcgatctggtcatcgccccgcgcatcgagaccgttgttgccggcccgctgtgtgaatccggtgacgtctttactcagcaggaaggcgggaaagtcgaaacccgttcgctgccagaggtaaaaccgggagattatctggtgctgcatgatactggcgcgtacggggcgtctatgtcgtccaactacaatagccgcccgctgctgccggaagtgctgtttgataacggcgtggcgcggctgattcgccgtcgccagaccattcaggagctgctggcgttagagctggtctga

SEQ ID NO: 115772 - DNA, 927 bp, Enterobacter cloacae
atgcccgccgttaacctacgccatatcgagatttttcatgcggtaatgaccaccggcaatctcactgaagccgcgcacatgctgcacacttcgcagccgacggtcagccgcgagctggcgcgttttgagaaagtgctggggctgaagctgtttgaacgcacccgcggcaggctgcatccaacggtgcagggtttacgtctgtttgaggaggttcagcgctcctggtacgggctggacaggatcgtgagcgcggcagagagcctgagggagttccgccagggcgagctgtccatcgtctgcctgccggtcttttcccagtcattcctgccggtactgttacagccgtttctggcccgctatccggaggtcagcctgaccatcgtgccgcaggagtcgccgctgctggaggagtggctttcggcccagcgccacgatctgggtctgaccgaaaccctcgtcacgccagcgggaacggaacgcacggagctgctgtcgctggatgaggtctgcgtgctacctgccagccacccgcttgcccacaaagcggagctgacgccggcggattttcacggtgagaactatatcagcctgtcgcagaccgacagctaccggcagcttctggatggcctgtttgccgaacatcaggtgaagcggcggatggtaatggaaacgcacagtgcggcgtcaatttgcgcgatggtgcgcgcgggcgtgggtatttcggtggtgaacccgctcacggccatggactacgccagcagcggcgtggttctgcgccgttttagcgtttccgttccctttaccgtgagcctgatccgcccgctgcaccggcccgcctcagcgctggttgatgcgtttagtgaacacctgattgcgcacgcgcgtcaggtggcgcttcgcttacctgacctgcaaaaaccactatga

SEQ ID NO: 115773 - DNA, 693 bp, Enterobacter cloacae
atgaaaacgatcggtctgttagggggcatgagctgggaatcaacgatcccgtactaccgcctgattaatgaaggtgtcaaacagcgtctgggcggtctgcattcggccagcctgctgctgcacagcgtggatttccatgaaatagaagcctgccagtcgagcggggagtgggacaaagccgggcagatgctggcggacgccgcgctcgggctggagcgtgcgggcgcgcagggtattctgctgtgtaccaacaccatgcataaggtggcgtcgcacattgaagaccgctgttcgctgccgttcttacatatcgcggatgccaccgggcgtgccatacgtgccgccggcatgacgcgcgtggcgctgctggggacgcgctacaccatggagcaggatttttaccgcgggcggctgaacagccagttcgggattgaaagcctgatccccgaagaggccgaccgggcgcgcattaaccagattatttttgatgagctgtgtctgggcaccttcagcgaaacgtcgcgcgcatggtatgtcagcgtgattgagaaactggcgcagcagggggcggaaggggtcatcttcggctgtaccgaaattggcctgctggtgccggcagaccaaagcccgataccggtcttcgataccgccgccatccatgccgccgatgcggtggagtttatgctgtcatag

SEQ ID NO: 115774 - DNA, 324 bp, Enterobacter cloacae
atgtttattttccataaagagaccacgcttgaggatctgggcaacggcgtgacgcgtcgtattctggcgcacgacggcaggatgatggcggtggaagtgaatttcgagcaaggcgcgattggcccgatgcataaccacccgcatgagcagctcacctacgttctctcgggggagtttgagttcaccatcggcgaggagaagcatgtggtgatggcgggcgacaccctttataaagcgccgcacgtgatgcacggctgcgtttgcctgaaacccggcaccctgctggatacctttacgccggttcgcgaagatttcctgaaataa

SEQ ID NO: 115775 - DNA, 1137 bp, Enterobacter cloacae
atgtcagcgatggatttcaaaaaacatacggatctcaattttcctcactatgctcccccggcggtcagcgctaaagaaatagatcttctgggtctgctggacgtcctgctggcagcaaaaaaacgcatcatcaccattgtctttgcatttgcactggtcggcctggcaatcgcttttctgataccgcaaaaatggaccagtaaagcggtcattacgcccgcggaacagacgcagtggagttcgctgcgccagatgatggtggcgctccaggtgcttgatgtcgacgtgaaaattacccgtgcggatgtgtttaatctgtttatcaaaaagtttcagtcccagtctctgcttgaagagtacatgaagagctcaccttacgtgatggctcagctcgatggcgctcaggttgacccgctggagctgcaccgcgcggtggtcaatattgccgaaaagatgaaggctgttgataacacgcaggaaaaaaacgctgataaagcaccgtacctctcctggacgttaagcttcactgccccaacggcagaggacgcgcagaaagtgttgaatggttacattcagtacatctcccgcatcgtcgagcaggagaccatgcaaaacattcgcgatcagctgatcctgagaaccaaaacggttcagcagcagctggagctggatcgggtccgtctgacaaatatccataataccaacctgcaacgcctgaactactcgctggaagtggcgaacgcggcagggatcaaaaagccggtctacagcaatggacaggcggtgaaagacgatccggattattccgtcgccctcggtgcggacgggattgcgcagaaattgcagattgaaaaaaatctgaaggatgtttctgagctgaacgccgatttccagaaccgcgaatactatctggcacagctgcaaaaactttccttcgaagatgtgagcctggagccgttcaaataccagctttcaccttctatgccggtgaaaaaagatggcccgggcaaagccctgatcgtgctgctggcgtgtattctgggtggactgttcgcctgtggcagcgtgctgctgcgcgaggcaatgagcacccgcaacccgctgccggaacaacttcctgagccggttacggaataa

SEQ ID NO: 115776 - DNA, 891 bp, Enterobacter cloacae
atgaatgaaaacaagctgctggggctcgcatggatatcaccctatatcatcgggctgataatctttacggcattccccttcgtctcatcgtttttcctcagctttacggattacgatttgatgagtccgccggtgtttaacggcatcgaaaactatcgctacatgtttaccgaagacacgctcttctggaaatccatgggcgtgacctttgcctatgtatttttaaccatcccgttaaagctcgcctttgcattaggaattgcctttgtcctgaactttaaattacgcggcatcggctttttccgaacggcctactatattccgtcgatcctcggcagctccgtcgccattgccgtactgtggcgcgccttatttgccattgatggtctgctgaacagctttatcggtgtatttggctttgatccggtgaactggctgggcgagccgtcgctggcgctgatgtccgttaccctgctgcgcgtctggcagttcggttccgcgatggtcatcttcctggccgcgctgcaaaacgtaccgcagtcccagtatgaagcggcaatgatcgatggcgcatcgaaatggcagatgttcatgaaggtgaccgtgccgctgattacgccggtgatcttcttcaacttcatcatgcagaccacacaggcgttccaggaatttaccgggccgtacgtcattaccggcggcgggccaacctattcgacctatctgttctcgctctacatctacgacaccgcgttcaagtatttcgatatgggctatggcgcggcgctggcgtggatcctgttcctggtggtggccgtcttcgccggtatcgcctttaagtcgtcgaaatactgggtgttctactccgccgataaaggaggcaaaaatggctga

SEQ ID NO: 115777 - DNA, 903 bp, Enterobacter cloacae
atggctgatattcaacaactctccacggcaagaagcgtcgccgaacgcgaagtggcccgcacgctgcgcagagagaaaatcaacgcctccgttcgctatgtgatcctgctggttgtcggcctgctgatgctttacccgctggtgtggatgttctccgcgtcgttcaaaccgaaccacgagatcttcaccacactgagcctgtggccagcccacgccacctgggatggtttcgtgaacggctggaaaaccgggaccgagtacaacttcggccattacatgctgaatacctttaagtatgtgatcccgaaagtgatcctgaccattatctcctccaccatcgtggcgtacggctttgcccgcttcgagatcccgtggaagaagttctggttcgccacgctcatcaccaccatgctgctgcccagcaccgtgctgctgatcccgcagtacctcatgttccgtgaaatgggcatgctcaacagctatatgccgctgtacctgccgctggccttcgccactcaggggttcttcgtcttcatgctgatccagttcctgcgcggcgtcccgcgtgacatggaagaggcggcgcagattgacggctgtaactccttccaggtgctgtggtacgtggtggtaccgatcctgaaaccggccattatctccgtcgccctgttccagttcatgtggtccatgaacgactttatcgggccgctgatttacgtctacagcgtggataaataccccatcgcactggcgctgaaaatgtccatcgacgtcaccgaaggcgcgccgtggaacgaaattctggcaatggcgagcatctccattctgccatccatcattgtcttcttcctggcacagcgctacttcgtacagggcgtcaccagcagcggaattaaaggttaa

SEQ ID NO: 115778 - DNA, 1128 bp, Enterobacter cloacae
atggctgaagttattttcaacaagctggaaaaggtctactccaacggctttaaagcggtacacgctatcgatcttaaaattgctgaaggggaattcatggtgatcgtcggcccatccggctgcgccaaatccacgaccctgcgcatgctggcggggctggaaaccatcagcggcggcgaggtgcgcatcggcgacaagatcgtgaacaacctcgcgccgaaggagcgcggtattgcaatggtgttccagaactacgccctctatccgcacatgacggtgcgcgagaatctggcctttggtctcaagctgagcaaactgccgaaagatcagattgagtctcaggtgaatgaagccgccaaaattcttgagctggaagagctgctcgaccgcctgccgcgccagctttccggcggccaggcgcagcgcgtggcggtaggccgtgcgattgtgaaaaaaccggatgtgttcctgttcgatgagccgctttcaaacctcgacgccaaactgcgcgcttcgatgcgtatccgtatttctgacctgcacaagcagttgaagaagtcaggaaaaccggcgaccaccgtttacgtgacccacgaccagaccgaagcgatgaccatgggcgaccgcatctgcgtgatgaagctcggccatatcatgcaggtggacacgccggacaacctctaccacaagccgaagaacatgttcgtggcgggctttatcggcgcgccggagatgaatatacgcaaaagcgtgctggtcgaaaaagcgggccagctgcacatcgccattggcgatgaaaccatgccgctgaacgcggagaagcaggagaaagtcgcggcttacgcgggtcaggagatcttctacggcgtgcgcccggaatttgtgtcgctctctgatgagcccttcccgaatggcggctgtagcggggagatggtgcgcgtggagaacatgggccacgaattctttgtgtacctgaaggtcgcggactacgaactgaccgcccgaatcccgtccgatgaagctaagccaatgattgataaagggcttcatcgtaaggtgtatttcacgtttgagatgaacaagtgtcatatttttgacgcaaaaactgaacagaacctctctctctga

SEQ ID NO: 115779 - DNA, 1287 bp, Enterobacter cloacae
atgaaaaaagtgcttttaagcgcagcaatctccgcgaccctgggccttaccgctttgccatcgatggcgcagaatgtggatttacggatgtcctggtggggcggcaatggccgtcaccaggtcactctgaaagcgctggaagagttccataagcagaacccggacatcaacgtaaaagcggaatacaccggctgggacggtcacctctcccgtctgaccacccagattgcgggcggcaccgagccggacgtgatgcagaccaactggaactggctgccgatcttctccaaaaccggtgacggcttctacgatctgaacaagatgaaggacgtgatcgacctgtcgcagttcgatcccaaagagctgcaaaccaccaccgtggacggcaagctgaacggcattccgatctcggtgacggcgcgcgtgttctacttcaatgacgaaacctggaaaaaagcgggtattgcgtacccgaaaacctgggacgagctgatggcggccggtaaaaccttcgagagcaagctcggcaagcaatactatccggtgatcctggagcaccaggatacgctggcgctgctgaattcgtacatgatccagaagtacaacattcctgcggtggatgagaaaaccaaaaagttcagctacacaaaggaacagtgggtggagtttttccagacctacaaaaagctgatcgacagccacgtcatgccggacaccaaatactatgcctcgttcggtaagagcaacatgtatgagatgaagccgtggatccagggtgaatggggcggcacctacatgtggaactccaccatcaacaaatattccgacaacctgaagccaccggcgaaactggagctgggcagctacccaatgctgccgggagccaccgacgcgggtctgttcttcaaaccggcgcagatgctgtcgattggtaagacaaccaaaaacccggaagcggcagcgaagctgattaacttcctgctcaacagcaaagaaggggtcgatacgctgggtcttgagcgcggcgtgccgttgagcaaagtggcggtgcagtatctgaccgaagacggcaccattaaagaggacgatccatccgtggcgggcctgcgcctggcgcagtcgctgccggcgaaactcaccgtctcgccatactttgacgacccacagattgtggcgcagttcggtacctctttgcagtatatcgactacgggcagaaaaccgtggaagagacggccgctgacttccagcgtcaggcggagcgtattttgagacgtgcgatgcggtaa

SEQ ID NO: 115780 - DNA, 1416 bp, Enterobacter cloacae
atgacatctgtaaatgactctacccttatgcccgctgcgctgcgcgatacccgacgcatgaaccagtttgtttctgttgcggccgccgtagccggtttactgtttggtctggatatcggcgttatcgctggcgcactgccctttattaccgaccactttaccttaagcaaccgcctgcaagagtgggtggtgagcagcatgatgctgggtgcggccatcggcgcactgtttaacggctggctgtcgttccgtctcgggcgcaaatacagcctgatggttggggcgatcctgtttgttgccggttccattggctcggcgtttgccatcaacgttgaggtgctgctgctctcccgcgtgctgctgggcgtggcggtgggtatcgcgtcctacaccgcgccgctttacctctccgaaatggcgagcgaaaacgtgcgcgggaagatgatcagcatgtaccagctgatggtgacgctcggtatcgtgctggcgttcctgtcggatacatacttcagctacagcggcaactggcgggcaatgcttggcgtgttggcgctgcctgcggtgctgctgattgtgttagtcattttcctgccgaacagcccgcgctggctggcgcaaaaagggcgtcacgtggaggcggaagaggtgctgcgcatgctgcgcgacacgtctgaaaaagcgcgtgaagagctgaacgaaatccgcgagagcctgaagctgaagcagggcggctggtcgctgtttaaggcaaaccgcaacgtgcgccgcgcggtgttcctcggcatgctgttacaggcgatgcagcagttcacggggatgaacatcatcatgtattacgccccacgcatctttaaaatggccggttttaccaccaccgaacagcagatgatcgccacgctggtggtagggctgacctttatgttcgccacctttatcgcggtgttcaccgttgataaggccggacgtaaacccgccctgaaaattggctttagcgtgatggcgctcggcaccttaatactcggctactgcctgatgcagttcgataacggcacggcgtccagcggcctctcctggctctccgtcggcatgaccatgatgtgcatcgccggttacgcgatgagcgccgcgccggtggtgtggatcctgtgctctgaaattcagccgctgaaatgccgtgactttggtatcacctgttccaccaccaccaactgggtgtcgaacatgatcattggcgcgaccttcctgacgctgctggatgcgattggcgcggcaggcaccttctggctctatacggtgctgaacgtggcgtttatcggcgtgaccttctggctgattccggaaaccaaaggcgtgaccctggagcatattgaacgcaagctgatgagaggggagaaactacgtaatatcggcgtgtaa

SEQ ID NO: 115781 - DNA, 762 bp, Enterobacter cloacae
atgattctggatgcattttctctgcaaggtaaagtggctgtggtttccggttgtgacaccgggttggggcagggtatggcgctaggtctggcggaagcgggctgcgatatcgtcgggattaacatcgttgagccaacggaaaccatcgagcgcgtcaccgcgctgggtcgtcgtttcctgagcctgaccgcggacctgcgcaaaatcgatgcgatccctgagctgctggatcgcgcggtggcggagtttgggcatatcgatattctggtcaacaacgctggcctgatccgtcgtgaagacgcgattaacttcagcgaaacggactgggacgacgtgatgaacctgaacatcaagagcgtgttctttatgtcccaggcggctgcgaagcacttcatcgcccaggggaaagggggcaagatcatcaatattgcctccatgctctctttccagggcggcatccgcgtgccgtcttacaccgcatcgaagagtgccgtgatgggcgtaacccgtctgctggcgaacgagtgggcgcagcacaacatcaacgtcaacgcgattgcgccgggctacatggccaccaacaatacccagcagctgcgtgcggatgaagagcgcagcgcggcaatcctggagcgtattccagcgggtcgctggggtctgccgagcgatctgatgggcccggttgtgttcctggcgtccccggcttcggattatattaacggctacaccgttgccgttgacggcggctggctggcacgataa

SEQ ID NO: 115782 - DNA, 837 bp, Enterobacter cloacae
gtggacgtcagacaaagcatccacagtgcgcacgctaaaacgctggatactcaggggctgcgcagtgagtttttagttgagcaagtgttcgaagccgacaagtacaccatggtctacagccatattgaccgcattattgtgggcgggattatgccggtggcgaaaaccgtctccgtgggcggtgaagtgggcaaacagctgggcgtgagctacttcctcgaacgccgtgaactgggcgtgattaacatcggcgggccgggcaccattaccgttgatggccagtgctacgaaattggtcaccgcgacgcgctgtacgtcggcaaaggggcgaaagaagtggtgttcgccagcattgatggcagcaaaccggcgaagttttactacaactgcgccccggctcatacgacttaccccaccaaaaaagtcacgccagcggatgttgccccggtgacccttggcgataacctcaccagcaatcgtcgcaccatcaacaaatactttgttccggatgtgctggaaacctgtcagctcagcatggggctgaccgagcttgcgccgggcaacctgtggaacaccatgccgtgccatacccacgagcgccgcatggaggtctacttctatttcaacatggatgaagacgcctgcgtgttccacatgatgggacagccgcaggagacgcgccatatcgttatgcacaacgagcaggcggtcatttcgccgagctggtccatccactctggtgtgggaacgaaagcctatacctttatctggggtatggtcggtgaaaaccaggtcttcgatgacatggaccacgtcgctgttaaggatctgcgctag

SEQ ID NO: 115783 - DNA, 1176 bp, Enterobacter cloacae
atggctaaaggtatgcgggtcaagctgagctatgaggtcagccgcgatccggatacaggcgtggaagtcacccgcctgaccccaccggaagtaacctgtcatcgcaactacttttaccagaagtgcttctttaacgatggcagccacctgctgttcgccggggagttcgacggtcactggaactattacctgttggatctgaaaaacgccgaagcggtacagttgaccgaaggcgcgggcgataacacctttggcgggtttctctctccggacgataaatccctctactatgtgaagaacgatcgcaccctgctggaggtggatttacagacgctggcagagcgcgaagtgtaccgcgtaccggaagagtgggtcggctacggcacctgggtcgcgaacagcgactgcaccaaactggtgggtattgagattgccagacgtgactggacgccactcaacgactggaaaattttccacgacttcttccacaaagggccgcactgccgcctgctgcgcgttgatctgaaaacgggtgaaagcaccaccattcatgacgagaagatctggctgggacatccgatatatcgcccgttcgatgacaataccgtggccttctgtcatgaagggccgcacgacctggtcgacgcccgcatgtggctggtgaacgaagatggcagcaacgtgcggaaagtgaaaacgcacgcggaaggtgaaagctgtacacatgaattttgggtgccggacgggtccgcgctgatctacgtttcttacctgaaaggtcagcaagggcgcaccatctcccgcttcaacccggacaccggcgtgaatgaagcggtaatgaatatgcccgcctgttcgcacctgatgagcaacgtcgacggcaccctgctggttggcgacggctccggtacgcctgtcgatgtgaaagacaccggcggctacaccattgataacgatccttatctgtatgcctttgacgtggcgaagaaagcctgttaccgcatcgcccgtcatgacacctcatgggctacggtggcgaacagccgccaggtaacccacccgcatccgtccttcacgccggacgaaaaagcggtgctgtacagttccgataaagacggcaaaccggccctctatatcgcgaaactccccgagcaacctgaaatgttgcatgtctga

SEQ ID NO: 115784 - DNA, 684 bp, Enterobacter cloacae
atgtttaagaaatctctgctccttgcttcccttattagtgcctcttttgcggctagcgccgttaccgtcgatctgcgtcacgaatatattgacagcggctcgaatgccgaccgtgttgccgtctcgcaccgctttgataatggctttggtttttcagtcgaggcgaagtggaaatcaggcggggacaaggcagatcagccattcgcggatgtagtggggaacggtcacgaagatcagattagctggcgctggaaagcgacagacaatatcgccctgacccctgcgtttacgattgaaagcacagacagtcgcaccatttataaaccgaatctgcatgtgcaatatagcttcgataatggcttctacgtggctgcgcgttaccgttacgaatatacccgctacccgtcaagctcaaataaggacgatgataaagttaaccgtggcgatgcgtgggtcggttgggtattaggtgactggcgtaccgagctgaactatgtttacgcgaaaagttctgaaggcgtggcccgaaataacaataaagattattccaacgaatataacgccaagctggcctacaaatgggataaaaactgggcgccgtatgtggaggtgggcaacgtgggggttaaagacacggacgaacgccagacccggttccgtttaggcgtggcgtactccttctga

SEQ ID NO: 115785 - DNA, 1179 bp, Enterobacter cloacae
atgaaagatgtcgttatagtgggtgcgttacgtacggctatcggctgttttcagggagcgcttgcgcgtcactctgcggttgatcttggcagcgtggtggtaagagcgctggtggaacgcagcggggttgccgcacatgaaattgatgaggtgatcctgggccaggtgctgaccgctggcgcgggacaaaaccctgcgcgccaggcggcgctgaagggcggcctgcctaataccgtttcggcaattaccattaacgacgtctgtggttcaggtttgaaagcgctccatcttgcaacgcaggccatccagtgtggtgaagcggatgtggtcattgccggcgggcaggagaatatgagccgtgccccgcatgtcctgaccgacagccggaccggcgcgcagctcggaaacagccagctgcttgacagcctggttcacgacgggctgtgggacgccttcaacgactaccatatgggcgtaacggcggaaaacctggcgcgggaatacggtatcagccgcgagcttcaggatgcatatgccctcagctcacagcaaaaagcgcgtgcagcgatcgactccgggcgttttcgcgatgaaattgtcccggtcagtacccagcgccagaacggcgaagcgctcatcgtcgataccgacgagcagccgcgcaccgatgccagcgcagaagggctggcaaaactcgatccggcctttgaaacgctcggttccgtaacggcaggcaacgcctcatccattaacgacggtgcggcggcggtgatgatgatgagtgaaagcaaagcccaggagctggcgctgccggtgctggcgcggattaaagcgtttgccagcgtgggcgttgatcccgcgttaatggggatcgccccggtctatgccacgcgccgctgcctggagcgggcgggctgggagttgaacgatgtggatctgattgaggtcaacgaagcttttgctgcacaggcgatctcggtcgggaaaatgctggaatgggatccgctgcgggtcaacgtcaacggcggagccatcgcgctgggccatcccattggcgcctccggctgccgcattctggtgtcgctggtccacgaaatgaaaaagcgtaacgcccgaaaagggatcgcaacgctctgtattggcggggggcagggggtggccctggctatcgaacggtaa

SEQ ID NO: 115786 - DNA, 867 bp, Enterobacter cloacae
atgcgttactctcccgaagcactgaccgcgtttgttgaaactgtcgccgcaggttcgttttctgctgcggcacggcggctgcgtaaaagccagtccaccatcagcacctccattgccaaccttgaagctgaccttggctttgagctgttcgatcgctcggcgcgtcacccggtattaaccgcccagggtgaacaggtgctgggctatgtccagtcgatactcgccgccagcgcgcgcctggatgagctggccgtatcgttaaccgcgcaaacggaggcgcgttttacctttgttctctccgatacgcttaacccggccgtgctggaagagatgatgagccagttcgaccagcgttttccgcacacggaatttgagtgcctgattggagaagaggaggacgtgatcgatctgctgcaaaaggagcgggcgcaaattggcctgacggaagcgcgcgacagctacccgaccgatattggcgcgacccgtctgcctatgcagacgcggatggccatctacgtttctgccggacatcctctggcagggcaacatgagacgcaggcggacgagctgcatggctggcgcgagctgcggctgagcacctatcttgaacgggaagcgcccctttcgcgcgggccggtctggtctgcgccgaattacctgttactgctgagcatggcggtacagggctttggctggtgcgcgttaccctgcgcgctggtcgacgaatttgccgcgtcgaaatcgctggtgcagctgaacgtgccgggctggccgaggtcgattgccatcgatctggtatggaacaaacgaaccccgcccggcgtcgccggaagctggctgcgccagtacttacaggacgcacgataa

SEQ ID NO: 115787 - DNA, 465 bp, Enterobacter cloacae
atgcaatatcaggatgcactccaacgtaaattgccggagcggatcttccatgccgtctgttttgaaggcattgctacggcgatcctcgccccgacggccgcgtggctaatgcagcgctcggtggttgaaatgggggggctcaccattattctggcgaccacggcaatgctctggaacattatctataactttggcttcgaccgtttctggcccgtccagcgggtgaagcgcacggcgaaagtgcgcgccctgcatgccctgggttttgaatgcggctttattgtgattggcgtaaccatcgttgccgccgtgctgggcgtgacgctgctccaggcttttaccctggaaattggtttctttctgttcttcctgccgtacatcatgctctacaactgggcgtacgacaccctgcgggagaaaatcatcaagcgccgccagcaacgacgcgccctggcaagcgaataa

SEQ ID NO: 115788 - DNA, 1230 bp, Enterobacter cloacae
atgtcgaaaatttggtcaaaagaagagactctctggagtttcgccctctacggcactgccgtgggcgcaggaaccctgttcttgcccattcagctcggctctgctggcgcgattgtcctgctgatcaccgcccttgtggcgtatcccttaacctactggccgcataaagcgctggcgcaatttattctgtcgtcgaagacgaaaggcaacgaagggatcaccggtgccgtttcgcattactacggcaaaaagatcggcaacctgatcaccacactctattttgtggccttctttgtggtagttctgatttacgcggtggcgataaccaactcactcactgaacagctggcgaaacggatgacggtggataccggcatgcggatgctggtgagctttggcgtagtgctgattttgaatctgatcttcctgatggggcggcacatcaccattaaggtgatgggtttccttgtctttccgctgatcgcctatttcctgtttgtctcgctgtatctgacgggcagctggcagccgtcgctgctgaccagccagatggccttcgaccagcatacgctgcaccaggtgtggatttcgatcccggtgatggttttcgcttttagccatactccgatcatctcgaccttcgccgtagaccgtcgcgagaaatacggtgaagaggcgatgggtaaatgcaaaaaaatcatgaaagtggcgtacctgatcatctgcctcagcgtgctgttctttgtgttcagctgcctgctttcgattccaccgtcgtatatcgtggcggcaaaagaggaaggggtgacgatcctgtccgcgctgtcgatgatgccatcgtccccggcatggctgggcatttccggcattatcgtggcgattattgcgatgtcgaaatcgttcctcggcacctattttggcgtgattgaaggggcaacggaaattgtgaaatcgtcgctgaatcaggtgggtgtgaagaaaagccgcgcctttaaccgcgcgatttcgattctcggcgtgtcgctgattacctttgcggtctgctgcatcaacccgaatgcgatctcaatgatttatgccatcagcggtccgcttatcgccatgatcctgttcatcatgccgacgctgtcgacgtacctgatcccgtcattaaaaccgtaccgctccatcggtaacctgctgacgctgattgtgggtgtgctgtgtgtgtcggtgatgtttgtgggttga

SEQ ID NO: 115789 - DNA, 273 bp, Enterobacter cloacae
atggaaattcttgaaggccataacaagttttacgtcaacgacgccgaaggcaatcaggtagcggagatcgtctttgtcccgaccggcgagcatctgagcatcattgagcacaccgatgtggatccgagcctgaaagggcagggtgtgggtaaacagctggtggcgaaggtggtagagaagatgcgcggtgagaatcgtaaaattatcccgctgtgtccatttgcgaagcatgagtttgataatacgcgggagtatgacgatattcgggcgtaa

SEQ ID NO: 115790 - DNA, 231 bp, Enterobacter cloacae
atggatcaggagctactggatgcggggtaccgggcctataccggtgagaaaatcgatgtctacttcaacaccgggatctgcaaacactcgggcaactgcgtgcgcggcagcgcgaagctgttcgatctgaagcgtaaaccatggatcgcgccggatgaagtagatgcagaaacggttatgcgcgtaattgatacctgcccgagcggtgcgctgaagtaccgccaaaaataa

SEQ ID NO: 115791 - DNA, 189 bp, Enterobacter cloacae
atggcagagcaacatcgtggtggttccggtaatttcgctgaagaccgtgaaaaggcatcagaagctggacgtaaaggcggccagcacagcggcggtaatttcaaaaacgatccgcaacgcgcatctgaagcgggtaagaaagggggacagagcagtcacggcggaggccgtaaatctgataactcctga

SEQ ID NO: 115792 - DNA, 498 bp, Enterobacter cloacae
atgaatatgaaaactgttgaagatgtatttattcacctgttatccgacacctacagcgctgagaagcagctgacccgcgcgctaagcaaattagctcgcgccgcatccagcgagaagctgagtgccgcgttcacggctcacctcgaagagacgcagggacagatcgaacgtatcgatcagattattgagcaggaatccggcctcaaactgaagcgcatgaaatgcgttgcgatggaaggcttaattgaagaagccaacgaagttattgagagcactgagaaaaatgaagtgcgtgacgctgcattaattgccgcagctcagaaagttgaacattacgaaattgccagctatggcaccctggccaccctggctgaacaattaggctataaaaaagccgttaaacttcttgccgaaacgctggaagaagaaaaagaaaccgatctcaaattaaccgatctggctgtcggtaatattaatcaaaaagcccagaaaggataa

SEQ ID NO: 115793 - DNA, 507 bp, Enterobacter cloacae
atgaatcatgtagaacactaccatgattggctacgcgatgcccatgcgatggaaaagcaagccgaatccatgctggaatcaatggccagccgtattgataattatcccgacttacgtgtacgaattgaacaacatgttaatgaaactaaacaccaaattaccgtgctggaagaaattctcgaccgcaatgatatttcccgttcggtcataaaagattccatgagtaaaatggcggcgctcggccagtccattggcggcatgttcccttccgacgaaattgttaaaggctctatcagcggctacgtttttgagcagtttgaaattgcctgctacacctctctgctggctgcggccaaacaagcgggcgataccgcctccattccagcccttgaatccattctggaagaagagcgccagatggcagactggctgctccagcatattccacagacgacggaacagttcctgctgcgctccgacgcggacggcgttgaagctaaaaaataa

SEQ ID NO: 115794 - DNA, 873 bp, Enterobacter cloacae
atgtttcgacacgtaaaacagctgcaatacacggtacgcgtagccgaaccgaatccgggcctggccaatcttctgcttgagcagtttggcgggccacagggcgaacttgccgcggcatgtcgttactttacgcaaggattaagcgacgacgatcccggtcgtaaagatatgctgatggatatcgcgaccgaggagttaagtcacctggaaattatcggcaccctggtgggtatgctcaataagggtgcgaaaggcgaactggcggaaggcgttgaaaatgaagcggaactgtaccgctccatgaccgagaacggcaacgacagtcatatcacctccctgctctacggcggcggtactccgcttactaactccgcaggcgtaccgtggacggcggcgtacgtggataccattggcgaaccgaccgcggatctgcgctctaacatagcggccgaggcgcgcgccaaaattatctacgaacggcttattaacgtaacggacgatccgggtgttaaagatgcgctggcgtttttaatgacgcgtgaggcagcacaccagctctcgtttgagaaggcactccagtcgatccgtaacaatttcccaccgggtaaattgccgccaatcgaagagtacaccaacaagtactacaatatgtctgaggggggagaagttcgcggcagctggaacagcgataagcacttcgactacgtggaatctcctcagccagcggtcgatggcggtgacggcggcgcaagcgtaacgctcactacagagcaggaaacgctggtcaaagcgatgtgcgcacgcacgaaatccgaccctaatgccgatccgcttaccggtgccgagcttggcgcaggtaagaaaaaaccgtaa

SEQ ID NO: 115795 - DNA, 1404 bp, Enterobacter cloacae
atgttcgagcttgatgcgtttcatctggccaggatacagttcgcctttaccgtctcttttcatattctcttcccggcgatcaccatcgggcttgcgagctatctggtggttctcgaaggcatgtggcttcgcaccaaaaatgatgtctggcgctcgctataccatttctggctgaaaattttcgccgtcaactttggtatgggcgtggtttccgggctggtcatggcttaccagtttgggactaactggagcggcttttcccagttcgcaggcagcataaccggccctctgctcacctatgaagtactaaccgccttcttcctggaagctggtttcttaggcgtgatgctgttcggctggaacaaggtcggccccggcctgcacttctttgccacctgcatggtggcgctgggcacgctgatgtccactttctggatcctcgcctccaacagctggatgcacaccccgcagggcttcagtattcagaacggtcaggtcattcccgaagactggctggccattatctttaacccctcattcccttaccgcctgatccatatgtccatcgccgccttcctgtgcagcgccttgtttgtgggcgcgtccggggcatggcatctgctgcgcggtaacgatacgcccgctattcgcacaatgttctccatggccatgtggatggcgctgctggtcgcgcccattcaggccgtggttggggatatgcacggcctgaatacgcttgagcaccagcctgccaaaatcgccgcgattgaaggccactgggaaaacccgcccggcgaggccaccccgctgctgctgtttggcgtaccggatatgaaagaggagcgcaccaaatacgggcttgaaattcccgcgctcggcagcctgatcctgacgcacagcctggataaacaggtcccggcgctgaaggatttcccgaaagaggaccgccctaactcgctcatcgtcttctggtccttccgcattatggtcggcatggggctgctgatgattacccttggcgtgctgagcgtctggctgcgctatcgccgtcgactctatcactcgcggccattccactggtttgccctctgtatggggcctgccggactgctcgcgctgctcgccgggtgggtcaccaccgaagtgggccgccagccgtgggtcgtttacggctatctgcgcacgatagatgcggtgtctctgcacagtacgttgcagatgagcatcagcctgctggcctttatcgtggtctactgttcggtatttggcgtgggttatgtgtatctcgcccggttgattaagaaaggtccgcagcctgtgggcacgctaacgtctaatacatcgggcacccctgcccgtccgctgtccgccgccgagtctgttccggaagaggagaagatctga

SEQ ID NO: 115796 - DNA, 1011 bp, Enterobacter cloacae
atgggcgtcgatatcccggtcatctggtttgccattattgtcttcgccacgctgatgtacatcatcatggacggtttcgatctcggtatcggcatgctgttcagctttgtgggcgatgccaaagagcgcgacgtgatggtgaacagcgtcgccccggtctgggacggaaatgaaacctggctggtcctcggcggcgcagggttgttcggcgcgtttccgctggcctacgcggtaataatcgatgccctgaccatcccgctgacggccatgctgatcgggcttattttccgcggcgtggcgtttgagtttcgctttaaggcgaccccttcacaccgcaaattctgggactactcctttgccggcggttccctgctggcaaccttcagccaggggatcgtggttggcgcgatgatcaacggctttgacgtggaagggcgtcgctttgtgggctcctcgctggactggttcaccccgtttaatctgttctgcgggctgggcttaattgtcgcctataccctgctggctaccacgtggctgatcatgaaaagcgaaggcgcgctgcaatatcggatgcgcgagctgacccgccacgtgctgctggcgctgattgccgttattgcggtggtaagtatctggaccccgctcggctggcagtttgtcgccgagcgctggtttactctgcctaacttcttctggttcctgccagttccggttctggtggcggtattcagcctgtggatctggcggctgacgcgcaatcccgacagccatgcccgtccgttcctgttaacgctgggcctgatcttcctcggctttagcggcctgggcatcagcctgtggccacacattattccgccgcacatcaccctgtgggaagccgccgcgccgcctgccagccagctgtttatgctgattggtacactgttaatcatcccggtgatcctggtttataccgcctggagctactacgtcttccggggcaaagtgtctgataccgaaggttatcattaa

SEQ ID NO: 115797 - DNA, 1626 bp, Enterobacter cloacae
atggcaggctggcatacacgcgccattatttaccagattgataccgccctgttttacgatcttaacggcgatggctgtggcgacatcgccggaatcaccgcgaagctgcgctacatccgccggatgggcgcgacggttatctggatcaccccgttttacctcacgccttttctcgatgaaggttatgacgtgatcgaccatttgcaggtcgatccccgcttcggcaagctcaacgatatcatcgcctttattgaacaggcgcgggagctggggatgcaggtcattattgagctgctgatccagcatacctcggatgcgcatccctggtttcaacaggcccgccgcaacccccagtcaccctaccgtgactattacctgtggtccgacacggacgacgacgatacgccaccgatgttccccggcgtggagaagagcatctggacatgggacgacgaggcggggcaatactaccggcatatgttttatcaccacgagccggatctcaatctggcctcccctgcggtgctaaaggagattgagaacatcatcatcttctggctaaagctcggggtgtcgggctttcgcctggatgcggcatcgcacctgacaaaacaggccggacgtggggatgaaaaacgcggcctgtggatcctggagcatctgcgccgtcttatcgggcagcgtaacccggacgcgatcctgctcggcgaagtcgacgtggaggtcgaggcctacaaagattattttggtcagaacgaccggctcaacctggtgctgaatttctggctcaataagtacttttacgtcagcctggcagagaagagcgcacgaccgctgcgcaacgcggtgaagaagatgattgtgccgccggactcctgctgcttcgccaactggctgcgcaatcatgatgagctggatctggaagggataggaaaaaaagcgaagcagaccgtcatcgatacctttgcccctgacgaagagatgagtgtgtatcagcgaggtatccgccgccgtctggcgccgatgcttaatggcgatcgaaagcggctggccttttgccatgcggtcttgttttcgctaccgggcgtaccggtcatgcgctacggggatgagattggcatgggggatgatttggatcttgaggagcgttacgccgtacgcaccccgatgcagtgggccggatcgcaaggcggcggtttctcagatgccgacccggaaacttttgtcgccccgatgattgaccacggcccgtaccgctatcaaaaaatcaacgtggcggattcgctgttgcaccgcaactcactcctgcactgcattatcgatatcgccaatacgcgctcggagttccctgagatcggcgtcgcgccgtttcgtcttattaatatcgacagcgatgcggtactggggatctattacgaaaccgacacgcgcagcattctgaccttcgttaacttcagcgataagcccgttaattttaccgccagagggatccggcatgcgacctggaccgcctgcctggcggacaaacgctacgacgacgcgctggtgtgcggcaaaaccgtcgcgcttaacctcagcggctatggctaccgctggttctggaccgatcgtaccgcactgcgctga

SEQ ID NO: 115798 - DNA, 987 bp, Enterobacter cloacae
atggctgtgatcgttattaccggcggtacggcgggcgtggggaaagccacggcgctgcactttgccaaagcgggctacgatgtgggcatcattgcccgcgacgagcagagcctgcgctccacagaagaggagttgcgccgttttgggatcaacgcccgtgccgttcaggccgacgtggccgacagcaaggcggtgaccgatgctgctaacgagattgaataccggcttggggccatcgatgtctgggtgaataacgctatgggcgggatgctggcgccgtttcgcaccatgtccccggaggagtttcgccgcgtcaccgaggtgacctatctgggctatgttaacggcacccgcgccgcgctggagttaatgaccccacgcgatcgcggaacgattattcaggttggctccgcgctggcctaccgttccattcccttgcagtcagcctactgcggggcgaaagccgcgatccgcggatttaccgatgccgtgcgcaccgaactgatgcatgaaaacagccgggtgcagatcgcaatggtacagatgccaggcctcaatacgccgcagttcgagtgggcgaggaataaatttgcctgggcgatgcgcccggttcctcccgtttttcagccggaagtagctgccagcgctatttttaaggtggcgcagaaaccggtgcgggaactgtgggtgggcagcagcaccgtccagtcgattgtcgggcaatttcttttccccggctttctggatcggctgatggttaaaaaggcctgggaagggcagatgaccgatacgttaaatgcggatgaccgtcaggactatctggatcagccggtcaacgacctgcataaaatccacgggcacttcaccgacgaagcaaaagagcgcgctatcagcgtcacctccggcatgccggggaaagtgctgctcggctcccttgccgtcacgggcgcgatcgtggcccgtctgctgctctcgcggagacgataa

SEQ ID NO: 115799 - DNA, 519 bp, Enterobacter cloacae
atgagcaaccttattcacgacagcaacagcaccatcagcgagctgacgaaaaagctcgccactcagcttacggacagaggtttgcggttaaccaccgcagagtcctgtaccggcggcaatctcgcggttgcgctttgtgccgaagagaacacggcggaattttatgacgttggcatggtggtgttcagcgatgcggcgaaggagaggatcctcggcgtgcggcacgaaaccattgagcgcttcaccgccgtcagtgaacaaacggtgaccgagatggccgctaaaattcgcgaaattgccgaggcggatatcggccttgccatcagcggctatgcgggaccggaaggcggagacgatggcaccgcagccggtacggtctgcttcgtctggaatattcgcggaaagacggaaacccgcaccgtgctgttttccggtgaatgtcaggatgtggtggataaagcggtgcgttattccctgtctgaactgatcgaaatcctctccggctgggataacgtctga

SEQ ID NO: 115800 - DNA, 447 bp, Enterobacter cloacae
atggacatggtttttcgtgccctggcaatttacctgtttctggtcattgtgtttaaagttgccgggcgacgcgctctgctacaaatgaccagttttgaccttattttgctcttaattatcagcgaggcgacacaacaggcgctgcttggcgaagatttctccgtcaccggagcaatgattacaataacgacgctggtggttgtggatattatttttggcctactgaaaaaatatttttccactgttgagaatattcttgatggcacgccggtgatattggtggagaacggtgttccccttgccgataaactgaaaaaggtcgatgtatcctgtgatgacatattggtatcagcccgccagaatcacggtattacagaattgaaggagattaaatacgctattcttgagcgtaatggtcatatttctattattcctgacgaaaattaa

SEQ ID NO: 115801 - DNA, 504 bp, Enterobacter cloacae
atggaaccaaaaaatgaaaaagtgcctgggataaaagagagtagccgtttactgacgtttgagtatgcatttcgccaggtgggttttattgtgctgttagctattatcgtggccgcgatagccggcctgttttccagcggcgcggtcagcgacgtggagaaaacaaacgaagcaaaatccctgaccctgagctatgagcgcttcggtcgccgccagaccgaatcgcggatggcactgacgtttccggtgacgtctgaggggaaatataccctcagcatgaccagcgaaagcagcgacgcatatgagcccggcagcgtctggccacagccggacagcatgtacagccgggggaataccctgtttctcgtctacgatcgtttacaacagaccgataaatttaccgttttgttattcatcacgccgtcaaaagcagggaagtggacaaacagtatccgcgtaaacaacgagccagatatccatttctggcagtttatttacccctag

SEQ ID NO: 115802 - DNA, 390 bp, Enterobacter cloacae
atgaaattatcagtgatttcagccttgttaatattaattatccctactgcatgggcagataataacggcgggttacaaaagggtgacgcgccgccaccgccgcatgcgctggacagcggttatcgtggtaccgatgatgcgcgcattatgaccattactcaggccaaagagatgcatgatggtgcctctatttcattgcgcggcaatcttattgatggcaatggcgataaatacgttttccaggataaaaccgggaaaatcgacgttattatcccgaaagccgtatttgacgacagaaccgtggaacctgacaacatgatcagtattagcggctcgctcgataaaaaatcatccccacccgtagtgcgggtcagccacttgcaaaaataa

SEQ ID NO: 115803 - DNA, 885 bp, Enterobacter cloacae
atgagtgataatgaacaacgtacgaacgcttacccaacgccacctttcccggagcagcctcagacgccaccgggcctggcctcagagatggaacccgtacccgaccacggcgagaagagctacaaagggcatggtcgtcttgccggtaagaaggcgctaattaccgggggcgattccggcataggacgcgcggtagccattgcctatgcccgcgaaggggcagatgtcgcgattaactatttgccggaagaggaagaagacgcagcggaagtcatcgccctgattaaagcggaaggacggaatgccgtcgcgcttccgggcgatgtgcgggacgaaactttttgtcagagccttgtggagcaggccgtctcaaaactgggcgggctggatatcctggtgaataacgcaggccgccagcagtaccgtgagtcgctggaagaactgaccacggaagattttgacgcgacctttaagaccaacgtctatgcgcctttctggatcacaaaggcggcgttgcgccacatgaaagcccccgcctccatcattaacacctcatctgtacaggcggtgaaaccgagcgccgtactgcttgactatgcgcagaccaaagcctgtctggcggtgttcaccaaagcgctggcgaaacagctgggaccgaaggggatccgcgtgaacgcggtagcgccgggaccttactggaccgtgcttcagcccagcggtgggcagccacaggaaaaagtgaaacattttggcgagagtacccctctgggacgcccgggacagcccgtggagatcgcaccgctgtatgtcaccctggcctcggatgagtgttcatacacctccgggcaggtgtggtgttcagacggcggggatggcgtcatctag

SEQ ID NO: 115804 - DNA, 1983 bp, Enterobacter cloacae
atgaaatttaaaactctcgttagtgcgatagccgttgctggtctgctattagtgtcgttgacctcattgcctgtcctggcacaaaaggaagggaagggagccactgtccatacgaaagagatgaatgatgcactttatggtcaactgcccttctttgataagaccgatttccgaaatgcgcacaaaggctttattgccccgctgccacccgcggtgattaaaggcgaaaaaggcgccgttatctggaacccccagaaatacgcttttatcaaagaagggcaaaaagcgccggataccgtcaacccgagcctgtggcgtcaggcgcagctgaataatattggcggtctgtttgaggtcacggaaggcgtctaccagatctgtaacctcgatctgtcgaatatgacgattatagagggcaaagaggggatcacggttatcgatccgctggtgtctgcggaaacggccaaagcgggcatggatctttacgttcaacatcgtggcaaacgcccggttgttgccgttatttatacccatagtcatgtcgatcattatggcggcgtgcgtggcgtagtcgatgaagcgggagtgataaccggcaaagtgaaagtctatgctccagcaggttttatggaagaggcggtatcggaaaatatcatggccggaaatgccatgagccgccgtgccagttatatctacggaaacctgttaaatgccaatgtaaaaggtcaggtaggggcgggtctggggacgaccacctcagccgggacggtcacgcttatcgcgcccactcacgccattaccgaagacgggcagaaagagatcatcgacggtctcacctatgattttatgctggcgccggggtcggaagcgccgtctgaaatgctctggtatgtggaagagaaaaagctgattgaagcagcagagaacgtcactcacaccctgcacaatacttactcgctgcgcggggcgaaaatacacgatccgctggcatggtcaaaatacatcaataacgccctcgatcgttggggggataaagcggaaattattatcgcgcagcaccactggcccacatggggtaataagaaagtggtgaagctgatgaaaagccagcgtgatatctaccgctatatcaacgaccagacgctgaggctggcgaataaagggctgacgagggatgagatagccgctaatttcgccctgccttacgggctggcaaaatcctgggcaggccgtggctattacggctcggtaagtaacaatgtcaaagccacctatgtctactatcttggctggttcgacggaaatccggcgacgctcaatgaactgcctccggtcgaggcagcgaaaaaatatgtcgattacatgggcggagcccgcgcgatccttgaaaaagcccgggttgattatgcccggggaaattaccgctgggtggcgcaggtagtgagtaaagtcgtttttgccgatccaaataataaggcggcgcgcgaactggaagcggacgcggttgaacagctgggataccaggccgagtcaggaccctggcgtaacgcctacctcaccggtgcgcaggagttgcgtaacggggtgaagaggatgccgacgcccaataccgccagcccggatgcggttcgtgccatgtcgactgagatgatttttgactacttcggcgttcaccttaacggcgtcagagctgcgaatgccagagggatttttaacgttgatctgggtcgcgagggcggcaggtacaagctggagctggagaatggcgtgctgaaccatagcgccaacgctcaggcagaagatccggatgcaaccatcacgctcagccgcgaaacgctgaataaaatcatcctcaaagagaccacgttgaaaaaggcgcaacaggcaggagaggtgacgatcgtcggcaatgccgcgaaggtaaacgaaatgctgcgctgcatggagagcttcagcttctggtttcctgtcgtcaccccttaa

SEQ ID NO: 115805 - DNA, 399 bp, Enterobacter cloacae
atgaagagcctgccgttctttttcgctgtattaaccctcagcacattaacagcctgtagttctccccaaccagacaatgttgaaaaaattaatcatctgcaaattccactggtgttgccgggggaaaaaccgccgcaggcacagatatcgcatatcgcgtctctttatcaggaaaataaacagcagatcgagaccttaacgcgcagcgtaaaatcacagtatctacaggacaccaccgcaaaagaaatttttgttgcggacagtgacgttcaacgcgtctatgcctcgctgaccaaactggaacagttagatatggttaatcagcaatacctgaaagataataatgtcacgggcctgcaaaatattcatatcattcttgaaccgttattcaccagctga

SEQ ID NO: 115806 - DNA, 612 bp, Enterobacter cloacae
atgaaaaagacagttatcgcattgattatggctaatgcatttaccgccacttccgcgttcgccgccgctgatgcgggcacctggtatagcggggctaaattcggctggtctcactattttgataccaatatgggttcaaaagcgtttgagaacacgtattccgatcacttcgattttaaccatgataatgtcggcgggggtgtttatacgggttatcagattaccccatggcttgcggtagaaggtggttatgattatttaggtaacatgcagattaaaggtcagcatggcgccggggcgcaaatgaagacgcagggcctgcaaatgtctctgaaggccagttatgccctgaccagtgactgggatatttacggccgtgccggcgcaatgggctatcgcgctgaatccgatgtaagtggtcacaatcgttttgaaaccggtgtgcgcccgcttgcagccgtgggtactgaatacgctttcaataaaaactgggcgggccgcctggaatatcagtgggtaagcaacgtgggcaatgttaaccagatcggcgtgagcagcgacctgagttccgtcaccgcagggcttagctatcgctttggtcagtacgactga

SEQ ID NO: 115807 - DNA, 630 bp, Enterobacter cloacae
atgcatattttaccgcctgttcgacccgaaaaatccatcgaaagactgaccgccatccttgagccgatagcggagaaagtgcacgttgttccgcgtaagcgactcacctggttacggaaggggaaacagcagatgtacctctttctggaaggagagctgtccctgctgcgggcttcggatggactggtggtagtgaccgtttacgagccgcatttgtttggtattgcagagatgatccagcctacgcaggggcaccttctccgtgctgaaagagagtcgactattttacgtctcgatgcggacaaggcggctgagttgtttcgtgccgagggcgtctgggaggatgtcgccgcgctgctctcataccatacggcctatttaatattccgtgatgcccaggtactccagcagcgtacctattccgttattcgtaaccaccttcaggaaatgattttgctcccggaagagacgcgtttgcgtaccacgattctggaatatatccaggatcgtacgctgctctctcgcagcagtatactcaatgtattatctgcccttaagcagggggaatatatcgcctttaagcgcggtggatatctgcttgaggtcagacatttacccgagtcattctag

SEQ ID NO: 115808 - DNA, 1176 bp, Enterobacter cloacae
atgaaaacacgactcctcctgtgcgcgggcttatttgccgcctccagtgcccatgccagcgccctctatttttatgaagccggcaccgaagataccgcgcttgccggagcagggcaggcggctcgtgcgcaggatgcctcgacaatcatgaccaaccctgctggcatgacgcgcctgccggatcatatggtcactggcgggttacaggttatggatggctccatcgacaaccagctggataaccatgcccatcaaagccccggcgacgtgatgaaaaccatcccgaatgccagcgccttttatagccagaagataaacgatgatctttatgccgggatcgggctttacggtaattacggtctggggatcgattacggtagctgggcgggcgacaggctgattaaaaagagtaccctggttgcaatgacgctcagtccgtcactggcatacaagctcaacgaccgactctcaataggggcgtccgccaacgttaattacggttatttctcgctgacccgcaacgttaatgataatgactatcggcagcatgatgaggactgggccatgagctatcggcttgggctactcatgcaactgaccgaccagacgcgagccggtattacatggaacagcgagacgaactatcgctactctgttaacggcaaagctcgagtacagaatggtgcctacgacctcccggtgtcggcacaaatcagcgcgccgcagcaaatcatgctcagtcttgtgcatgatattaaccctcggtggtcggttatgggcgatctcggctggcaggactggagccagttcggtgctccgcaaatcgtcgttggggatcggcaactgaacaacgtcagccgcctgaaggatacatggcacggcgcggtgggcgtgcagtatcgtccaacacctcagtggcgactgaataccggtgtggcgttcgacagctctccgtatgagagtcagagtgatgtggccttaactttacccaccggggatgagtggcgatttggcacgggagcccagtatcagatcaccccggccagcaatattggtattgccgtgtcgtatcttcatatgcagtcgtcgcatgtgaaatccccgacggcgtttgccggaagttacgatcatccttatctttggtttgccagcgtcaactacagctatcagttttga

SEQ ID NO: 115809 - DNA, 669 bp, Enterobacter cloacae
atggctgctacaaacggtatgattgatactgatgacgctgtaattttactcatcgacaatcagagtggcttatttaacacggtacgtgatgtgcctgtaccagaccttcgtaattatgtgacagcgatagccaaagttgccacgcttttaaatatcccggtgatcaccacggcctctgttcctgacggtcccaatggcccgctcatcccggaaattcacaaatatgcaccccatgccgtgtatgttccacgcaccgggcagattaatacctgggataatccggcgtttgtgaaggaagtggaaaagacgggcagaaagaccctgattattgccggcacgctcaccagcgtctgcatggcgttccctgcggttagcgctgtccaggaggggtataaggtttactgtgttgtggatgcctcggggaactggtccaaaatcgcgaccgataccaccatcgcgcgcgtggctcaggcgggggcgatccctaccgatacgtttgccattgtcgctgaattaatgagaacctggaaccgcgcggaaggttctcgctttgctgagatcctggcagagcatgtctgtccggaatataagtgcctgattgaaagtttcggcaaagctcaggaaattgccagaacgggcccggaaaccaatctggagcattataagtaa

SEQ ID NO: 115810 - DNA, 144 bp, Enterobacter cloacae
atggctaccgggaagagaaagaaccaaaaggaatcacctgaagaagagttagatcgcttgctggatgagcttgaactcacagaggagcaacgggagtttatcgaatccatgcgggaggataagggcgatcccagtagtgagtaa

SEQ ID NO: 115811 - DNA, 426 bp, Enterobacter cloacae
atgcaaaacgcacaggtttttaagaagcggtatctacttctgatcctgttggctgttgtcgcctatgggatatacaacttgctgcacttttcaccacttgagcaagtgattattaagaaggcgaaagttaacaatctggctaatctttacatcacagaagcgagtgcaggagccaccacaggcttttcctaccgtttctatctctatgatgtaaccaaagatgataaagcgtttatggcgagtctggagaacgatcaccagcctttcatgatcaccacggacaaagatgcattgaagaaggtcgagaataatgcgatctacctttccgtgaagggaaccatttacacctttcacagccctgcggattatctggcaggtggctcgatctactccgtccctgtctatttaaccgcatcaccatactaa

SEQ ID NO: 115812 - DNA, 741 bp, Enterobacter cloacae
ttgtttgcaggaagcctgacgagaaacccgatcattgccgttttctgcctgacgctgacgctacttgtagcaggatgctcggggagtaaatcttcggatatgggcagttattccggtgcagtctataccgttaagcgcggggacacgctctaccgcatctcacgcgccacgggaaccagcgtgaaggagctggcgcgcctgaataatatctctccaccgtatactattgaggtagggcagaagctcaaggttaacggcggttcctcctcagggaaaaagtcctcaacgcgtaaaacagccaaagtcacgccatcctatcaggtgcctaaatcatcctggccgccggtcggtcagcgctgctggatctggcctgcaagcggaaaagtggttgcgccgtactcgctctcggaaggtggcaataaaggtattgatatcgctgccgcacgcggcacaccggtttacgcttcaggggccgggaaggtggtctatgtcggtaaccagcttcgtggatacggtaacctgatcatgattaagcatggtgaggactacattacggcgtatgcgcataacgacacgatgctggtcaataacggccagaacgtgaaggcggggcagaagattgcgaccatgggcagtaccgggacggatacggttaagctgcacttccagatccgctataaggccacggccatcgatccgcagcgttatcttccggcgcagggcagtaagccgaagtgctaa

SEQ ID NO: 115813 - DNA, 543 bp, Enterobacter cloacae
atgagtattcaagaacacgttattttggtaaatgaccagggaaaagtgattggcactcaggagaagtacgccgcgcacacgtcacacaccccgctacacctggccttctcttcatggctgtttaacgctaatggagaatgtctgatcacccggcgcgcattaagtaaaaaagcctggcccggcgtatggaccaactccgtttgcggtcatccacaggccgacgaagcgacagagcaggcgattatccgccgctgtcgctttgaagtcggcgccgaaatcacagacatcacccccattgccccggagttccgctaccgtgaagccgacccgtcagggatcgttgaaaacgaaatctgcccggtctatgccgcccgcgtaacgaataccctcgcaatcaatgacgatgaagtgatggagtatcagtgggtgaagctggacgcgctattccgcgcgctggacgccacaccgtgggcatttagcccgtggatggtgcaggaagcgaacaccgcgcgtgaaaaactcagcgccttcgcggcgcaataa

SEQ ID NO: 115814 - DNA, 1518 bp, Enterobacter cloacae
atgtctgaacaacaagcacagggcgctgacgcggtagtcgatcttaacaacgaactgaaaacccgccgcgagaagctggcagcgctgcgcgagcagggcgtgccgttcccgaacgattttcgtcgtgaccacacctcagaccaactgcacgcagacttcgacggtaaagagaacgaagagctggaagcgctgaacgttgaagtgtccgtggcgggccgcatgatgacccgtcgtatcatgggtaaagcgtccttcgtgaccttacaggacgttggcggccgcattcagctgtacgtctctcgtgacgacctgccggaaggcatctacaacgagcagttcaaaaagtgggacctcggcgatatcctgggcgctaaaggtaaactgttcaaaaccaagaccggtgaactgtctatccactgcaccgaactgcgtctgctgaccaaagccctgcgcccgctgccggacaagttccacggtttgcaggatcaggaagcgcgctatcgtcagcgttacctggatctcatctctaacgatgaatcccgtaagaccttcaaaattcgctcccagatcatggccggtattcgccagttcatggttaaccgcgactttatggaagtagaaaccccgatgatgcaggtgatcccaggcggtgcctctgcccgtccgttcatcacccatcacaacgccctggacctggacatgtacctgcgtatcgcgccggaactgtacctgaagcgtctggtggtcggcggtttcgaccgcgtgtttgagatcaaccgtaacttccgtaacgaaggtatctccgtacgtcataacccagagttcaccatgatggaactctatatggcgtatgcggattacaaagatctgatcgagctgaccgaatccctgttccgcaccctggcgcaggacattctgggcaccacccaggtgccttacggtgaagaggtgttcgacttcggcaagccgttcgaaaaactgaccatgcgcgaagcgatcaagaaataccgtccggaaaccaacatggcggatctggataacttcgactctgcgaaagcgatcgctgaaagcatcggtatcaaggttgagaagagctggggcctgggtcgtatcgtgaccgaaatcttcgaagaagtggccgaagcgcacctgattcagccgaccttcatcaccgaatacccggcggaggtgtctcccctggcgcgtcgtaatgacgagaacccggaaatcaccgatcgcttcgaattcttcatcggtggccgcgaaatcggtaacggctttagcgagctgaacgatgcagaagatcaggcgcagcgcttccaggatcaggttaacgcgaaagcggcaggcgacgacgaagcgatgttcttcgacgaagactacgtgaccgcgctggagcacggcctgccgccgacggctggcctgggtattggtatcgaccgtatggtgatgctgttcaccaacagccacaccatccgcgacgtgatcctgttcccggcgatgcgtccggtgaaataa

SEQ ID NO: 115815 - DNA, 882 bp, Enterobacter cloacae
atggcgcagggtctggaagatgtttctgggctgctggagctggctgtcgaagccgacgacgaagaaacctttaacgaagccgtggcagagctcgacgtgctggaagagaagctggcgcagctggaattccgtcgcatgttctccggcgaatacgatagcgctgactgctatctcgatattcaggcaggttctggcggtaccgaagcgcaggactgggcgagcatgctgatgcgcatgtacctgcgctgggcggaagcgcgcggtttcaaaaccgagattatcgaagagtccgaaggtgaagtggcgggtatcaaatccgtcaccatcaagattattggcgattacgcttacggctggctgcgtaccgagaccggcgttcaccgcctggtgcgtaagagcccgttcgattccggcggccgtcgtcacacctccttcagctccgcgtttgtctacccggaagtggatgaagatatcgatatcgacatcaacccggcggacctgcgtatcgacgtttaccgcgcatccggcgcgggtggtcagcacgttaaccgtacggaatctgcggtgcgtattacccacattccaaccgggctggtaacacagtgccagaacgaccgttcccagcataagaacaaagaccaggccatgaagcagatgaaagcgaagctttatgagctggagatgcagaagaaaaatgctgagaagcaggcgatggaagacaacaagtccgatatcggctggggcagccagatccgttcttacgtccttgatgactcccgcatcaaagacctgcgtaccggggttgaaacccgcaacacgcaggcggtgctggacggcagcctggaccaatttatcgaagcaagtttgaaagcagggttatga

SEQ ID NO: 115816 - DNA, 1734 bp, Enterobacter cloacae
gtgaaagccccgataaaactgcgccgccgcgatgcgggtgaaaccgcggatttaccagacacgcttccgctgctgttaaagcggctgtacgccagccgtggcgtgcgtacggcaagcgatcttgagcgcagcgtcaaaggcatgctgccctggcaagcgctgagtggcatcgaaaaagcgactgaaatgctctacgacgcgttccgggaaggcacgcggattgtcgtggtgggcgatttcgatgccgacggcgcaaccagtaccgcgctgagcgtgctcagcctgcgtgcgctgggctgcgagaacgtgacttacctggtgccgaaccggtttgaagacggctacggcctcagcccggaagtggtcgatcaagcccacgcccgtggcgcacagatgatcatgaccgtggataacgggatctcctctcatgcgggggtcgatcatgcccatgcgttggggatccccgtactggtcaccgatcaccacctgccaggcgaaactctgcctgccgccgaagccatcattaacccgaacctgcgcgactgcgatttcccgtcgaaatcgctggccggagtaggggtggcgttttatctgatgctggcgttacgcacgttgctgcgagataagggctggttcgaatcgcgcggaattgccgtgccgaacctcgcggagtatctcgatctggtggcgctgggaaccgtggcggacgtggtgccgctcgataccaataaccgtattctcacctggcagggcttaagccgcattcgggcaggtaaatgccgtccgggaattaaggcgctgctggaaattgccaaccgcgatccgctgaagcttgcggcaagcgatttaggctttgccctcggcccgcgcctgaacgcggcggggcggctggatgatatgtcggttggcgtcgcgctgctgctgtgcgacaacatcggcgaagcgcgcgtgctggccagtgagctggacgcactcaaccagacccgtaaagagattgagcaggggatgcaggccgaagcgctgaccctgtgcgaaaagctggagcgcagcggcgataccctgccgggcgggctggcgatgtatcaccctgaatggcaccagggcgtggtgggcattctggcgtcgcgcattaaagagcgtttccaccgcccggtgattgcgttcgcccccgccggggacggcacgctgaaaggctccggtcgttccattcagggtctgcatatgcgcgatgcgctggagcgtctggatacgctgcatccgaacctgatgattaagttcggcggtcacgcgatggcggcaggcctgtcgctggaagaggcgaagttcgacgaattccagcgtctgtttggcgaactggtcaccgagtggatcgatccggctctgttgcagggtgaagtggtttctgacggtgagctttcaccggctgaaatgaccatggaggtggcgcagatgctgcgcgatgccggcccgtgggggcagatgttcccggaaccgcttttcgacggacgttttcgtttgctgcaacagcgcatcgtgggcgaacgccatctcaaagtgatggtggaaccggtcggcggcggaccgctgctcgatggcatcgcctttaacgttgatacctccatctggccggacaacggcgtgcgcgaggttgagctggcctataagctggatattaacgagttccgcggtaaccgctcccttcagatcatcatcgacaatatctggccaatttag

SEQ ID NO: 115817 - DNA, 714 bp, Enterobacter cloacae
atgaaaaagtctttagcgctgctcaccctgctggcagcttcgatttccggtattgcccatgcggacgatgccgccattaaacagtctctgacgaaactcggcgtcgccagcagcgagatccagccagcgccggtggctggcatgaaaacggtgctgaccaacagcggcgtgctgtacgtgaccgaagacggcaagcacatcattcaggggcctatgtacgacgtgagtggcgcgcagccggtgaacgtcactaaccagctgctgatgaaaaacctgaacgcgctcgaaaaagagatgattgtctacaaagcggcgcaggaaaagcacgttattaccgtcttcaccgacatcacctgcggctactgccacaagctgcatgaagagatgaaagactacaacgcgctgggcattaccgtgcgttacctggctttcccacgcgccggcgtgcagagccagcctgagcaggatatgaaagcgatctggtgtgcgaaagaccgcaacaaggcctttgatgacgcgatgaacggcaaaggcgtgaagcccgcgtcctgcgatatcgacatcgctaaccactacgcgctgggcgtacagtttggcgtgagcggtacgccagccattgtgctgagtaacggctacgtggtaccgggctaccagggtccaaaagagatgaaagcgttcctcgacgagcaccagaaacagatgggtggtaaataa

SEQ ID NO: 115818 - DNA, 897 bp, Enterobacter cloacae
gtggaaaaggatctcgcactcatcgaacagtttgtcgacgcgctgtggctggagaaaaacctcgctgaaaatacactcagcgcctatcgtcgggatctcacgctgctggtcgagtggctggcacatcgtgggctgacgcttgaaagcgcgcaaagcgatgacctgcaagggttactggctgagcggatggaaggggggtacaaagccaccagctctgcacgcctgctgagcgccatgcgccgcctgttccagcacctgtaccgcgagaagatccgcgcggatgaccccagcgcactgctggcatcgcctaaactgcctcagcggctgccaaaagatctcagtgaagcacaagttgagagattattacagtcgcccgcagttgaccttccgctggagttacgcgataaagccatgcttgaactattgtatgccacgggcttgcgcgtttccgagctggtgggcctgacgatgagcgatatcagcctgcgtcagggcgtggtgcgcgttatcggtaaagggaacaaagaacggctggtgccgctgggtgaagaggcggtctactggctggagacgtatctggaacacgggcgtccgtggctgctgaacggcgtctccatagatgtattgttcccgagccagcgcgcgcagcagatgacgcgacaaacgttctggcatcgcattaaacattacgccacactggcgggtattgacagtgagaagctgtcgccgcacgttttgcgtcacgccttcgcgacgcatctgttaaaccacggcgctgatttacgcgtggtgcagatgttgcttggacacagcgatctttcaacgacgcaaatatacacccatgtcgcgacggaacgcctgcggcagctacaccaacagcaccaccctcgcgcgtga

SEQ ID NO: 115819 - DNA, 522 bp, Enterobacter cloacae
atgaatattggtctgctctatggttccagcacctgctacaccgaaatggcggcggagaaaattcgtgacatcattggcccggaactggtgacgctgcataacctgaaagatgacgcggttgccttgatggagcagtacgatgtgctgattctgggtatccctacctgggactttggtgagattcaggaagactgggaagccatctgggatcagctcgattcagtcaattttgaaggcaaaatcattgcgatgtacggcatgggcgaccagttgggctacggggagtggttccttgacgcactcggcatgctgcacgacaaactggcgccaaagggcgcgacctttatcggctactggcctacggaaggctatgagttcaccagtcaaaaaccgattattgccgacggtcagctgtttgtcgggctcgcgctggatgaaaccaaccagtacgatcttagcgacgagcgcctccagagctggtgcgagcagattctgggtgagatggccgagcaattcagctga

SEQ ID NO: 115820 - DNA, 411 bp, Enterobacter cloacae
gtggtcctgtggcaatctgatcttcgcgtctcgtggcgctcacagtggatgtccttactgctccacgggctggtggcggcactggtgttattggtgccgtggccgcttagctatacccctctgtggttgctattgctgtcgtttgtggtgtttgacagcgtgcgcagccagcgtcgaatcaacgcccgtcagggtgaaattaagctgctgatggattctcgcctgcgctggcagggaaaagagtgggagatgatggggacgccgtggatgcttaataccgggatgatgctacggctgcgtcgggtcgaggataaccgtcgccagcacctgtggctggccgcagacagtatggatcccgcggagtggcgagatctgcgccggttgatcgtgcaacagccgacgcaggagtaa

SEQ ID NO: 115821 - DNA, 267 bp, Enterobacter cloacae
atggatattaacaacaaggcccgtattcactgggcgtgccgtcgcggcatgcgtgaacttgatatctccatcatgcctttcttcgagtatgagtacgacagcttaagcgatgacgataagcgcctgtttgtccgtctgcttgagtctgacgatccggatttattcaactggctgatgaatcacggcaagcccgccgacaccgagttgcaacggatggtgcaattaattcaaacacggaatcaggaacgtggtcctgtggcaatctga

SEQ ID NO: 115822 - DNA, 981 bp, Enterobacter cloacae
atggcatttacaccattttctcctcgccagcccgccgcctctgcgcgtctgccgctgacgctgattactcttgatgactgggcactggcgacactgactggtgcggacagtgaaaaatacctgcaaggccaggtcacggcggacgtggcgcagttgactgagcaccagcatctgctggccgcgcattgcgatccaaaaggcaaaatgtggagcaacctgcgtctgttccgccgtcaggacggattcgcctttattgagcgccgcagcctgcgtgacgcccagcttaaagagctgaaaaaatacgcggtcttttctaaagtcaccatcgccccggacgatgaacacgttctgctgggggtcgcgggtttccaggcgcgtgcagcgctgaaaaacctgtttgccgagctgccggatgctgaaaaacagctggtcagcgagggagcgacctccattctgtggttcgaacacccggcggagcgcttcctgctggtaaccgacgaagcaacggcggaacgcgtcactgacgccctgcgcggtgaagcacagctcaacaacagccagcagtggctggcgctgaacatcgaagcgggcctgccggtgattgacgcggcaaacagcgcgcagtttatcccgcaggcgacaaacatccaggcgctgggtggtatcagctttaagaagggctgctacaccggtcaggaaatggtggcgcgtgcgaaattccgcggcgcgaacaaacgcgccctgtggacgctggctggtcacgccagccgtgtgccggaagcgggtgaagatcttgagatgaagatgggcgaaaactggcgccgtaccggcaccgtgttagccgccgtccagctcgatgatggccgcctgctggtgcaggttgtcatgaataatgatatggagcccgacagcgtgttccgcgtgcgggatgatgcaaacacgctcagcattgagccgctaccgtattctctggaagattga

SEQ ID NO: 115823 - DNA, 660 bp, Enterobacter cloacae
atggtgagcagaccattaatcgcacagggatattcgctggctgaggaagtagccaacagtataagccacggcattggcctggtttttgggattgtcggcttagtgttattgctggtacaggcagtggataccaacgccagcgcgatggccattaccagctacagcctgtatggcgggagtatgatcctgcttttcctggcctcaacgctgtatcacgctattccgcatcaacgggcgaagatatggctcaagaaatttgaccactgcgctatctatcttcttattgcgggtacctatacgccgtttttgctggtggggctcaactcaccgctgtcgcgtggcctgatgattgtgatctggagcctggcgctgctggggatcctttttaagctgactattgcgcaccggtttaaagtgttgtcgctggttacctatctgacaatgggctggctgtcgctgattgtggtgtatcagttagccattaagctggcggtggggggcgtgacgcttctggcggtgggcggggtagtctactcgctgggcgtgattttctacgtctgcaagcgtattccgtacaaccatgccatctggcacggctttgtgctgggcggcagcgtgtgccacttcctggcaatttatctgtatgttgggcaggtgtag

SEQ ID NO: 115824 - DNA, 738 bp, Enterobacter cloacae
gtgagtatgttcagccattccgccattgccagcctcaacaatctggaaatgatggtctacaactatgtcattaagaaccgcgataaagtgatgtacatgaccatccgcgagctggcggatgcggcgggcgtttccactaccactatcctgcgcttctgccgcaagctcaactgcgatggttactcggaatttcgggtgcgctttaaactctatctggagcagaacgagccgcagcaggcgaattttggtgccagtgaaatcatcagcttctttaaaagcgtaaataacgaagagtttgatgcgctattagataacgcggtcgatattattttatcatctgaacgaattatttttgtcggtgcgggcacctccggatcgctggcaaaatatggcgcacgtttcttttcaaatatcgggaaattcagtaaccatatcgacgatccttatttcccggtcactaacgacatggctaaaaatgcgctggccattgtactctccgtctccggcgagaccgaggagatcctgcgcttcgccagccagttcagcctgcaccactgcaaggtgctctcagtcaccagccacgaacattcacgtctcgcaaagctggcggactttaacctctcctggcacgtaccgcaaacgcgcattggcggcgtttacgatatcaccacgcaaattcccgtcatctatattctggaatcattaggccggaaactggcgaagaaattaacagaataa

SEQ ID NO: 115825 - DNA, 1434 bp, Enterobacter cloacae
atgaaaaaactcaccttaccgaaagattttttatggggcggcgcggtagcggcgcaccaggttgaaggcggctggaacaaaggcggcaaagggccaagcatctgcgacgtgctcaccggcggcgcacacggcgttccgcgagaaatcacgcaggaagtgattgaaggcaaatattaccccaaccacgaagccgtcgacttctacggccattacaaagaagacatcaggctgtttgccgagatgggcttcaaatgtttccgtacctccatcgcctggacgcgcatcttcccgaaaggcgacgaaactcagccaaacgaagaggggctgaagttttacgacgacatgttcgatgaactgctgaagtacaacatcgagccggttatcaccctctcccactttgaaatgccgctgcacctcgttcaggaatatggcggatggaccaaccgtaaagtggtcgatttctttgtgcgcttctcggaagtggtatttgagcgctacaaaaataaggtcaaatactggatgaccttcaacgaaatcaacaaccagcgcaactggcgtgcgccgctgttcggctactgctgctctggtgtggtctataccgagcacgacaacccggaagagaccatgtaccaggtgctgcaccaccagttcgtggccagcgcgctggcggtgaaagccgcacgccgcattaacccggaaatgaaagtcggctgcatgctggcgatggtggcgctctatccgtactcctgcaagccagaagatgtcatgttcgctcaggaatccatgcgcgagcgctacgtctttaccgacgtacagctgcgcggctattacccgtcttacgtgctgaacgagtgggagcgccgtggcttctccatcaaaatggaagctggcgacgagcagatcctgcgtgaaggcacctgcgattacttaggtttcagctactacatgaccaacgcggtcaaagcggaaggcggtaccggtgacgccatttccggcttcgagggcagcgtgccgaacccacacgtcaaggcgtccgactggggctggcagattgatccggtaggcctgcgctattcgctgtgtgaactgtacgaacgttatcagaagccgctgtttatcgtggaaaatggtttcggcgcctacgacaccgtggaagaggacggcagcatcaacgatgactatcgcatcgactacctgcgcgcccacgtggaagagatgatgaaggcggtgacctgggatggcgtggatctgatgggctacacgccgtggggctgcatcgactgcgtctccttcaccaccggccagtacagtaagcgctacggctttatctacgtcaacaagcacgacgacggtaccggtgacatgtcccgctcccgtaagaagagctttgagtggtataaaaccgtcattgccagcaacggcgaaacgctgtaa

SEQ ID NO: 115826 - DNA, 2010 bp, Enterobacter cloacae
atgtttactgtattcaggcgactgctggtctgcctgctttggctatggctgcccctcagccaggctgccgacagcggctggctgcgcgccgccgataatcagcacgccagcgtcaggctgcgtgcgcaacccgaaagcactggcgaaacccgcctgctgctggacgtcgccctgcaaaaaggctggaaaacctactggcgctcgccgggcgaaggcggcgtcgcacccgcgattaaatggcatcagcccgtcgaggcgatctggcgctggcctgtgccgcagcgtttcgacgtcgcgggcatcaccacgcagggctaccacggcgatgtcagctttcccatcactctgcggggcgacgtcccgaagatcctgagcggcgtactgacgctctccacctgtagcaacgtctgtattcttaccgactacccgttttcgctgaacatgaccgcatccgcaggcgccggttttgattacgatttcagtcgggccatgggcacccttccgctcagcggcgggttgacctcaacgcttaacgccacctatgcccccggcaagctgaccgtaacggcgcagcgtgacgcaggctggcaggcgccgtccctgtttatcgacggtatggatgatgttgatttcggcaaaccggccctcaccgtgcgcggtgactcgctggtcgccaccgtgcccgtgacggacaactggggcgaggccgcgcccaacctcagcggcaaaaccctgtcgctggttctggccgatagcgggcaggcgcaggagtccagcctgagcattcagccggggaacgccgcgccgacgctctcgttaggctgggtactgctgatggcgctggcgggcggtctgatccttaacgtcatgccctgcgtactgcccgtgctggccatgaagctaggcacgctgatgcaaaccgaacggcaggcgcggagtcaggtacgccgacagtttcttgcgtcggtagccgggatcgtgatctcgttcctcgcgctggcgctgatgatgacggttttacgcttaggcaatcaggcgctcggctgggggatccagttccagaatccgtggtttattggcgcgatggcgctggtgatggtgcttttcagcgccagcctgctggggttgtttgaaatccgtctcccttccggcgccagcaccttcctcgccacgcgcggcggcaacgggcttgcgggtcatttctggcaaggcgcgtttgccacgctgctggcgacaccctgcaccgcgccgttcctgggtacggcggtctcggtcgcgctggcggcgccgcttcccctgctgtgggggatcttcctggcgatgggtatcggcatgagcctgccgtggctgctggtggcggcctggccggggctggcccagcggttgccgcgtccgggacgctggatgaacgtcgtacgcgtagtgctggggatgatgatgctcggctcatcgctgtggctgctgagcctgctgacggtgcacattggcagcctgcccgtcatcacgctgggcgtgctcctgatccttacgctgctgctggtcaccgcctggcgctaccgctggcaaacggcactgcgcgccggggtattagctgtagtggtggccggggcggtcgcgtttgtatccggttccggcggcgagggttcccgccgcgatcgtattcactggcagccgctcagcgagcaggccattgcccgcgcgctggcggagaacaaacgggtgttcgtcgacgtgaccgccgactggtgcgtgacctgtaaagccaataaatacaacgtgctgctgcgcgacgacgtgcaggatgcgctctccgccccggacgttgtcgccctgcgcggcgactggagccgcccctcagataccatcagccagttcttaaccacgcgcggcagcgccgccgtgccgtttaaccagatctacggaccgggattaccgcagggccacgtgctgcctgcgttgttaagccgcgaagcggtgctgagcaacctgtccgatgcaaaaggaaaataa

SEQ ID NO: 115827 - DNA, 603 bp, Enterobacter cloacae
atgagagccttcgttgccttacttctgctgtcgttatcaacgttcggtttcgccgcaccttctgatgacgcttccagcgaccagctggcaaaactgctgtttaacgaccccaacagcccgcaaaccggcgcgacatcgccgaagctgaccatcgtctccttcacggactacaactgcccgtattgcaagcagttcgacccaatgcttgagaaaatcgtgcaggaaaatcccgacgtgcagctcatcgtcaaactgctgccgttcaagggacaaagctcggtaaatgccgcgaaagcggcactctcaacgtggcagcaggcgccggataaattctgggcgctgcaccagcggctgatgatgaaaaagggctatcacgatgacgccagcatcgccgccgcgaaggcaaagaccggaacggacagcattaaaacggatgataaaaccatggacagcctaaagatgaacctcatcctggcgcaggtgctgaatattcagggtaccccggcgaccattatcggcgaccagatggtggcgggcgcaattccgtatgacgacctggaggggctggtcaaagaacagctggcaaacgcccgtggcaagtaa

SEQ ID NO: 115828 - DNA, 546 bp, Enterobacter cloacae
atgacgacctggaggggctggtcaaagaacagctggcaaacgcccgtggcaagtaagcttccgcgcctgctgcgcgagctgggcgtgtggctgctgattggcgtagccgtgagcctggcggtggactatttccgccagcccgcgctgccgcagaatttctccgcgacggcactgcacaccctcgacggccagcccgtcgatcttatcgccatgagtaaggagcgaccgctgctggtctacgtctgggcgacatggtgcggcgtctgccgctacaccacgccgtcggtggcggcgcttgccgcggacgggggtaacgtgatgtcggttgcgctgcgctcgggcgataacgcgacgctcgaaacctggatgaggaagaagaaggcgacgatgcccacggtcaacgacgccagcggagaactggcgcgtaagtgggacgttaaggttacgccaacgctggtggtgatctctcacggcgaggtaaagtcgatcaccaccggctggaccagcggctggggaatgcgcctgcggctgtggctggcgtcgtag

SEQ ID NO: 115829 - DNA, 744 bp, Enterobacter cloacae
atggcaattgcactggtcaccggcgccagccggggtattggtaaagccaccgcgctacagctggcaagcgaaggctacaccgttgcggtgaattttcatcacaacatcaaagccgcgacggacgtcattaatcagatcgtggacgcgggcggtaaagcctttgccgtacgcgcggacatcagcgatgaagcgcaggtgatggcgatgttcgacagcatcgatcgcgaaggtgagccgctcgccgcgctggtgaacaacgccgggattttgtttgaacaatccaccatcgaaaacctctccgctgaacgtattaaccgcgtgctggctaccaacgtcaccggctattttctctgctgccgtgaagcggttaagcgcatgtcgcataaacacggcggcaagggcggcgcgattgtgaatgtctcctcggcggcatcacggctgggcgcgccgggggaatatgtggattatgccgcctcaaaaggggcggtggattccctgaccaccggcctcgcgctggaggtggcggcgcagggcattcgcgttaactgcgtgcggccaggcctgatttataccgatattcacgcctccggcggcgagccggggcgtgtggatcgggtgaagtcgatgttaccgatgcagcgtggcggtcagccggaggaggtcgcccaggccattgtctggctgctgagcgacaaagcctcctatgtcaccggtagcttcctggagctggctggcgggaagtaa

SEQ ID NO: 115830 - DNA, 2874 bp, Enterobacter cloacae
atgacacagactttaagccagcttgaaaaccgtggcgccttcattgaacgtcacattgggccggatgctcagcaacagcaggagatgctgaagacagttggcgcggattcattaaacgcactgatcggccagatcgtgccaaaagacatccagcttgctacgccgccgcaggtaggcgagtccacgacggagttcgccgcgctggcggagctgaaggccatcgccggccttaacaagcgctataagtcttacattggcatgggctacaccaacgtgcagttaccgcccgtgatcctgcgtaacatgctggaaaacccgggctggtataccgcttataccccgtatcagccagaagtctcccagggccgtctggaagcgctgctgaacttccagcaggtgacgctggatctgaccggtatggatatcgcctctgcctcgctgctggatgaagcgaccgccgccgccgaagcgatggcgatggcgaagcgcgtgagcaagctgaaaaacgccaaccgcttcttcgtggcggcggacgtgcatccccagacgctggacgtggtgcgcacccgtgcggaaaccttcggctttgaggtgattgtcgacgacgctgaaaaagtgctggatcaccaggacgtcttcggcgtgctgttgcagcaggtgggcaccaccggggaagtgcacgactacggcgcactgatcgccgagctgaaatcccgtaaggttattgttagcgtcgccgctgattttatggcgctggtgctgctgacggcgccaggcaaacagggcgcggatattgtcttcggctcagctcagcgtttcggcgtgccgatgggctacggcggcccgcacgcggcgttctttggcgcgaaagatgaatttaaacgttccatgccaggccgtattatcggcgtatcgaaagatgccgccggtaacaccgcgctgcgcatggcgatgcagacccgcgagcagcatatccgccgcgagaaagcgaactccaacatctgtacctcgcaggtgctgctggctaacattgccagcctgtacgcggtgttccacggtccggctggcctgaaacgtattgccagccgcatccaccgtctggccgatatcctggcctgcggtctgcaacagaaaggtctcagactgcgtcatgaacactatttcgataccctgtgcgtcgaggtggcagacaaagcggccgtgctggcgcgcgccgaggcagcgcaaatcaacctgcgcagcgacattcacaatgcggtcggcattacgctggacgaaagcaccacccgtgacgatatcctgaccctgttcaacgtattgctgggtgacgcacacggtctggacgttgatacgctcgacaaagaggttgcgctcgacagccgctccattcaggaaagcatgctgcgcgacgacgcgattctgactcacccggtgttcaaccgctatcacagcgaaaccgagatgatgcgttacatgcactctctggaacgtaaagatctggcgctgaaccaggcgatgatcccgctgggctcctgcaccatgaagctgaacgccgcggctgagatgatcccaattacctggcctgaattctctgagctacacccgttctgcccggctgagcaggcggaaggttatcacatgatgatcaaccagctctccgactggctggtgaagctgaccgggtacgacgcgctctgcatgcagccgaactccggtgcgcagggtgaatacgctggtctgctggcgatccgtcactatcacgaaagccgcaatgaaggccaccgtgatatctgcctgatcccaagctctgcccacggtaccaacccggcttctgcccagatggcaggaatggaagtggtggttgtggcgtgcgacaaaaacggcaacatcgatctggccgacctgcgcgccaaagccgagcaggcgggcgacaaactctcctgcatcatggtgacctacccatccacccacggcgtgtacgaagaaactatccgtgaagtgtgtgatgtggtgcatcagttcggcggccaggtttacctcgacggcgcaaacatgaacgcccaggtgggcatcacctctccgggctttattggcgcggatgtgtcgcacctgaacctgcataaaacgttctgcattccgcacggcggtggcggcccgggcatgggtcctatcggcgtgaaggcgcacctggcaccgtttgtgccgggccacagcgtggtgcagattgaaggcatgctgacccgtcagggcgcagtctccgcggcaccgttcggcagcgcctctatcctgccaatcagctggatgtacatccgcatgatgggcgcggaagggctgaagcaggccagccaggtggcgatcctcaacgccaactacatcgcaacgcgtctgaaggacgcctatccggtgctctataccggccgcgacggtcgcgtggcgcacgaatgcatcctcgatattcgtcctctgaaagaagagacgggcatcagcgagctggatattgccaagcgcctgatcgactacggcttccacgcgccaaccatgtccttcccggtagcgggtacgctgatggttgagccgaccgaatctgaaagcaaggtggagcttgatcgctttatcgacgccatgctggcgatccgcagcgaaatcgaccgcgtgaaaggcggggagtggacgctggaagataacccgctggtgaacgcgccgcatacacagaacgaactggtggcagagtggaaccacggttatacccgcgagctggctgtcttcccggcaggtgtggcaaacaaatactggccaaccgtgaaacgtcttgatgatgtttacggcgaccgtaacctgttctgctcctgcgtaccgatgagcgaataccagtaa

SEQ ID NO: 115831 - DNA, 390 bp, Enterobacter cloacae
atgagcaatgtgccagcagaactgaaatacagcaaagaacacgagtggctgcgcaaagaggcggacggcacttacaccgttgggatcaccgagcacgcgcaggagctgctgggcgacatggtgtttgttgacctgccggaagtgggcgcaaccgtgagcgcaggcgacgactgcgcggtggcggaatccgttaaagcggcctctgacatctacgccccggtgagcggtgaaattgttgccgtgaacgacgcgctgagcgactccccggagctggtcaacagcgaaccgtatgaaggcggctggatcttcaagatcaaagccagcgacgaagcgcaggttgccgcgctgctggatgcgaccgcgtacgaagcactactggaagacgaataa

SEQ ID NO: 115832 - DNA, 1095 bp, Enterobacter cloacae
atggctcaacagactcctttgtacgaacagcacgtgttgtgcggcgcccgcatggtggacttccacggctggatgatgccgctgcactacggctcgcagattgatgagcaccacgcggtgcgcaccgatgccggtatgttcgacgtgtctcatatgacgattgtcgacctgcgcggtagccgcacccgggagtttttgcgttatctgctggcaaatgacgtcgccaaactgaagacgccgggcaaagcgctctataccggcatgctgaatgcctcgggcggcgtgattgatgaccttatcgtctattacttcactgaagatttcttccgcctcgttgtaaactccgccacccgcgaaaaagacctctcctggatcacccaacacgccgaaccttatgccatcgacatcaccgtccgtgacgatctgtcactgatcgccgtgcaggggccgaacgcgcaggcgaaagccgcgtctctgttcagcgacgagcagcgcaaagccaccgaaggcatgaagccgttcttcggcgtgcaggcgggcgatctgtttatcgccaccaccggctacaccggtgaagcgggctacgaaattgccatgccaaacgataaggccgctgatttctggcgtgcgctggtggaggcgggcgtgaagcctgcgggcctgggcgcgcgcgatacgctgcgtctggaagcggggatgaacctctacggtcaggagatggacgaaggcgtctctccgctggcggccaacatgggctggaccatcgcgtgggaaccggctgaccgtgattttattggtcgtgaagcgctggagatgcagcgcgagaagggcactgaacagctggtcggcctggtgatgaaagaaaaaggcgttctgcgcggcgagctgcctgtacgcttcaccgatgccgatggcaatcatcgcgaaggcgtgatcaccagcggaacgttctccccgacgctcggctacagtattgccctggcacgcgtgccggcggggattggcgaaacggcggtggtgcagatccgcaaccgcgaaatgccggtcaacgtgaccaaaccgatttttgttcgcgccggtaagccggtcgcctaa

SEQ ID NO: 115833 - DNA, 1203 bp, Enterobacter cloacae
gtgcaaaatgttgatgtcgccattgtgggtggcggaatggtaggactggcgctggcctgtggtttacagggcagcggcctgcgcgtggccgtgcttgagcaaaaagcgccgcagcctgtagcgcaggatgcaccgccggagctgcgcgtctcggcgatcaatgccgccagcgaaaagctactgacgcaccttggcgtctggtctgaaatcgtggcgctgcgtgccagctgttaccatggcatggaagtgtgggacaaagacagcttcggccatatcgcgtttgacgatgaaagcatgggctatagccaccttggacacatcgttgaaaacgcggtgatccaccacgcgctgtggcagaaagcacagcagtgcagcgacgtcacgctgatcgcaccggcgaaactccagcaggtggcgtggggcgaaaacgacgcgtttatcactcttgaaagtggcgacatgctgaccgcgcgtctggtggtgggtgccgacggcgccaattcctggctgcgtaacaaagcggatattccgctgaccttctgggattaccgccatcacgcgttggtggccacaatccgcaccgaagagccgcacggcggcgtggcgcgccagattttccataatgacggcattctggccttcctgccgcttgccgatccgcatctctgctccatcgtctggtccttagagccggagaaagcgcagcagatgcaggaggcgacgccggatgccttcagtcaggcgctatgcgtggcgtttgataaccgtctgggcctgtgcatgcttgaaagcgaacgccagacgtttccgttaaccggtcgctacgcgcgtcagtttgccgcgcaccgtctggcgctggtgggggatgcggcgcataccattcatccgctggccgggcagggggtgaacctcggctttatggacgcggctgagctggttgaagagctgcgtcgcctgcatcgggaaggcaaagatattggccagcatctgtatctgcgtcgctacgagcgcagccgcaaacacagtgcggcgatgatactggcggggatgcagggtttccgcgagctgtttgccggagcgaatccggcgaaaaaactgctgcgcgatattggcctcaagctggccgacactcttcccggcgtaaaaccgcagcttcttcgtcaggcaatgggcctcaacgatcttcccgactggttacgttaa

SEQ ID NO: 115834 - DNA, 1179 bp, Enterobacter cloacae
atgagcgtaatcattgttggcggaggcatgaccggcgctactctggcgctggctatttcgcagttaacccagggccagcttccggtgcatctcgttgaggcggtcgcgccgcaggctgccgatcatcccggtttcgacgcccgcgctatcgcgctggcgcaggggacctgtcagcagcttgcgcgtattgggatctggcaggcgatagcggattgcgcaacggcgatcggcaccgttcacgtcagcgatcgcgggcatgccgggtttgtgacgctggatgcccacgattaccggatcgaggcgctggggcaggttgtcgagctgcatgatgtagggctgcggctgttccgtctgttacaggacgcgcctggcgtcacgctgcactgtccggcgcgcgtcgccagctttagccgtcgtgacgaggccgtcagcgtgacgctggacaacggcaccacgctggaggggcaactgctggtggcggcagatggttcacgctccgcgatcgccacgcagtgcggcgtcgaatggcgctctgaaccctatgggcaggcggcggtcatcgctaacgtctctacggctggcgcgcataacggcagggcatttgagcgcttcacggagcacggcccgctggccatgctgccgatgtcgaacgggcgctgctcgctggtatggtgccatgcgcaggatcgggccgatgaggttctctcctggtccgacgaacgtttttgttccgagctgcaaaaagccttcggctggcggcttgggcgcatcacccatgccggaaaacgcgtggcctatccgctcgcgctgacgaccgcatcgcagactgtctcccatcgcgtcgccctgctcggcaacgccgcgcagacgctgcaccccatcgccgggcaaggcttcaaccttggcctccgtgacgtgataagcctggcagagctactggcccggacgtggagcgaacaacaggattgtggcgcatactcggtgctaagccattaccagaaacgacgccaggcggacaaagcggcgaccattggcgtcaccgacggtttagtccacctgtttgccaatcgctgggcaccgctggttgcgggtcgcaaccttgggctgatggcgatggaactgttcattccggcacgtgacgtgctggcgcagcggaccctgggttgggtcgcgcgttaa

SEQ ID NO: 115835 - DNA, 1320 bp, Enterobacter cloacae
atggttatctccagtcaagagtattctcgccgtcgtcaggcgctgctggcaaaaatgcagccgggaagcgctgccctgattttcgccgcgccggaagtgacgcgcagcgccgacagcgaatacccctatcgccagagcagtgatttctggtacttcaccgggtttaacgagccggaagcggtactggtgctgattaaaagcaatgacacccacaaccacagcgtgatttttaaccgcgtgcgcgatctgaccgcggaaatctggtttggccgccgcttagggcaggaggcggcgccagaaaaactgggcgtggaccgcgcgctggcctacagcgaaatcaaccagcagctctaccaactgctgaacggtctggacgtgctctatcacgcgcagggcgaatacgcgtatgcggatgacattgttttcaccgcgctggataagctgcgtaaaggctcacgtcagaatttgtctgcacctgccaccctgacggactggcgaccgatggtgcatgagatgcgcctgttcaagtctgaagaagagctgaacgtgatgcgccgcgcgggcgaaatcagcgccctggcgcatacccgcgccatggaaaagtgccgtcccggtatgttcgagtaccagcttgaaggggaaattcaccatgaatttaaccgtcacggcgcgcgcttcccgtcctataacaccatcgtaggcggcggggaaaatggctgcattctgcactacaccgaaaacgaaagtgaactgcgcgacggcgatctggtgctgattgacgctggctgtgaatatcagggttacgcgggcgacatcacccgtaccttcccggtgaacggtaaattcaccaccgcgcagcgtgaaatctatgacatcgtgcttgagtctctggagaccgcgctgacgctgttccgccctggcacctccatccaggaggttacgggcgaggtggtgcgcatcatgattaccgggctggtgaagctcggcattctgaaaggcgatgtggacacccttataaccgaaaacgcccatcgtccgtactttatgcacggcctgagccactggctggggctggatgtgcatgacgtcggggcatacggtccggaacgttcgcgcgtgctggagcctggcatggtgctgaccgttgagccggggctgtacatcgcgccggatgccgacgtgccggaacagtaccgcgggatcggcattcgtattgaagatgatatcgtcatcaccgaaaccggtaacgaaaacctgaccgcgaccgtggtgaaaaaagccgacgacatcgaggcgctgatggcggcggcacgcggatga

SEQ ID NO: 115836 - DNA, 585 bp, Enterobacter cloacae
atgcgtatgtctatacagaacgaaatgcctggttacaaggatttaaaccagttactgaaccagcagggagtcggtctgacccctgccgaaatgcacggtctgatcagcggcatactgtgcggcggaaacagcgacagctcatggcagccgctgatccacgacctcaccaacgaagggctggcgtttggccacgaactggcggaagcgctgcgtaaaatgcacgccgcaaccagcgattccctggaagacgatggctttctttttcagctttatctgcctgaaggcgacgatgtcagcgtcttcgatcgcgctgatgcgctcgcgggttgggtaaaccactatcttcttggcctgggcgtaacccagcctaaactggataaagtgaccggcgaagcgggtgaagcgatcgacgatctgcgtaacatcgcccaactcggctacgatgaagacgaagaccaggaagagctggagatgtctctcgaagagattatcgagtacgtgcgcgtggcgtctctgctgtgccacgacaactttacgcgctcgcagccgaccgcgacggaagttcgcaagccaacattacactaa

SEQ ID NO: 115837 - DNA, 330 bp, Enterobacter cloacae
atgtctgcacaacccgtcgatctccagatttttggccgttcactgcgagtgaattgtccgcctgaacaaagggatgccttgaatcaggctgcggacgatttgaatcagcggttgcaagatctaaaagaacgcactagagtcacaaatactgagcagctggttttcatcgccgcgttgaacatcagctatgaactgactcaggaaaaagcgaagacccgcgattacgcggcaagcatggagcagcgcattaaaatgctccagcagaccatagaacaggcattgcttgatcaaggtcgcagtcccgaaagaccgggaccaaagtttgaataa

SEQ ID NO: 115838 - DNA, 597 bp, Enterobacter cloacae
atgactcaactccctgaagtttctgcttcacgccaggacatccgtcagcttattcgccagcgtcgtcgcgctctaagcgccgagcaacaggcacagtttgctcagcaggccgccgcccgcatgatggcctatccccctgtggtgatggcaaacaccgtcgccctgtttctctcgtttgatggtgagctggatacccaaccgcttatcgaccagctctggcgcgccgggaaaaaagtttacctgccggttctgcatccctttagcccgggcaatctgctgtttctgcactaccatccgcacagcgagctggtggtgaatcgtctgaaaatcaccgaacccaaactcgacgtgcgcgacgtgctcccgctttccgggctggatgtgctgattacgccgctggtggcgtttgacgagcagggccagcgattaggcatgggcgggggattctatgacaggacgctacaaaactggcagcagtacggattgcagccggtggggtatgcgcatgattgccagggcgtggaggcattacccgtagagaaatgggatgtgccgttgccggcggtggtgacgcccagtaaaacctggacctggtag

SEQ ID NO: 115839 - DNA, 1233 bp, Enterobacter cloacae
atggcaaaggtatcactggagaaagacaagattaaattcctgctggttgaaggcgtgcaccagaaagcgctcgatagccttcgcgcagcaggctacaccaacatcgaatttcacaaaggcgcgctggacactgaagagctgaaagcgtccatccgtgatgcccatttcattggcctgcgatcccgtacccaactgactgaagacgttattgctgcggcggaaaagctggtggcgattggctgtttctgcatcggcaccaaccaggttgatctgaatgccgccgcaaaacgcggtatcccggtctttaacgcgccgttctctaacacccgttccgtggcggagctggtgattggcgagctgctgctgctccttcgcggcattccggaagctaacgccaaagcgcaccgtggcgtatggaataagctggccgcgggctcctacgaagcgcgtggtaaaaagcttgggattatcggttacggccacatcggtacgcagctcggtattctggcggaatccctcggcatgcacgtgtttttctacgatatcgaaagcaagctgccgctgggtaacgcgacgcaggtgcagcatctctctgatctgctgaatatgagtgacgtggtcagtctgcacgtgccggaaaatgcgtccaccaaaaacatgatgggggcggaagagctggcgctgatgaagccgggctctctgctgatcaacgccgcgcgcggcactgtagttgacattcctgcgctgtgcgacgcgctgaagcgtaagcatctggcgggtgcggcgattgacgtattcccgacggaaccggccaccaacagcgatccgttcacctctccgctgtgcgagttcgacaacgtgatcctgacgccgcacatcggcggttctactcaggaagctcaggagaatatcggcctggaagtggcgggtaagctgagcaaatattccgacaacggttcaacgctctctgcggtgaacttcccggaggtgtctctgccgctgcacggtgggcgtcgtctgctgcacatccacgaaaaccgtcctggcgtgctgaccgccatcaaccagatctttgctgagcagggtgttaacattgccgcgcagtatctgcaaactaactcgcagatgggttatgtggtgattgatatcgaagcggatgaagacatcgccgagaaagcattgcagagcatgaaggccattccggggacgattcgcgcgcgcctgttgtactga

SEQ ID NO: 115840 - DNA, 660 bp, Enterobacter cloacae
atgacgcaggatgaactgaaaaaagcagtaggatgggccgctctccagtacgtacagccgggtaccattgtcggtgttggtacggggtcgacggcggcgcactttatcgatgcgctgggcacgatgaaggggcagatcgagggcgcggtttccagctccgatgcttccacggaaaagctgaaaagcctcggcattaccgttttcgacctcaacgaagtggaccgtctgggcatttacgttgatggcgcggatgaaatcaacggccacatgcagatgatcaaaggcggtggcgcggcgctgacccgcgaaaaaatcatcgcttccgtggcggataagttcatctgcatcgcggacgcctccaagcaggtcgacattctggggaatttcccgctgccggtcgaagtgatcccgatggcgcgcagcgccgtggcacgtcaactggtgaagctgggtggtcgtccggaataccgtcagggtgtggtgaccgacaacggcaacgtgatcctcgacgttcatggccttgagatcctcgatgccattgcgctggaaaatgcgatcaacggcattccaggcgtcgttaccgtagggttatttgccaaccgtggcgcggacgtggcgctgatcggcacggctgacggtgtaaaaaccatcgtaaaatga

SEQ ID NO: 115841 - DNA, 894 bp, Enterobacter cloacae
atgaaacgtccggactacagaacactacaggcacttgatgcagttattcgtgaacgcggttttgagcgcgcggcgcaaaagctgtgcatcacccagtccgccgtatcacagcgtatcaaacagcttgaaaacatgttcgggcagccgctgctggtgcgtaccgtgccgccgcgtccgacggagcaaggacaaaagctcctcgcgctgctgcgtcaggttgaactgctggaagatgaatggctgggcgatgaacagaccggctccacgccgctgctgctgtcgctggcggtgaacgccgacagtctggcgacctggctgctgccggcccttgcgccggtgctggccgactcccctatccgcctgaatctccaggttgaagacgagacccgcacccaggagcgcctgcgccgtggcgaagtggttggggcggtcagtattcagcctcaggcgctgccaagctgtctggtggatcagctgggcgcgctggattacctgtttgtcggttcaaaagcctttgccgagcgttacttcccgaacggtgtgacccgcgccgcgctgctgaaagcgcctgccgtcgctttcgaccatctggacgatatgcatcaggccttcctgcaacaaaacttcgatctgccgccgggcagcgtaccgtgtcatatcgttaactcgtccgaagccttcgtacagctcgcgcgtcagggaaccacctgctgcatgatcccgcatttgcagattgagaaagagttgaaaagcggtgagctgattgatttaaccccggggctgtatcagcgccggatgctgtactggcaccgttttgcgccggaaagccgcatgatgcgcaacgtcactgacgcgctgctggcgtttgggcataaggtgttaagacaggattga

SEQ ID NO: 115842 - DNA, 723 bp, Enterobacter cloacae
gtgaagtttaaggtgatggccctggcggcattagtaagtttaggtgcggtgtcggtgcaggcgaatgaactgccaaacggcccgcacattgtcacttcaggcacggcaagcgtggatgcggtaccggatgttgcaaccctggcaattgaagtgaacgtggcggcgaaagatgctgcttccgccaagaaacaggcagacgatcgtgttgcgcaatacctctctttcctggaacagaacggtgtcgcgaaaaaagacatcagctctgcgaacctgcgtacccaaccggattacgactaccagaacggcaaaagcatcctgaaaggctatcgcgccgtgcgtactgtggaagtgactgtacgccagcttgataagctcaacggattgctggatggtgcgctgaaggctgggctgaacgaaattcgttccgtctcgctgggcgttgcgcaaccggagaaatataaagacgaagcgcgtaaagcggcgattgatgatgccattcatcaggcgcagcagctggcatccggcttcaagaccaagctcggtccggtttacagcgtgcgctaccacgtttcaaactaccagccaagcccgatggttcggatgatgaaggcggacgccgcgccggtttctgctcaggaaacctatgagcagccaaccattcagttcgacgatcaggttgatgtggtgttccagctggagccgactgaaaagcccgctcagtaa

SEQ ID NO: 115843 - DNA, 636 bp, Enterobacter cloacae
atgttaacttactattttcaagggcttgcattaggtgcggccatgatccttccccttggtccacaaaatgcgtttgtgatgaaccagggcattcgccgccagtatcatctgatgattgccctgctgtgcgcggtgagcgatttgctactgatttgcgccgggatttttggcggcagcgccttgctgatgcagtcgccgtggctgctggcgctggttacctggggcggcgtagcgtttctgctgtggtacgggtttggcgccctgaaaacggccatgagcagcaatcttgagctggcgagcgccgaagtgatgaagcaggggcgctggaagattatcgtcaccatgctcgccgtgacgtggcttaacccgcacgtctaccttgatacctttgtggtgctcggcagcctgggtggacagctggacgttgagcccaagcgctggtttgcgctcggtacggtcagcgcctccttcctctggttctttggtcttgcgatcctggcggcatggctggcgccccgtctgcgtaccgctaaagcgcagcgcattatcaataccctggttgggctggtgatgtggtttattgccttccagctggcgaaagaggggattcatcacgtacagggactgttcaactaa

SEQ ID NO: 115844 - DNA, 1059 bp, Enterobacter cloacae
atgaaacatcaaggcgttgcaatggtcatctccgccatatttgcgctcttaactgcatttccggccatagcgagtgcaggaaagatacttcgctacacggaccatgaaccgtacggcaatatgcgtacgcaatttatcaaaaacgttttctttagtgagattgaaaaagaatcgcaaggccgcctgaaaattgaagcccactggaaaggtgatatatcaagtagttacaatgcgctaagtacgcttggccagggaaccagagctgatattggcatcgttgtccctgaatatacggctgagcaactgccgcttcatcaaatattcaaaagctttcccctggggcctgcaaacggcgaggcccaggtgcgcttctttcatcgcgtgttccagcaatacccacagtttgcccgcgagcttgggcagaataacctggtgaatttgcagttcttcctgggttatccggtcgggttctttacccgtcagccagacgttaagctgaagcagctagagggaacaaaatggcgaaccgccagcttctggcaccagtcatttttgcgcaatgctggcggagctaccctggtaatgccctggaatgacaagattaccgacgcgttgcgcacgggacagttgaatggccttatggtgaatctcgacagcggagatgacatacatgcgcagcgcgcggcgccctacattcattattctcctgcgctctggctggggcatgtctaccttctggttataaataaggacaccttaaacgcactggacgagcgggatcgtcttgctattcgtcgtgcagccgaaaccacggagaaacaactcggtgctgcgttggacagcgggctggcttctctcaccacgcgtctggaaaacgaaggcgctaagcttcatcttctgagccgtgatgagcaattggaatggcagaaagcaacgcgatatcaagaggttcaggaggaatgggtacggcaacaggaaagtaagggtaatacggacgcaggcaaattgatgcacgagctacgcctattgctggaggctaacgcccggcaaaagcgatag

SEQ ID NO: 115845 - DNA, 855 bp, Enterobacter cloacae
atggaagatctcggtgttgtagatagcatcaataacgctggctcctggctggtgcgcaaccaggcgctcctgattagttacgctgtgaatattgcggcggcaatcgccattattattgtggggatgatcgttgcccgcacggtttcccggggcgttaatcgcgtaatgctatcccgtcatatcgatgcaaccgttgctgatttcctttctgcgctggtgcgttacgggattattgcgtttaccctcattgcggcaatggggcgggtcggtgtacagaccgcttcggtcattgccgtacttggtgccgctggtctggccgtaggtctcgctcttcagggctcgctggctaaccttgcagctggcgtactgttagtgacgttccgtcctttccgtgccggagagtatgttgatctcggtggcactgcgggcaccgtgctgaacgtgcagattttttctaccacgctgcgttcggcagacggcaaaatcgtcattgtgccaaacaagaaagtgattgatggcaacattactaacttctctcgtgagccggttcgccgtaatgaactcattatcggggttggctatgattcagatactgagttggtgaaaaagctgattaccgatatcatcgaatcagatgaccgcattcttaaagatcgcgaaatgaccgttcgcctgaacgagttgggcgcgtcatccattaattttgtggtgcgcatctggagtaaaagcggcgatctgcaaaacgtttactgggacgtgctggagcgcattaagcgtgatttcgatgccaacggcatcagcttcccttatccgcagatggatgtgaacttcaaaaaagtgaaagaagctgactaa

SEQ ID NO: 115846 - DNA, 1080 bp, Enterobacter cloacae
atgtctaaaatttttgatttcgtaaaacctggcgttatcactggtgatgacgtacagaaagtgttccaggtagctaaagaaaacaacttcgctctgccagcagttaactgcgtaggtaccgactccatcaacgccgtactggaaactgctgctaaagttaaagcaccggttatcgttcagttctctaacggcggcgctgcgttcatcgcaggtaaaggcgtgaaaactgacatccctcagggcgctgctatcctgggtgctatctctggcgcacatcacgttcaccagatggctgagcactacggtgttccggttatcctgcacactgaccactgcgcgaagaaactgctgccatggatcgacggtctgctggacgcaggtgaaaaacacttcgcagcaaccggtaagccactgttctcttctcacatgatcgacctgtccgaagagtctctggaagaaaacatcgagatctgctctaagtacctggcgcgtatgtccaaaatgggcatgaccctggaaatcgaactgggttgcaccggcggtgaagaagacggtgtggacaacagccacatggacgcttctgctctgtacactcagccagaagacgttgattacgcttacaccgagctgagcaaaatcagcccacgcttcaccatcgcagcgtccttcggtaacgtacacggcgtatacaaaccaggtaacgtggttctgaccccgaccatcctgcgtgattctcaggaatacgtgtctaagaaacacaacctgccgcacaacagcctgaacttcgtcttccacggcggttccggttcttctgctcaggaaatcaaagactccgtaagctacggcgtagtgaaaatgaacatcgataccgacacccagtgggcaacctgggacggtatcctgcaatactacaaaaccaacgaagcttacctgcaaggtcagctgggcaacccgaaaggcgaagaccagccgaacaagaaatactacgatccacgcgtatggctgcgcgctgcccagacttctatgattactcgtctggagcaggcattcaaagaactgaacgcggttgacgttctgtaa

SEQ ID NO: 115847 - DNA, 1164 bp, Enterobacter cloacae
atgtctgtaattaagatgaccgatctggatctggcaggtaaacgcgttttcatccgtgccgatctgaacgtaccggttaaagatggcaaagtgaccagcgacgcgcgtatccgtgcatctctgccaaccattgaactggctctgaagcagggcgctaaagtgatggtcacctcccacctgggccgtccaactgaaggcgagtacaacgaagagttctctctgctgccggttgttaattacctgaaagacaaactgtccagcccggttcgcctggtgaaagattacctggacggcgtggaagttgccgaaggtgagctggttgttctggaaaacgttcgcttcaacaaaggcgaaaagaaagacgacgaaaccctgtccaaaaaatacgctgcgctgtgcgacgtattcgtgatggatgcattcggtacggctcaccgtgcgcaggcatctacccacggtatcggtaaattcgcagatgtcgcctgtgcaggtccgctgctggctgacgaactggaagcgctgggtaaagcactgaaagaacctgctcgtccaatggtcgctatcgttggtggttctaaagtgtctaccaaactgaccgtactggattccctgtccaaaatcgctgaccagctgatcgttggcggtggtatcgcgaacaccttcgttgctgcgcaaggccacaacgtaggtaaatccctgtacgaagcggatctggttgacgaagccaaacgtctgctgggcacctgtgatatcccggttccaactgatgttcgcgtggcaactgagttctccgaaaccgctaccgcaaccctgaaatctgttaacgacatcaaagatgaagagcagattctggatctgggcgacgtttctgcacagaaactggctgaaatcctgaaaaacgcaaaaactatcctgtggaacggtcctgtcggcgtgttcgaattcccgaacttccgcaaagggactgagatcgtggctaacgctatcgcagacagcgaagcgttctctatcgcaggcggtggtgacaccctggcagctatcgatctgttcggtatcgctgacaagatctcctacatctccactggtggcggcgcattcctcgaattcgtggaaggtaaagtcctgccagcagtagcaatgctcgaagagcgcgctaagaagtaa

SEQ ID NO: 115848 - DNA, 1020 bp, Enterobacter cloacae
atgaccgtacgcgtagcgattaatggcttcggtcgcatcgggcgcaacgtggttcgtgctttatatgaatccgggcgtcgtgcggaaatcaccgtggtggcaatcaatgaactggcggatgctgcgggcatggcgcatttgttgaaatatgacaccagccacggtcgctttgcctgggacgttcgccaggaaagggaacagctgttcgtcggtgacgatgccatccgcgtgctgcatgagaacagtattgaagggctgccctggcgcgaactgggtgtggatgtggtgctggactgtaccggcgtgtacggtaaccgtgaacatggcgaagcgcatctgaatgctggcgcgaaaaaagtgctgttctcccatcccggcagtaacgacctcgacgccaccgtcgtgtttggcgtcaaccagcacgagctgcaagctgaacaccgcattgtctccaacgcctcctgcaccaccaactgcattattccggtcattaaactgttagacgatgcgtatggcattgaatccggtaccgtgaccacgattcactccgccatgcacgatcagcaggtcatcgacgcctaccatccggatttacggcgcactcgcgcggcgagccagtccatcattccggtggatacgaaactggctgccgggatcacccgtattttcccgcagtttaacgaccgtttcgaagcgattgccgtgcgcgtgccgacgataaacgtcaccgcaatcgatcttagcgtgacggtgaaaaaaccggtaaaagcctgtgaagtcaacctgttgctgcaaaaagcggcacagggagcatttcatggtatagttgactatacggaattaccgttggtctcagtagattttaaccacgacccgcacagcgccatcgtggatggcacgcagacgcgagtcagtggtgcgcaccttatcaagacgctggtctggtgtgataacgaatggggctttgctaaccgaatgctcgacaccacgttagccatggccgcaaaaggtttcaggtag

SEQ ID NO: 115849 - DNA, 1992 bp, Enterobacter cloacae
atgtcctcacgtaaagagcttgctaatgctattcgtgcgctgagcatggacgcagtacagaaagccaaatccggccacccgggcgcccctatgggcatggctgacatcgccgaagtcctgtggcgtgatttccttaaccacaacccgcagaacccggcatgggcagaccgcgaccgtttcgtgctgtctaacggccacggctctatgctgatctacagcctgctgcacctcactggctacgatctgccaatcgaagagctgaaaaacttccgtcagctgcactccaaaactccaggtcacccggaagtgggctacaccgctggcgttgaaaccactaccggtccgctgggtcagggcatcgctaacgccgtagggatggcgattgcagagaagaccctggcggcgcagtttaaccgtcctggccacgacatcgttgaccacttcacctacgccttcctgggcgacggctgcatgatggagggcatttctcacgaagtgtgctccctggcaggcaccctgaagctgggtaaactggttgcgttctacgacgacaacggcatctccatcgacggtcatgttgaaggctggttcactgacgacaccgccgcacgtttcgaagcctacggctggcacgttgtgcgcggcgttgatggccacgatgctgactcgattaaacgtgccgtagaagaagcgcgcgccgtgaccgacaaaccgtccctgctgatgtgcaaaaccatcatcggcttcggttctccgaacaaagcgggcactcacgactcccacggcgcaccgctgggcgacgcggaaatcgcactgacccgtgaagcacttggctggaaacaccctgccttcgaaatcccgtctgaaatctacgctcagtgggatgcgaaagaagtgggccaggcgaaagaagcggcctggaacgagaagttcgcggcatacgcgaaagccttccctcaggaagcggctgaattcacccgtcgtatgaaaggcgacatgccgtctgacttcgacgcgaaagcgaacgagttcatcgcgaagttgcaggcgaacccagccaagatcgccagccgtaaagcatctcagaatgcgatcgaagcgtttggccctctgcttccagaattcctcggcggctccgctgacctggcgccatcaaacctgaccctgtggtccggatctaagccaatcaacgaagatactgccggtaactacatccattacggtgtacgtgaattcgggatgaccgcgattgccaacggtatcgctctgcacggtggcttcctgccgtacacctctaccttcctgatgtttgtggaatatgcacgtaacgccgtgcgtatggctgcgctgatgaaacagcgtcaggtgatggtctacacccacgactccatcggtctgggcgaagacggtcctacccaccagccagtagagcaggtggcttctctgcgcgtgaccccgaacatgagcacatggcgtccatgtgaccaggttgaatctgcggtggcgtggaaatacggcgttgagcgtcatgatggcccgaccgcactgatcctctcccgtcagaacctggcgcagcaggagcgtaccccagagcagctggcaaacatcgcgcgcggtggttacgtgctgaaagattgcgcaggccagcctgagctgatcttcatcgcgaccggttctgaagttgaactggccgttgccgcatgggaaaaactgactgctgaaggcgtgaaagcgcgcgtagtctccatgccgtctaccgatgcgttcgacaagcaggatgccgcgtaccgcgaatccgtactgcctaaagcggtctccgctcgcgtggcggtggaggcgggtatcgctgactactggtacaaatacgtgggcctgaacggcgctatcgtcggtatgaccacgtttggtgagtctgcgccggctgaacagctgtttgaagagttcggcttcaccgttgagaacgttgtcgctaaggcgaaagaactgctgtaa

SEQ ID NO: 115850 - DNA, 759 bp, Enterobacter cloacae
atgaaaatgcgtgcaatcgggctggctgtgggaacaacgctcctgctaagcggctgtcagaatatggattctaacggcctgatgacctcaggcgcagaagcttttcaggcctactcattgagcgatgcgcaggtgaaagcgttgagcgacgaggcctgtaaggatatggatggaaaagctacgcttgccccggcaaacagcacctacacgcagcgtctgaacaagattgcttccgcgctgggcgacaacattaacggtcagccggtgaactacaaggtgtatatggcgaaagacgtcaacgcctttgcgatggcgaacggctgtattcgcgtttacagcggcctgatggacatgatgaccgacaacgaagtggaagcggtgatcggccatgaaatgggtcacgttgcactgggtcacgtgaagaaagggatgcaggttgcgctgggcaccaatgccgtgcgtgcagcggcggcctctgcgggcggcatcgtcggcagcctgtcccagtcgcagctgggcgacgtgggcgaaaaactggtgaactcgcagttctcccagcgtcaggagtcggaagcggatgactactcttacgatctgttgcgcaaacgcggcatcaatccatcgggtttagctaccagcttcgaaaaactggcgaaactggaggagggccgtcaaagctccatgtttgacgatcacccggcttcggaagagcgtgcacagcatattcgcgaccgtatggcggcagacggaattaaataa

SEQ ID NO: 115851 - DNA, 1269 bp, Enterobacter cloacae
gtgaaaaaagaattatcattaattgctttaagtttatttgccgcattacctgccgccgcaagccagcaatccgacagcaagggttttattgacgacagccatctggatctgtttttacgcaatgcgtatatcagccgcgactaccatcagggccagcaggacaaagccgaatggggtcaggggatcatcgccacgtttgcatccggctataccgaagggctggtgggcttcggcgtggacggtatcgcgcagtatggcgtgcgtcaggacggtggccgcggcaagagcggcgcgggcggcatcgacttctttaagcaggaagacgacggccgggcaaaatccgatctggcaaagtttggcgcgacggccaaaatgcgcatctccaataccgtgctgagctacgggaaccagcgtcctgaactgccaatcattacatccgacagctcccgcctgctgtttgaaagctacaccggcaccctgctgacctcgaaagagatcgacggtctggaagtcaacgccggttacttcaccgacgagcagcgtaaaagcgatgaccgccacgacagcggactgaagagcctctccttcggcggtgcgagctatcagtttaacgaccagctcagcggcgcgctgtacgcctctcataacgaagaggtgatgaacaagcagtacctgggcatgaacttcaaacagccgttcagtaccgggcagcagctggtgctcgacttcaacggctataactcccgtctcgaccagcattacgcggacagcctcaacacgggccgcagcaacaccatctggagcctggcagcgagctatatctgggacattcacacgttcaaagtggcgtaccagcagagcagcggcagtaccggctacaactacggcggctatcgcgacaaaggcggagtgggtgacggcggtaacaccatctggctggcgaactcctactggtctgatttcaacggcgaagatgaacgttcctggcaggcatcctacggtctggactttggcggccttggcttaccgggcctgagctggaccaccgcctacgtgcgcggcgataacatcaaaacctctgaaaccagcaatggcaaagaacacgagtggtttaaccagatccagtaccaggtgcaggatggcccggcgaaagatctgaagctgaagctgcgctactccgtactgcgcgtctccagcaacgccagcgagtacaacgtcggcggggacgagatccgcgcttacgtggaatacccgtttaacgtgttctga

SEQ ID NO: 115852 - DNA, 1641 bp, Enterobacter cloacae
atgagcgaaatgataaccgtcggcgacgccatcgccagaacgctggagcagtatcaggttgaggccatctacggcgtcatctctattcacaacctgccgatcgcggatgcggttgggcagcggggcaatatccgctttgtgcccgcccgcggtgaagccggttccgtcaccatggccgatgcccacgggcgcttttccggcctcggcgtggcgctgaccagcaccggcgcgggggcgggtaatgcggtaggcgcgctggtggaagccatgaatgcctgcacgccgctgctgcatttaaccgggcaggttgagaaagcctggctggacgccgacaccgggtttatccatgaaacccgtgaccagctgaccttcctgaaggccagctcaaaacgggcgtaccgcatcagcaatgcgaatcaggcgatagcgattctgcataaagctatccaggacgcgcagaccgcgccatgcggaccggtctcggtggaaataccgattgatattcagggcgccaaaattccgctgtcgctggtgactaaaccggttaaaccggcatcggttccagccgtggataccggaatggttgacgcgctgtgggcgcagctcaagcaggcgaaacagccgctgctgtggctggggggcggggcgctgggcagcgctgaggcggtgaaaacgctggcggatgcgggcatcaccgtgatttccagcacccacgcgcgcggcgtgctgccggacagccaccgcgccagccttcgcgcgttccacaactcgccgtcggttgaggccctgattgcgcagtgtgattttacgctggtggccggttctcgcctgcgcagcaacgaaacccgatcctggacgcttgagctgccttccccgcgggtgcagatcgatatcgacccggcggcggcaagccgtaactacctgatggatagcacgttgatagccgattgttcagcggtgcttggcgcgctggctgaaaaagtacagggccgcgagtggggcagtccccagtgggatatgcaggtgcagcaggcggtcgggcaagctgagcaggggctgcgcgagcagtgcggcgcctatgcgaagcttaacgacgccatagcaaaagccctgccgaaagacggcctgcttgtgcgcgatatcaccgtgtccggcagcctgtggggtagccgcctgttcagggctaacggtccgctgatgaacattcactccctcgccggggcgattggtatggggctgccgatggccatcggcaccgcgattgccaacccgcagcgcaaggtggtggggctggtgggcgacggcggcctgagcctcaatttaggcgagctggcgacgctggcgcaggagaaagccaacgtgacgctgctggtcatgaacgacggcggctacggggtgatgcgcggtattcaggataagtatttcggcgggcgtcagtattataacgcgctgcatacgccggactttaccctgctggcgcaggcgattggccttcaggcgtggagcgttgagcgggcagaggattttgatgcggtgatgacggaggcgctggcgatgccggggccgtcggtagtggaagtgcggatggggcagattggcgccctgaagtttgccgggccgccgcagaagacgctttactag

SEQ ID NO: 115853 - DNA, 1470 bp, Enterobacter cloacae
atggacgatctgaagatttttatcggcggccagtggcgacacggcggcggcaacccgatgcagagccacttcccggcagacgggtcgatcaacgcgacgctgaatgccgccagtctgtatgacctggaggaggcggtagacgccggagagcgcgcctggcgcgatcccgcatggcgtaacagcctgccgcatatgcgcgcgaagatcctgcataaggttgccgatctcattgaatcccgcgtcgacgcgctggcgcagatgcagagccgtgataacggcaagccgctggcggaagcgcgcgggctggtgatgagcgcggcgggaacggcgcgctactttgccgccgcctgcgagctgctggaaggggaactgcccacgccgcgccagccggatctgctgacgctgagccgctatgagccgctcggcgtggtggcggccatcacgccgtggaactcgccgattgccagcgaaatgcagaaggtcgcaccggcgattgccgccgggaacgcgatgatcctcaagcccgccgaagccacgccgctgatggcgctggagctggcgcggatttttgaacaggccgggctgcccgccgggctgctgagcgtgctgccgggcaaaggggcggtgattggcgatgcgctggctcgccatcctcgcgtgcgcaaaatttcctttaccggcggtaccaccacgggccgtcatctggcgcacgtggcggcggaaaaactgatcccggcctcgctggagctgggcggcaaatcgccgaccattgtgctggaggatgctgatatcgaacaggccgcgcgcgggatctgctatggcattttcagctcggcggggcaggcgtgtatcgccgggtcgcggctgtttatccacgagagcatttacgccctgctgatggcgaggctgctggaattaactcgcgggctgcgcgtcggacacccgtttaccgacggcgtgcatgtcggaccgctgatcggcgaaaaacatcgccagagcgtgatcgagtacgtcgaactggcgaagcgtgaagggggccgcgtgctgtgcggcggcgagatccccgccgatcccgctctggcaaacggcagctttttccagcccacgattatcgaagggctgagcaacagcgcccgcgcctgtcaggaggagatcttcggcccggtgctggtggcgatgtcgtttgccgatgaagccacgcttatccgcgaggcgaacgactcggtttacggcctggcggcggggatctggacgcgcgataccgggcgcgccctgcgtctcagcgagcagctggaggcaggcacggtgtggatcaacacctacaaagtctttgcgatttcgaccccgttcgggggctttaaagagagcggtctgggccgcgagaagggtattcaggggctgaaagcctggatgcaacaaaagagcatttatctggcgacgggtaacagcgtcaaccactggtgcgactga

SEQ ID NO: 115854 - DNA, 771 bp, Enterobacter cloacae
atgaaaaaggtaatgttgattggttttggcgccatggcacaggcggtgattgagcgcctgcccgccggcgtggctatcggctggatcgtggcgcgcgcgtctcaccatgccgccattcacgaccagtttggcgatgcggttgaggcgctgacgtcgccgatggcgtgcgcacaaacgccggatctggtgctggaatgcgctagccagcaggcggtggcccagtacggggaagagatcctgcgtcgcggctggcatctggccgtcatttccaccggcgcgctggcggacagcgcgctggagcagcgtctgctcgctgcgggcggaaaaatgaccctgctttccggtgcggtggccggtatcgacgggctggcggcggcgaaagagggcggccttgagcgcgttacctatcagtcgcgcaaaagcccggccagctggcgcggcagctatgctgagcagcttatcgatctgaatgcggtgtcagaggcaaaggtcttttttgaaggcagcgcccgcgaggcggcgcgcctgttcccggcgaacgccaacgtggcggcgaccgtggcgctcggcggcgtcgggatggacgacacccgcgtgcagctgatggttgacccggcaacgaaacgtaacacccacacgctccatgtggaaggattgttcggcgagtttcatctggagctgagcggactgccgctggcatcgaatcctaaaacctccaccctggcggcactgagcgcggtgcgcgcctgccgcgagctggccctgagctga

SEQ ID NO: 115855 - DNA, 795 bp, Enterobacter cloacae
atgaatgcacaaattgacgggcgcgtagcggtcgttaccggcggttcttccggcattggctttgaaacgctgcgcctgctgctgggtgaaggggcgaaagtcgccttctgcggccgtgacccggaccggctcgccagcgcccatgcgacgctgcaaaacgaatttccccacggggagattttcgcttaccgctgcgacgtgctgaacgccgacgaagttcaggcctttgcggatgcggtgcaggcgcgctttggcgcggcggatatgctgatcaacaacgccgggcagggctacgtggcgcacttccatgacaccccgcgcgaggcgtggctgcacgaagccgaactcaaactgttcggggtgattaacccggtgcaggcgtttcagactctgctggagcagtccgacattgcctctgttacctgcgtgaattccctgctggcgctacagccggaggagcacatgatcgccacctccgccgctcgtgccgcgctgctgaacatgacgctgacgctgtcgaaagaactggtgggcaagggcattcgcgtcaattccatactgctcggcatggtggaatccggccagtggcagcgccgctttgaaaaccgggcggacaaaagccagagctggccggaatggacggcggatatcgcgcgcaagcgcggcattccaatggcgcgcctcggcaagccgcaggagcccgcgcaggcgctgctgttcctcgcttcgccgctggcctcgtttaccaccggcgcggcgctggacgtttccggcggcttctgccgccatctgtaa

SEQ ID NO: 115856 - DNA, 774 bp, Enterobacter cloacae
atgatgacgggttttcgtgaacagggaagcggtattccgctgatgctgctgcacgggatcagctccggcgccgcctcctggcacaagcaaatggcgctgaacggttttcgcgtgctggcgtgggacatgcccggttacggcgaaagcccgatgctggccgtagcgcgggcgaacgcgggggattacgccgacgcgctggcggcgatgctggatcgcgccggtgtctggcaggcagtgctggtcggccattccctgggggcgctggtggccagcgcctttgcggcaaagttcccggatcgcgtcattcatctggtgctggccgacgccgcgcaggggtacggcaatgccgcgccggagcagcgggagcaggtctggcgtaaccgcgagcagcagatggcgctggggggcgacatcctcgcccagacccgcgccgcgaagctgctgcgccccggcgcgcgcgcggaagatatcgccaccgtcgcggcgggcatgcgggcgctgcgcccggaaggctaccttgccgccgcgtggatgctggcgcatgacgatatccacggctggcttaaacgctactccggcacgtttgaagtctggtgcggcgagcaggatgccatcacccagccggaactggttcagggtctggcgctgcgctacggcatgccgtttatcgccattccgcaggccgggcacgccagctatctcgataacgacgcgtttttcaaccaacagcttttacgcattaacgaagaggtgcgcgatgaatgcacaaattga

SEQ ID NO: 115857 - DNA, 531 bp, Enterobacter cloacae
atgactgattcaaccgtaaccaacacaacaggcatcaaacctgaccatctgacgatggaagagtgggtcgagtcgcgcatcgcgcgcttcgaaggccgtaaatacgactggaacgcgctgaagttccaggccgattttgacccgaaataccgccgggcgcagatgcgctacatcggcaccggcgcaacgggcgtcgcgaacgacaccaacaccgtgcaggcggaccattttaccttctccaccatggtgctgccgtcgaagtgcgaaggaccgctgcacctgcacgacgacgtggaagaggtgttcttcatgctcaaggggcagatcacgctgatgatccaggacggcgacaactacacagaaaccgtgctgcgtgagcgtgacctgatctccgttccgccgggcatctatcgcggcctgtttaaccacggcgaagaagaagcgctgatgtgcgtcatgctggggaccaacaagccggaaatcccaacctatccgtccgaccatccgctttccaaagtgaagcggaactaa

SEQ ID NO: 115858 - DNA, 1257 bp, Enterobacter cloacae
atgaccacactagagactaacaccgcaccggttgaggcgagcggtgaggggacccgcacgcccgaaaaagcggtgcgctgggccatcccgctgtcgctgctggcctgcgtgctgctggcgtttttcgacaaaatcagcatcgcggcgctcttttcggatacccatttccagcaggcgatgggcattgatttcgacaccacgcgtctcggcattttgatgagcgctttcctgctgagctatggcttctcatcggtgtttttaagcggtttaggcgacaaaatcgcgccgctgcgcctgctcaccgggatgatggcggtgtggtgcgtgctgatggtggcgatgggctttacccataactacacgctgatgatcgtcctgcgtattctgctgggcgtggcggaaggaccgctgttcccgctggcctttgccatcgtacgtcacaacttcccgcagcatttacaggcacgcgccaccatgctgtggctgctgggtaccccggtgggcgcggcgattggtttcccgctctccctctggctgctgaacacctttggctggcagagcactttctttgtgatggccatgcttaccgtgccggtgcttatctttgtgcgcattggtctgcgcgggatccgcctggaggcaaaacccggcacctcgcaggcgtcccgggacgagcggcgcgcggcgcggcgtgagctgttcgtcagcccgcacttctcgatcatctgcatctttaacatcgctttcctgacctatctgtggggcatcaacggctggctgccgggctacctgatcaaaggcaaaggcattcatctggagcacgcgggctggctgtcgtcgatgccgttcatcgccatgctggcaggggaagtgattggcgcgtggctctcggacagggtcgataagcgcgcggcggcatgctttatctccatggcgggggcggccgtcgggctggcggcggtgatgcaccttgataccccgctggccgtcatcgcggcgatgagcttcagcacctttatgtggggcaccggcgcacccaacattttcgccctgctggcgaaggccacccatccccgggtgagcgccacggcgggcggtatcttcaacgggctgggaaactttgcgggcgcgctgtcgccggcggtgatgggcgcgcttatcgccttcacccacagcatggattccgggctgatttttctggcggtgatggcggcggtgggctgcgtcctgttactgccgctgctgagacgttactga

SEQ ID NO: 115859 - DNA, 1188 bp, Enterobacter cloacae
atgacgtcgcgcattgtcattatcggcggcggccaggcgggcggctgggcggcgaaaaccctgcgcgatgagggtttcgacggcgagatttgcgtggtagcggaagaagagtgggatttctacgagcgcccgccgctgtcaaaagcgtctttgctggagccggacgcggcgctcccaaggctgtttagcgacgaggtgcagcaggctctgaacctggcctggtaccggccgctgcgcgctgaatctgtcgatcgcgatgagaaaaaagttgttcttagcaacggcgagcatcttagttacaacatccttttaatcgctaccggcggtcgggcgcgcctgccttcgcaggcgtgggccagccatccgcaggtctataccctgcgccactggcaggacgcgcagcgcctgaaaagtcgtctggcggaaattaaaaaactggcgatcgtcggcggcggctggatcggactggagattgctgcctcggcgcggaaaagcggcgtggcggtcaccctgttcgagcagcagccagcgctctgcatgcgctcggtgagcggcgaggtatcgcagcgcttaaaggcccttcaccgcgagcagggcgtggatatccgtaccggctgcggtgcgctggagctggaggacgacggcggcctgccggtcatccactgcgacggccagcgtgaaacctttgatgcggtggtggttgggatcggcgtcgatctcaatctggagctggcgcgcgatgcggggctgaaaaccgggcgtgggatcgtggtggatgcccagggacgcacctcggatccgttcatctttgccgcaggagatgtcgcccagcaccatcactacggcctgtgcatccagtcctgggccttcgcccagaatcaggcggtggcaacggcgaaagcgatgctcaaccccgatgcgccaggctacgacgacgcgccgtggctgtggtcggatcaatatcagcacaatattcagatcctcggtattccgcagccaggcagcagaacggtcgtgcgtgaagaggcgctgtacttctcgctggacgacaacgggaggctgacgcagctggtggcgttcgacgatgcgcgtaccgtcaagctggcgaagcgctggatggcggcggggcgggatctgtccgacgtgccgctcgccgacccgaccttttcactgatgtcactgcgatag

SEQ ID NO: 115860 - DNA, 927 bp, Enterobacter cloacae
atgagtgtaaccggaattgaaaagctggaatttggtgtgcaagacctgacgcactgcgccaaatttatgcgtgattttggcctgacgggcgatgccagcggccagcgtttcaccaccctgagcggcgcgcgcgtggagcttaacccgatcgacagccccgacctgccgcccgcgtttgaagcgggcaacaccctgcgccgcatgacctgggcggttgccagccagtctgatctggacgcgctgcgcccgaagctggcgcaacagccaggttttcgtgaagtgggcgacgcgctggagtgcctggacccgaacggcatgacgctgcgcgtgcaggtgacccagcaaactgacgtggagctgaacgtcgagccgattaaccagtggggcgatgcccgccgtatcgacacccccagcccggtttacgatcgcgcccagccgatcaacgtggggcatgtggtgttcttcgtggaagagctggcggcagtggagaaattctaccgcgaggtgctcggcttccaggtctcggaccgctatatcaaccgcgccgtgttcctgcgctgcggcgtgcgcggcggccatcacaacctgttcctgctgcaactgccgaaccgcaagcgcggcctcaaccacgtggccttcaccgtgcgcgacatccacgaggtgatcggcggcggtatcgcgatgaataaacatgactggagcacctttatcgggccgggccgtcatccggtgtcgtcggcgtacttctggtacgtcaacagcccgaccggcggggcgtttgagtattacaccaacgatgattacctgacggaaaactggcagccgcgtgagctggagcattccctggtctcctttaccgagtgggcggtggaaggcgggattgaccatgacacacgccgccagcagaaaaagccggaggcggtatga

SEQ ID NO: 115861 - DNA, 792 bp, Enterobacter cloacae
atgatggcaaacgatcaggaagtgaagtatctggtgccggggctggagcgcggtttacagctgctgttggcctttggcgagcagcatcgcgatctgacctttgccgaactgcaccggctggtggatatgccgaaggccaccgcctatcgcgtggtacagacgctggagtacatgggatttctggagcgcaatacgcgcaccaataccttttcgctgggcatgaacgtgctgcgtcttggctttgagtacatcgcctcgctggacgtggcgcaggtcggccagccggtgatcgagcaactgcgcgacgtgagccagtgcagcagccatctggcgatccgcgacgggcgcgacattatctacatcgcccgcgtcagcgccgccgggtcgcgcatcaaccaggtcagcattggtacccgcctgccggtgcactgcacctcgctgggccgcatgctgttgaccgatatttcccgcgctgatttcgaacagctgttcccgcatgagcgtctgccgggcaacacgccggggcagcttcacgaccgcgaagccctgtggcagatggtgcagcaggacaaagcccgcgggtatgtcatcggcgaatccttcttccgccacggcatctcttccatcgtctacccggtgtatgaccgaagcggccgcgtggcggcggtggtcagcattctggtgccgtcggaggagatcccgcagagcgaccgcgagcgcctgcaaaacgaggttcgcctcgcggcggataaaatttctggcttcttagggtatttgtcacaggccagttaa

SEQ ID NO: 115862 - DNA, 750 bp, Enterobacter cloacae
atgaatgggctgctgagcggcaagcgcatcgtggtgaccggcgccgcgcgcgggctgggctaccactttgcccaggcctgcgcggagcagggcgcggcggtggtgatgtgcgacatcctcaaaggcgagctggccgagagtgcccaccggctgcgcgagcagggctatgcgatcgaatcgcacgttatcgatctggccgatcagcactctatcgaccaggtgttcagcgccattggcgagcaagggcagattgacggcctggtgaacaacgcggcgatggcgacgggcgtgggcggcaaaaacatgcttgattacgatccggatctctgggatcgggtgatgagcgtcaacgtcaaaggcacctggctggtgacgcgcgccgccgtgccgctgctgcgcgaaggggcaggcattgtgaacgtggcgtccgacaccgcgctgtggggcgcgccgcgcctgatggcctacgttgccagcaagggggccgtgattgccatgacccgttcaatggcgcgcgaactgggggaaaaacgtatccggatcaacgccatcgcaccggggctaacccgcgtcgaggcgacggaatatgtccccgccgaacggcatcagctctacgaaaacggacgcgcgttaaccggcgcgcagcagccggaagatgtcaccggcagcgtggtctggctgttaagcgatctgtcgaggtttatcaccggacagctgatcccggtcaacggcggttttgtctttaactaa

SEQ ID NO: 115863 - DNA, 1023 bp, Enterobacter cloacae
atgacgacgaccgtacaaaactatcttgataaaggcctgcgcggcctctggtatccggtgctggcaagctgggaagtgcagtctgctcctgtgggcatcacccgcctgggcgagcagattgtggtctggcgcaataaagatggccaggttcaggcgctggaggaccgctgtccgcatcgcggtgcgcgcctgtcgatgggctggaacctcggggaccgcattgcctgctggtatcacggcgttgaggtggcgggcaacggcgaggtgaaagacgtgcccgccgtggataaatgtccgctggtcggccagcattgcgtgcgcagctataacgtgcaggaggcgcacggcgccatcttcctgtggtttggcgtcaccgcggaccagcagccggacgaactgaccttcccggatgaactcgccgacacggaaaacttcagcaacttcctctgcaccgccgcgtggaaatgcaattaccagtacgcgctggaaaacgtgatggacccgatgcacggcacctatctgcactcctcgtcgcactcgatggcggaaggggatcgcaaggccgacatggtgctccagccgaccaaaaccgtttttattttcgagaagaaagggcagagcggcgtcaattttgactgggtggagctgggcaacagcggcacctgctggatgcgcctctccattccgtacaagaagcgcttcggaccgggcggccacttctttatcgtcggcatggtggtgccggaagataacgacaactgccgcgtcttcttctggcgcatccgccgcgtacagggctggcagcgcgatatgtggcgcttcatgtaccgcaaccggctggaaaaactgcactgggaagtgctggagcaggaccgcgtggtgctggagagcctggcgccaaacgcgcgcgatcatgaatacctgtatcagcatgacgttggcctctcgcgcctgcgccgcatgatgcaaaaggccgccaaagagcagctggcgatgcgtgaagcacagcagggagccgcctga

SEQ ID NO: 115864 - DNA, 309 bp, Enterobacter cloacae
atgagcgacacgctgaactacaacccggcgctgccggaaagccgccagtttaccccgccggcagagggcggtaatggcgccattcataagccgggtgattacaccaacctgatctggcagacccgcagccgcgagccggaaagctgggaagtgaagctgattgcgacgctggaagatctcttcgagcagggcgttgaaaccttgccggagctggtaagcgggctgaacgcggtgcgtatgcacgaccagcagggcgagccgtggagcgacgccagcttccaggcattcttacaggttaacggctactga

SEQ ID NO: 115865 - DNA, 324 bp, Enterobacter cloacae
atgagctggataggcgtatgtgacgcagaacaagtacaggaagatttcccttttagcggcaacgtcgacggtaaagagatcggcgtttacctgatcgacggtgaatattacgcgctggaggacgtatgcccgcacgcctatgccctgctgagccagggcttcgtggaagacggcaaggtggaatgcccgctgcacgaggcggtgttcgacgtcaaaaccggccagtgtctgcacggccccggaggacgcaacctcaaccgatacccggttcgggtctttgaaaaccagattcagattaccttcgttgaggagaccgtggcatga

SEQ ID NO: 115866 - DNA, 1284 bp, Enterobacter cloacae
gtgaaccattttagctccgtgacaatcacattgatgaaaaatataagttacaaaaaacgtaaggcggacatgatgacggcaagatggcaaggcacgatagcgcttttattactcattattatttcctacgtcgatcgggtaaatatctcggtaatgattttaaacccggaatttgccgaacattttcagttaaatgaaaacagaatgttacagggcctgctcatgacctgctttcttctgggttatgggttttccgctttattattaacgccagttattgaaagcaaacttcattatcggcaaggattattaagcagcattgcgatttgggccgcggtctgcgcggcttcacctttgctcggctcgctgacgggaatgctcatcgcccgcgtgattctggggatcgcggagggaccgcttttttcactgaaaacgcgctttatcagcgataactttagcgcgcaagagatcggcaaacccaacgccgtgaccgcgctgggcgtctcgctcgggctggccgtgggctttccgctggtgacctggctgatgtcgcatctgggctgggccgggtcgttttacgccctggcggtgatgaatctggtgttgggcggcgggctcatctggcgttttctgcccgcgccacacagcccggtgaagatgaaaaaaccggggtttgttcacaccttcacgctggcctggcagacgccgctgctgggctggatcctgctggttgaaatcgccacgctgagctatctgtggggcagcagcgcgtggctgcccgcatggctgcgtgacgagcaccacttctcgctgcacgcgacgggcatgcttgcggcggtccccttcctgctgagcctggggtcaaagtttctgggcggcgtgctgctcgacaaaatgcggccggaacaggcgccggtactgtttgtggtgggcggtacgttgacggcactctccgtgatcgcactgatgctcagccatcaacccgcatggctggcgctctttatgctttcggctaacgtcttctgggggctacagggagcggctattccggcggtgatccagcatcacgccgcgcgggaagcggtgggcagcgcttacggcataatcaatgggatcggcaatatctgcgcggcgtttattccgctgctgatggggatggtgatgagatcggtggggtcggtcagttcaggcttttcggtgctggtcgtctcgcaggttgtcaccctgcttgccgggggaatgttgctgctgcgcatgcggcgcgcagcagcaatcagcgcgtaa

SEQ ID NO: 115867 - DNA, 921 bp, Enterobacter cloacae
atgagcactttaggtcatcagtacgataactctctggtatctaacgcgtttggttttttacgccttccgatgaacttccagccgtacgacagcgatgcggactgggtgatcaccggcgtaccgttcgacatggcaacgtccggtcgcgcgggtggacgtcatggcccggcggcgatccgtcaggtttccaccaacttggcctgggagcacaaccgcttcccgtggaacttcgacatgcgcgagcgcctgaacgtggtggactgcggcgatctggtgtacgccttcggtgacgcgcgtgaaatgagcgaaaaattgcaggcgcacgccgagaagctgctggcggccggtaaacgcatgctctccttcggcggtgaccacttcgtgaccctgccgctgctgcgcgcccacgcgaagcacttcggcaaaatggcgctggtgcacttcgatgcgcacaccgacacctacgcgaacggctgtgaattcgaccacggcaccatgttctataccgcgccgaaagaaggcctgatcgatccaaaccactccgtgcagatcggcatccgcaccgagttcgacaaagacaacggcttcaccgtactcgacgcgggccaggtgaacgatcgcggcgtggacgatattctgtctcaggttaagcagatcgtcggcgatatgcctgtctacctgaccttcgacatcgactgccttgatccggcattcgcaccgggtaccggtacgccggtgatcggcggcctgacatcagaccgcgccatcaagctggtgcgcggcctgaaggatctgaacatcgtcgggatggacgtggtggaagtagctccggcctatgaccagtccgagatcaccgcgctggccgcggcgaccctggcgctggaaatgctctacatccaggcggcgaaaaaaggcgaataa

SEQ ID NO: 115868 - DNA, 1977 bp, Enterobacter cloacae
atgtctgacgacatgtcttcgctttcgccttcgtcagcaggcgaacagggtgtactacgttctatgcaggaggttgcgatgagctcccaggaagccagcaagatgctgcgcacttacaatattgcctggtggggcaataactactacgacgttaacgagctgggccacatcagtgtctgcccggatccggacgtcccggaagcgcgcgtggatctcgctaaactggtgaaaacccgtgaagcgcagggtcagcgcttgcctgcactgttctgcttcccgcagatcctgcaacatcgcctgcgttctattaatgccgcgttcaaacgcgcgcgggaatcgtatggttataacggcgactatttcctcgtttacccgatcaaggtcaatcagcaccgtcgcgtgattgagtccctgatccactccggcgagccgctgggcctggaagcaggctctaaagcggagctgatggcggttctggcgcacgcgggcatgacccggtcggtgatcgtctgtaacggctataaagaccgcgaatacattcgtctggcgctgattggcgagaagatgggccacaaggtctatctggtgatcgagaagatgaccgaaatcgcgatcgtgctggaagaggccgagcgtctgaacgtgatcccacgccttggcgtgcgtgcgcgactggcgtcgcagggttccggtaaatggcagtcttccggcggtgaaaaatccaagtttggcctcgcggcgaaccaggtgcttcagctggtggaaattctgcgcgagcgcggtcgtctggacagcattcagttgctgcacttccacctcggctcgcagatggccaatattcgcgacatcgccactggtgtgcgtgaatccgcgcgtttctacgttgagctgcataagctcggcgtgaatattcagtgctttgacgtgggcggcggcctgggcgtggactacgaagggacccgctcgcagtctgactgctcggtaaactatggcctgaacgaatatgccaacaacatcatctgggcgattggcgatgcctgcgaagagcacggcctgccgcacccgacggtaatcaccgaatccggccgcgcggtcactgcacaccatacggtgctggtctctaacatcatcggcgttgagcgtagcgaaatcaccgaagccacgcctccggcagacgatgctccacgttccctgcaaagcatgtgggaaacctggcaggagatgcacgagccgggcacgcgtcgttccctgcgcgaatggctgcacgacagccagatggacctgcacgatattcacgtcggctactcgtcaggcaccttcagcctgcaagagcgcgcgtgggcggagcagctctatctgaatatgtgccacgaagtgcagaaacagctcgatccgagcaaccgcgcgcaccgtccaattatcgacgagttgcaggagcgtatggcggacaaaatgtacgtcaacttctccctgttccagtcgatgccggatgcctggggtatcgaccagctgttcccggttctgccgctggaagggctgaaccacgccccggaacgccgcgccgtgctgctggacatcacctgtgactccgatggcgcaattgaccactacgtcgatggcgacggtatcgcaacgacgatgccaatgccggagtacgatccggagaacccgccaatgctgggcttctttatggtgggggcgtatcaggagatcctcggtaacatgcacaacctgttcggtgataccgaagcggttgacgtgtttgtcttccctgacggcagcgtggaggttgagctgtccgacgaaggggacaccgtggcggacatgctcgaatacgttcagctggatccgaaaaaactgctcacccagttccgcgatcaggtgaaaaacaccggtctggacgatgccttgcagcagcagttcctggaagagtttgaagcgggtctgtacgggtatacgtatctggaagacgagtaa

SEQ ID NO: 115869 - DNA, 1155 bp, Enterobacter cloacae
atggcaaaacacctgtttacgtccgagtccgtatcagaaggacatcctgataaaattgctgaccaaatctccgatgcggtgctggatgcgatcctggcgcaggatccaaaggcgcgcgtagcgtgtgaaacctatgtcaaaaccggcatggttctggttggcggtgagatcaccaccagcgcatgggttgatatcgaagagatcacccgtaacacggtgcgtgagattggctatgtacattctgatatgggctttgatgccaactcctgcgccgtactgagcgcgattggcaaacagtctccggatatcaaccagggcgttgaccgtgccgatccgctggaacagggcgcgggtgaccagggcctgatgttcggctacgcaaccaacgaaaccgacgtgctgatgccagcgccggtaacctacgcccatcgtctggtgcagcgtcaggctgaagtgcgtaaaaacggcaccctgccgtggctgcgtccggatgcgaaaagccaggtgaccttccagtatgacgacgggaaaatcgtcggtatcgatgcagtggttctttccacgcagcatgctgaagagattgaccagaaatccctgcaagaagcggtgatggaagagatcatcaagccggttctgccaactgaatggctgagctctgcgaccaaattcttcatcaacccaaccggacgctttgttatcggcggcccaatgggtgactgcggtctgaccggtcgtaaaatcatcgtagatacctacggcggcatggcacgtcacggcggcggcgcattctccggtaaagatccgtctaaagttgaccgttctgcggcgtacgctgcacgttatgtggcgaaaaacatcgttgctgccggtctggctgaccgctgtgagatccaggtttcctacgccatcggcgtggctgagccaacctccatcatggtggaaaccttcggtactgaaaaagtgccttctgaacagctgaccctgctggtgcgtgagttcttcgacctgcgtccatacggtctgattcagatgctggatctgctgcacccaatctaccaggaaaccgcagcgtacggtcactttggccgcgaacatttcccatgggaaaaaaccgacaaagccgccctgctgcgtgatgctgccggtctgaaataa

SEQ ID NO: 115870 - DNA, 1398 bp, Enterobacter cloacae
atgcctgacaataataaacaggggcgtacgtccaataaggcaatgacgttcttcgtctgcttcctcgccgctctggcaggattactctttggcctggatattggcgtaattgccggtgcattacctttcatcaccgatgagttccagattagcgcacacactcaggaatgggtggttagctccatgatgttcggtgccgccgtcggcgcggtcggcagcggctggctctcctttaagctcgggcgtaaaaagagcctgatgatcggcgcgatcctgttcgttgccggctcactgttctctgccgctgcgcctaacgttgaagtgctgatcatctcccgcgtgctgctcggtctggcagtgggcgtggcgtcttatactgccccgctgtacctgtctgaaatcgctccggaaaaaatccgcggcagcatgatttccatgtatcagctgatgatcaccatcggtattctgggggcttatctctcggataccgcattcagctacagcggcgcatggcgctggatgctgggcgtaatcatcattcctgccatcctgctgctgattggcgttttcttcctgccagacagcccgcgctggtttgccgccaaacgccgcttccatgatgccgaacgcgtgctcttacgcctgcgtgataccagcgccgaagccaaaaacgagctggaagagatccgcgaaagcctgaaggtcaaacagtccggctgggcgctgttcaaagagaacagcaacttccgccgcgcggtgttcctcggtgtgctgttacagatcatgcaacagttcaccgggatgaacgtcatcatgtattacgcgccgaaaatcttcgaactggcgggctacaccaacaccaccgagcagatgtggggcaccgtgatcgtcggcctgaccaacgtgctggcgacctttatcgctatcggtctggtggaccgctggggacgtaagccaaccctgacgctgggcttcctggtgatggccgtcgggatgggcgtgctgggtaccatgatgcacatgggcattcattccccaacggcacagtacttcgccgtggcgatgctgctgatgtttatcattgggtttgcgatgagcgccggtccgctgatttgggtgctgtgctctgagatccagccgttgaaagggcgtgattttggcatcacctgctctaccgcaaccaactggattgccaacatgatcgtcggcgcaacgttcctgaccatgctcaataccctgggtaacgccaataccttctgggtctacgccggtctgaacctgttctttatcgttctcactatctggctggttcctgaaaccaaacatgtttcactggaacacattgaacgtaacctgatgaaaggtcgtcctctgcgcgaaatcggcgcacacgactga

SEQ ID NO: 115871 - DNA, 498 bp, Enterobacter cloacae
atgaaagctccccgtctccccatcgccattcagcaagccgtcatgcgcagcctgcgggaaaaactcgcccaggccaacctgaagctcggccgcaattatcctgaaccgaagctggtctatcagcagcgtggcaccgcggcaggcaccgcctggctggaatcgtatgagatccgcctgaatccggtgctgatgatggaaaaccagcaggcgtttatcgacgaagtcgtcccgcacgaactggcgcacctgctggtgtggaaacactttggccgcgtcgcgccgcacggcaaagagtggaaatggatgatggaggcggtgctcggggttccggcccgccgcacccatcagttcgagctggaatcggtacgccgcaataccttcccctaccgctgccagtgtcagcagcaccagcttaccgtccgccgccataaccgcgtggtgcgcggcgaagcgacctatcgctgcgttaaatgcggcgaaccgctggttgcggaataa

SEQ ID NO: 115872 - DNA, 708 bp, Enterobacter cloacae
atgtcccgtaatgtttctctcgcggtcgcttttctggcgacagcgctctccggccatgctctggccgacggtattcacagtttctctcaggcaaaaaccgcgggcgtaaagattaacgccgacgtaccgggtgatttctactgcggctgtaaaattaactggcagggtaagaaaggggtcgtggatcttggatcctgcggctataaggtgcgcaagaacgagaatcgcgccagccgaatcgaatgggaacacgttgttccggcctggcagtttggccaccagcgccagtgctggcaggacggtggacgtaaaaattgcgcaaaagatccggtctaccgccagatggaaagcgatatgcacaacctgcaacccgccgtgggtgaggttaatggcgaccgcggaaacttcatgtacagccagtggaacggtggcgaaggccagtacggtcagtgcgccatgaaggtcgatttcaaagagaaagtcgccgaaccacctgcccgcgcacgcggcagcatcgcccgcacttatttctatatgcgcgaccgctacgatctcaatctttcccgccagcagacgcagctcttcaatgcctgggacaagctctacccggtgacggactgggaatgccagcgcgacgaacgtatcgccaaagtccaggggaatcataacccttacgtccagcgggcttgccaggcgcaaaagagctaa

SEQ ID NO: 115873 - DNA, 732 bp, Enterobacter cloacae
atgcgcatccctcgcatctatcaccctgaactgattaccccaggcggcgaaatcgccctgtctgatgatgccgcaaaccatgtaggtcgcgtgctgcgcatgggggcaggccaggcgattcagctctttgacggctctaatcaggttttcgacgctgaaattacgcgcgccgataaaaaaagcgtgcacgtgaaggtgctgcgtggcgacgtggacgaccgggaatccccgctgcacattcacctgggccaggtgatgtcgcgtggggaaaagatggagttcaccattcagaaatccattgaactgggtgtaagcctcattacgccacttttttctgagcgctgcggcgttaaactggatgcggaacgtctgaacaaaaagatccagcagtggcaaaaaattgccattgcggcctgcgaacagagcggccgcaaccgtatccctgagatccgcccggcgatggatctggaggactggtgtgcagaagaggaaagcgggcttaagctcaatcttcatccgcgcgccagcgccagcatcaatacgctgccgctgcccgttgagcgtgtacgcctgctgattggcccggaaggcggcctgtcggctgacgaaattgccatgacggcgcgttaccagtttactgatattctgttgggacctcgcgttctgcgcactgagacaacggcactcaccgccattaccgcgctacaggtgcgatttggcgatctgggttga

SEQ ID NO: 115874 - DNA, 948 bp, Enterobacter cloacae
atgattaagctcggcatcgtgatggaccccatcgcaaacattaacatcaagaaagactccagcttcgctatgttgctggaagcgcagcgtcgcggctatgaactccactatatggagatgaacgatctttacctgatcaacggtgaagcccgcgcacgcacccgcatcgttaacgtcgagcagaactacgaaaaatggtacgaattcggtaccgagcaggatattgccctggccgaccttaacgtgatcctgatgcgtaaagatccgccgttcgacaccgaatacatttacgccacctatatccttgagcgtgccgaagagaaaggaacgctgatcgtcaacaagccgcagagcctgcgcgactgcaacgagaagctctataccgcatggttctctgacctgacgccggaaacgctcgtcacccgcagcaaaacgcagctgaaagaattctggcagaagcacggcgacatcatcatgaagccgctggacggcatgggtggcgcgtcgatcttccgcgtgaaagagggcgatccgaacattggcgtgattgccgaaacgctgaccgagctgggaacccgctactgcatggcgcagaactatctgccagccattaaagacggcgacaagcgtgtgctggtcgtagacggcgagccggtgccttactgcctggcgcgtatcccgcagggaggggaaacccgtggcaacctggcggctggcggccgtggcgaaccgcgtccgttaagcgaaagcgactgggaaattgcccgccgcgtcggccctacgctgaaagccaaaggcctgatcttcgtcggtctcgatatcatcggcgatcgcctgaccgaagtgaacgtcaccagcccgacctgcattcgtgaaatcgaagcggaattcccgatctcgatcaccggaatgctgatggacgctatcgaaaaacgtttacagaaataa

SEQ ID NO: 115875 - DNA, 561 bp, Enterobacter cloacae
atgaatttacagcatcactttcttattgccatgcctgctctccaggatccgattttccgccgctccgtggtctatatttgcgaatacaacgaagacggcgcgatggggattatcatcaataagccgctggaaaacctccaggtggaaggcattctggacaagctgaaaatccctgctgaagcgcggctgccggaaatccgtctcgataaaccggtgatgctcggcggcccgcttgcagaagatcgtggttttatcctgcataccccgccggttttctcgtccagcattcgtatctctgataacaccgtcgtcaccacctctcgcgacgtgcttgaaacgctgggcactgccagtcagccttctgaggtgctggttgcgctcggctacgcctcctgggaaaaagggcagctggaacaagaaattctggacaacgcctggctgacagcccctgcggatatgaatatcctgtttaaaacccctatcgccgatcgctggcgtgacgcggcaaaactgattggcattgatattctgatcatgcctggtgttgcggggcacgcgtaa

SEQ ID NO: 115876 - DNA, 417 bp, Enterobacter cloacae
atgagcggcacccttctcgccttcgacttcggcaccaaaagcatcggcgtcgctgtgggtcaacggatcaccggcaccgctcgcccgctcacggcgctgaaagctaacgacggcacgccggactggaaccttattgagcgcttgctcaaagagtggcagccggacgacgtgattgtcggcctgccgctaaacatggacggcaccgagcaaccgcttaccgcccgcgcgcgcaaattcgcgaacaaaatccatggccgctttggcgtctccgttaagctgcacgatgaacgtttgagcaccgtcgaggcacgcgctggcctgttcgagcacggtggcttccgggcgctgaacaaaggcagcgtggattcagcttcagccgtcattatcctcgaaagctatttcgaacagggttactga

SEQ ID NO: 115877 - DNA, 981 bp, Enterobacter cloacae
atggatgtggaagaaattgtggcccttagtgtaaagcataacgtctccgatctacacctgtgcagtgattcgccaccgcgctggcgcaggtcaggccgtcttgaacctgcgccgtttccgcccccggatgtggaggcgttattaaaagcgtggctcaacgacgaacagcagggcgcatggtgggcaaacgggcaggtggattttgccgttaccctcgcaggccgtcagcggctgcgcggcagtgcgtttaagcatatgcacggcgtttcgattgcgctgcggctgttgccgctgacgtgcccgcagctctctgcgctaggtgtgccgcgagcgatcccggagctgctgtccaatgacaatggcctgattctggtcaccggcgccaccggcagcgggaaatcgaccaccctggccgctatggtcgatttcctcaatcaccagacggacgggcatattctgaccctggaagatccggtggagtttatgtaccagagcgaacgttgcctgatccagcagcgggagataggccagcacagcccgtcctttgccgaggcgctgcgcagcgcgctgcgtgaagatccggatgtgattctgcttggtgagctgcgcgacagcgagacgatacgcctggcgctgacggcggcggaaaccggccatctggtgttggccacgctgcacacgcgcggtgcggcgcaggcgatcgagcgcctggtcgacacctttccggctcaggagaaagatccggtgcgtaatcagctggcgggaagcctgcgtgcggtcctggcgcagaagctacgtcaggatgtccagggcgggcgcgtggcgctgtatgagctactggtgaatacctcggcggcggcaaacctgatccgcgaaggcaaaacctggcaactgccgggcattattcaaacggggcagcaggcgggaatgcagaactttgagcagagtctggcggagcgacgggcgcaggggcggctgtag

SEQ ID NO: 115878 - DNA, 702 bp, Enterobacter cloacae
atgaacgacattgcgcataacctggcacaggtccgggacaaaatctcagccgcggcaacgcgttgcggccgtgctccagaagaaattacgttgcttgcagtcagcaaaaccaagcctgcgagcgccatcgcagaagcgatagccgccggtcatcgtgcctttggtgaaaactatgtgcaggaaggcgtggataaaattcgcgctttccgggaacggggaaatacagacctgcaatggcactttatcggtccgctacagtcgaacaaaagccgtctggtagcagagcactttgactggtgccacaccatcgatcgtctgcgcatcgctacccgtctgagcgaccagcgccctatggagatgccagcgcttaacgtgctgattcaaatcaacatcagcgatgaaaacagcaagtccggcattacgctgggcgaactggaggcgctggcggcagacgtggcggcgctgccgcgcttaaccctgcgcgggctgatggctatcccggcgccagagtcaagttatgaaaggcagtttgccgtggcacagcaaatggctgtagcatttgaggcgcttaaggcgcgctatgacacggtagacacgctttctctgggcatgtcggacgatatggaagccgccatcgcggcaggcagcaccatggtgcgcatcggcacggcaattttcggtgcgcgcgattacccccaataa

SEQ ID NO: 115879 - DNA, 567 bp, Enterobacter cloacae
atgaagacgttgactttcctgctttcaacggtcattgaactgtatacgatggcgctgctgttgcgcgtctggatgcagtgggcccgttgtgatttttacaatccattctcacaatttatcgtgaaaatcacgcagcccgttgtggggccgcttcgccgcgtcattccggcaatggggccaattgacagttcatctctgctgatggcgtttattctgagcgttatcaaagcgatcgtgctgtttatggtcatcactttccagccgattatctggatttcagccgttctgatcctggttaaaaccgtcggctcgctgatcttctgggtcctgctggtgatggcgatcatgagctgggtaagccggggccgtagcccggtggagtacgcgttgattcagctgactgaaccgttgctgcgtccgattcgtagcctgctgcctgcaatgggcggaatcgacttctccccgatgcttctcgttcttctgctgtacgtgctgaatatgggtatcgcggaactgttacaggcgacgggtaatatgctgctgccggggctgtggatggcgttatga

SEQ ID NO: 115880 - DNA, 297 bp, Enterobacter cloacae
atgagtgcagttagcccctgcgccgacgggctggttttgcggctgtacattcagccgaaagccagccgcgacagtattgttgggctgcatggcgacgagctaaaagtcgccatcactgccccgccggttgacggccaggcgaatgcgcatctgaccaaatatctggctaaacagtttcgcgtcgctaaaagccaggtcatcattgagaaaggtgaacttggccggcataaacaggtaaaaatccttaacccgcaatctatcccgacggaagtcgcggctctgaaagaacaggactaa

SEQ ID NO: 115881 - DNA, 594 bp, Enterobacter cloacae
atgcagaaagttgttctcgccaccggtaacgccggtaaagtgcgcgagctggcctcgctattaaatgattttgggctggacgtggtggcccagaccgagctgggcgtggactccgccgaagagaccggcctgacgtttatcgaaaacgccattctgaaagcgcgccacgccgcgcagatcaccggactgcccgcgatagccgatgactccggtctggccgtggattttctgggcggtgcgccggggatttactccgcccgctattccggggtggacgccaccgaccagcagaatctggaaaagctgcttgtggccctgaaagacgtccctgacgaacagcgtaccgcgcagttccactgcgtgctggtctacatgcgtcacgcggaagatcccacgccgattgtctgtcacggcagctggccgggcgtgatcacccgtgaagcggcgggcaacggcggctttggttacgacccgattttctttgtcccgaccgagggaaaaaccgctgcggaactcacccgcgaagagaaaagcgcgatctcccaccgtggacgcgccctgaaactgttactggaagcactgcgtaatggctaa

SEQ ID NO: 115882 - DNA, 1149 bp, Enterobacter cloacae
atggctaatttgccgcctctgagtctttatattcacatcccatggtgcgtgcagaaatgcccgtactgcgatttcaactcgcacgcgctgaagggcgaagtgccgcacgatgattacgtcgcgcatctgctggccgatctggatgctgatgtatcgtacgcacagggacgtgaagtgaagaccatttttattggtggcggtacaccgagcctgctttcaggcccggcgatgcagacgctgctggatggcgtgcgcgcacgcctgaacctggcagtggatgctgaaattacgatggaagccaaccccggtaccgttgaggccgaccgttttgtcgagtatcagcgtgcgggcgtgaaccgtatctctatcggcgtgcagagctttagcgagccaaagctgaagcgtctggggcgtatccacggcccggaagaggcaaaacgcgcggcaaacctggcaacggggcttgggctgcgcagctttaacctcgacctgatgcatggcctgccggatcagtcgctcgaagaagcgctggacgatttgcgtcaggcgattgaactgaatccgccgcatctgtcgtggtatcagctgaccattgagcctaacaccctgtttggttcccgtcctccggtgctgccggacgatgacgcgctgtgggatatcttcgagcagggccaccagcttttgaccgcggcggggtatcagcaatacgaaacgtcggcgtatgcgaagccgggctatcagtgtcagcacaatctgaactactggcgttttggtgattatctgggaattggctgcggcgcacatggcaaagtgaccttcccggacggacgcattctgcgtaccgccaaaacgcgtcacccgcgcgggtatatggaaggccgctacctggagcgtcagcacgacgtcgaggcggcggataagccgtttgagttctttatgaaccgcttccgtctgctggaagccgcaccgcgcgcggaatttacgcgttataccgggctgccggagtcagtgattcgtccgcagattgacgaggcgctggcgcaggggtatctgaccgagtgtgatgagtcctggcagatcaccgagcacggcaagctgttcttaaactcccttcttgagctgttcctcgctgaaaatcctgaaggctga

SEQ ID NO: 115883 - DNA, 339 bp, Enterobacter cloacae
atggaaaaatcaaaacaactccgcaaacaaatgacgcccgaagaattacgcctctggtatatgctcagaggtcgtcgtttcttcgggtataagtttcgccgtcagatgccggttgggccgtatatcgtggattttgcctgctttaaggcgaagctgattattgagctggacggtaggcagcatcagaacaaagagaagtatgattctcaccgtaccgagtttttgaatgcgaacggctgggaagtcgtacggttctggaataatgaattcaggactaatgaggatgaggtgctgatggctattttacaacgattgcaatgcctgatgccctcaccctaa

SEQ ID NO: 115884 - DNA, 717 bp, Enterobacter cloacae
atgcgcaaaacgttgctggctgttgcattactggcaatcggatccaccgcccatgcggagtataaatgtagcgtcaccccgcgtgatgacgtggtgctgagtccgcaaaccgtgcaggttaagggcgagaatggcaatctggtgattacgccggatggcaacgtgacctttaacggcaaaccgcaaaacctgacggccgctcagcgcgagcaggcgatggactaccaggccgagttgcgtaccgcgctgccctggatcaacgatggcgcgctgacccgcgtcgagaaaagccgcgtggcgctggataaaatcatcaccaaagaggtgggggagagcagcaatatgcgcacccgcctgacgaagctggataaacagctgaaagagcagatgaaccgtattatcgagacgcgctctgatggcctgacgttccactataaggcgatcgatcaggtgcgtgccgacggtcagcagctggtgaaccaggcgatgggcggcattctccaggacagcatcaacgagatgggcgccaaagcggtgctgaagggtggcggtaatccgttgcagggtgtactgggtagcctgggcggactgcaaacctcgattcagaacgagtggaagaatcaggaagccgatttccagcagttcggcaaagacgtgtgtaaacgcgtggtgtcgctggaagacagccggaagtcgctggtggggacgctgaagtaa

SEQ ID NO: 115885 - DNA, 327 bp, Enterobacter cloacae
atggcaaagaatcgtagccgtcgtctgcgtaaaaagatgcacatcgaagaattccaggaagtgggcttctccgttgcctggcgcttcccggaaggcaccagcgttgagcagatcgatcaggacgttgatgcgttcatcaacgaggtgatcgagccaaacaagctggccttcgacggtagcggctatctggcgtgggaaggtctgatttgcacccaggaagtggggaaatgcaccgaagagcatcaggcgctgatacgcaaatggcttgaagaccacaaactggaagatgtccgcgttagcgaacttttcgacgtttggtgggactaa

SEQ ID NO: 115886 - DNA, 720 bp, Enterobacter cloacae
atgaaaaacgacgtcatttcaccggaatttgatgaaaacggtcgcccgctgcgccgtattcgcagctttgtccgccgtcaggggcgcctgacaaaagggcagcaacacgcgctggacaactactggccggtgatgggcgttgagttcagcgagcaaccgctcgacttcaccgacctgtttggccgcgacgcgccagtgacgctggagattggttttggcatgggcacctcgctggtgaccatggcaaaagcgcgcccggagcagaacttcctcggtatcgaagtacactcgccgggcgtcggcgcgtgcctggcaacggcccacgaagagggcgttgagaacctgcgcgtcatgtgtcacgacgcggtggaagtgctgcacaaaatgattcctgacaattctttgaacatggttcagctctttttccctgacccatggcacaaagcgcgtcataataaacgccgtatcgttcaggcgccgtttgccgagctggtgaaaagtaagctcaagctgggcggcgttttccacatggcaaccgactgggaaccttatgcggaacatatgctggaagtgatgtcgtccctggacgggtataaaaatcagtctgaaagcaacgactacgtaccgcgtccggattcacgtccggtgacaaaatttgaacagcgtggccatcgtcttggtcacggcgtatgggacttaatgttcgagagggtgaaataa

SEQ ID NO: 115887 - DNA, 1053 bp, Enterobacter cloacae
atgcaagcctctcaattttcagcccaggtgctggactggtacgacaaatacgggcgtaaaaccctgccctggcaaattgaaaaaacgccgtacaaagtatggctctccgaggtgatgttgcaacaaacgcaggtcgcgacggtcattccttacttcgagcgttttatggcgcgcttcccgacaatcaccgatctggccaacgcgccgctggacgaggtactgcacctatggacaggcctcggctattacgcccgcgcgcgcaacctgcacaaagccgcacagcaggtcgccacccgccacaacggtaaattcccggaaacctttgacgaggtggcggatttgcccggcgtcgggcgttcaaccgcaggcgcaatcctctccctctctttaggcaaacatttccctattctcgacggcaacgtcaagcgcgtgctcgcacgctgctacgccatagatggatggccgggcaagaaagaggttgagaaacgcctgtgggagatcagtgaagcggtcactccggcgaaaggggtggcgcgttttaaccaggcgatgatggatctgggcgcgatggtctgcacccgttcaaaaccgaagtgcaaactttgcccggtaaacaacctctgcatggcctatgcgaaccacacctgggcgcagtatccggggaaaaaaccgaagcagacgctgcctgaacgcaccgggtacatgctgctgatgcagcatggcgacgaggtgtttctcgctcagcgcccgccgagtggcctgtggggtggtctatactgcttcccacagtttgaggatgaagcctcacttcgggcatggcttgaacagcgcggcattgcggccgataccctgacgcaactcaacgcgttccgtcataccttcagccatttccatctggatattgtgccgatgtggcttcccgtgtcctcattcacgtcgtgcatggatgaaggcaacgctctctggtataacttagcgcaaccgccatcagtcgggctggcggctcccgtggagcgcctgttacagcaattacgtgtcggtgcaatggtttag

SEQ ID NO: 115888 - DNA, 273 bp, Enterobacter cloacae
atggccagaaccattttttgtactttcctacagcgcgacgctgaaggccaggatttccagctctacccgggcgacctgggtaagcgcatttacaacgagatctccaaagaagcctggggacagtggcagaagaagcagaccatgctgatcaacgagaaaaagctcagcatgatgaacccggaacaccgcaaactgctggagcaggagatggtgaacttcctgttcgagggtaaagacgtccatatcgaaggctatacgccaccggaaaaataa

SEQ ID NO: 115889 - DNA, 1080 bp, Enterobacter cloacae
atgatgaaaaaacttttagcgctagcccttgttgcgccgttgcttgtgtcttgttcttccaaaaaaggcgatgaatacaacgaagcctgggtaaaggacaccaacggttttgacattttgatggggcagtttgcccacaacatcgagaacatatggggatttaacgaagttcttattgccggaccgaaggactacgttaagtacactgacgcctatcagacccgtagccacatcaacttcgatgacggtacgattacggttgaaaccatcgcagggactgaacctgcggcgcatttacgtcaggccatcatcaaaaccctgctgatgggcgacgatccggggtctatcgacctctactctgatgccgatgacatcaccatctccaaagagccgtttctgtatggccaggtcgttgaccagaccggtcagccgatccgctgggaaggccgcgccacgaaatttgccgactacctgctgcaaacgcgcctgaaaagccgcaccaacggcctgaaagtgatctacagcgtcacgatcaacctggtgccgaaccacctcgacaagcgtgcgcataagtatctgggcatggtgcgtcaggcgtcgcgtaagtatggcgtggatgagtcgctgatcctggcgattatgcagaccgagtcctcgttcaacccctacgcggtaagccgttccgacgcgctggggctgatgcaggttgtacagcacagcgccggtaaagacgtgttccgcgcacaggggaaatccggcacgccgagccgcagctacctgttcgatccgcaaagcaacattgataccggtacggcctacctggcgatgctgaacaatgtctacctgggcgggattgataacccaacctcacgccgctatgcggtgatcaccgcctataacggcggggcgggcagcgtgctgcgcgtcttctcaaatgacaaagtgcaggccgcgaacatcatcaacagcatggcgccgggggatgtctactcaaccctcaccacccgccacccgtctgcggaatcacgccgctatctgtataaggtgaatacggcgcagaagaactaccgtcgccgctag

SEQ ID NO: 115890 - DNA, 1257 bp, Enterobacter cloacae
atgaaccttaagctgcagcttaaaatcttgtcgtttctgcagttctgcctgtggggtagctggctgactacactcggctcctatatgtttgtgacgctcaagttcgatggtgcgtcgatcggtgccgtttacagctcgctgggtattgcggctgtcttcatgccaacgctgctcggtatcgtggcggataaatggctaagcgcgaaatggctgtatatgctttgccacctggtgggtgcggggacgctgtttatggcggccgaagtgaccacgccgggggcgatgttcatggtgatcctgcttaactcgctggcctatatgccaacgcttggcctgatcaacaccatctcctactatcgcctgaaatctgccggtctggatatcgtcaccgacttcccgccaatccgtatctggggcaccatcggctttatcatggcgatgtggggcgtgagcttcgcgggcttcgagctgagccatatgcagctctacatcggcgcggcgctctccgtactgctggcgctgttcaccctgacactgcccaccattccggtatctaatcagcagaaaaaccagagctggagcaccatgcttggcctggacgccttcgcactgtttaaaaacaagcgcatggcgatcttctttatcttctccatgctgctgggcgcggaactgcaaatcaccaacatgttcggtaataccttcctgcacagcttcgataacgatccgctgtttgccgggagctttatcgtcgaacacgcgtcggtgatgatgtccatctcgcagatctccgagacgctgttcatcctgaccatcccgttcttcctgagccgctacggtatcaagaacgtcatgctgatcagtatcgccgcctggatgttgcgcttcggtctgttcgcctatggcgacccgagcgcgttcggcaccgtgctgctggttctgtcgatgattgtttacggctgtgccttcgacttcttcaacatctccggctcggtgtttgtggaaaaagaggtgaagcctgaaatccgcgccagtgcgcagggcatgttcctgatgatgaccaacggcttcggctgtattctgggcggcgtggtgagcggcaaagtggttgagatgtataccactaacggcatcaccaactggcaaccagtgtggctgatcttcgccgggtactcgctggtgctgttcttcgcgttcatcgcgctgttcaagtacaagcacgtgcgcgagccgcacggtgcgcagccgatcgcgcattga

SEQ ID NO: 115891 - DNA, 804 bp, Enterobacter cloacae
atgactggtttgctcgcgactgaaccgcgcccggttgatctccctgcgcttgccgaagcggcgctgtggcaggagctggagctgacgccaaaaccggggctggtggacaggctcaataacggctcccatcgcgatatggaccatgccttgtttgtccgcagcattatggcgattacgccgtggtttgcccggtttgcggaactgggtgaagcacatgcggccaaacctgccgatcggcagttgcggattcttcgcccaatgggaatggcctgcgagcaggcaatgtacgccgccacgggcggggtaaatacccacaagggcgggatttttgccctcggtttgctctgcttcgccgccgggcgtgtgaaaaatatctctgcggatagcctctgttgtgaggtaagtaacatctgtcatgggctggtggcgagggagctggccgggcgcagtgggcaggcaacggcgggggagcggcagtttcagctgtacggtttaaccggcgcgcgtggcgaggcagaaagcggctttgccacggtgcgtaaggctttggatgcgtggaacggtcagtcgcttcacggcctgctgttgcgcctgatggcggtaaatcaggacagcaatctcgtttcgcgcggcggcattgaggggctgcgctacgttcagggctacgcgcgggaactgctggctaacggctgggactgcgaggcgttgctgaagatggataaggcattgattgaacgcaacctgagcccgggcggcagcgcggatttgctgtcggtggggtgggtgctttctggaataaaatag

SEQ ID NO: 115892 - DNA, 540 bp, Enterobacter cloacae
gtgactattgcgacacccgtgcggacgggtgtcagcctggacgaactgctggcggcgaaagagcgccgcgcagcgcgccaggctgacatgcttgcgcactatcaacaaccggtgatctccctcacgctggttacgcccggggaaatcaaagacagccttcgctatcgcaacaccatgggcgtggcgctgcaaatgtgcgaccagctgctgtgggaaaaccgctggcaggtgctggaccgtaaggtgctgtggctacccaccggacctgaagccttgtggtgcatcgcgcatccggcggcggaaattaaggcgcactgtgcagaactggagcagacgcacccactcggcaggctgtgggatctggatgtgatctgccctgaaaacggccacgtcgggcgtcagtcgctgggggcgaatctcagacgctgcctgatctgtgacgagcccgcccacgcctgttcccgttcgcgcaatcaccccgctgagcaggtggtttcccgcgtggagaagatgatcgatgactggtttgctcgcgactga

SEQ ID NO: 115893 - DNA, 1524 bp, Enterobacter cloacae
atgaatcagacagaacttctccatgtaaatttcccccatctgcgggatctgaaaccctttgataccgcccacagcgcgacgccgtggctggcggacagcgaggcgaagcacagccgcaagctctgcgcctcaattgaagaggcggttaagcgcagcggcttgcaggacgggatgaccatctccttccaccatgcctttcgcgaaggcgaccgggtgatcaacaccgtcgtggcgctgctggcgcggatgggcttcaaaaatctgaccctggcttccagctcgctgatgacctgcaacgacgcgctgatcgagcatatcgagagtggcgtcatcacccggatttacacctccggcatgcgcggcaggctggcggatgccatctcccacgggctgatggacgagccggtgcaaattcactcccacggcgggcgcgtgaagctgctccaggacggcgagctgaatatcgacgtggcgtttctcggcgtgccgtgcagcgatgagtttggcaacgccaacgggacgcacggcaaatcctgctgcggctcgctgggctacgccatggtggatgcgcactttgcccgtaaggtggtgctgctgaccgaagcgctggtgccattccccaatatgcccgccagcctggtgcaggatcaggtggactacatcgtgcaggtggagagcgtgggcgacccggcgaaaatcagcgtcggcgcggcgcgcgtcaccagcaacccgcgcgagctgatgatcgcccgctatgcggcggacgtgattgaacactctggctatttcaaaccaggcttctcgatgcagaccggctccggtgcagcggccaccgcctgcacccgttttatggaagagaagatggagcgcggcggcgtgaaggcgcgcttcgcccttggcggcatcaccggcagcctggtggatctgcacgagaaggggctcatcgaaaagctgctcgacacccagtgctttgacggccaggcagcggcctcgctggcgcgcaacccgaaccacgtggagatctccaccaacgtctacgccaaccccggcagcaaggcggcaagctgcgaccagctcgacgtggtgatcctcagcgccctggaaatcgacgtcgactttaacgtcaatgtcatcaccggctccgatggcgtgatgcgtggcgcatccggcggacactgcgacgtggcggcggcagccaacctgaccattgtggtcgcgccgctgctgcgaagccgcatcccgaccgtcgtgaagcgcgttaccacccgcctcacgccgggggagagcattgacgtgctggtcaccgaccacggtattgcggtcaacccggcgcgcccggagatccgcgaacgacttatggaagcagggctgaaggttgtagatatcaacgcgctgtatgagcgagcgatttcgttgacaggcgtaccgaaaccgattgagttcaccgacaaaatcgtcggggtgatccgctaccgcgacggcagcgtgatcgacaccgttcgacaggtaaaggaggaagtgtga

SEQ ID NO: 115894 - DNA, 876 bp, Enterobacter cloacae
atgagcaaactccgccgcagtatgctgttcctgccaggcgccaatgccgccatgctctctaccgcctttatctaccgccccgactccatcatgtttgaccttgaggacgccgtggccctgcgcgagaaagacaccgcacgcatgctggtgttccacgcgttgcagcacccaatgtatcaggatatcgaaaccgtggtgcgcattaacccgctgagcacgccgtttggtctgctggatctggaggccgccgtgcgcgcgggcgtggacgtgattcgcctgccgaaaaccgacaccccggacgatatttacgagctggaaggccacctcgagcgtatcgagaaggagtgcgggcgtgatgtgggttccacccgcgtgatggcggcgattgaatcggccattggcgtcatcaacaccgtggcgattgcccgcagctccccgcgcctgatcggcatcgcgctggccgcctttgactacgtgatggacatgcagaccgagcgcggcgacggcaccgagctgttctatgcccgctgcgccgtgctgcacgccgcacgcgccgccggtatcgacgccttcgacgtggtgtggtccgacgttaacgacgaagccgggttcctgcgcgaggtcgacctgatccgcaagatgggcttcaacggcaaatcgctgattaacccgcgccagatagacctgctgcacaacgcctacgccccgactcaggaagaggtggatcacgccaaaagggtgattgaggcggcagaagagggcgagcgtaacggcctgggcgtggtgtcgctcaacggcaaaatggtggatgcaccgattattaaccacgcgcaggtggtgctggagcgcgcggcggcctctggcgtgcgtcggtaa

SEQ ID NO: 115895 - DNA, 294 bp, Enterobacter cloacae
atgaatattgtaagggaggcgctggccggaacgcaggagtccagcgacctgatggtgaaaatcgcccccgctcacggtgagctggagattgtcatccacagtgaagtgattaagcagtttggcgagcaaatacgccaggtggtcaacgacacattgcgcgccatgaacgtgcaccagggattaatcattattgaagacaaaggggcgctggactgtgtgatccgcgctcgcctgcaaagcgcgcttctgcgtgccgccgatgaacaggccatcaactggggggcgctgaaatga

SEQ ID NO: 115896 - DNA, 1023 bp, Enterobacter cloacae
atgcaatcgcaacccattgattttcggcacaccgttgtggcgaaacacccggaacgcttaagccagatccgctacctgctggcagacagcggccttggcctggacaacgacatcacgctgtttgtcgaagcctggtccggcgcgcagctggtgggttgcgccgggctggctgccaacgtcatcaaatgcgtggcggtcaacgagcagcttcgtggggaaaacctcagcgcgcgtctgctggcagaggtggaaaacgcggcgctggagcgcggccattttcacctcttcctctgcacccgtccgtgcaataaggagcgctttggccgcagcggtttctggccgattgcccagagcgggaacaacgcggtgctaatggagaacactccgcaggggatcgcgcgctactgccgatccctgcgcgcgaagcgccggtgtggggaaaaaacgggcgcgatcgtgatgaacgccaatcccttcaccctcggccatcgtcatctggtggagcaggcggcgacgcagtgcgatgccctgcatctgtttgtggtgcgtgaagacgcctcgttcttcccgttcagcgcgcgcattgagatggtgcgtgcgggcgtggcgcatctgccgaacgtggtggtgcatgaaggctcgcagtacatcatctcccgcgccaccttcccggcctacttcctgaaggagaccggcaaagtgcagcaggcgtggagcgagatcgacgtgctgatcttccgggactatatcgccccggcgctgggcatcacgcaccgcttcatcggctcggagccgttctgcgacatcacgcggcaatacaaccagacgctgcacgacctgctggcctcgcacatcgacgtggtggagatgccgcgcatcaaagccaccggcaacgccatttcggcctcggaagtgcgccgtttactcaagacacagcagttttcccggatccgggagattgtcccggactccaccttcgcgcacctcgaagcacattatcgtgcgagtgcggaagtcgcataa

SEQ ID NO: 115897 - DNA, 864 bp, Enterobacter cloacae
atgaaactcgcaagctttttataccagggaaaacgcagctacggcatcgtacaggccgaaggcgtgattgatttgggccgccgcctgggcgaccgctatggcgaccttaaagcgctgttgcaggggaacgggctggcgcaggccacccgttttctgaacgacgcggtggatgtaccgctgaacgccatcaccttcttaccggtgattgtccagccggaaaaaatcctctgcgtgggcatgaactatgccgacaagcgcaaggagtttgaccagcacaacccggccccgacgctgtttgtccgcttcccggactcacagaccggccacaacgagccggtgctgaagccgcgccactccagcgagttcgactacgaaggcgagctggctgtgatcatcggcaaaggcggggagaacatcagccgcgacgacgccctgcgccacgtggcgggctacagctgttacatggacggctccgcccgcgactggcagcacacctggttcaccgccgggaaaaactggcggcagaccggggcgttcggcccgtggatggcgacggcggatgagatcccggacccgcacagcctggcgatccgcacctggctgaacggccgcatggtgcaggaggacaacaccagcagcatgatccacaaggtggcggaactgatcgagtatatcagcaccttcacccgtctcagcccgggcgacgtgatcatcaccggctcgcctggtggcgtgggtaaaaagcgcaacccgccgctgtttatgaaggagggggatcgcattgaggtggagatcgagcatatcggtcatctgagcaacgtgatcgtggaagcgccagccgtcgggctcgcggcagcgcactga

SEQ ID NO: 115898 - DNA, 1362 bp, Enterobacter cloacae
atgagcacaactgacgattcattctctgttacccacgacccgattgatattcagcggccatcgctcaaagagcgctggtggcatattatggatacctggaaaatcggcattattcctctgccgctgttcgttctggcgggcgcgctgattgcgattgattgcctgggcggaaaactgccgagcgacattgtggtcatggtggccacgctggccttcttcggctttgcctgcggtgagttcggcaaacgcctgccgattgtcggcaagctcggtgcggcggcaatttgcgccacctttatcccttccgcgctggtctattacggcctgctgccggacgtggtggttgagtccacgaccaaattctataaatccaccaatattctctacctctatatctgctgcattatcgtcggcagcatcatgagtatgaaccgcaccgtgctgatccagggcttcctgcgcatcttcttcccgatgctgtgcggtgaaatcgtcggcatgattgtcggcatgggtgttgggctggcgctgggcctcgagccgttccagatcttcttctttatcattctgccgatcatggcgggcggcgtcggggaaggggcgatcccgctctctatcggctatgccaccctgctgcatatggatcagggcgtggcgctcggccgcgtgctgccgatggtgatgctcggcggcctgacggcgatcattatctccggctgcctcaaccagctcgggaaacgctacccgcacctgaccggtgaaggccagctgatgccgaatcgcgccaacgctgatgccactgtttcccaacctgcgttctccggcaaagcggacgtgacgaccatcgcctcgggcgcgctgctggcggtgctgctgtacatgctgggcatgctcggtcacaagctgattggtctgccagcgccggtgggcatgttgtttatggcggtgctggtgaagctctgcaacggcgcctctccgcgtctgctggagggttcccaggtggtgtacaaattcttccagacctccgtgacctacccaatcctcttcgctgtcggcgtggcgattaccccatggcatgaactggtggcggcgttcaccgtcagcaacctgctggtgattgtcagcaccgtttccgcgctggtggcgaccggattcttcgttggcaaaaagattggtatgcacccgattgatgtcgccatcgtctcctgctgtcagagcgggcagggcggcaccggtgacgtggcgatcctgaccgcaggcaaccgcatgagcctgatgccattcgcccagattgctacccgtatcggcggcgcgattaacgtctctgtctcactgctgattctgggcaacttcctcgtttaa

SEQ ID NO: 115899 - DNA, 1638 bp, Enterobacter cloacae
atgaaagtatcgtttcagatcaagctgtttatttcgctggtcgcctttttctcagtgctgttcgcattactgggcggatattattatgtcgatgtcggcaggcagctttatcaggaaatgagcgcgcgcgcaaaaatacaggccgaagaaattgcgcttattcctaccctgcgaaaagaagtcgaacaaaaggatatcctgggtatccatgactttatgcagaaaatagccgcccgcagcgacgccagttttattgtgattggtgacaataaggggctgcatcttttccactccgtgtttgccgaccgggtaggcaaaacgctggttggcggagataacgacgaggtattacacggcaaaagcaccatcaccatccgcaagggcgggttaggcatttcgctgcgcagcaaagcgcccatttttaatgatgccgggcaggtggtggggattgtttcggtaggctatctcacgagctatctggacaccatcaccgtcaacaaggtggttaatatcctgattgccgccgtgctgctgcttatcgccctgtttattttctcctggttcttcacccgcagcatcaagaagcagatattctctctggagccgcgcgaaatcggcctgctggtgcgccagcaaaaggcgatgatggaatccatttatgaaggggtgattgccatcgacgacgatctccgcattgaggtgatcaaccaggcggcgcgtaaattattaggcttacgccagcccgcccgcgaactgcggggtcagctcatcagccaggtgatcgcgcccgtcccgttcttcaacgcgcaaaccatgcttgcgaaagacacccacgatgagatctgtcgctttaacgatctcacagttattgccagccgggtgcggatcatgctggaagatgcgttgcagggctgggtgatcacctttcgcgatcgcaacgagatcgactcgctcagcgcccagctcagccaggtgaagcgctacgttgataacctgcgcatcatgcgccatgaacagctgaaccgcatgactacgctgtccggcctgctgcatatgggccgttatgacgaagcgattcgctacatacaggcgcagtcggaacacgctcaggagctgctggactttatctcgtcccgctttagctctccgacgctgtgtggtttgctgcttggaaaggccgcccgcgcgcgtgaaaaaggcgttgagctgagtttcgacccggcctgccgggtggataaaccgttcctgccgctgctcgaatcggaacttatctcgatcatcgggaacttgctggataacgccattgaagcgacccagcgtgcaccgctcccgcatgccccggtggacgtgctgataaagctgaacgagccggaactgattattgaagtcgccgaccagggcgtcggcatcacaccggagatccgcgaccggatctttgagcgcggcatcaccaccaaaacgcgcggcgatcatggtattggcctgtatctgattgaaagctatgtcacacaggctggcggtgcaattgaagttgccgataacaccccacgcggtgccattttctcactgtttattcccgccacgggaacggcccggcaccccgtacaggaactggaagataccgactatgcaacatga

SEQ ID NO: 115900 - DNA, 693 bp, Enterobacter cloacae
atgcaacatgaacttatcgacgtactgattgttgaagacgagaacgaactggcgcaactgcacgcggagcttatcggtaaacatccgcgcctgaggctggtggggattgccgcgtcgctggccgacgcgcaggtacaactggagagcaaacagccgaagctgatgctgctggataactacctgccggacggcaaaggcatcacccttatcagcaacccgatgctcacccgcgccaactgctcggtgattttcatcaccgccgccagcgatatggacacctgtagccaggcaattcgtaacggcgcgttcgactacatcctcaagccggtttcctggaagcgcctgagccagtcgctggaacgttttgtgcagtttgccgaacagcagcgcgtctggaagattgtcgaccagcagaacgtagattcactctatcaattgcaggcgaaaaactatcgcctggacaacggcagcaaagggatagaggagaacacgctggcgcgggtgcaaatgctgtttaacaacaaggcggcgcactgttttacggtggatgaggtggtgagcgagacgggcctgagtaaaaccaccacccggcgctatctggaacactgcgtggaggtgggttttctgacagtggagatgctgtacgggaagattgggcatccgagaaggatgtaccgccgcgcagaagcctga

SEQ ID NO: 115901 - DNA, 2139 bp, Enterobacter cloacae
atgaaaaccatgaaaattgccgtcagccgtgagctggtatccaaagtttctacgcatcgcgaaaaagttatgctggataacactgatttcaccgatgtggcggcagtcgtcattacggttgttgaaagctacagcggcattctcgcattgctgaagcgtacgggctttcagctaccggtatttatgttctcaacagagccaggagagatgccagagggtgtcacggcgatcatctcaggtaaagcacaggaattgctggaactggaatctgccgcctgccggtatgaagagaacctgctgccacccttttttgacaccctgagccagtatgtggcgatgggaaacagcacctttgcctgtccgggtcaccagcacggtgcctttttcaaaaaacacccggcggggcggcagttctatgatttcttcggtgagaacgtttttcgcgccgacatgtgcaacgccgacgttaagctgggcgatctgctgatccacgaaggctccgccaagcacgcgcaaaagttcgcggcgaaagtattcaacgcggacaaaacctactttgtgctgaacggcacgtcggcggccaacaaggtggtgaccaacgcgctgctgacccgcggcgacctggtgctgttcgatcgtaacaaccataagtccaaccatcatggggcgctgatccaggccggggcaacgcctgtctatcttgaggcagcccgtaatccgtttggttttatcggcgggattgatgaacactgctttgatgaggcctggctgcgggaactgatccgtgacgtcgcgccgcagaaagccgccgaggcgcgcccgttccgcctggcgatcattcagctcggcacctatgatggcacgatctacaacgcccgtcaggtgatcgacaagatcggtcacctttgcgactacatcctctttgactccgcctgggtcggctacgagcaatttatcccgatgatggcggaaacgtctccgcttctgctggaactgaacgagaacgatccgggaattttcgtgacccagtcggtccacaagcagcaggccgggttctcgcaaacgtcgcagatccataaaaaggataaccatattcgcggtcagtcgcgcttctgcccgcacaagcggttgaacaatgcgttcatgctgcatgcctccaccagcccgttttacccgctgtttgctgcgctggacgtgaacgccaagatccacgagggcgagagcggacgcaggctgtgggcggagtgcgtcgagctgggcattgaagcacgcaaggccatcatcgccaactgcaatatgatcaaaccgtttatcccgccggtggtggcggggcggccatggcaggatcaccccacacaggctatcgccagcgagcgtcgcttctttagttttgaaccgggtgcaaaatggcacggttttgaaggctatgcccgcgagcagtatttcgtcgatccgtgcaagctgctgctgaccacgccgggcattgatgctgaaacaggtcactataccgatttcggcattcctgcgaccattctcgcccactacctgcgcgagaacggcattgtgccggagaagtgcgatctcaactccatcctgttcctgctgacgccagccgagagcgcggagaagctaatgcagctggtggcgatgctggggcagtttgaacagcatattgaagacgacacgccgctcgcggatgtgcttccgactatctatcagaaatacccggtgcgctaccgcgactacacgatccgtcagctgtgccaggagatgcacgatctttacgtcagctttaacgtgaaggatttacagaaggcgatgttccgtcaggagagcctgcctgccgtggtgatgaacccgcaggatgccaaccaggagtacgttcgcgggaacgtcgaactggtgcgtattcgtgacgccgaaggacgcattgccgccgaaggtgcgctgccatacccgccgggcgtgctgtgcgtggtgcccggggaagtctggggtggagcagtacagcgctatttcctggcgctggaagagggcattaatatgctgccgggtttctccccagagttgcagggcgtttacagcgagaaagatgcggacgggattaagcggctgtatggatacgtattgaatgtctga

SEQ ID NO: 115902 - DNA, 714 bp, Enterobacter cloacae
gtggtaattggaccctttatcaatgcgggagccgtattgctgggcggtgtacttggggcagtattaagtcagcgcctgccggagcgtattcgcgtctccatgccttctatttttggcctggcgtcgttagggattggtatccttttagtggtgaaatgcgccaacctgccggtgatggtactggcgacgctgctcggcgcgctcatcggcgagttttgctatctggaaaaaggtattaatcacgcggtaggcaaagccaaaaatctgattgcccgaccaggcaaggcaaagcacggcacgcacgagtcgtttattcagaactacgttgcgatcattattctgttctgcgccagcggcacggggatattcggttcgatgcaggaagggatgaccggcgatcccagcatattgattgcgaaagcgtttctggatttctttactgccaccatttttgccaccaccctaggcatcgccgtcgccgcgatttgtgtgccgatgttgcttattcagctggcgctggccacctgcgccacgctgatcctaccgctgacaacgccagcgatgatggcagactttaccgccgtcggcggcctgttgctgctggcgacagggctgcgcatctgtggcattaagatgtttgcagtggtgaacatgctccctgccctgctgctcgcgatgccgctttccgcgctctggacgcactttttcgcttaa

SEQ ID NO: 115903 - DNA, 477 bp, Enterobacter cloacae
ttgtttttagaaataattggtggtttagcaagtgtcgcatccatctcgggcatcacagctaaagagttgattccatttatatctgatccggataagaaactgtttgagaaatatttcagttatcttgaaggtaaaaaggttttaactgcaccattcgattcagaggtttcccaagcagtaatcaaaagtttagaatcaatcaaagataaaacagagcaactaagattggacataaaatccaagcaagcgcaacatttaatattagatttaatccacactctaagtcaaaatttaatgttattatataagcatcaaaattcgacagatgaagtacttttttataaatctttgcaaaaagtacgagttaaatttgcaagagtattatctttactatgttttacgtatgaagtcgatttatcaaatcaacaaactgatttagctagattggtgttggaacatgcttaccgagtaagataa

SEQ ID NO: 115904 - DNA, 921 bp, Enterobacter cloacae
atgtccctgctacatcagattcaagagtctgtggttcaagatggatcaagcttgggtccaatactgctcaaactccgactcttggcagcaagattaggaagtaacgatttagaagaatgggtcaaacatgaatcggaaggctatcctcaggatgctgtgcttcccgattacagaatagtaggagtaacttataaaggcacgttttctggcccttttggctctggtataaaaaatgcgcctatcccaccaatattaataaaaacgtttgcaaatgatagctggaataactactccgtcagagagagcattgctgctgttgacgaacttgttaaagttagcgcaaaaggtggttctttggggattaatgcgtcaaatttaatccttcttctacaagggaagatatatgaagattatgcttgtaatgatatctctggaaatatttcagtagtgtcactatcagaaatttcacaagccgttcgcaatagagttcttgaattaacaattgaatttgaaaaatcaattcccgcagcagcacacatcacttttggtactcaaggtatggataaagataatgcatcaaaagcacagcaaataacacaacaaataatttatggtaacgttggcaatgccatctctggtggcagcgaatcaactattaatgtaagcatacaatcacacaataaagaatcggtagcaaactatctgaaagattcaggtatttctgaagaagatgcgcttgatttctcactgattgtagcgtctgaaacaccatcaagttctgaagaaccttttggggaaggtgcaaaaaattggattgcatcaaatataagaaaagctgccgatgggacttggaaagtcgggatggcagttgcaaccaaagttctgacggaggctgcactgaaatactatggtttgcagtaa

SEQ ID NO: 115905 - DNA, 123 bp, Enterobacter cloacae
atgaaattctccggtctttctctggtcttctccgcaattttcccggtgaaattcccgaaaacgggaggtgaaaaagtgttgcaccataacggtttaactggtcatttccccgtttccccgtga

SEQ ID NO: 115906 - DNA, 1197 bp, Enterobacter cloacae
atgcccacaccacgtcgtttcaaattcactcaccgcctcattgatggcctgccgcctaatgaatccggtgccgcttcccgggaagccgagtacagcgataccgaaatcagcgggctcaaatgtctggttggtaagggagaaggtaagaagaagtttcttctgcgctatctctggcagggccgcaaacgtgctatcagtattggtcactggccggaaattgatgtcacgacagcccgaaagattgccactgagatgaaacgccagatagccaccggcactgacccgcgttatgagcgggacaaatgccgggccattcccacccttcaggaagctttcagtcagtattatttcccgtgggcgaaactgcataaaaagagctggaacaaggatgaacagcgctttcgtgatcacattgcccctgtgatgggaaatctgctgcttaatgaaattacgccccgccacgttacccatcttcagtcatcactgtgtgaaacctgtcagcctgccaccaataaccgggtaattgccctgctgaaagctctcctcagatggtcattgcgtcatgagatggtgactgtgaacccggcggcaaacactcctctgctgcgtgaaaataatgcccgtcagcggtatttctcggaaacggaaatccggcgcatatttgaagctgccagtgaggacaacagccgggtggccggtatctatattcgtttactgttactgaccggattgcgtcgcgacgagttgaggctggcaaaatgggcgcattacagtatgcagcagagaacgctgtggctgcctgaaaccaagaacggtacagggcgactgttgcatctcaacgactggtcgataaagcttattgacgagctgccgcgctttggcggcaatatctggatgtttggtggcaaaattccgggcaaaccggtctgcaatgtcactaaagccttcaggcgcatcatccgtcgggcaggtatctacgatgatgaagtctgcattcatacttgccgccattcggttgcggcattaatcgtttcacggggaggcaccttatatgacgttcaggcccagctcgggcaccgcagtattcagtcatcccagcgctatgctcatctgcatccgcagcggctgaaagcaaccggtcagttgattgaaaagcatatttgcttacccactgaaagccaggacagcatagtttaa

SEQ ID NO: 115907 - DNA, 1776 bp, Enterobacter cloacae
atgttaaccattaataagaaagtagctaaagcacaattgccagaaggtttttatgagaaaaatagcaagctctttttccatgatgaagcggctgataagcatattcttgtttcttctcagtcactggtgccggtggtgaaagccagcaataaataccttaatgagaactggcatattgtacttcgctgtattaatcacagtgatgctgaagtggaaataacaattagcctgaagcaggcgacgatgaatatcgatccgataatcggctatctggctggctgtggtgtgttcattaagaataagaaatactttttgagctttctggaagcatcctgccaactgaacttacctgtttatcgcgtcgccactcaggctggattccagccagatgaggagcttatcttcatgtatggctcggtaccgatatatgcacccgaacatgtagattttcagggggtcattccggcagaaaacatgttggtaaatacaagcgttgcggtcgcggggtcccttgaagagtggaagcatcaggttgccggtaaggtgcagggatttgcgccaaagctggcgatgctggttggtctgagctcacctctgttgcctttaatcaatgaggggggcgggatgtttcatctggcaggtcacagttccaccggcaaaacagtggctatgcagttatgtgccagcgtgaatggaccagccgcagagcccgggagtggtgcaccgacgggcattaagcgctggaataccaccagtaatggactggaaacgctgatggcctccagcaacaacactacgctgtgtatcgatgaactcggcagttttgcggggaaggccttttcgcacgtactttatgacacggtgtccgggcagtccaagacgcgcatgaacggggacagctttgataaagcagcggagtccacctggtcccagaacgtgctgtcaactggagagctcactatcgaagaacgtttaaggcaggataaagaaaacattctcgacgggcagatgcaccggtctctgtcgataccgatcacagcggaagattcccgtggagaggaggaaagtgctgaagctgcccgtcagcgcataggcgagctcaaaagaaatttgctgtctcagtatggaagtgtgggtcttgattttgcttattgtctaacgggtttaacggatgagagtggtaatgctttaggctggcaggatactgcaacatatatgagaaacgcatatcgttcactgtgcgatgaaatagctgagcgcctgcgtgaaacccagattgagctaagtgaagttgaaaaacgtgctagtgaacgattcggcgttttgtacctcgccggttggctggcggtggcgtgggaaattctcccctggagtaacgatgatgtttcagatgtggtctgtacggcatttacccggtggctgaataattaccgtcatgatgccaaccgcaaggcaaacatcctttccgaggtccagaactacctgggattacatggggcgacattctatgatgcgagaataccctacccgggtgttaaaaaggcagatactggcggatactgcttaacggacggttgttacctcattttgcctagagcatttgaaaaactaggggaaaagtggggattgaatacaaaaaaattggcgcaactcatcgattctgagggatatctcgtacgccctgaaggtgacaggttgacgatgcgaaagaccattaacaaggtcaacattaccggctattgtataagcagtaagtttactaaagcggaattctga

SEQ ID NO: 115908 - DNA, 855 bp, Enterobacter cloacae
atgaccctggctgaactctgtcatatataccttcagcataccagagggtataagaaatccagccatacggataagtctaagatctcgaattatattgtgccactgttaggtgacacagagattacagatattacgcggctacagattcaaagctatattaacggcctgacacatcttaagtgttcaacccgtaatagacatcttaatttgatcaaggcgatatattcattctctgtggagtttggctacatgaatatatctcctgtagcaggaatgcggacttataaagagcctgcatccttacgcaaaacgcttgaaccagaggagttttcctcattaattcgggtgcttaaagaggaagtagtggctgagccacgcgatacgctgagtcttattatgcttctggcattcaccggaatgcgtctgggtgaagcacgggctggtctgattgaagatataaactttaatcataatactctctttttaagagacagtaaatccggtgattccaggctggtgccactttgtcgtgaagcaaaggagattttacgtatgcagcagaataaatatggggcaacaggtttgatttttcgctcaatcaatggagggatggtcagtgaaccgcgaaggttaatggcaaaactctgtgaaaaggctggcattcgtaagtgcctcttgcatgagctcagatatacagcaggcagtgctatgttggcagcgaccaataatatatatgcagtcaaagttttccttggtcatcggacggtacgcaccacggaaaagtatgtttcctttttccgtggtaaacaacatgaagatgttgaaaaagcaatggccctgatgctgaaagattga

SEQ ID NO: 115909 - DNA, 1230 bp, Enterobacter cloacae
atgtttaaaaaaatcaccgcaaatgacctgattaataaaatggagcaggaccctgatatcgttagtattaaaaaaatcaaactacaggattttttgaagatgatgtatgcatgtaaaatgccgggtggttatgctactgctgacaagggacattcagtacttgatattttaacaaaggatggcgcgttgaacaccgtggcattgatgttgaattctctcagcaaccgcaaagaaggaaatacagggtatttttatcgtaattttccctgtaattatataagcatttatagttccagtatcgaacccatagttgcttcacatgggaaatatattttcgatctcgaagttatagttaagaaactcatatcagaacttaatggagaagagtttctgattcaactgcatgcaaacgtgttagctcagggcaacgtattttcctttttcccggaaaaggaaaaagatgcatctgaacatgtgcttaatttaaattacatcaaaatggtaagtgagcgatttttggaaggcttgggtatttttgatgaaaagctgaatacaggaaatggcattcatattatcgatgtactttcacaccttctggggcttacgactgaatgtcagcagaacagaggggatacagagatgtgtaagtccctaaagcaaaagaataaggtgcatctctttgagcgaaaagtcgctttcgacacaatgttcacatttgttctgctgagtaaagtgctggaggcgataaagcgtgcaaacgtacttcagcccgtggacgctaaggtaacgatgcccggcagtccacttcaggtactcattgatgaaaattttacaaaagattcgttctttatcattaaagagcagcgaaagttattaatgaaggtagtgtggtactgttcattgttgcgcctacatgataagcaggaaagcattctggatgagaataatcgctatttgtcacccgatgtcattaatcatatttatcgcaatgtatcctggctggactcgaactcaacccgaaccgcgcagtatttctggacattaacaaaggatgcgatggacggaaaatcacgcagccatcttcacagaatttcggctgagcggtattaccagccacctgttccactgattgagctcagtacaagagcggggatcaaaaaattcatgggcgaacattttgaccccgataatatcctctggagagcatctaaacctaaaaaggccgaatag

SEQ ID NO: 115910 - DNA, 375 bp, Enterobacter cloacae
atgcacattatacagtctccggcagatgctttctgcctgcctgtgtcaccggttcagcaactgcagctggttaacgaactcaccgaatgcactgatggcagtcttacggcggcagcaggcttgtgggaggaaacccggacccagcttttatatctgcttcccggcgaggagaagcacctttctgagcaactgaccacctatctgcatcatctggcctgcaataccgaatacgtcatccgtctggatgattcgttatttcttgccctgaccattctcagtgattcaggacagggcttttatctgctgctcccctcctcatcaacctttgccggagccgctgaacttatcgctctggctcaaccgtcaggatattaa

SEQ ID NO: 115911 - DNA, 438 bp, Enterobacter cloacae
atgaaaaagaccaaacccgcaccagtcaccaccgctgaaactgaaaaagatctctgcattcttatcggcgaggccgagaaaattaatccgcactccaccggcctgttgtactgggaaatgactgacaatctggacggggaacgggggctgcgcattaccaccaacgacagcggcggtttgttttcccgggaatggattgccctgagcgctatatccggggttctgaaaacgtatgcagccggtgatttcacctccacggttctgcgcccgttgtataccagcgccagccgcaataatgcgggtttccttgccgccattcttcgcagccctgatatctgcctcaccgaagagggttccggcggggcgttcagtcatcgctgttatcccgactgggaaaagcgactggaaaaactgctgaccttctccccttctgcctga

SEQ ID NO: 115912 - DNA, 432 bp, Enterobacter cloacae
gtgccccccagctcacccacgctgcatcagcccacacttgaccttcccctcagtgatgagtttatcgtgctgataaccacatacctcgcggcactgcctgacacctttcagggtgtcgtgctgaactttcgcgacccaacgtacagctctgaaaacggtggctggcatccggtagaaattcgcctcatccgcagcgagcagcctgaaatatggcaacttgattacctcaccgactttagctggcagggccgtgtctggcccgaactggcaaaggaattcgatatcagctggtcgcagcgctatgcctggcacttccttatcggagagctgccgctaaaccatgagttgagcgagttctggacgctctggcaggataattttgtggcgtactgcgcgatggatgtcttcaccatcaccgtttccccggactaa

SEQ ID NO: 115913 - DNA, 492 bp, Enterobacter cloacae
atgctgttcacgctcatttcccggctggcgatgtaccggcctctgttcagtctggcggaaagcttcaccgacaatgttatccgtgacacggtggatgaaccggcaagaggcggtattgtctggtgcgaactggcaggcggctatgtcacccacagcggtatctacaccggtaataaccggattgtgcatttgtccggtgatggtgaagtgctttgcagcgaccgcaaaggatttatggccagactgaatggcctgaaccctgccatgtcggtctataccgattgtcagggacggttgcccgtgggaaatatcgctgcagccggtcgggcactacgggcgctgggctccggacgtcattatcatctgctgaaggagaactgccaccgtttcacagcggagtgcctgaccggaagaccggataatgccgtggtcctgcatcgccagcttaaacgactgcaacgcgggaatacctggcgcgtatgggaggactga

SEQ ID NO: 115914 - DNA, 219 bp, Enterobacter cloacae
atggcccgcgctgaaaaacttgctgaacgcctctgccactgcgtcattttgctctgtcaggggaagacgttgtcagttcgtgtgctgacacagctattcggaatttcaccccgcacggcccgccgtgaccttgcccgcatgggctgcatcatggagcccgcctcacccggtcgctggcgactctcagcaccacttcgacgcgcctttatccatcgctga

SEQ ID NO: 115915 - DNA, 327 bp, Enterobacter cloacae
atgaacaagatttttactgcactgtttatttctctcatcccgcttgtcagcgctcatgccggactggttcaggttgaaaaccgggtgagctgttatctggcactggacggcaatgaagggcttatgaagtccagtggaagtgacatcgcctttaccaaaagctggctgcacaacgagctggcccgccacggcgttgaccaggaatccattaatgaaaactctgacgctctggaaaatgagcttccccgggcttaccagaaggcagctttcgccgataaatgcgtcagctattacagctcctccaccaaccgcaaaggcgatgaatag

SEQ ID NO: 115916 - DNA, 393 bp, Enterobacter cloacae
atgaaaaacatgattctcaccgcatttattctggctgcttctgcttcagcatccgccgctcaaatctcactggaaacagcgggccgttgctatgaggccacccgtcagtcaacacaaatggccatgctgctggaccctgatgcaaaggaatacaaaaatataggcgacaataacaaggagctgtttggcacgctttctggcggcgtgggcgaaaaggactcgaagaaaatacgcgatgcgtggaaagccattctggataatgcgggcatggaaggaaaaatggcgaaatcagacgggtatcgtgcaatgaatatgtatccgcacgatgtcattatgcaggaagccaacaagtgtgtccggctggcgattaagaatggtatcgtcaaactgtga

SEQ ID NO: 115917 - DNA, 450 bp, Enterobacter cloacae
atgaataatgaaacaacctcagacgacgataatgatgcggaaaacgcttttgaagcgctcgcagtggatttactcagcgggttgctgggggcgcatgacaatgagcaaaatgccgatctgaaagactggctggacagtcctttccccgttcagccagaagtattgctccggcatgcccaatttatctgtgagcattttcaggcaggggatgacagccatttgctgatgcacgggattgatgagcaacttgatgcgatgtcttattcaaatatcgacagacaaaagccaaccagatttggtgctgtcagagcggtgacgacaggacgcgatgtggcaaaggtcaattctttgctgaaagttattattacctggtacgagtgcgaaataatccggctaaaggtgaagtatggcgaaatcacgccaccggaaaaaaataaaccgcaccggtaa

SEQ ID NO: 115918 - DNA, 912 bp, Enterobacter cloacae
atggatcgacacgacaaacttggataccgactaggattgatactgacgcgcctcaacaatggcgagtcactgaccgtgagtggtcttgctgacgaatttaacgtttgcgaaaaaacgatacggcgagatctgaccgagcgacttgcttatctgaacctgcttcgacagggcaaacagtaccgactgcctaaaggtattctggggcaacgcagcaacacggatttgcgtcgttttacccgcattctcggtatcgaagggttgttcccccgctgggaagatcgtctgctgaatgtgctattgggtgatgccgaaaacaatcccttcctgatcaagcaacgcccttatgagaattgcggtgctttcatgtctaccctgaatgccatttccggggcgattcaggcatccctgaaaattgcgtttacctataaagacaagatgttttctgccactgaaccttatcgtgtcgtgaatgaccgagggctctggtatctagccgcccggcacgaaggaatgttgaagagttttgcagtttccacgatgacccatgtgcaggtcagcaatatgcgattcagtcttgatcccgttgttagtcagcaagtggaacttgcggaaagcatctggtatggcgatgaactcaccgaagtgctgatcgctgtctcagcccgtgtggcgtcctatttctctcgccgcaacctttatccaggtcaggaaattatccatacaacaccaaccggtgatttgctcattatttcccgtgtggtgcatccccgggagattattcctctaatcaaatactggttgcctgaggtggaagttattaagccagcgtacatccgcaatcagattattgacgacatgcgcagtgcgctcacccgatatgatgaaatgaatggagattcttcagatgaataa

SEQ ID NO: 115919 - DNA, 1356 bp, Enterobacter cloacae
atgaaaaataaatctaatttcagaattcgcgaactaacggaaaaaaagcaacgtgtgatgactgagactatgaaggccgttgctatgcccaacatcagcgaatcattacgttctagtctgacatcgcatagtgcaatgaccgaggctatgaaggctgttgctatgcccaacatcagcgaatcattgagttctagtctgacatcgtatagtgcgataaccgaagccatgaaggctgtagctatgcccagtatcagcgaatcactgagttctgctctaacatcacatagtgcgatcaccgaagcgatgaaggctattgctattccgagtataaatgaatcactacgcgctaatatggcacagcacagtgcgataactgaggccatgaaagcggttgctatgcccagtatcaacgaatcccttcgttatgcacttgagttacaacgaaatacgatttcagatgcaatgagtgctgttgctataccaaacatcagtaccatgctaagttcagcattagaatcacagaatgtgaatataactgatgtgttaaaaataaggaaaagtacatcatttttagatggtaacttatttagcactatcgtcgattctggtcttggaaaaatggctaaagccattgctgacacatcaaattcgtcaaacaaccatagtttgttaagttggaaacttaactctaccatggaagaaatggctagaaaagtcgtaactttctcaagctacaatccaccaaacaagacgcttatagataattctttcctaacagccgcattagcttggagtaattcacctgtaggcaaggaaatggcgagcattattaatattcagaatgtggatgattctgttattggtgatgcgttagaattaagcgaggttgttacctcccattcttcgagaataagtaataaaaaaactatctttgaacaattccatgcgctccctccatttattcaacaaataatcacatggattctttgtgaagttttactaagtatcgtagctgatgctggcaaggaatatatcttgattgcaattaataaaacagaaagctatgtgtcctctcttttaaatgagcatcctatcacccaaaaagagataatatcatccaacccagatattaactggaaagaactaaataagtttcgactaatcaccgctgacaacgtaaatatgaggactaaaccatcgatgagcgccgatgtgattgagactttaaataaaaatacagcaattgcagtaattgactctacgaatagacaatggttgtatattcaagtcatatttcatggtgaaaaaacgttcggatgggtgaatagaagttataccaagaggttaggtctatag

SEQ ID NO: 115920 - DNA, 321 bp, Enterobacter cloacae
atgcacaaccagcatgatgtgttcatagacgctatacataccaaaaagaaactaagaatacgattctactctgaagacgatgggcgttacattgaaagagtatgtgcaccaatggatcacgctgctggaactagaatcaaagatgggatcccacgatattgggtttgggattttgagagcgataaaactaatcataccctccctttaagggaagaacgtatcgagtacatgattgatacaggcgaccattttgaacctagttcctttgtttcatggcgtccagcatgggtaattgatagggattggggccagtacagctga

SEQ ID NO: 115921 - DNA, 2397 bp, Enterobacter cloacae
atgttcagtcaggttgacatcgatagtttcggtagttttgcgggcctcagttggagaaagagccttaaggatgcaggtaacaacgtccagaatttcaagaggctcaacatcctctacggacggaactactctggtaaaactacactctcgcggattttccgcgctttggaaacggggcgcattccacataactacgtggatccaaatttcactattcgtggtgacaaaggtgatgtgacacaggtaggccttgccggtcatggctatgatgttcgggtctacaatcgggactttgtgagcgataacttaagctttttggtcaatcaaaccgacggagagatcaagacgtttgctatcgttggtgaaaagaataaagagatcgaagatgccattatcgcaatccaaactaagctaggcagtgttgagtcgaaggcaggcctccgacatgaacttgaagctaaaaagaaagaacgagatcgaacgaaaggcaatcataaaactgcgtctgatgctctggaaggcaaacttcgttctcatgccaacagtaagattaagcagaaccgcatctacggccctgctgtttacaatatagacagcatcaaaagagacattgactcagtcaaaaaacctagcttcataccgctgacaaccgaagaacaagcatccaaggtcaacctattgaagcaagaagccttacctgatattgctgataccgtatcgataagcctcaacattgagtcaataaaaaaggtggctgaagaactcctttcaagatcgatcaagccaactacggcgattcaggaactgttgaatgaggcggctcttcaaacgtgggtgaagcaaggcatacctctacataaagataagcgggacacttgcgccttctgtcgtcagaaccttcctcatgacatctggcaggtattagactctcacttcagtaaggaatcctcggatctggagtcgtgtatcgattcatgcctgacttccatcgccagcgaaatccaagccattcctaacttcttgactttgactggtgataagttctatgcagaagaaaaaatcttatttgaagccagcaagagagaacttgctgaatatctgaaaagctacatgcaggatatcaaaactctgaaggctgcattggataagagaaagaacaccatttttcagcaggttgccatacctgtctacattcacgattcgaatgcaattcagcgatgcgtaggcgacatcaataatctgatcagtagaaacaacagccgtacaagttcactagaaaaagataaaaatactgctcgcgaatctcttcgacttaccgatgtggcttcctttatcggagacattacctacgatactgagttgacccgtattgccagtctcaaaacagatgctgacactgccaacactgcatttaccgaggcagaagtcgaaattatcaaacaagaagccgaagtgacccgcctacagggccaacagaaggatgaacgcaagggcgcgaagcgagtaaatgacctgctcagtcacttctttggtcacgatggcatcaaacttgaagccaaagacaatgttgagcagacttcggttaagtttgaagtcacaagagatggtgaatcagcctacaacttgagcgaaggcgaatgcagtctgattgctttctgctacttcatagccaagctggaagagccagacagcaaaggtaaggatctgatcatttatatagatgacccaatttccagcctggacgggaatcacatcttcttcatgttcagcttgattgaaagcctgattgcgaaacccatcaagaatgcagatggaacaaactgctatcgctacaagcagctttttatatccacccacaacctagatttcttgaagtatctaaagaaaatatcacttccgaatgagaagaatcacggcggatgccaacatttcatcgtggagagaaacggaggggccagtcagatttccctgatgccttcgtatctgcgagactacatcacagaattcaactacctgtttcatcagatctacaagtgccgtaatcaaggtggagcgaatgaatctcatgaaccattttatggatttggtaacaacctccgtaagttccttgaggcatttttattctttaagttcccccaccaagatgataagaacgatgcctttgaacggatcaagaaattctttggcgaagaggatccgactgcgatagctcttgtgaatagacttaacaacgagttttcacatctcgaatcaatccctgatcgcggattcaaacctgtggagattccagaaatttccaaggtggcaaactacgtgttggacaagatttatgcggcggatccgcatcaatacaactccctgttaaaaagtattggcgaaccaccaagggcactatag

SEQ ID NO: 115922 - DNA, 288 bp, Enterobacter cloacae
atgttaaaaattaccggtttagataaactacaaaaagagttgaaagtcgcccagctagctttgggtgagttggaaggaaatcttggcactgtgcactttgacccgctagacccagcaagtattgaaaatgcaattcaaaaaataagtcaaataattgacgaaagagtttctcaatattcatccaattcaatcattggtccaatggccgagcaaatgaagcaagcatatcgtgaacaattggtccaaaaagctgcagaattcagactaaacaataacgaggataattaa

SEQ ID NO: 115923 - DNA, 894 bp, Enterobacter cloacae
atgtctcaggatatatttgttgaaattaataatgtagtgctggatttgcaggcttcacagtcacaaacctacgagcgctatttaaaaaagcttgctcaacttctgaaacatgctgatctcgagccttataataatgagttggttgcaaaccttaacttaaatagttttcttgaaaaaagtgagcaatctgcgggttcaatggttggaagtgcaactctcgactggccagacgatcccagagaagaactgggtttaacactacttttaatctggaaattaggcgcagacccaagctatgccgtccacttcagtcttaatttcttttactctggcaacaaaatcatcagcaatatacatgcacttaccggtcaacttatcattccctttattcgggactataaaagttacattctatcgaaaggaatcccccaaaccatgcttacgccccctctctcaaagaaagtgttcattgttcacgggcatgatgagggttcacgtgaaaaagttgctcgttttttagaacgcattggcctggaagcaatcatattacatgaacaggccaatcggggacgtactgtaattgagaaagttattgaatacggtaatgtaggatttgcagtcgttctacttacccctgatgatgaagggtgtgtaaaaggcggtacgcttgaacccagagcacgccaaaatgtacttctagagttaggtttttttattggtcaccttggacgagataaagtctgcgctcttaaaagaggagcagtcgaaatccccagtgattttgctggtgttgtctgggaacacatggatgataataatggttggaagcaatcactttcccgcgaactcgaggctgcaggctatacaatcgattggaacaaagtgatgcgttaa

SEQ ID NO: 115924 - DNA, 1107 bp, Enterobacter cloacae
atggcaagaaatcgagatgactttaataagcggacgaggaatgatttggctctacgtgccagttatctctgttcgttgtgtaaatgctcaacggttggacctagtgatgaagggaaaaatgccgtcactatgactggcgttgctgctcatatttgtgctgcggctcccggcaaaggttcacggcgttatgatctaaacatgtctcctgaagaacgctctcatatagacaatggaatatggctctgtgtgtcgtgtagtgtcctgattgaccgagatgaaaaacgcttcactgtagaaaaactacatcaaatcaagtatgagcatgaaagctctcggcgaattggcattttagaggattgtgacgaaaacaacattgtcgccattggtcctgacataattgcgttgggccacataattcgttcagctcctgaaggattacgaattcgactttctcattttgtaagcggttccgtacgagatctttgggctttacagcagaactttagcagatggtctccggaaagacgttacgtgctgtgcaacgaacttggctttggtggattactcaaccaacctcctgtgattgaacgagtcaatagctcctacgaaattcaattagcacttcaaaaacaagttatacgacaggatgcccgagcaggaatatcaacaatgtgcccgaacacgttgaaacgtatttccggaattgaagcttttatccagatttttgaaaatattctcggtacggcacaaggaacctggttcactaatcttagcctcggtagtgatatgtctgacctttactggcgttatagaggttctccatggttcaaaagtctggctatgatggagatgattcgcatgtcttcaatacctcgattgaataaaagccagcaaactccaacaacaccatttttgatcgtcaatcgagttaacaatgtggaaataccatcatttgaattggtagatcagaagcttgagatcttagttgacttcgacctcgagggcatagggcaatggaaacatacactgtcagtttttatctcgacacctgagcaacttaccgaagggcgcgagaaagcgcgacaaattcatcatgaattgttttaa

SEQ ID NO: 115925 - DNA, 1785 bp, Enterobacter cloacae
atgaggtttttccagagcttacaaaatgatggtatctctgctccggcgcagatccgtttgctaaacaacacctttctgcggctggtattcagctttagtgcggtaccctttgttggtattcctttcgccatctggatttatatgcttggggatgaactcggcccgacgattatctggataattatttatctgctatgtgccgtggcgatacgaatattgcaccgacgctatcagcgtgaagcgaaagaaaacggtgaaagggacgttctgcgacgctggcttccgcgtattaataatattgcctttattcacgggctgggaatttcatcactctatttaattacgccacagacgcagaattttgactttttcctgttacttaatatcagcattgccgccatcgtcgccgccaatgcgacgcatctgacgcctgtcatcagtacctttacgcgttttttcttcgcctcctggggggtgctgaacctcggtattatctggcggctggatgagttgatgttcatcgtgctcatgctgaatctgctttacggcttcgcgatttaccgccatgcgttaacttcccatgcgttctttattcagcaagcgctgcttgaggaaaaaagctcacgccttgcggaacagtttcgtcaggccaaagaggacgcggagcaggcattgctggataaaaatcagtttctgaccaccgccagtcacgatctgcgccagcccgtacacgcaatgggctttctgatcgaagccatcctccaccgaaaccgggacgacagcctgacgccgcaactccttgaccttcagcagagcgttcgctcggtgcatttaatgctcaattctctgctcgatctgagcaaaatagaatccgggaatgtcctctctgccccgaccaaagtggatatcggtgctctgctcgactcggtcatcacgctgtttcgtgaagaggccaacagccgcgcgcttaggctgtgcatccggcggcctaaacgccgtatcgacgtgatgggcgatccactgctggtgcgacagtccctgattaacctgattcaaaacgcccttcgctacacgctccagggcggggtgctggtcgccatccgaccgcgcggtgacgagtgtatggtggaggtgtgggacacgggagtcggtatcgccgatgaagagaagggcaaaatcttctcaccttactaccgccccgagctggcatggaagatcgacagcgccggacacgggctggggctggccgtcgttgcccgttgtgccaagctcatgaaggtaaaatacgggatgcaatccattgaaggtaaaggctcacgcttctggatgcgctttatccaatatgctggcgaagatagcgtgctggacaccccgcccgccgctgacaacaccgccacgccggtacgctatgcgccgctgcacggttcctgcctggtcgtcgatgacgacccgctggtgacgtctgcctgggagagcctgatgagcgtctggggaatcgacgtacgctgtgcggcctccgctgaagaagcgtttgccatcatcgacgacggctttacgccgttcgccgtgctgtgcgaccagcgcctgcgatcgggcgaaagcggcttcgacatcctgaaagcgctttttgaccgtctgccggatatgagcggcgcgatagtcagcggcgaatttaattcaccggttctgctggaggcggagcaggagggttacctggtgcttcgcaagcctcttgagccggctaaactgcatgcgctgctgacgcagtggtcggggtgtcattaa

SEQ ID NO: 115926 - DNA, 633 bp, Enterobacter cloacae
ttgggacagaattatgcgttagtcgttgatgaccatccattggtagcaagcggcatcgccaattttctgattacacattgccattttaagcaggcgtgtgtggtgacgaatgaggatgattgctaccgccaaattagggatcatggcccgccacgtttgctggtaatcgatttttggctctcttccggaacggccctgaaattactcaaagaagtaaagcaactttacccacaggtacgactcctggtggtcagcggggatgacaataatgatatctggcgcaaagttcatgccgccgggggacacggttttgtattgaaaagcgagccacctgagatgttctcgcgggccgttttcgcactcactgataatcagacctggtttcctgagggaaacgaaatttccgttaagacgaataatgagaagttaagtaaatttaacttaacgccgcgacaaatagacgtgttaaatatgattatgcgtggcctgccaaataaacgcatcgccgcccagctttcaatttctgagcccacggtcaaagaacacatcagcaatatattgaaaaagataggcgttaacagccgggtcgaagccatcacgcttctgcatggcaagcaggaaccgtcggaatga

SEQ ID NO: 115927 - DNA, 315 bp, Enterobacter cloacae
atgaaaaaaccactaatcgttttaaccgttacgttgatgctagccggttgttccacgttgaaaaccgatcaggctattccactcctacaggcggagaccgctaaaatgctgggactgggctcatcggatgaaataaccgtatccaacgttaatggcgcccagccggacgcactgggaggacaaaaactctcttatcgcgccacgacagaaaaagggcgtattttcgattgttcatcgatgatgatgccgggaattttaggatccgcaccgacgctgagcgcgccaacctgtacaccagttgtcacacataaataa

SEQ ID NO: 115928 - DNA, 3018 bp, Enterobacter cloacae
gtgaataactctacatcgcattctttagcggttaagacgccgctttccagactttacctcgctctattttccgcgccgctgttactgtttttacctgccgatgtcgcgcgtgcagccgatgccttttttgatggcgagtcgcgtattaccgaaacgctgggttacaccggagatgtttatgttggacgtaaccaacgcggaaacctgctgatcgataatggcaaaatcaccgcctataacatcaatatcggtcggctgttcgacggcaaaatttatgaaagcgtggtcacggtccgtgggccagacgctgagcttaacgcggtgaacgatcggtacgtcctgcgcggcgacctgaatcttggcctcggcaccctgcgagtcgaagagggcgcgctggcgagcgcgaaggagatcgttgtcggcaccacccgcggctacgacagccaccttatcgctacgggtgccggctctcgtgtgaccagtaattttcttagcgtaggcaccgatctgggcgcacgctccacgcttgcgattgaagacggcgcggcgctcagcaccgcttacgatgcgcgcatcggcaacggtaccgggccgggtgaaaccgacacgctgagcccgaaagccaccgtcacggggagcggctcacagtggaacgttggccgtacgttgacgctatatggcgacctggacgtgctgaacggcggggtggttaacgttggcggcgtgcaggtggcgggcgtctccggcgcagggaaaaccgccgaactggttattgcgggcaaggactcgcgctttaccagcggcagcagcgtgagcgtgggcgattatggcaatggcgtgctgtctgtgattgacggcggttcattttccgctggcagcaatgcgctgatcgtggggacatcgggttccggctcgaaccggggtgcgctcatcatcggcagccgcggcaatatggacaccggcacgggtttaactgagccaacgcttggcacggcgggcggcgcaggtaccctcgatgcgaagacggcaatcagccttcgtggcggactgttcggcagctatgtctacttcaaccataccgacggaaattacctcttcagcaacacgatgagcggtgaaggtgatgtgatcaacacctccgggcagacgacgctgaacggcgaactttccgcactcaaggcgaacgtaaccgcgcggggcggtaaagtcatcattgccagcaatattaatacccagccagaagacgatatctttgacgtccagacccttagcgcggagaacggcggcacgttgatcctcaacgcgacggcgggttcagacgtcagcaacggggtgggttatagcagcgccgcgtcaatcaagtccggcggcacgctgggcggcaacgggacgctgggtcagaccgagatcctgtccggcggacatatctcgcccggcgacggcaatatcggtacgttgacgctgaaacgctatctgaactttatcggcgaatccttctatgacgtcgatatcgcaggagatggccgcagcgaccagctactggtatcgggcaaaaccaccatcagcaatcaggctaaggtacaggtcaccgcgctggatccgcaaaccagctataaaacgggccaaagctaccgcattttgacctccgacgggggaatcgacggtgagttcgccggagcgatctccaaatccgcattcctcgacgtggcgcttaagcaaagcaccaacgccgtcgatctgaccatcgcgcagaaagagaccagtggcgagaatcctggaggtgaaaaccccggaggcgaaaatcctggcggtgagaatcctggtggtgaaaaccccggaggtgaaaacccgggcggtgagaatcctggcggtgaaaacccgggcagcggcaagccgggcattttccagaccgtggcccaaagcagcaaccagtggaataccgctggcgcgctctccacgctgacgcaaagcggcccgtcgctggcgctgtataactcgctgcttctgctaagcgcaccggaagcgcgcgaggcgttcaaccagctttctggtgaagtttatccgtcaatgcagtccaacctgatcgctggcagcacgcaggtgtttaacgtgttaaaccagcggatgcagcgcgcgtttgataacgacagcctgccgataccaccgttagccatgtcgctggtgcagcagccggagccgcaaaacaatggcgtctggggccagaccttcagctcctggagccgaaacagcggcgacggtaacgtgggcaagctggacggcaacaccaccggcttcctgctgggggcagatcgcaaactggcggaccataacgtgcgtgtcggcggctacttcggctacagccggggtgattatgacgtcgacagccgtcgctcctcaacggataccgacaactatcaccttggtctgtatgcggcgggtcaacaggatgcgttctcccttcgcggcgcgctgggttacacctggcacaagatcgaaggcgagcgcaatgttgatttcagcggcttctcggatcggctgaagtcagattacgacgcgaactccctgctggcgttcaccgaagcgggctaccgtttcggccagccagacaggaatattgagccgttcgtcaatttatcgtacatccggctgcataccgacagcttcagggaagacggcggtgccgctgcgctgagcgtccgtaacgaaacgatgaacaccttctatacgacactcgggttgcgcggtgtgaccgagttgccgaagcacgttaacctctacggttcgttgggctggcagcacgcctatggcgataagaatacctcttcgcgcatggcgtttgcgggcagcgacgcgttcattactcagggacaggccgtggatgaggatgtgatggtcggtgatatcggcgtgagcgtaaagctgtcgcgtgctgcgacgctggatgtgggttaccagggacaatatggtgcggatacccgcgtcaactctgttaacgccaatctgcgctggtcgttctga

SEQ ID NO: 115929 - DNA, 321 bp, Enterobacter cloacae
atgaagctgtttatgaacacgtcgcttacggctccggatatggcgtcgttattcaatctggtgcttgatatgaaaggcaggcgtctgacaaccaaatggctgcttaacttacggctgagtcgacacgaagcgataatgatcaggttgctgaaggcagggaggtcaatggaagagattgcagataagctggatatgtcggttaaaagcctctatcgcaagcgaacggtgctgtcggagcggttaggagcaggtaacttcaacgaggcgtgtttgtttatctttaaaaacaaactgctggacgcggttgggaacgatccctag

SEQ ID NO: 115930 - DNA, 2481 bp, Enterobacter cloacae
gtgttatgcaatggattcacgataaacaaatggcaaatagatatggaaagatcgcttagcttcactacgttattcttttatcgcaccacaatattattgctcctgcttttactctttcctgttctggttcaggctgatgaatccgtttatgagcatcagatacaacaggcacgtaacggtaattacgctctgtttcttgattacctacagcgctatgagcaacagcatgctttaacacccggacaggttgcggactggttacaggtagcctcctgggcaggacgcgatgatgaggttatccgggtctggcagcgttatggtatttatatgccgctgcccgctcgcgccatcgctgctgtcgcccagtccagaagaaaccaaaaagcctggccatccgccttatcgctgtggaaagaggcgctcagccttgcgccagataacgacgattaccgcatcggctatgttaagaccctggccgatgcccgcagagatcgcctcgcgctttcggaagcccggcggctggttaaggacaatccttctcccgcgcaccttgagacgctctcctatgtctggatgcgccagggaaaaaacggggaccggctgctggcggacatgcgtgcactgaacgccgctcccgggaataatgcccttcttcgcgagacgatcgatgcgttaacggaaaatcgggtaagcacgcctgcactctggctgtcgcaaagcgcggcgatgtctcccgcggagcgccgccgccttgagcgtaacgccgcggctgaaagggtacgcctggcggatgtgcctggcagaacggagaaagagcgcctgcggctggcacaaaacgcgttagatcgctatcacgccctgctttcccgctggcaaaacgaaccgcaggcggctgaagacgtcgtccttgcacgtatcgatcggcttggcgccctgtatgcgcagggtaattaccggcaggtcattagcgaatatgaggcgctgacggccgcacagcatccggtaccggactgggccatcggctgggtgatctcggcatatttgcaggagaaaaacaccgtcgccgccttctcgcttgtgcaacgctatccacactacgcctccgatccgcaggatgaggagcatgcgcttttctacgcctggctggatacggggcagtatcagaccgcccgccactacgttgagcgcgagacccgcagcgttccctggacccgctacgatttcggatccccgaccgctcagccgaacgatcggtggctcaccggacagtctctcaaacttaactatttgctggcgaccaacgccctgccggaggccgaaaagctgtcgtatcgtctggcgtcaacggcgccgggaaatcagggattacagattgattatgccgccctgcttcaggccagaggcctgccgcgcgcggccgagcaaaagcttaaacaagcagaggcgcttgaacccgcgaatctggagcttgaaaaacagcaggcttacgtcgcaatggaccttcaggagtggcgtcagatggatttactggctgatgacgtgattgctcgcgcccccgccgatcgcagcgcccgtcgcctggacaggctcagagcggtccaccacatgtctgagctgcgtctgaacgcgggtaaaggattgcactcagataaccccgtcagcggtagccacgacatgagctgggacgccacgctctatggcccgcccgtggcggataactggcggctgtttgccggcgcccgctatgcccaggggaatttcgacgaaggtaaaggcatcagccgccacctgttgggcggcgttgagtggcgcccacgtgacctcacgctcgaagccgagctctccagcaaccgctatcacggcacaaacaggccgggcgcacggctctcaacaacctacagcctgagtgataactggcaggtcagcggtaacctcgaacacttgtcacgtgcgacacccttacgggcattacgcaatgggatcagcgccaaccggggtgaaggtggggtgcgctggtatcaaaacgagcgacgtgaataccagttcaacgccgccgtcagccgcttctcggaccacaaccgccgtcaggaatacaccctctctgggaaagagcgtctctggcagaccccgaccctgacgctggatctcgaaccggggatcgccgccagtaaaaacagcctgcggaatacgctctattacaacccggcacgggatctgtccgtgacggctgccctgtccgttgaccatgagatgtaccgccactacgacaccctctggagccagcagttcgtggcaggagggggcagctactggcagaaaaatcagtccgcgggtgccgttaccctgctgggttacgggcaacgcatccagtggaacaacgttgtcgatactggcgtgatgctgaactgggataagcgcccttacgacggcaaacgcgagagcaatctctccgtcacgttagatgcgactttacgcttttaa

SEQ ID NO: 115931 - DNA, 1938 bp, Enterobacter cloacae
atgctgaacacacgtttttctgtaagcctgatcgtcatcggctggctctgcctcagcgcgagcctctgcgcgcagccgctctcctttatggcccctgaaaagaggccgcagctggaggccagcaaaccctggccggagaatcagtttctggtcctggcctaccacgacgttgaagatgatgccgccgatcagcgctacctctccgttcgcaccagcgcgttaaacgagcagataagctggcttttgcacaacggctatcacgccatcagcgtgcaggacattctggatgcgcatgaagggaaaaaagcgctgccgccgaaagccgttttgctcagctttgacgacggctacagcagcttttacacccgggtctggcctctgcttcaggcctggaacgttcctgcgctgtgggcgccggtgggcagttgggtggatacgccggcaaatcaaaaagttaacttcggcggtctgatgacgccccgcgatcgctttgccacctgggatatggttcgcgagctcagccagtccccgctgattgagattggctcgcatacctgggcctcgcattacggcattccggccaacccgcagggaagccgtgaacccgccatcgccagccgtttttatgataacgcgacggggcattacgaaaccgatgaacacttcaaccagcggatcgccgcagacgtacgcaaagtcaccgataaaatcacccaggtgacgggaaaagcgccgcgtgcctgggtgtggccctatggggctgccaacggtacgtcgctcgctatcgcccaaaaacagggctatcagttggcctttaccctggaggacgggctgggaaacgtgcgcgacctcggcaacatcccgcgcctgctgatcgccggaaatccgtcgataaaaacctttgccaacacggttagccgcgttcaggagtttgacccggtgcgcgtcatgcatgtcgatctcgattacgtctacgatcccgatccggcccagcagacgaaaaacatcaacaaactcgtccagcgggtctacgacatgaaaatcagccatgtgtttctccaggcgttttcggatccgcggggcgacggcaggatcgatgcgctctatttccccaaccgccggcttccggtccgggccgatctctttaattttgtcgcctggcagctacaaacccgcgcgggagtgaaagtcttcgcgtggatgccggttctctctttcgatctcagtccagccttgccgcgcgtgcagcgccgggatcgtcaaacgggagagttgaccgtggccgccgagccctatatcaggctctccccctggagtccgcaggttcgccagcaggtgacggagatctatgaagatctggcccgctatgccagcttcaatggcatcttatttcatgacgacgcggtgctgacggacgttgacgatgccggacaggacacgacccgacagaagagtcagcgacttatcggctttacccgcaccctgagccaggcggtgaaaaacatccgtggcccgcagatcaaaaccgcgcggaacatgttcgcgttgcccattctcgagccggaaagcgaggcatggtttgcgcaaaatctcgatgattttctggcggcctacgactggacggtgccgatggcaatgccgctgatggagtccgtcccggcagaagagagcaatgcctggctgacgcgtttagtcaaagccgtcgccgcacgccccggcgcgctgaataaaacgatttttgagctacaggccagggactgggcacagaaaccgcagcgtgccgtagccgatgaacgtctgatggagtggatgcgggtgctccagctgaatggcatcaaaaattacggttattaccccgacgacttcctcaacaaccaacctgatatttcacgtatcagacctgaattttcttcgtactggtatcctgacaatgactga

SEQ ID NO: 115932 - DNA, 1332 bp, Enterobacter cloacae
atgactgatcgcattatcgccttctctattttgtgtctggtattcgggttgccgttaggcgtagccgcgctatttaccggcgaactgattctggactttgtctttttctggccgctttttatgtccgtgctctgggtaaccggcggcctctatttctggtttcagcttgaacggcactggtcgtgggataacgcaacacccgcccccgccttagccggtgagccgttaatctcgattcttattccctgcttcaatgaggaacgcaacgcacgggagaccattagcgccgcgctgggtcagcggtactggaatgtggaagttatcgccatcaatgacggttcttctgataacacggcggaggtactgcaacagctggcgcgagagcaaccgcgcctgcgggtgattaatctcgcggagaaccaggggaaagccgtggcgctcaaggccggcgctgcggcggcccggggcgatttgctggtctgcattgacggcgacgccctgctcgaccgcgacaccgcggcgtatctggtggcaccgctgattcagtatccccacgttggggccgtcaccgggaatccgcgtattcgcacgcgctcaacgctgattggccgcattcaggtgggcgagttttcttccattattggccttatcaagcgaacgcagcggatctatggccgggtctttaccgtctccggcgtcatcgccgcctttcgccgacaggcgctggcggatgtcgggtactggagcccggacatgatcacagaggatatcgacataagctggaagcttcagcttcgccactgggatatctttttcgagccgcgggcactgtgctggatcctgatgccggagacgctaaaggggctgtggaaacagcgtctgcgctgggcgcaggggggggcagaggtgtttctggttaacctgcgcaagatggtccgctgggagcatcatcgcatgtggcccctgtttcttgagtacgcgctatcaacgctgtgggcgtttgcctatggggcaaccgtggtgttgttcattctcagccatattatccctcttcccgcgaacctggccgttgcgagcctgtttcccccggcgtttaccgggctgctgctgggcgtgatgtgcctgctgcaattcctcgtcagtttgtatatcgagcggcgctacgagcggaaagtggcaggctcgctgttctgggtaatctggttcccgatggtgtactggatgattggcctgtttaccaccctcgtggcatttccgaaagtcatgcttaaacgtaaacgcgcccgcgcgcgctggatcagtccggaccggggtaaagggagcattcaatga

SEQ ID NO: 115933 - DNA, 435 bp, Enterobacter cloacae
atgaacgagaatacgttaattttgactgaacatcggctggcaccgcgtcttttcgatgccgcattaacgctgatagcctggggaggattcctgtttttcctttacgccaggctgtggatgcagttaaccgaggagggcgatcaccgctggaacgtgattatcgcctcttttaatacggtgctggtctatctgctgattgcggcgttcaacggctggctgctgatcctgtggtatcagtacaatcgccgccgcgcgcatgtgaggcggcgtcatccggaaatgttgcgccatgacgagcttgcccaaagttttaacgtcacgccgcaaattatgtccgagatgagccagtacaacctgctgacggtttaccatgaccagattggccggatcattgatttgaagatcagcgagcagcaggaagaggaagagcagtaa

SEQ ID NO: 115934 - DNA, 1863 bp, Enterobacter cloacae
atgcgtaaaggaacgttaagcagtgacgcacccttcgggacgttattaggttatgcgccgggtggcgtggcgatttactcttcaaattacggcagtctcgatccgcgtcactacccggaagacgcggaattccgcagctatatcggcaacgaatacatgggccataaatggcagtgcgttgagtttgcgcgccgtttcctgtttctcaatcacgggtttgtttttaccgacgtcgggatggcgtgggagatcttctccctgcgttttttgcgccaggtggtaaacgacaatattttgccgctacaggcctttgctaatggctcaaaacgcgcgccgcaggccggtgcgctgctcatctggcaaaagggcggtgagtttcatgaaaccggccacgtcgccgtcattacccagctgctggatgacagagtgcgcattgccgagcagaacgttattcactccccgctgccgatggggcagcagtggacgcgcgagctgcgtctgagcgtggaggacggttgctatacgcttcatgacacgttcaacgataccgagatcctcggctggatgatccagacggaggagacggaacacagtattcctcagccggagatcgacggtgaactgctgaaaatcagcggcgcgcgattgaagaacaaccgtcagttcgacggaaaatggctcaatgaaaacgacgccctgcaacaggcgtacgttcgcgccaacggccacgttatcaacaacgatccctgccagtacttcaccattaccgaaagcgccgagcaggagctgatcaaagccaccaacgaactgcatctgatgtaccttcatgccaccgacaaggtgctgaaagacgacagcttactcgcgcttttcgacatcccgaaaattctctggccgcgtctgcgcctttcctggcagtggcgtcgtcaccatatgatcaccggtcgtatggatttctgcatggatgaacgcggcatcaaggtttacgagtacaacgcggattccgcctcctgccataccgagggcgggctcattcttgaagagtgggtgaaaaacggctatcgcggcaccggccacaatccggcggaaggcttgctggaggagctgaccggcgcatggaagcacagccacgcgcggccgttcgtccatatcatgcaggacaacgatatcgaagaggattaccacgcgctctttattcagcgctcgctgatccaggccgggtttgaaaccaaaatcctgcatggactgggggcgctgagctgggatgccgccgggcaactgattgatgatgaaggccgtcacgtcaactgcgtatggaaaacctgggcgtgggaaacggcgattgagcagatccgcgaggtgagcgaaaccgagtacgccgccgtgcctatccgcaccggtcacccgcaaggtgaagtgcgcctgattgacgtcctgctgcgcccggaagtgctggtctttgaaccgctgtggacggtgatcccaggtaacaaggcgatcctgccggtgctgtggcagctgttcccgaaccaccgttacctgctggataccgattttgaggtcaacgatctgctcaaacggaccggttatgccgttaaaccgatcgccggacgctgcgggagcaatatcgatctgatcggcgcccaggacgaactgctggaccagtccagcggcaagtttgttgaccgcaaaaatatctaccagcagctatggtgcctgccgaaagttgacggcagatacattcaggtctgcacttttaccgtgggcgggaactatggcggaacctgtctgcgcggggatgactcgctggtggtgaagaaagagagcgatattgaaccgctgattgtggtgaaagataaataa

SEQ ID NO: 115935 - DNA, 867 bp, Enterobacter cloacae
atgtcagataacacctatcagccaccgaaagtgtgggaatggaaacagaataacggcggcgcgttcgccaatatcaaccgtcccgtctcgggcgcgacgcacgagaaagagctacctgtgggcgcgcacccgctccagctgtactctctcggtacgccgaatggacagaaagttaccatcatgctggaagagctgctggcgctgggcgtgacgggcgcggaatacgacgcatggttaatccgcattggtgagggcgatcagttctccagcggttttgtcgacgtgaacccgaactcgaagatcccggccctgcgtgaccactccaccaccccgccgacgcgcgtctttgaatccggcaatatcctgctctacctggccgagaaatttggtcacttcctgccaaaagatccggcaggacgaacggaaaccctgaactggctgttctggttacagggcgcggccccgttcctcggcggcggttttggccacttctataactacgcaccggtgaagattgagtacgctatcgatcgcttcaccatggaagctaaacgcctgttcgacgtgctggacaaacagctggcgcgcggtcgttacgtagcgggtgaggaatataccattgcggatatggcagtctggccatggtttggctgcgtggcgctgggcagcgtgtataacgccgccgagttcctggatgccgggaagtacaccaacgtgcagcgctgggcaaaagatgtggcgaatcgtccggctgttaaacgcgggcgcattgttaaccgtaccaacggcgagctgaacgagcagttacatgagcgtcattcagcaagcgacttcgatacccagacggaagataaacgtcagggttga

SEQ ID NO: 115936 - DNA, 762 bp, Enterobacter cloacae
atgtcagaccagacgctaaaagcgacccgacagcagagtcttatcaccttgctgagtcaaagcgactggctgactaccgatgtgctggctgaaaagctctccgtcagcaaagagaccatccgccgggatctgaagtcgttgcagcagcaggggaagctgctgcgccagcacgggcgcgcgcgtctgattcatccggacagccgcgacagcggtgaaccctttggcgcacgcctgaaaagccattatgccgacaaagccgatattgcccgccacgcgctgggctggatcagcgaagggatgaccatcgccctcgacgccagctcaacctgctttcatctggcgcgccagttgccggacatcgacctcaccgtatttaccaatagtctgcctatctgccacgagatggcaaagcgcgagcggatcacgcttatctgctccggcggaacgcttgagcgtaagtatcgctgctatgttaatccggcgctggtgacgcagctaaaagggctggagatcgatctgttcatcttctcgtgtgaaggggtcgatgagcatggcgtcctttgggatccgtccgagcacaacgcgggctttaaggcgctgctgttaaaccgcgccagccagtcgctgctgctgatcgacaaaagtaaatttatgcgggcaagtgaagtgaaaattggtcagctgtcgcaggtgacacagattattcagagcgataaacgtcaggccgccagagacggcctgacacgagaggttacgcggtga

SEQ ID NO: 115937 - DNA, 1554 bp, Enterobacter cloacae
atgaagatgcttcgtaatttcaccatccgtttcgtcatgctgacgatactggggatcttttgtgtcatgtgggcaggcgtggggctttacagcacctggtctctgtctcgtgtttctgatggtaatgatgttgaccgccagctggtccggcaaatgacggtgctgagccagggcaacgatcagtatttccgtttcgtcacccgcctgagccgggcgatggaagtcaaagcggcgggcggcacgccggacctggctcctgctcagcaggcgctggataacatgagtaaaaagctggcagagatgaaagctatctctccgggcccgatggatgaaaaggtgtctgcgcaggtgatttccacctggcaggcgctgctcgatcgtggcgtgacgccgcagatggcgcaggcgaagcaggcgacgctcgaaggctatcgtcagcatgccaacaacgtcacgccgccgctaagccgtgcattcgggtcagcggctgagaactttaacaacaccgcggcgaaggcgctcgacagcacgcgcgtggtggtcgacggcctcaccagtatgacccggacggtgattatcaccgccacgatcgtgggtctgttgatcctgctgttcaccgaccgctacctggtggcgatactggtaaaaccgctggatcgtatccgtcagcagttccgccagattgcgcagggcgatctcagccagccgattgaatcctttggccgcaactgcgtggggcaactggtgccgctgctgagcgccatgcaggacagcctgcgggaagcggtcagcacgattcgttccggcagcgagaatatctggcgcggggcaacggagatctccagcgggaataacgatctctcttcgcgtaccgaagagcaggccgccgcgctggaagagaccgcggccagcatggagcagctaaccgcaacggtgaagctgaacgccgaaagcgcgcgccaggccagccagcttgcggatgtcgcctccagtacggccagccgcggcggctcgctggtggaagatgtggtcacaaccatgagcggcatttcggacagctcgaaaaaaatcgctgaaatcactaccgtcatcaacagcatcgccttccagaccaatattctggcgctgaacgccgcggtggaagcggcccgggccggggagcaggggcggggctttgcggtcgtggcgggtgaggtgcgtaatctggccagtcgcagcgcgaatgcggcaaaagagatcgaagggttgattgcagattccgttgcccgcgtggagcagggggcgcagctggtgaacgataccggcaccacgatggaagcgatcctgcgcgacgtgacggaagtgaccgtcattatgaagcagatcgccaccgcgtcagaggagcagagcaaaggtatttctcaggtcggcgttgccatcacgcagatggacggcgtgacccagcagaacgcctcgctggtggagcaggtttccgccgccgccgccgccgccgcacttgaacggcagaccgaagaactccagcgctcagtgcagaaattccgtctcaccgcgtaa

SEQ ID NO: 115938 - DNA, 1041 bp, Enterobacter cloacae
atgtcctggcacccttacactggccgatacgaaaacatgcagtaccgatactgcggcaaaagcggcctgcgcttaccggcactgtcgctaggcctgtggcacagcttcggtcacgttcagccgctcgattcccagcgcgcgctgctgcgtaaggccttcgatctcgggattacccattttgaccttgccaacaactacggccccccaccaggcagcgctgaagagaattttggccgtctgctgcgggaggattttgccgggtatcgtgacgagctgatcatctccaccaaagcgggctacgacatgtggccagggccgtatggttcgggcggttcacgtaaatacctgctcgccagcctcgaccagagcctgaaacgcatgggtgtggagtatgtggatattttctattctcaccgcgtagacgaaaacacgccgatggaagagaccgccgccgcgctggcgcacgcggtgcagagcggaaaagcgctgtacgtcggcatttcgtcctactccacggaacgcacggcggtaatggccgaattgctgcgcgagtggaagatcccgcttttgatccaccagccgtcttacaacctgcttaaccgctgggtcgacaagaccggcctgctggacgcgctggagaaaaacggaacgggctgtatcgcctttaccccgctggcgcagggcctgctcaccggaaaatacctgaacggtattccggacggttcacgtatgcaacgcgaagggaaaaaagtgcgcggcctgacggagaaaatgctgacggaagccaacctgagcagccttcgtttgctgaacgagatggcgcacgcgcgcgggcagacgatggcgcagatggcgctaagctggctgttgaaagatgagcgtgtaacctcagtgctgattggcgcgagccgcccggagcagctggaagagaacgttcaggcgctgaataacctgcgctttagcgaagatgaactgacgcggattgaccagcacgttgcggatggtgagctgaatttgtggcaggcgtcgtcggataaataa

SEQ ID NO: 115939 - DNA, 489 bp, Enterobacter cloacae
atggaacgcttctttgaaaacgcaatgtatgcctctcgctggctgctcgcacccgtctattttggtctctccctggcgctggtcgccctgacgatcaagttcttccaggagatatttcatgtcctgccaaacattttctccgtggcagaagccgatttgattctggttctgctgtcgctggtggatatgacgttggtggggggattactggtgatggtgatgttctccggttatgagaatttcgtctctcagcttgatatcgccgagcacaaagaaaagctcaactggctggggaaaatggatgcctcatcgctgaagaataaagtcgcggcgtcgattgtggcgatttcgtctatacacctgttacgcgtctttatggacgcgaaaaacgtcccggataataagctgatgtggtatgtgattatccacctgacgtttgtgctgtcggcgtttgtgatggggtatctggataagatcagtaagaaataa

SEQ ID NO: 115940 - DNA, 504 bp, Enterobacter cloacae
atgaacagcattttctttacggtcataacgttactattactgaccgctggcgtgcttttattgatgcaagagttaaataaaacgaaagcgtcaaaagacgtcagtgaaccgccgcagcctgaattgatgtcgaaagaggagggggaagatcatttctccgtattgatgaacgccgtgacgccggtctggtactggcgggtaaatcacgaatatatcgattttctccatgcgacaattaagcgaatgaaaatggctgaaattaatgatacgcccggcctgttcgacgcgcagcgccgttgtagcgaccttaattcggcggtttataaatattacgacaatatcaaaaaacgctgtctgaatggcgagaaggtgtcgtactccgatttagacgtattaaatctgcgccagtgttttcgcgagtttagcctggaagcctacccggaactggtcgcgctggtctggccggagtatgcgcgtccggatgtggatcccaacgaggtatag

SEQ ID NO: 115941 - DNA, 405 bp, Enterobacter cloacae
atgctgcccgacaatcttgtcccggcaaagtaccacattacgcctgtggaacagccttcgacggaagcagataaagaggcgaatttcactcaaggaaaaagaaaactctccgactatgaagccgacatattaattggtgtttcacgcaccggcaaatcccgtaatatggtgctggaagagcacgatcgccatttaaaagagcgtttatttcgcgccatcaagattgaagccttagttcatctactaaatgatttacaggccgaaggggaaatagatgcccagacgctaagtcaaataatgaccgagaaaacgcagcaaataaatgaggccggcaatgaaatttggcttaatttaattacgcgtgaaaaaaacaatcccattttttatgacctgggggaagattaa

SEQ ID NO: 115942 - DNA, 447 bp, Enterobacter cloacae
atgacctgggggaagattaacgtgaatgatgacagcggtaataacgtttatttgactttagatgataagaaaagcgatgaatttatcttaaagcagaatctcgacgccctgaaaaagataaaaaatgacgagatgacgcgaattacgcaggatttggtttcgattccggccacgctggtgcgcctgaaatggcagaatcgtcgggagatttacgccttgcaggccaaggaggagatttacggcgcggtgatgaacgccattattgaacagcgccctgagcttaaagagaagatcctcgggcgactggaggcgaactatcagtacctgctggcacgcgagacagccaccctgcgcctgacccgtaaactctcggaaggtcattaccgaacttcaaacgtgacctgtgtagcgcttgatgaagaggcgccgacggcgccttcagtgtga

SEQ ID NO: 115943 - DNA, 426 bp, Enterobacter cloacae
atggcaatgcgtcttaatgaaaatctggacgataacggtgaaatgcatgagatcaacgtgacgccgtttatcgacgtcatgctggttctgctgattatctttatggttgccgcaccgctggcgacggtggacgtgaaggtgaatctgcctgcgtcctccagccagccgcagccgcgtccggaaaagcctatttacctgtccgtgaaggccgataagtccatgttcctgggcaacgatccggtaacggatgcctcggttattccggcgctggaccagctgaccggcggcaagaaagacaccaccgtcttcttccgcgcggataaaaccgtcgattatgaaaccatgatgaaggtaatggacacgctgcatcaggcgggatacctgaagattggtctggtcggcgaagagaaagcggccgcgaagtaa

SEQ ID NO: 115944 - DNA, 729 bp, Enterobacter cloacae
gtgggtaataatttgatgcagacggatctctccgtttggggcatgtatcaacatgctgacatcgtagttaagattgtgatgatcggcctgattctggcgtccgtgatcacctgggctatcttcttcagcaagagcgccgaacttctttcacaaaaacgccgcctcaagcgtgagcagaagcagctggcggaagcccgctctctggatcaggcttctgatatcacctcatccttccatgcgaaaagcctgactaccctgttagtgaacgaagcgcagaacgagctggaactctccgcaggcagtgaagataacgaaggcattaaagagcgtaccggcttccgtctggagcgtcgcgttgcggccgtgggtcgtcatatgggccgcggtaacggctacctggcgactatcggcgccatctccccgttcgtcggcctgttcggtaccgtctggggcatcatgaacagctttatcggtatcgcccagacgcagaccactaaccttgcggtcgtcgcgccgggtatcgcagaagcgctgctggccacggctatcggtctggttgccgctatcccggcggttgttatctataacatcttcgcgcgcatgattggcagttacaaagccacactgggtgacgttgccgcgcaggttctgctgctgcaaagccgcgatctggacctgaacgccgccgttaaaccggtacatgcggcgtccaaactgcgcgtaggttga

SEQ ID NO: 115945 - DNA, 1188 bp, Enterobacter cloacae
atgactaaaaagcagcttgagaccacgctggtgcaggcaggacgcagtaagaaatacacgcagggctcggtcaacagcgtgatccagcgcgcctcctcgctggtgtttgataccgttgaagataaaaaaatcgctacgcgtaatcgcgcgaagggcgggctgttttacggtcgtcgtggcacgttaacccatttctcgttgcaggaagccatgtgtgaactggagggcggcgcgggctgcgcgctgttcccgtgcggcgcggcggcggtcgccaataccattctggcgtttgtggaacagggtgaccacgtcctgatgaccaataccgcctacgagccaagccaggacttctgcaccaaaatactcagcaagctcggcgtcaccaccagctggttcgatccgctgattggggccggtattgccgcgcttattcagcccaacacgcgcgttgtgttcctggaatctcccggctccatcaccatggaagtgcatgacgtcccggccatcgtgaaggcggtgcgcagcatagcgccggaagcgatcatcatgatcgacaacacctgggcggcaggtgtgctgtttaaagccctggaatttgacatcgatatctccattcaggcggcgaccaaatacctgattggccattccgacggcatgatcggtacggcggtatctaacgcccgctgctgggatcaattgcgtgaaaacgcctacctgatgggccagatggtggatgccgataccgcctacatgaccagccggggcatccgtacgctcggtgtgcgtttgcgtcagcatcacgaaagcagcctgcaaattgcacagtggctggcgctgcatccgcaggtggagcgcgttaaccatccggcgctgccgggcagcaagggccacgaatactggcaacgtgactttacgggcagcagcgggttgttctcatttgttcttaaaaagcgcctgaatgacgccgaactggcaagctatctggataactttaccctcttcagcatggcctattcatggggtgggtttgaatcgctgatcctgcccaaccagccggagcagattgcggccctgcgcccgggcggcgaggtggacttcgaggggaccttaatccgcctgcatatcgggctggaaaatgtggacgatttaattgcggatttatcggcaggatttgagcgcatcgtgtaa

SEQ ID NO: 115946 - DNA, 660 bp, Enterobacter cloacae
atggctgttattcaaaatatcatcacggcgctctggcaacacgattttgccgcgctggcggacccgcatgtcgtcgggattgtctatttcgtgatgttcgcgacgctgtttctggaaaatggattactgccagcctcatttttacccggtgacagcctgctcctgctcgcaggggcgttaatcggcaagggcgtgatggacttcgcaccgacaatggtgatcctcacctctgcggccagtctcggctgttggctgagctacctgcaagggcgctggcttggaaacactcgcgtggtgaaaggctggctggcgcagctgccgcataaatatcaccagcgcgcgacctgcatgtttgaccgtcacggcctgctggcgttacttgccgggcgttttctggcgtttgttcgtaccctgttgcctaccatggcgggtatttcaggcctctctaaccgccgcttccagttcttcaactggctgagcgccctgctctgggtaggcgtggtcaccacgctcggctacgcgctgaatatgatcccctttgttaagcgccatgaagaccaggtgatgaccttcctgatgatcctgccgattttcctgctggttgcagggctggtgggtaccattgcggtggtgattaagaaaaagtattgcagcgcataa

SEQ ID NO: 115947 - DNA, 900 bp, Enterobacter cloacae
atgaaccgtgatgccatctgccgccagctaacgtcgcagattaaaagactgatagataacggaaatgattcggctgagctgttgccggatatccgattgctgtacggtacccagcccgggacgcgcaccccggtgatgtatcagcccggcatcgtgtttctcttttctggccataagattggctatatcaatgagcgcgtgttccgttacgacaccaatgaatatctgcttctgacagtacctttacccttcgaatgtgaaactttcgcgacagaggaggtaccgctggccgggatccgcgtcaacgtcgacatcctccagttgcaggagctgctgatggagattggggaggacgaacttttccggccgtcaatggcggcaagcggtatcaactccgcgaccctgtcggaggaaattctctgcgcgattgaacgcctgttagacgtgatggaaaggccgctggatgcgcgtattctcggaaaacagattatccgcgaaattctttaccatgtgctgctgggaccgggcggcggggcgctgctggcgctggtaagccggcaaacgcacttcagcctgattagccgcgtgctgaagcgcatcgagagccagtacacggaaaacctcagcgttgaccagctggcggcggaagccaatatgagcgtctcggcgtttcaccataactttaaatctgtcaccagcacgtcaccgttgcagtacctcaaaacctaccgtctgcataaggcgcggatgctgatgatccacgatggcatgaaggccagcgccgcggcgatgcgggtcgggtatgaaagcgcgtcgcagtttagtcgggagtttaagcgctacttcggcgtcacgccgggggaagatgcgtcacgtataagaaccatgcagggagcctga

SEQ ID NO: 115948 - DNA, 1164 bp, Enterobacter cloacae
atgaacaactttaatcttcataccccaacccgcattctgtttggtaaagacgccatcgccgacctgcgcgcgcaaatccccgctgacgcccgcgtgctgatcacctacggtggcggcagcgtgaaaaaaaccggcgtgctggatcaggtttacagcgccctggacggactgaacgtgcgcgagttcggcggtatcgagcctaacccgtcttatgaaacgctgatgaacgcggtaaaaatcgcccgtgaggagcaaattaccttcctgctggcggtgggcggcggttccgtgctggacggcaccaaattcatcgcggcggcggcccattacgctgacgacatcgacccgtggcatattctggaaacgggcggcagcgacatcagcagtgcgatcccgatgggctccgtgctgacgctgccggccaccggatcagagtccaacaaaggcgcggtcatctcccgtaaaaccaccggtgacaagcaggcctttatgaacgaacacgttcagcccgtgttcgcgatcctcgatccggtttacacctataccctgcctgcgcgtcaggtggcgaacggcgtggtcgacgcctttgttcacaccgttgagcagtacgttacttacccggtaaacgccaaaattcaggatcgtttcgcggaaggcattctgctgacgctgattgaagaaggtccaaaagcgctgaaagagcctgaaaattacgacgtgcgtgccaacgtgatgtgggctgccacccaggcgctgaacggcctgatcggcgcaggcgtgccgcaggactgggctacccatatgctcggccacgagctaacggcgatgaacggcctggatcacgcccagacgctggcggtggttctgcctgcgctgtggaacgaaaaacgtgacgctaaacgcgccaaactgctccagtacgccgaacgcgtgtggaacatcaccgacggttccgacgatgcgcgtattgatgccgcgattgaagccacccgtcacttctttgaaagcctgggcgtgccaacgcgtctctctggctacggcctggacggcagctccatccctgccctgctggcgaaactggaagcacacggtatgacgcagatcggcgagcatggcgacatcaccctggacgtcagccgtcgtatttacgaagcggcacgctaa

SEQ ID NO: 115949 - DNA, 828 bp, Enterobacter cloacae
atggcaaaccaaaccgtaatcaagctacaggacggcaacgtgatgccccagctggggctaggtgtatggaaagccggtaacgacgaggtcgtctccgccattcataaagccctggaagtcggctatcggtccatcgataccgccgccgcctataaaaacgaggacggcgtgggaaaagcgcttgccagcgccggcgttccccgggatgagcttttcatcaccaccaagctgtggaacgacgatcaaaagcgtccccgcgaagcgttgcaggagagtctggagaaactccagctcgatttcgtcgatctttatctcatgcactggccggtaccggctatcgaccattacgttgatgcctggaaagggatgattgaactgcaaaaagaggggctgataaaaagcatcggcgtctgtaatttccaggttcatcatctgcaacgcctgattgatgaaacgggcgtcgcgccggtgattaaccagattgagctgcatccgctgatgcagcagcgccagcttcattcatggaacgccacgcacaagatccagaccgaatcctggagcccgttggctcagggcggcgaaggggtgtttgaccagaaaatcatccgtgaactggcggataagtacggtaaaaccccggcgcagatcgtcattcgctggcatctggatagcggtctggtggtgatcccgaaatcggtcacgccatcgcgtatcgccgagaacttcgacgtctgggatttccgcctggataaagacgagctgggtgaaattgcgaagctggatcagggcaaacggcttgggccggacccggatcagtttggcgggtga

SEQ ID NO: 115950 - DNA, 1026 bp, Enterobacter cloacae
atgatcagaattatagggtgctcgctctgttcgatcaccgaacacgaaggccgtattattcagagccgttccgaagagtcgattgttaacgagatcgaagcgattcgcgacacggtgccgggctttaccggcgtgatctccgatctgggtggtccaacggccaacatgtacatgctgcgctgtaaatcgccgcgcgccgagcagacctgccgtcgtctctcctgcgtctatccgagcatttgcgagcatatggacaccaaccacgagccgactatcaatctttaccgtcgcgcccgtgacctgaaaggcatcaagaagatcctgatcgcctccggcgtgcgttacgacattgcggtggaagatccgcgctacatcaaagagctggcgacgcaccacgttggcggttatctgaagatcgccccggagcacaccgaagaaggcccgctgtccaaaatgatgaagccgggcatgggcagctatgaccgctttaaacagctgtttgatacctattcaaaacaggcggggaaagagcagtatctgatcccatacttcatctccgcacaccccggcacccgtgatgaagacatggtgaatctggcgctgtggctgaagcagcgtcgattccgtctggatcaggtgcagaacttctacccgtcgccgctcgccaactcgacgaccatgtattacaccggcaaaaacccgctgagtaagattggttataagagcgaagacgtggtggtgccgaaaggggataaacagcgccgtctgcataaagcgctgctgcgctatcacgatccgaaaaactggccgctgatccgtcaggcgctggaagagatggggaaaaagcacctgatcggctcgcgtcgtgattgcctggtgccagcgccaacgctggaagagatgcgcgaagcgcgccgccagaaccgcaacacgcgcccggcgctgaccaaacacacgcctattgagcatcagcgttcgaacggtgttgcgggaacgaagaagaacgtaaaacgtaagaccggttaa

SEQ ID NO: 115951 - DNA, 330 bp, Enterobacter cloacae; identical to SEQ ID NO: 26489

SEQ ID NO: 115952 - DNA, 3276 bp, Enterobacter cloacae
atgactctacgattgcagacggaatcacccgctgaccaggatatgtttagaggcagcagtcatgaaaaagttgcagagaatgtggctcagatcatcaggacacctgatgtcaatattattggtctggaaggtgagctgggttcaggtaagtcaacaatattgaagttcctgcagaaaaagcttaaagatgattttacgttcattaactttgatgcagaacgttaccatcatggctcaactaaaaaagcgcttatcgatgtcatccaccacggggtcagcctacaatgtccgggctcccgggatgtgttggataagtataaaaatctggctctgggtaacatcgttgaatacgacaagagggtcagcagcaggctaagctggttgaccgtcgtttttattttactgtcattgctttccgtgcagatgcttcgttatgtgctaacagaccttaatcaatattttactaacaaggagtcattattagggtggcttttttatgttgaggtggccgcgtttctttctcctgccattatggtcgcaggactggcatgcctgcagaacatggaatggtacagaaagaaagggtattcgagtattggtgatttgttcaaacgcaacagtactgacaggattgaagagacttggctagttaataaggaggtcggagctattgagctggctgaagctctgcagggatttacctccaaagaggtcatttcccatggagatcgcttcatccttatcattgataatctggaccgaatcagtgcagacaaagtgaaagagctctggagtgatatggagcttattgccggagccactcatgaacacttcaggatagtggtgccctattcggcaagacaggtttcagcctcactttctgtggcgggtttcagcgggcgtgagtttattgcaaagcggattcctgtaagttttcaggttcctcctcttatttcggcaggatggcaggaagcgttaaggcagtactggaaagaaacagtaaatgaggatgcagggatagcgtgccgggaagcaacggtgttgcttgagcgctggaaaccctctgagtatcctcgtatcacaccgcgattaatgaagaagtttgttaatgatattcatattctgaaccttaccgttcctgcaacagaagatcatcgccatattcttattgctctctacttactggtggtcagatacggggagcgagatattaaagtattacttcgcgatcccaaagctagtcagaccgaacccggtattgctccggatgattttgacgagatgctctcgctaacttatcaacaaatatcccgaatttttaataacgatacagaaagatggagcgaatttctgatgagcatccactatcagtccacggtggagcttgccaggagcgagttgcttgatacgcctcttaaagacgcgattggtgctataaatatcccacggcttgaagaactgacggccttgtggggtttcgctgaagcatggcagcgagtggcaccacatattcagatgcgagactggctggtttcttatagccggatggatgagaagtgtcaggctctcgccgaaccgcaactcaaagtcgcagtgcaaatgctgaatcagagttatgctgtttcactcagagaaaagaatgatgaaggtttcgtattgagtctgcagaaactgatggctgacgggcggataagcctagagcctttcgtcgaaaggcaaatatcgtttattgtgagtaaacttgatgaaattcaggattcagaaaaattggaggctgaatccacgaagacgttgctgcaggaagctgattcatactctgttctggccggtgaatcactactgaataaaatggagaattttgtagatggcgtattttatgtggaataccttgtcaataatgaagagaccttgtcaaacctgaaaattggcacactagatatcggaaatcacggtcgggaggagatgttacgctatggagctgagcaacctcagatagacctttttaatccgggaattatccggcatatcaatattgcatcgaaggcggtacagaacgtaattggaaagaatgatggtacaggtggggctcaggttagctctgcaataatgacgcttaaaaatcgtcaggttgttgaggacgttatccatttcagaaaaattgttctgagcccggactggaataataatgttttaaatcaatattatcttaataatacggcgacgaggaatctcttccctgcggaatttgctgcacaggctgttgctcacatggtgctccatggtaactatgccggtatcgagtcgtacagtgaacatattggtgaggaacggtttgacctggctttggctgcatatcttcgttatctacgtactgccgagagtatctttatagcacttaaggataaaaatgttctgccgtacatcaaaaatgctgttggcaggattgttgatttaggtcttctggtgaatatacctgtcctgagctttgttaaaggtcagtatgacgtcatcaaagaagctacaaatgcaacctctcttttaatatttgtgcgagagcgtcaaaaagcactgtcagagaaaataattgagtctgatgtgaatgctatgggtccagtatttctccatgacgtatatcagtcaggtgagcagtttgatattttgaagaaaaagctgaacgccctggcatgtggagtatttagttcttctgaaaggcttattgagtgttttacggttcttcctgtgaacatgcgctttatccttgaacaaatgcaacttcaggggcagcatatccggatggaaggtagtgtgggtatctttgcatcatggttccgtgatgcagagccagacgttgtcacaaatgccgagaacattcattttctgtggtcttgcctcgacgatacccagagagagactgtacttgatgagttgcacgatgtcttacttgaaagacatattcgtattgacagccgtattgcgattattacccgtttccataatgagttgtcgtttattgaacctgagaaggccgttgaacgcagggctattgcggcgctgtttagcgcttctgttgataatgtattattgtctcaatggcttgaccgtcagacgttttcattttcatcatggtctccggaggacgcccgtacggcaacgagttgtataatgaataactcggagatttttcctctcatctgcaggaattcacagtatattaaaaacagaatgttaccagagaaagcggacgttacagaagatagtgatacgtttccggactga

SEQ ID NO: 115953 - DNA, 207 bp, Enterobacter cloacae; identical to SEQ ID NO: 26487

SEQ ID NO: 115954 - DNA, 297 bp, Enterobacter cloacae; identical to SEQ ID NO: 26486

SEQ ID NO: 115955 - DNA, 276 bp, Enterobacter cloacae
gtggcttctgtttctatcagctgtccctcctgttcagctactgaaggcgtggtgcgtaacggtaaaagtactgccggacatcagcgctatctctgctctcactgccgtaaaacatggcagctacagttcacttacatcgcctctcagcccggtacacaccagaaaattattgatatggccatgaatggcgtcggatgtcgcgccagtgcacgcattatgggcgttggcctcaacacgattttacgacacttaaaaaactcaggccgcagtcggtaa

SEQ ID NO: 115956 - DNA, 294 bp, Enterobacter cloacae
gtggcgcacgtattcggtgaacgcacgttggtcacgctggagcgtcttctgggcctgctgtcggcctttgaggtcgtggtatggatgacggatggctggccgctttatgaatcacgcctgaagggagaactgcacgttatcagcaagcgatatacgcagcgcattgagcggcataacctgaatctgaggcagcatctggcaaggctgggcaggaagtcactgtctttctcaaaatcggtggagctgcatgacaaagtcatcgggcattatctgaacataaaacactatcagtaa

SEQ ID NO: 115957 - DNA, 276 bp, Enterobacter cloacae; identical to SEQ ID NO: 16862

SEQ ID NO: 115958 - DNA, 1110 bp, Enterobacter cloacae; identical to SEQ ID NO: 113667

SEQ ID NO: 115959 - DNA, 399 bp, Enterobacter cloacae; identical to SEQ ID NO: 16863

SEQ ID NO: 115960 - DNA, 837 bp, Enterobacter cloacae; identical to SEQ ID NO: 16864

SEQ ID NO: 115961 - DNA, 393 bp, Enterobacter cloacae
atgcaatcccggatgacaaaggacattgtcctgaacgcactgctgatggctgtatggcggcgtaatcccgaaaaacaggtgctggttcattcggatcagggcagtcagtacacaagccatgagtggcagtcgttcctgaaatcacacggcctggagggtagcatgagccgtcgcggtaactgccatgataatgcggttgcagaaagttttttccagttgttgaaacgtgaacggataaagaaaaagatctacggaacgcgggaagaagcccgcagtgatatttttgattacatcgaaatgttttataacagtaagcgtcggcatggttctagcgaacagatgtcaccgacagaatatgaaaaccagtattatcaacggctcggaagtgtctag

SEQ ID NO: 115962 - DNA, 375 bp, Enterobacter cloacae
atgaagcccactctctcacgcgaactggcactcgacgcgctgatgatggccgtctggcggcgaaaaccggacggcgaggtcatcgtgcactcagaccagggcagccagtacggcagtgacgactggcagcgcttctgccgggctaataacctggccccgagcatgagcaggcgtggcaactgctgggataatgcggtggccgaatcgttcttcagttcgctgaaaaaagagcggatcagaaaacgcatctataaaacccgggatctggcccgggccgatatcttcgattacattgaagtgttctacaaccgggcccggcgccacagtcacctcggcggcctcagtccggaggccttcgaacaggcctcatcgtga

SEQ ID NO: 115963 - DNA, 477 bp, Enterobacter cloacae
ttgtctacgggcgtggggtcagtccagaattacgcggttgaaaacctggtaccgacgttcggcagccaccgcatcactcaacagcaatccgccgcacttggcagaacggcaacgcaaccggcaaaccagaaagcgatcgccaatctggtatacggtggtgagtggggaaaagaacaccttggcaatcaggtcgctggtgatggctggaaatatcgcggtcgcgggctgaaacagattaccggcctgagcaactatcgcagttgtggccaggcgttgaaactggaccttgttactcatccggagctgcttgaaaaggatgaatacgccgcgcgctctgccgcatggttctatgcctcccgcggttgccttcttcattccggcgacgttgagcgcgtgacactgttaatcaatggcggccgcaacgggctggataaacgccgtgcgctgtttaacctggcgaaatccgttctggtatga

SEQ ID NO: 115964 - DNA, 270 bp, Enterobacter cloacae
gtggggatcgaaacgataattgggctggtcgcattggttatttccgttatcgccggcgcttttggcctgggccatattcgcggcaccagcaaagctgaagtgaaagccgaccagcagcgcaccgaagataacgcagcggcaacggtcgcagcagccgaacgccgggtagaagcaacgaaagaggccagcaatgtacagcagactgttaaccatatgtctgacgacgatgttgatcgcgagctgcgggacaactggacccgtaagggttga

SEQ ID NO: 115965 - DNA, 312 bp, Enterobacter cloacae
atgaagaatgcgcataagaaagccatagctattcatgtgacatgcctgtcctcagtattggatttaggttacctcctggataaaaacttacccatcaacattaaaaatacaacgattccaacaggcactccaacaataggtgtagcgaacgcgcttactcccacggcggcaaccatacctcccaaagtactaaacatgatgggtatgattaacataatgatagcctggggtattcctgccttccagaggagtaacaccataatgacaacaaagaacaccatgagaaaaggcattgtttgcccccttaattaa

SEQ ID NO: 115966 - DNA, 264 bp, Enterobacter cloacae
atgaaaatcttaggattggatgagtacagaacccttcgtgagggagggacaatgaagtattttgaactggaacgcatgcctaacagcacttgggttgccattttcgaaagtttgtttgccgaaaaggatgaaaaggcatgggtagagggttactgcattgtgacgaactgctcaaacagtgaagtatccacccggttcatatacttgaaagaaaagtgcgaagaagcgaactctatatacagggttaagcattctgcactataa

SEQ ID NO: 115967 - DNA, 231 bp, Enterobacter cloacae
atggcacagctattgatttttgctgatgatgagcctgctaagttgctgaaaattcgaagttatcggagcaagattctttatctgtatgctaatgatgaggtgaggtgtttggatgtggtgatttttttttcaacttttctgaaaggcgaaagtggagccatattggtggcagccgacagatacgtgagcaggaaagaaattatcgaggcttatgatgctctgattggttga

SEQ ID NO: 115968 - DNA, 999 bp, Enterobacter cloacae
atggcaaaaccggactggggagagcttcagcaacggttcctgtccgaacatgccgcaaccggcgtatcaccaaaggaatggtgtgaagcgcagggactgaactacgctaccgcccgtcgatatatcaaaaaaacttctgcgcaaactgcgcaaaaatctgcgcagaaaaaagtgcgcattgcgcagaaagaacaaagcgcaaatgagctgatggatgatgatggacttactgctcagcaacgcttatttgttgcggaatacctaaaggatggtaacgccacacaagcagctatcagggcgggttacagcaaaaaatccgctgaacaaattggttatcaactccttcagaaaacttcagttgcccaggctattgcacaacagcagaaagcctccattgcgcgcacgcttggcggtgccgatgaagtcctcgcgcagatgtggcagcttgccaccttcgatgcaaaccagctatcgcagtatcgccgcggcgcgtgtcgttactgctggggattcggtcaccagtaccagtggcgcgatatggttgagttcgaagagaaacgactcgaagcgcttgagcggaaaagtcgcgagcccgctgatgttggtggctatggctatgaccataatcgtgagcctaaccctgcctgcccacgctgtaacggcgatggtatcggccagccttacttcgctgatacgcgtaaactctcgccagtctcgcgactcgcttactccggcgtaaaggtcggaaagaacggcgtcgagataaccgctatcagccgtgagcgtatgttcgaagccgtaatgaaacggcttggcctggcggatagcgagttcgctcagcgtctccagcagatcgaaatcgaccgccggcagctggaggttgagaaactccgcaaagagctggccggtgatggtgatggtgacgaaccgaccccagttcagatcaatatcaacgtagtggacgcgagggcggaagatggggatcagcccgacacttaa

SEQ ID NO: 115969 - DNA, 1308 bp, Enterobacter cloacae
atggggatcagcccgacacttaacattcctcaggcgcgtttcctcgcgatgcagcacaaattcaaagcctacgttgccgggttcggttccggtaagacgtgggtgggttgtggcggcatctgtaaggggatgtgggagcaccctaaaatcaaccagggttatttcgcgccgacgtacccgcagatccgtgacatcttctacccgacgattgaggaagtggcctttgactgggggctgagcgtcataatcaatgaggggaacaaagaggttcacttctacgaggggcgacgataccgcggaaccacaatctgccgctcaatggagaagccaggctcgatagttggtttcaaaatcggtaatgcgatggtggatgaactggacgtcatggcggctgccaaagcgcagcaggcctggcgaaaaatcatcgcccgtatgcgttacaaagtcgacgggttgcgtaacggcatcgatgtaacgactacgccggagggcttcaagttcgtctaccagcagttcgtgaaggcggtccgcgaaaagcctgagctttctgctctgtatgggctgattcaggccagcacgttcgacaacgcgaagaacctgcccccggattacatttcctcgctgctgagttcttatcctgatgaactgattcaggcatacctgcgcgggaagttcaccaacctcaacagtgggaccatttaccacacctttaaccgtaaactgaacaactgttctgacgagattcaggatggggatccgttgtttatcggtatggacttcaacgtagggaaaatggccgcgattgttcacgtaaagcgtaacgggctaccgcgcgcggttcgcgaactggtgaaagtctacgacacgccggcgatgattaagcgtatccaggaagagttctggcgatatgaggatgggcgttatgtgaagagccgggagatttacatctacccggatgcgtcaggcgactcccgcaaatcgcagaacgccagcaagacggatattgcccagcttaacgatgccggcttcagcgtcatcgttgatgatgccaacccgccggttaaggaccgcatcaactcgatgaacgccatgttctgcaacgccaacggcgagcgccgttacctggtgaacgtccagaactgcccggtttacaccgagagcctcgagcagcaaatctgggcggctaatggcgaaccggataaatcagcggataacgatcaccccaatgatgctggtgggtacttcattgtgaaggattaccccatcgtgaaaccggcatactcaatcaccttggacaccactttctga

SEQ ID NO: 115970 - DNA, 456 bp, Enterobacter cloacae
atggcaaacgacgacatcacctgggttcgaccagagcaccgggcggcttctgctgcctggaagaaatatcgtgatttctgtaaaggagtcgaagcggtaaaggcggcgggcaataagtatttgccttatctcgatccaaccgataaatccacgcgcaaccgtaagcgcaatgaggactatctgcgccgcgctgtattttacgccattgccggcaatacgaagatcggcatgcttggcatggcgtatcgcaaagacccaacgtttaacggcccggagaagctgaaatacctgctggacaatgctgacggggcgggtaccagcatttatcagcagtcgcagctggtggtcgagaacgtgctggaggtggcgcgagatgggctttatgttgactatgcagaggcatcagacgaagcgatcattctccgctatccggcagagaacatcatcaactggtga

SEQ ID NO: 115971 - DNA, 903 bp, Enterobacter cloacae
gtgctggtggtcctgcgcgaatgcgtagaagagccggacggttacgcttacaaggacgaaattcagtaccgcgagctggcgctggaagaagggacgtttatctgccgggtatggcgccgggctggtggcactgcaagcggaacctatgccgtcgacagcgaatatcatccgaagcctaaagggaaggaatactgggatgaaatcccgttcacttttgttggcgctcagaacaacgatcctactatcgatgattcaccgctggccgcgctggtggagataaaccatggacattatcgaaatagcgctgactatgaggacagcgtgtggttcagcggacaggtgcagccgtatatgaccgggcttgatacgggctggcgagatcaccttgaaaagaccggggtaaaaataggttcccgttcaccgctgatgcttcctaaagacggatcgtttggttatgcccaggcgcagccgaacatgctggctaaagaggccatggacagcaaacgcaattacatggtgcagctgggcgccaggttaattgagcagaacgccacggcgaagactgcaacgcaggcaagcggtgaacagagcgcatcaacgtcagtgctgggtatctgtgtttccaacgtttccgaggcttacacgctggcgctgggctggtgtgcgaaatacctcggaattaaggacgaatcgacgagctacaccatcaaccaggaattcatcgcgaaggttgccgaatccgggatggtcaccgctattgttaacgcctggcagtccggcgcgctgcgtgatactgacatgattcgggcgcttcagaaactcgacctcatcaacccggcagacagcccggatgatgtgattgatgcgctccgcaatcaggcgccctcattgaccgggggctga

SEQ ID NO: 115972 - DNA, 1092 bp, Enterobacter cloacae
atggcaacagtcaacgaaagtttgcgggatgaggccattacccattccgtctggattagccgctatgcgacgggcgtggctaaccgaatggtgaagctgctcaacgagacagacgcagaactgtctgcccgcctgctggatgcactggatcggctcccggctgatagcttcacggttacacgtctggaaagcttgctcggcagcgtacgcgaacttaaccatcaggctgtcgcttcgatgcagtccgggctagaaggggaactgcttgcgctttccaggaatgaggtcagttatcagctgagcctgttcgattcccttcttccctcacaggtgctggcacgctacccgctacagggaatcaccgctgatatggtttatgccgcggcgatggctcagccatttcaggggcgcctgctgagtgagtggacggagaatctggaatcggacaggctggcgcggatcgtaaacgctgtacgccgtggctatcttgctggcgacacggttgaaaccatcgcccgaagcgtgcgcggtcatgccaataaagactatcgcgacggcgcgctccagatgagcagggcaaatgccgcaagcatcgctaaaacagccgtgaatcatctggctgctaccgcccgcaacagcttcaccagcgccaacagcgacatcgtgaatggtaagcagtggctgtctacgctggacaataaaaccagtcacgactgcatcattcgcgacctgctgcgctacaccctggataataaaccgatcgggcacaaagtaccttacctgcaagggcccgggaaaattcatttctgttgccgttctactgaaactctgattatcaagtcctggcgcgaactcggcattgatattgatgagatggacgagggcactcgtgccagcatggatgggcaggtacctgctaaaaccacgtatcttgaatggctcgcgcgtcagccagctcaaaggcaggatcaggttctgggtgccgagcgtggccgtctgttccgcgcgggtgaaatcgacctggctgatatgttcactgacaaaggcgagtggatcagcctggaacgtcttaagcagctatcaggtccttga

SEQ ID NO: 115973 - DNA, 771 bp, Enterobacter cloacae
atgttaattcgaaacatgcttctgaaatattacgcacctgaaagcggcggtgagggcagtggtggtggcggtatcgaaatcacccccgaaatccagaagctgattgatgagcgtgtgaccagtgaagttacaggcctgaaatcaaaaaactctgagttgctgggcaccatcaagcagcaaaaagaaaacctgtcacgttttgacggtatcgacccagacgctgtacgcggcattctccagcgtttttctgacgatgaagaggcgaagcttatcgccgccggaaaaattgacgaggtgctggataagcgtaccgagcgcatgcgtgctgacgttgataagcagatcaaagcggcgaacgagcgcgcggaaaaagctgaagcgttctccaacaaatttcgggatcgggtcctcggggatgcaatccgtgcagcagcctctaaagcgggcgcgctgccggaagcttctgacgatctgattctacgtgccaaaggcacattccagctcaacgacgagggcgaggccgtagcagttgatgcaaatggcgatgttctgttcggtaaagacggcaaaactccactaagcccgcttgagtgggcggagtcactcaaggagacggctccgcatctgttccctcgcgcagaaggcacgggcgcgggcggacacaagccaaacggtggtggaagcctgaaacgttccgaaatgagcgccagcgacaaagcggactacatccgcaaacacggccagcaggccttcctcaaacttccgaaataa

SEQ ID NO: 115974 - DNA, 954 bp, Enterobacter cloacae
atggcaacgactgttaataccgacctggttatttatgacgatctggcgcagaccgcgtttcttgagcgtcgccaggacaatctggaagtgttcaacgcttcctccaacggtgcgattttgctggataacgaactgattgaaggtgatttccgtaaacgcgccttctacaaagttggtggttccatcgaatcgcgcaatgtgaactctgtcgataaagtcacaggtaaaaaaatcggtgccggtgaagcggtatccgttaaagcaccgtggaaatacggtccgtatgaaaccacggaagaggcctttaaacgccgtggccgctccgttgatgagttctccgaagtgatcggcgttgatgtcgcagatgccacgctggaaggctatgtgaaatatggcctgaaagcgctgactgcggcgattggtgctaacgccgacatggtcgtaaccgccgacattgagaccgacggtaaaaagaccctgacgcgtggcctgcgcaaatatggcgacaagtttaaccgagtggttctgttcgtgatgcactccgcgacctacttcgacattgtggatgaggcgattgccaacaaaatttacgaagaagcgggcgtggtggtttacggcgggcagccgggcacgctgggtaaacctgtgctggtgaccgacaccatggacgctgatgcgatccttgggctggtagctggtgcggttaccgttaccgagtctcaggcgccgggcttccgttcctacgatatcaacgatcaggaaaaccttgcgatcggctatcgtgctgaaggcgtggtgaacgttgatctgctgggctacagctgggataccgccaaaggtgataaccctgacctgaccgccatcggcactgctggcaactggaagaaacacttcaccagcaacaaatccacggcaggcgtgctgattaagctgggatccgcagcgggggagtaa

SEQ ID NO: 115975 - DNA, 483 bp, Enterobacter cloacae
atgatcaataccgatatcacctctcctgatgccaacagctacgctagtgaagaggagctttcctcatttgcggaaatacgcggcattgaactgcctgacaagctcatacctttgctgattaaggcaatggattacctggaggggctggactgggttggctcgaaagctgacccgaaacaggctctggcatggccacgcgtgaatatcgttctggatgaacatgatttcccgccggatgaagttccacggcaggttataaccgcgcagtgcatgctggcggtagaggcaatcgacggcgatttactctccagcgtgcgcgaagccgctgtgaaaactgaacgtgtggaaggtgctgtaacgatgacctatgcggtcgcagatggtgaagtcttcacgccgtcctatcctgccgttatggcgctgctgggcgacctcgctggtggtcgtggttacgccattaatgcatttgttgagagggcctga

SEQ ID NO: 115976 - DNA, 351 bp, Enterobacter cloacae
atggcgattgattaccaacgtatgcaggccagaacgacccgcatgctcaggcagaacggcgcgacgtacaacgtaacccgcaagggttcagtaacggttatcggtggagtcgagcataaaacggatgatgttcagttcattgcgatcggcgttaaaacggaatacgcacccggtgagatagacggaacagtcatcgtaaacggtgatgttcgaatcgtctttaccgcagagcaggaaattaaaatcggcgatgtggttgatattgatggcacaacgtaccgtgttgtcaaatcgaatccggtaaaacctgccgtgttggtgctctgctacaaagcgcaactgagggcttag

SEQ ID NO: 115977 - DNA, 585 bp, Enterobacter cloacae
atgggcgagaacgcggctttcctggctgaaatcacggctttcgttaataaggcgaaaacgaatcaggaagcagtggtgcgcgccgtcggaatcaaaattcttaaccagctggtggttatgtccccagtgggcaacccggagttgtgggaagttaaccagacagccgtttcctataatcgcgctgttttcgaccataacgaggcgcagcgcgccaatcccgacaacctgaccaaaaccgggcgactgaagaaaaaagcccgggtggtggatgggatggatatcaaagcaccgccggggtatacgggcggacgctttcgcggtaactggcaggtatcgtttgatgctccgacaactgatgaaacagggcgaatagacaagaccggcgacctgacaaaagcggccgggaactacacgctgtcgctcttcaaagtcgggatgaaggccatttatttctgcaacaacgtgccctatgcctacccgctggaaatggggcattccacacaggcacccggcggaatggtccgcataaccgctgctgagtttcaacgcttctttgaggaagctaccaaggaggtgtccaggtga

SEQ ID NO: 115978 - DNA, 411 bp, Enterobacter cloacae
gtgattcctgatattgcatatgcactggccgccagactgggttcctgggccgatgccgaaggcatttctgttgcatgggagaacgtgccgtttacacctcctgctaacgagatgtacctggccgttcacgatttgcccgttactccgcgaacaatcgatctcgggttgcgctgccggacttattcaggcgtgtaccaaattaatgtcgtggcgccagctggctccggccgtacctcagtcgtttctctggcgggcagagtagtggaattgttccctgaggggcaggaaattgcaggaagtgacttcacttgctggatcaccagcacgccagcaatttttcgcggtatcccgaccgctgtttcctacaccattcccatcagcctgaactaccgggccgacatcattaactga

SEQ ID NO: 115979 - DNA, 672 bp, Enterobacter cloacae
atgggcttcgcactgcctaacggcgctcatgtttatctggcctcgggctacggcccggccattacttttaccggcgcgacgaatgctgagcacgcggtgatcaccgtcagcaccgcggacgatatcgcggtcggtgatatcgttcacgtgaactgtaactggtcgggtattgataacgttatcgcgaaaatcgacgcgattgcggagaatgccgttactcttcgaaatatcaataccacaaaccaaaacaaatacgccgcgggcggcggttccggctctattcgcaagattgaggaatggaccgaacttccacaaatcactgaggtatctaaatctggtggcgatcagaacaccacgcagattcagttcctcagcgatgaccgtcagcgcaacctgaatacctataaatctgctgtctcccagacttactcgatcgctcacgattcaagtctcccggtatatccgttgctgcgccagctggatgaagacgaagagactgtggcggcttatatgtacgttccgaaggcgaaggagaatcgttactgggcggccacggcatcttttgacgacacgccgaccacggcggtgaacgaagtcgaaacggtaagcgtcgtgctgaacctgcaatcgccagcaatgacgttctataaaatcacaggcgccgcggcataa

SEQ ID NO: 115980 - DNA, 312 bp, Enterobacter cloacae
atggcgactaaattcacccttcagcccaaaccaacttttaaggccaacgtctcgatcccgcgcgctggcgatgaggatggcgtgctgacattcacgttcaatcataaaccacttaaagagctggctgacctggaaaaactcgaaggcaaaaccgccactgattttctgatggaaattatttctggctgggcacttcctgatgcatttaacgcggaaaacttgtcgctgctgcttgagaactatccggcggcgatgaagactatccctgaaacctactatcgcgaactgatggggcaacgcgaaaaaaactga

SEQ ID NO: 115981 - DNA, 2913 bp, Enterobacter cloacae
atgagtaacgacatcgccacgatttccctgcgcgtgaataccagtgaacttgagcgcggtaaccaggcactggatcgctttcaggagactgcgtccgccgcggcaggtaaagcggatgacctgaacagtacgttccgcaccgggatcgacaaccagaaaaaaaacagcgaaagcctgaaacagcaacggcaggaactgcaaaacctgctgaataaaatcagccctgttaacaaggcgctagacgagctggataccattcaggaaagcctgtctaaattccggaacaaaggtttggtgggtgacgaggattttactcgttacaacagcgtgcttgagacaacccgcgcgaaactggcgcaggtcatggaatctgaaacagcagagggccgtgctcgcattgagcaggcacaggcagcgcaacgggcagctgccgcaggcaaaaattttatcgactcactcgaggaccaggttgcagctatcggaaaaacccgtgcagagttgctcgaactgaaggcggcccagcttggcgtgtcggaccgcgctgcgccaatgattgcccgactaaaagagcaggaagagtcctggaaatctggagctatcagtgcggggcagtaccgtaatgccatgcgttacctgccaatgcaaatgacggatattgtgacttcactggcctccggtatgccggtttatatggtcgctatccaacagggtggtcagctgcgtgattcctttggcggagtgggtaacgcgctaaaagcgatgttatccatggtaaccccggcacgtgttgcgattggtggtctggctggcgctgtactgattgcggcaaaagcgggatcggactacttcacagcctatgacgaaatcaataaagctatcatccgcaccggaaacattgccggtacgtcagcgctacagattatggcatcctcccagtcaatctctgcttcgattggggctacggtgggcactgtccagagtctgatgacagagctggttggtatcggctcaatgacccagcaacagcttgagaaagctaccaaagcgacagcgctggcagttgaaactggtattgtttcggctcaggacattaccaaggcttataaggatattgataaggatccggttaaggctcttcagaaccttaatgagcaattcaactttctcaccgtttcacagcttaagtacattgacgagttagttaagcagaaagaccagaccgctgccgttactcaagctatggatttgtttggcgacacgatggcagagcgcggagagcaggcttacgactcgctgacgccatttggccgcctgtggcttgatatcaagggatgggcgtctgaggctatgcagagcatcggtcagtgggtagctgagctggcatcaaacacgctcaaggaatttaacgcgatttattacagcgtcgcgatagttttccagaagctgaaccagattatttcttcttctatcgcggctgcgattaatctcgttcctgactgggcgaaaactgatactttgcagggatggcaggactataacgaacaaatggctggcgcttatggtaacagcttgtctcagctgaaaaaggactgggacgcggctgacattagcgcaggcaagtacctcgatacatcccgcaagataagcgccgcgaccactcaggaggatcgggaagcagtcgcttcgtttggcaaaaaaacgaaaacaggaaaacagggtactgtatcggctggcgaccgcagtactgacgctgctcaggccgaattgctggcgcttcaggcgcagttgcgtgctcttcagcagcataaagggctgaacgacactatcagccagcagcgcaaagatctgtggacgactgaagcaaaatttcaggtgctggaggaggcctcgcgttcacgttccctgacaaagcaggaacgatccctgctggcgagtaaagaccaggtgcttcagttggcacggcagaaagccctgttaggtgatcagattaccgaacaggaacagctgaacaagcgaatggatacctcgcagaaatacgtcacgcagatggcagagaagcaggctgctttggtcggtggagctggaatgagcgatcggttagctcagcgtgaactcgcgaaaagtcagcttgccgcaggttgggtgaacgccggcggttctctggaggacgttggttatcagaagcagctcaaagcggcgaataattactatgccgcagaggacaggttgcgtggcgactggttgaccggcgcgaaaaagggctgggctgaatttgaggactccgcaaccaatgtttactcacaagtgcagacacttaccagcaatacattcaccggtatggccagcactcttacagacttttttaccactggaaaagctaacttctcagatttcctgacaacctttttgaaaggaacagcccagatgctgacacagttggcgctggttaacggaatgaagtctgcgtttggggggacatcatttggttcatttttcggattttctagtggcggcgcagttccggaattcgatactggcggctacacaggggatggaggaaagtatcagccaaaaggcgtggtgcatggtggcgaattcgtcttcaccaaagaggcaacaagtgcgctgggagttggaaacctctattcacttatgcgaagcgcacagggttatgcaaatggcggttatgttggccacgctccgatgtatgggcttcagtcatcatcggccggtggggtaagtattcaaacgtccgtagttgttcaaaaccagaactctcagcagcagacttctgcaaataacgatgctgtttctcgcgcttacaagcagactattgatcaatctgttcgggcaggtattgcgaaacaacttcagcctggtgggctcatctggaatgcaacaaaatcaagataa

SEQ ID NO: 115982 - DNA, 354 bp, Enterobacter cloacae
atgaagaaggtagtggctttagctcttggggctttaatgttgtctggctgtactgttcgtgttgctgatatgaccgttggtagtactaaaaattacaacttgaacgcagctaagtttgaaaaaggtcaacgtgtgactggtgaagacaaagctccaattgttattttcccgctgggcattccaagcgttaaaactgcaatggatcgggctattgaaaaagacaagtgttccgtaggcctaagcgatgttgttatttatcaattaaaccacgcatttctgttcggcacatatggttaccgtgttgaaggcacgcagattatcgacaagtctcagcttggttgtgaaacccgctaa

SEQ ID NO: 115983 - DNA, 348 bp, Enterobacter cloacae
atggcactggaaacgttcacctggcgaacgcagatacaggcgggaatggaaggaacgtttagccataaaacccgctctgcaacctttggcgatggctatgagcagattgcaggggaaggcatcaactctgaaaagcagtcatggcctgtaaccctaacgggcaaaaaaacggacatgctccaggcccttaaattctttcgttctcacgttataaagtcattcatctggacatcgccagttggcgaaactgggctctaccggattgaggccgaatcaatcaagtcacagcccttatccagcaacgttctgaccatttccgcaacattcaaacaggcgtacgcaccatga

SEQ ID NO: 115984 - DNA, 756 bp, Enterobacter cloacae
atgatcacagcagactatcaaagccttgagcccggtaataaagtccggcttatcgaagttgatggctctacgttcggcgtggatgatgtactgcgatttcacgcgtacaacctcccgcacacagaagaggaaatcgccgccgctggtggtgatgaatcaaagctgaaggcaaaaagtatctggtggcagggggaagaatatgccgcctggccgtatcaaattgaaggccttgaagcctccacagacggcaacagcgcccagccaacgctgacggttgcagatatcgaaagcaagattacagcgctgtgccttgcctatgacgatatgctacaggcgaaagtcactatccatgacacttattcacattatctcgatgagaagaacttcccagcgggtaacgcaacagctaatccgcaacaggtcagaaaacgggttttttacatcgatggcaaaagcagcgaaattccgggcgaaagtatcgaattcgtactcgatagcccgatgtcgttgcagggtaagatgatccccacgcggcagcttcattccctgtgtacctggtgcatgcgcaataagtaccgcaccggcgacggctgcgactatgccggtacgcgctatttcgacaaaaacaacaacccggtaagcgatccgtcactggatgaatgcaacggcacgctgacggcctgcaaacttcggttcggcgaaaataaccaactctcgtttggtggattcccgggaacgtcgctgatcaggagctga

SEQ ID NO: 115985 - DNA, 720 bp, Enterobacter cloacae
atgcgtcagaaaacaattgatgcaattatggcgcatgctgccgctgaatatcctcgtgagtgctgtggtgtggtggtgcaaaaaagccgtgttgaacgttattttccgtgccggaatcttgccgcggcgccggaggaaaattttgtcctctgcccggaagattacgcagttgctgaggactggggtacggtgatcgccatcgttcacagccaccctgacgccactacgcagccgagcgaactggataaagcgcaatgcgactcaacgcttttaccctggcatatcgtgagctggccagagggggatttacgcaccattcagccgcgcggagagctgccgctgctggagcgtccttttgtgcttggtcacttcgactgctgggggctggtaatgagctatttccggcaaacgcatggtatcgaactccacgattaccgggttggttatccctggtgggaaaacgactatccggacaacttctatcaggattgctggtacgagtgcggattccgtgaattcgacgggccgccgaaacctggcgatatggtaatcatgcaggttcaggctgataagtggaatcatgcggggattctgctggaaggtaacatgctactgcatcacctttatgggcatctgagccagcgcgttccttatggcggctactggatggaaagaaccatgaagatactcagacataaaatcttattagagtgtggttga

SEQ ID NO: 115986 - DNA, 573 bp, Enterobacter cloacae
atgtttagcgaagaaaaagtagctcagatggctgcttacctgctacttaaacgtggcgggcgcatggcatatctgaagcttatgaaattattatacttggcaaatcgccaatctatgatccgacatggacgcatgatgggtgaggatcgtctctattcaatgcctcatggccctgtgatgtctactaccctggatttaatccgtggtagagcagagactggcggtgaatactggtatcggctgattcaaacagcggggcatgatgtttgcctgagtgctgatccgcgtgaaatggatgctgatgaagtgttcgatgaattgagccgggcagatgtccgcatcctcgatgaaatttatgcccagtatggtcacatgaatagatacgagttgcgcgatatgactcacctgcgtgatgtttgcccggaatggcatgatcctcgcgggtctagaacccctattgacgtgcgtgaaatttttttgaatgagggtaaaactcctgaagaagctgaaaatattttcaggagcatgtgcgaatcacaagagctcaaggagttttcttctcaattgtcatga

SEQ ID NO: 115987 - DNA, 495 bp, Enterobacter cloacae
gtgcgaatcacaagagctcaaggagttttcttctcaattgtcatgagcacatttcaaccatataaaaaaggaaccgttttagctccaagcgggccatgcaatcatcttcatgtgatttgcaacgatcctgtttattacccagtaaacgactgttactgcattttggttgttaacgtgtccagtattaagccgggcgttcctcatgatgatgcgtgtgtgcttaaccctggtgaccatcgatttatccagcatcccagttatatagtctatgccgaggcagttatctggcgtgtcgataatgttgcaagaaagcatgcagccggtgaaataacggcgcatgatgatatgccagaagctgcattcgagagagtactctcaggcttcgatatttcagaacaagcaaaaccaaagcacatcaggtttaaagaaaagtattgtacgaacacgtcattaatagatcagcctgaaccgaccgatggtttgacaggcacataa

SEQ ID NO: 115988 - DNA, 630 bp, Enterobacter cloacae
atggcaatttcactcgataaagaaccgctcagaacagtccggctttatggcgtgctaggtgccacattcgggcgtgaatatcgtttatcagtagcttcaccaaaggaggccatccgcgccctgagcgttatcgtgccgggttttgagcgtttcctgaataccagtaagcaacgaggtttaacttatgcggtattcagcgggaaacgaaacctcgtaaacgatgaactcagtatggacaggagcacagaggaaatccgcatcgcgccggtgatcatcggcagtaagcgagccgggttttttcagacaatcctcggggttgcccttgtcgctgttgccgcgttcgtcacgggaggggccgcgatcgggattggtgggactgcttttgctggtggatggggagctgtggcggggataggggcatcaatggcgatcggcggcgtagtccagatgctttctccacagactaccgggctagccagcaagcaatcagcagataaccgcgcaagctatgcatttggtggcgttacgaacacaacctctcagggaaaccctgtccccattctctatggtaaacggcgaatcggcggcgctgttgcctctgccgggatttacgtagaagaccagcaataa

SEQ ID NO: 115989 - DNA, 3582 bp, Enterobacter cloacae
atggctaaaacaattaccggacgtaaaggcggcagttcgagttcccgcatccctgtcgagcagcccgatgatctccagtccgttgcgaaagcgaaaatcctgatggttctcggtgaaggggagtttgctggtgggctgaccgcgagggatatctatcttgacggcacacctttacaaaacgcagatggttcccagaacttcagcggtgtcttgtgggagtttcgcccaggaacgcaggctcaggattacattcaggggatacctggcacagaaaatgaaatcagcgtcggtaccgaagtatccagcgaaactgcctggacgcataccttcacgaatacgcagctttcggcggttcgcctgcgcctgaagtggccaactcttttcaaacagcaggataacggggatttggtagggtattccatcaactatgtggtagagcttcagacggacggtggtagctggcaaaaggtccttgatactaatgtgaccgggaaaaccacatccggttatgaacgcagccatcgcatcgatttaccgaaagctggcagcacctggaccatcagactgcgcaaaattaccgctgacgcaaacagtgccaaaattggcgacacgatgacgctccaaagttatacagaggtcatcgatgccaaactgcgctatccaaacacagctctgttgtacattgagtttgattccagccagttcaatggctctattccacaaattgcctgtgaaccacgtggtcgtgtcatccgcgtaccggatacttacgacccggaaacaagaacttatagcggtacgtggcttgggacattcaaatgggcctggacagataaccctgcgtggatattctacgacctggtggttagcgaccgtttcgggcttggggatcgtctcacaacagcgaacatagacaaatggacactttaccaggttgcacagtattgcgatcagatggtgccggatggcaaaggcggaagtggcaccgaaccacgttatacctgcaacgtatacattcaggaacgcaacgacgcttatacggtcctgcgtgattttgctgctatcttccgcgggatgacctactggggcgacgaccagattgttgcgctggcggacatgccgagggatgttgattttacatacactcatgcgaacgttatcgatggccggtttacctattccagcagcaccacaaagaaccgttataccaatgcgctcgtatcctggtctgatcctgataacgcctattctgatgcgatggaacctgtttttgaacaggcgctggtttcgcgttatggatttaatcaacttgagataacagctattggttgtacccggcaatcggaggcgaaccgaaaagggcgatgggggatcctcaccaacaacaaagatcgcgttgttactttcaatgtaggggaagacggtaacatcccacagcctggctatgtaattgctgtagccgaccgaaatctttccggacgtgaccttggcggccgtgtttctgtggtgaatggtcgtgttttgacgctggacagggcaccggatgcatcttcgggcgacaggatgattgtcaatctgccatcaggggttgcgcagtcacgcaccatccagacgataacgggcaataaagtaaccgttacgactgcttacagcgaaacgcctgtggctcaggccgtgtgggtcatagagtctgatgaactctacgcacagcagtatcgcgttattacggtaactgataataatgacggcacgttcacaatcgtcggtgcaaatcacgatccggataaattcgatcgcattgatacgggagctatcattgaccagcggccggtgagcgtgatcccgccgggcaaccagtcgccgcctgcgaacatcgtgatcagctcgttttctgtggtacagcaaaatatcagcgtcgaaacgatgcgcgtgagctgggaccaggcgcagaacgctatcgcctatgaagcgcaatggcgccgcaacgacgggaactgggttaacgtgccgcgcagctccaccacgtcattcgacgtccccgggatttatgcagggcgctacctggtgcgcgtgcgcgcaatcaatgccgcagaaatctcgtccggatggggctattcagaagagaaaacgctgacggggaaagtgggcaatccaccgaagccggtcggcttcatcgcttctgaaaacgtggtattcggtattgagctgagctggggattccccgcgaataccgacgacactctgaagacggaaattcagtacagcctggccgggacggaagacgatgtgatgctgctggcagacgtaccctttccgcagcgcaagtatcagcagatgggcctaaaggcagggcaaattttctggtaccgcgcgcagctggtggaccgcagcggaaacgaatcagggtatacagactttgtgcgcgggcaggccagcatcgatgtatccgacatcaccgatgcaatcctggaggacatgaaaggctccgatacgttcaaagacctgatcgagaacgcggtggacagcaatgaaaaaattgctggcatggctaacgacatcaaacaggccaacgacgaactggagcaacaggcgcagaaaattgcccaaaatgcccaggatatcggaaaggttcagaccaacgttacaaacctgtcgagcaaggtcggagatgtgtcttcttctctgaacgagcttgagcagacagtggcgacggccgataccgcactgggtcagcgtatcgatagcatcaacgtgtctatggacggcatggcggggggagtgaagaactccgccatcgcgattattcagggcaacctggcgcaggtggtggcgcgcaaaacactgtctgcatcggtcgccggtaacagcgcgcaactggaccgcattgatgaggtgatcgtcaacgagaaggaggcaacggcgcgttcgctgctgagtttgcagactgacgtgaacggcaacaaggcatccatcaacagccttaaccagacgttctcggattaccagcaggctatggccacgcaggtaaacagcatcacggcgaccatcaacgggcatacgtcagccattaccactaacgctcaggccatagcgaacgttaacggggacctgaaggcgatgtacagcatcaaggtcgggttatccagcaatggtcagctttacgcggcagggatggggatcggcgtggagaatacgccgtcaggcatgcagtcgcaggttatcttcctggctgaccgcttcgccgttactcaccaggcaggagcgaccgttacgcttccgttcgttatccagaacgggcagaccataatccggaacacggtcattggagacgggacgattggaaacgccaagatcggcagctatatccaatcttcaacctgggacggcaccgggaacgttggctggcacatcaacaaatctggctacgcgacgtttaacaacgtgaccgttcgcggctcgatttacgccacaaacggtaatttttctttcaatggctccggcaacacaacggtgattaatggtaatggcgtaaccattaatattccgggtggaggtcgcatcgtactggggacatggacataa

SEQ ID NO: 115990 - DNA, 921 bp, Enterobacter cloacae
atggagatcacggcgggcctgcggtgcccgtcatttggggccaactttgaaagtggctaccagaaagccaagtacgctgatgttgccggttatgtttccggggcgcaggtgctgtttatccctcacgcaacggcttatcttgattcagggctgcttcataaaatgaactcggtcaccatatccggtggccgcgtgacgcagaactccacgatgaaggatgtaagcatcagtgagcgtgaaagtacgtacacgttccccggtagcctctggcagatatttccgtcaggccagcgtagtggtgtgggtcttctcatcagcaacagcactgacttcacctcaataaccaatgctacacagtcaggacagtgtatctggaagggtaccgtcaatgttcccactggcggctgggcagttcccacgatagcggggtacgacaagtccaaatatatcgtctttgggcgctgcaatagcggtaacacagtcgatttcgatggcaacacggtcaggttcttcagccctccatccaccaacgatgatgctccgacgaccggcacgatagatattgtcatctttgccagtggcgtggcgcctcagccgggcaccggcctcaacatcttcaatgcagccggggcttgcacgttttcgacgacaaagcggcctttcgtctacctcaaccaactctggacgccttcgaaaaatgccgtgagcatcggcagcggctatgttccgctgggcaggttcgggctgatggctcacgaagtaaatggcatgtacgtgtatcgaatgttcggaataaaaatacagaacggcagtgcttcagttcagggtgggaaatatcttgggcgcgagcggtatgcaatttttggtaatgacacggtaacgccactgaaccttcccgttcttcccgatatgtacgtctga

SEQ ID NO: 115991 - DNA, 1479 bp, Enterobacter cloacae
atgctttataacactggcaccatcgccattaacggaaatacagccaccggcaccggcacgaactggacggcacccgccagccagattcgggttggccagacgttgtttgttctttctaacccggtacagatgtttcagatcaccgccattaacagtgcgacgtcactgacggttacgcctgccgcgtctccggcgttgagcggccagaagtacggcattcttgttactgatagtctctcggtcgacggcctggcgcagagcatgtctcagctcatcaacgagtatgacgagaacatcggcgcctgggagacgttcgccaccacctcagcaaaccagaacatcaccgttaccatcaacggcgctcgtgtaaccgttccggcgatcggcaaactggtccagaaagggagcaatggggcggttggagtttcggacggtgggaccggggcaacgaatgccgctgacgctcgcacaaacctcggtttgggaggtagcgataatgttactttcagcaatttgaatctcgagcgcggtaatgactcttctgcatcagggattttaacaaccacatcgagggacggcagtggttcggtgaagaactatgctcgcttctacgctgaaaggcgttctgacggtatcgactacctgacgctacacatcaacggtgccaataacacccttaaccgctatttatctcttcgctctactgacggggccatcatcgcctcaagtgcagcgctaggaactggttttgattcgcagatcgggaatgtggcgcaatgtatgaatgagagaaaacaaaacggcggtacagcagcatttcgcagtttaaattcaggcctcattattggcgggcagaattttcagtatggtgcttcgctctacttccgcgcgggtgatacagcttcaacgttatgggtagattacagaaccggtaatgcaatggtctccgctggtaatgactccagcatttctacaggcacagcgcaatacaacaatctttggggaacaaaaaacacgactgtcgatgccagcggctttattaagcgttcatcccccgttgtgaaggtcttttcggatggagcataccggacgaacgacgaatcagaaggctgcactgtaactcgtctggctacaggtcaatatctgattgaaggatgccagggactgaactcagatgctgcctggggcgggattgatggtggttttgacatccccaacgatcgcaacaagcagccgcttatctggctggattatgaggttagtgccgatggttctgtgctggtgaaaacctatcaccgtactcaccctgatgcaccagcgttcgccaggaacgaactggaaggcgtgggtgatggtgatccagtcgacatcccccgtgaccagtttgtgtccgtgcgcgtcgaaatgcctgctgattctttatacaaccaaaaaatcagagcagcagagctggccatgactgccgatgcgggtgaataa

SEQ ID NO: 115992 - DNA, 831 bp, Enterobacter cloacae
ttgggagagagcaacacagccaactttggaagcctcgaaattggtgccaaaaaaccctctactgcaagctttgtggatttccatttccttggcactaacgactatgacgcacgcattctgtgcggtggtaattctaatggcgctatggggaaaggagacttcacattttacgcagggaaatacgtttttatcggcgatagctttgaatttcgtaaccctatcacctgtcagaacagcatcagcgcatccgcaaaaattgcgaccactgctgatatggaatgcaaaactaaaattggtgttttggccccagctaacaatcagaatgctcatgtttggttctatggcacaggtggggcatccaggggggttatttattccggacaaacaggaattattcagctccgccctgacaataatgataacggcgggtccaacggatacgcttttgcatttggggctgatggtaagttcacctgcgttacgatgaatcagacctcagatgagcgggttaaattcgacaaagagcccgtcagcgcggctctggataagatatgttccctgacgggcttcacgttcggaattcagctcacagaatcggagtcggtacgcagcgcaggcatcatcgcccaggatctggaaaaggttctgcccgttgctgtaagttctggcggaactggcactacgccagcaggagaggaaattaacgatcttaaaacggtggactacagtgccatgagcgccctgtatgttgaggccattaaggagctggccgaacggttaaacctcatcgaaaaagaactggctgacctccgcggctcgacagttgcctaa

SEQ ID NO: 115993 - DNA, 228 bp, Enterobacter cloacae
atgggggaactgggtgtagttgaggcagaacaaaccgaaaacggaggactgactatccgcctgtttaagcgaaaatacctgctaggcgatgacggggagatcgtcaaaacgaaaggggaaccgatggacgtgccagcgaacagctggatcgatgttcgcctggataggcccactgattcagttttcaggcgtgaacagtacagtctgcaaagtgacggagaagattag

SEQ ID NO: 115994 - DNA, 1797 bp, Enterobacter cloacae
atggcacaagtcatcaataccaacagcctctcgctgatcactcagaacaacatcaacaagaaccagtctgcgatgtcaacagccattgagcgtctgtcatccggcctgcgtatcaatagtgcaaaagatgacgctgctggccaggcgattgccaaccgcttcacctctaacattaaaggtctgactcaggctgcgcgtaacgccaatgacggtatctccgttgcgcagaccactgaaggcgcactgtctgaaatcaacaacaacttacagcgtatccgtgaacttaccgttcagtcttctacaggtactaactcccagtctgacctggactccatccaggacgaaatcaaatcccgtctggacgaaattgaccgcgtttccggtcagactcagttcaacggtgtgaacgtgctggctaaagacggctctatgaaaattcaggttggtgcgaacgatggccagactatcactatcgatctgaaacaaatcgactctgaaactttgggtctgactggtttcaatgttaacggtgcaggttcagttgccaatactgctgctactaaatctgacctggccgccgctcagcttgctaagacagccgctggcattgctattgcggatccggaagccgattcgaatggtgtgactaagtatacggtaagcgctggcctcaatgcatctactaaggctgacgtgttttccagcataggtgacaaggcagtaattaatgctactgtttcaagtggttttgatagcgtcaccggtaataactataaatatcataaagatactaacgattttacttacacgggaactattagcgctggagatgcaacgactccaagcaatagcgctaagcttcaatctttcctgacgcctaaagctggtgatacagctaacctaaaaattgatattggtggcacgtctgttaatgttgtgctggctagcgatggtaaaatcaccgctaaagatggttctgcactcttcattgatacgacaggtaacctgactcagaacagcgccggtgctgttaaagctgcaacacttgatggtctgactaaaaaccatagtgctgctgccgacgatgacaatcctgccgttgctgttgcggttaatatcaccacagaagacggtgctaaaatccgtttggctggtgatgccgctcctgctaaaggatctgcaactggcggtgctattactgttgaggatgctcgaatcagcgcggattccctgcaatcagccactaaaggcgttgcctttacaattgattctgctggtgatggtgccaccacaactgttggtgatattaaagttgctgcaaatggtgatattacaactacagctgatggtacaaaattctctgcggcctttactaaagcagacggaactttgactaccagcaatgagcaagagattttccttcagaaagacggttccatcactaatggttctggaaaagctgtatatgtatctaaggatggtacctttaccacagatgcgactactaaagcggcaactacaacagatccactgaaagccttggacgacgctatcagctctatcgataagttccgttcttctctgggtgcagtacagaaccgtctgagctctgctgtaactaacttgaacaacaccaccactaacctatctgaagcgcagtcccgtattcaggatgccgactatgcgactgaagtgtcgaatatgtccaaagcgcagatcattcagcaggctggtaactccgtgctgtccaaagctaaccaggttcctcagcaggttctgtctctgctgcaaggctaa

SEQ ID NO: 115995 - DNA, 933 bp, Enterobacter cloacae
gtgattaaaaaacaggcattcaaatttttgcttgaaccaaacaaaggtcagttatctgactttttggcctttgctggttcctgtcgttttgtttacaacaaaggccttgctcttcttaatgagaattaccgttcgggtaaaaaattcataggctacaatcagctggcttctgaattagtggaatggaagaatgaagagagcctttcttggttgaaagaagctccatctcagtgtttacagcaatcattaagagatttagacagagcattcagaaactttttcaccggcaaatcacaatatccaaagtttaaaaagaaaggtcggcatgattctttccgtataccatgccaaagggttagagtagatcaagaaaaaaaactggtatctctccctaaagtcggctgggtaaagtatcgcaagagccgtgaaatcattggtgatttaaaaaatgcaactatttcctttaatcagggaaaatggtatatcagttttaatacagagcaaacagttcctgatccaatacacccctctgaaatcaaaactacaattgtacttaataatgtgaatagcgttcatctgtcatctggggttggcggtgataacacttaccaagcggaagaaaagaaaaagttaatccgtctcaataaaacactgacgagaagaaagaaatacagcaaaaattggctaaaaaccaaaggtaaaattgatcgagtaagatcaaaggcagcaaggataagacttgataatatccataaagcaaccacggcaatttgtaaaaatcacgcagttgttgaggttgtgaacttgatggattctgtatctgccaagaacgataacactctgagtatgagatacgaatttgtcaggcagttgatatacaaacaagagtggctgggtggtgaaattattcgccgggagagtaaactcttgtaa

SEQ ID NO: 115996 - DNA, 1806 bp, Enterobacter cloacae
atgaagaacataagaaatttctccatcattgctcacattgaccacggtaagtcgacgctgtctgaccgtattatccagatttgcggtggcctgtctgatcgtgaaatggcagcccaggttctggactccatggacctggaacgcgaacgcggtattaccatcaaagcgcagagcgtgacgctcgactataaagcttccgatggtgaaacctatcagctgaactttatcgacaccccagggcacgttgacttctcttatgaagtgtcacgctcgctggcggcctgcgaaggcgcgctgctggtggtggatgccgggcagggcgtagaggcccagacgctggcaaactgctacaccgccatggaaatggatcttgaagtggtgccggttctgaataaaatcgacctgccagccgccgatcctgagcgcgtagcggaagagattgaagacatcgtcggtattgatgcgaccgatgcagtgcgctgctcggcgaaaaccggtgtcggtgttccggacgtactggaacgtctggtgcgtgatattccgccgccggaaggcgacccggatgcgccgctacaggcgctgatcatcgactcctggtttgataactacctcggcgttgtctcgctggtgcgtattaaaaacggcaccatgcgtaaaggcgacaaaatcaaggtcatgagcaccggccaggtctacaacgctgaccgtctgggcatcttcacgccaaaacaggttgaccgtaccgaactgaaatgcggcgaagtgggctggctggtctgtgcaattaaagacatcctcggcgcgccggtgggcgataccctgaccggtgcacgtaacccggcagataaagcgctgccaggcttcaaaaaggtgaaaccgcaggtttatgcgggtctgttcccggtcagctctgacgattacgaaaacttccgcgatgcgctcggaaagctgagcctcaacgatgcctccctgttctacgagccagaaagctcaacggcgctgggctttggcttccgctgtggcttcctcggtctgctgcacatggagatcattcaggaacgtctggagcgtgaatacgatctggatctaatcaccaccgccccgacggttgtctacgaagtagaaaccacctcgaaagaggtgatctacgtcgacagcccgtccaagctcccaccgctgaataatattcaggaactgcgcgagcctatcgcagagtgtcacatgctgctgccgcaggagttcctcggtaacgtgatcaccctgtgtattgagaagcgtggcgtgcagaccaacatggtttaccacggtaaccaggtggcgctgacctatgaaattccgatggcagaagtggtgctcgacttcttcgaccgtctgaagtctacctcccgtggctatgcgtcgctggactacaacttcaaacgcttccaggcctcgaacatggttcgtgtggacgtgctgatcaacggtgagcgtgtggatgcgctggcgctgatcacccacaacgataacgcaccgtaccgtggtcgtgagctggttgagaagatgaaagatctgatcccgcgtcagcagtttgacattgcgattcaggcggccattggtaaccacatcattgcccgttcaaccgtgaagcagctgcgtaaaaacgttctggctaagtgctacggcggcgacgtcagccgtaagaaaaagctgttgcagaagcagaaagaaggtaagaagcgtatgaagcaggtcggtaacgttgagctgccgcaggaagcattccttgccatccttcatgttggtaaagacggtaacggtaaataa

SEQ ID NO: 115997 - DNA, 975 bp, Enterobacter cloacae
atggcgaacatgtttgccctgatcctggtcatcgctaccctggtgacaggtctgttgtggtgcctggataagtttatcttcgccccaaaacgccgtgaacgtcaggctgccgcgcaggcagccacgggcgatgcgctggacgcgaaaaccctgaaaaaagtcggcccaaaaccgggatggctggagacaggggcatcggtattcccggtgctggcgattgtgctggtggtgcgttcatttatctatgaaccgttccagatcccgtcaggatcgatgatgccaacgctgctgatcggtgatttcattctggttgaaaagtttgcctatggcatcaaagatccgatctaccagaaaacgctgatcgaaacgggtcatccgaaacgtggcgacatcgtggtgtttaaatatccggaagatccgcggctggattatattaaacgcgcggtaggtctgccgggcgataaagtgacctacgatccggtggcgaaagaggtgaccattcagccaggctgtagctctggcaccgcatgtgaaaatgcgctgccagtcacttactccaacgttgagccagctgattttgtgcagaccttcgcccgccgtaacggcggtgaagcgaccagcggattcttccaggtgccaaaaggtgaaaccaaagagaatggcattcgtctggttgaacgcaaagagacgctgggcgatgttactcaccgcattctgaccgtgcccatcgcacaggatcagctggcaatgtactaccagcagccaggccaacagctggcgacctggattgtgccgccgggacactacttcatgatgggtgacaaccgcgataactctgcggacagccgttactggggctttgtgccggaagcgaatctggtcggtaaagcaaccgctatctggatgagttttgagaagcaggaaggcgagtggccgaccggcgttcgcctgaatcgtattggcggaattcattaa

SEQ ID NO: 115998 - DNA, 720 bp, Enterobacter cloacae
gtgtgctgcatttttgacgcattcatttattggtatcgcatgaaccccatcgtaattaatcggcttcaacggaagctgggctacacttttcatcatcaggagttgttgcaacaggcattaacccatcgcagtgccagcagcaaacataatgagcgtctcgagtttttaggcgactctattttaagtttcgtgattgcaaatgcgctttatcatcgttttccgcgtgtggacgaaggtgatatgagccgcatgcgcgccacgctggtgcgcggcaataccctcgctgaaatcgcacgcgaatttgagctgggtgaatgcctgcgtctggggccaggtgagctgaaaagtggtggtttccgtcgtgaatccatccttgccgatacggtcgaggcattgatcggtggcgtgttcctggacagcgatatccagaccgtagaaaagctgatccttaactggtatcagacccgcctggacgaaatcagcccgggcgataaacaaaaagatcctaaaacgcgtctgcaagaatatttgcagggtcgtcatctgccgctgccatcctatctggtggtgcaggtgcgtggcgaagcccacgatcaggaatttaccatccattgccaggtcagtggcctgagtgaaccggtggtcggcacgggttcaagccgtcgtaaggctgaacaggctgccgccgaacaggcgttaaaaatgctggagctggaatga

SEQ ID NO: 115999 - DNA, 906 bp, Enterobacter cloacae
atgagcatcgacaaaacctattgcggatttattgccatcgtcggacgtccgaacgttggcaaatccaccctgctgaataatctgcttgggcagaagatttctatcacctcgcgtaaggcgcagaccacgcgtcaccgcatcgtcggtatccatactgaaggcgcgtatcaggcgatctacgtcgatacaccgggcctgcacatggaagagaagcgcgccatcaaccgtctgatgaacaaggcggcgagcagctccattggcgacgtagagctggtgattttcgttgtggaaggcacccgctggacgccggacgacgaaatggtcctgaacaagctgcgcgacggcaaaacgccggtgatcctcgcagtcaataaagtggacaacgtgcaggaaaaagccgatctgctgccgcacctgcaatggctgggcagccagatgaacttcctggacatcgtcccgctgtctgcggaaacgggtctgaacgttgataccatcgcgggtatcgtgcgcaagcatctgccggaagcgactcatcacttcccggaagactacatcaccgatcgctctcagcgttttatggcgtctgaaatcatccgtgagaagctgatgcgtttcctgggcgctgaactgccgtactctgtgacggtggagatcgagcgtttccagagcaacgagcgtggcggctacgatattaacggtctgatcctcgttgagcgtgaagggcagaagaagatggtgatcggcaataaaggcgccaagatcaaaactatcggaatcgaagcccgtaaagacatgcaggacatgtttgaagcaccggttcacctggaactgtgggtgaaagtgaaatctggctgggccgatgatgagcgtgcgctgcgcagcctcggttacggcgaagatcagtaa

SEQ ID NO: 116000 - DNA, 708 bp, Enterobacter cloacae
atggatggatggcagcgcgcctttgtcctgcatagtcgtccctggagcgaaaccagcctgatgctggacgtcttcacggaagagtccggtcgcgtgcgccttgttgccaaaggcgcacgttccagacgttctaatctgaaaggtgccttgcagcctttcaccccgctgctggtccgctttggcgggcgaggggaagtcaaaaccctgcgcagtgctgaagccgtctccctggcgcttcctctttctggtatcacgctctacagcggtttgtatgttaacgaactcatctcacgggttcttgaacatgagacccgcttctctgaacttttctttgattacctgcactgtattcaggcacttgctggcgcaaccggcacccctgagcctgtgctgcgtcgtttcgaactggcgctgctcggacaccttggttacggcgttgattttctgcactgtgcgggaagcggagacgaggtagaagacaccatgacctatcgctatcgtgaggaaaagggctttattgccagtgtcgtcgtcgataacagcacctttaccgggcgccagctcagagcactgtatgaacgcgagttcccggacgccgacactctgcgtgcggcaaaacgctttacccgaattgcgctcaagccgtatcttgggggcaaacctttaaagagccgcgaattattcaggcagtttatgccgaaacgctaa

SEQ ID NO: 116001 - DNA, 732 bp, Enterobacter cloacae
atggctgaattactgttaggcgtcaacatcgatcacatcgccacgttacgtaatgcacgcggtaccgcgtatcccgatccggttcaggcggcgtttatcgctgagcaggctggcgccgacggcattaccgttcacctgcgtgaagatcgtcgccacatcaccgaccgggacgtgcgcatcctgcgtcagacgctggacacccgcatgaatctggagatggcggtcaccgaagagatgctggcgattgcctgcgagaccaaaccgcatttttgctgcctggtgccggaaaagcgtcaggaagtgaccaccgaaggcggtctggatgtggccgggcagctcgacaaaatgcgcgatgcctgcaaacgcctggcggatgccggtatcctggtttctctgtttatcgacgccgatttcacccagattaaagccgctgccgacgtgggtgcgccgtatattgaaattcacaccggctgctatgccgatgccgaaaacgatgcagcgcaggcgaaagagctggagcgaatcgccaaagcggcaacctacgccgcgagcctgggactgaaggttaacgccggtcacggcctgacctatcacaacgtaaaagccatcgctgccctgccggaaatgcacgagctgaacatcggccacgccatcattggccgcgcggtgatgagcggtcttaaagaagcggtttccgagatgaagcgcctgatgctggaagcgcgtcagtaa

SEQ ID NO: 116002 - DNA, 381 bp, Enterobacter cloacae
atggctattctgggcttaggcaccgacatcgttgaaatagcccgcattgaagcggtgatcgcccggagcggcgatcgcctcgcaagacgcgtgctgagcgataacgaatgggctatctgggaggcgcatcaacagccggtgcgctttctggcaaagcgtttcgcggtaaaagaggcggcggcgaaagcgttcggcacgggcattcgtaacggcctggcgtttaaccagtttgaagtgtttaacgatgatctgggtaagccacgtctgcgtttatggggcgaggcgcttaagctggcggaaaagctgggcgtggcgcacatgcacgtaacgcttgcagatgaacgccactacgcctgtgcgacggtgatcatcgagagttaa

SEQ ID NO: 116003 - DNA, 261 bp, Enterobacter cloacae
atggcgctgttaatcaccaaaaaatgcatcaactgcgatatgtgcgaacccgaatgcccgaacgaggcgatttcgatgggcgacagcatttatgagattaacagcgaccgctgcaccgaatgcatcggccactatgagacgccgacctgccagaaggtgtgccccattcccaatacgatcttaaaagatccggcacacgtcgagaacgaagaacagctatgggataagtttgtcctgatgcaccatgcggacaaaatttaa

SEQ ID NO: 116004 - DNA, 849 bp, Enterobacter cloacae
atgaactgtttaattcgtattcgccagcgctacgcagggtttgcccagagtgacaaaaagctggcggattatttactttcccagcccgatcgcgcgcgacacctcagctcccagcagctggcaggcgaagccggggtgagccagtcgagcgtggtgaaatttgcccagaagataggctataaaggctttccggcgctaaaactggcaatcagtgaagcactggtaagcaaccctaatccgcagtcaatgccggtgcataaccagatccgcggcgacgatccgatgcgtctggtcggcgaaaagctgatcaaagagaacgtggcggcaatgcatgccacgctggatgtgaacacggaagagaagctgctggaaagtgtagccatgcttcgcgacgcgcggcgtattgtattgaccgggatcggcgcctccggactggttgcgcgtaactttggctggaagctgacaaaaatcggctataacgccatcgttgaacaggatatgcacgcgctgctggcgaccgtgcaggccatggatcctgacgatttactgctggccatctcctattccggcgagcgtcgtgaaattaatatggctaccgacgaagccctgcgcgtaggaggaaaaattctggcgattactggcttcagcccgaatgcgctccagcagcgggccacccgctgtctgtataccattgccgaggaacaggccactcgcagtgcggcgatttcgtcgacgagtgcgcagatgatgctgacggacctgctgtttatggcgctggttcagcaggatctggagcgtgcgccagagcgtattcgtcacagcgaagagctggtaaaaaaactggtctga

SEQ ID NO: 116005 - DNA, 897 bp, Enterobacter cloacae
atgaatctaggctctcttgtttctgaaacgcgtaacccgcaaaccatggatcttgatgcactgtccacgctggagctggtaaaccgctttaatcaacaggataccctcgtcgcgctggcagtcaaagagacattgcccgaggtggcgaaagccgtagacgccgctgccgacgctctgaaagcaggaggacgcattatttacatgggggcgggtaccagtgggcgactcggtgtgctggatgcctcagaatgtcccccgacctttggcgttccgcacggtctggtcgttggcctgattgccggtggccccggcgcgctgctgaaagcggtggaaggggcagaagacaataaacagcttggggaagacgatctcagggcgctgaacctgaccgcgcaggatctggtcgtcgggctggcggcttctggtcgtacgccgtacgtcattggtgggctggaatacgccagacagacgggatgtaccacggtggccatctcttgtaacccgggttcgccgattgcgcaggtggccgccattgccatctctccggtcgtcgggccggaagcgctcaccggctccacgcgcctgaaatcgggaaccgcgcagaagctggtgctcaatatgatctccaccggcgcgatggtgaaattcggcaaggtctaccaaaacctgatggtggatatgcaggccaccaacgtcaagttggtggacagagcctgccgcatggtgatagaggcgacaggggcaggtcgggaagaggcggaagcggtactcaaacagaccgataacgacgtcaaacccgccattctgatgatattaaccgggctggatgcagccgcggccagagccaggctcgaagcccatcacgggtttttacgggcggcattagaacaccaataa

SEQ ID NO: 116006 - DNA, 1365 bp, Enterobacter cloacae
atggacaaaacagcagcgctcgccagcgacatcctgcttgggatcggtggggaaaaaaatattcagcgtctggaaaactgcatgacgcgtgtacgcgtcgaggtgcacaacgacgaaaagcttgatttaacgcgcctgaagcagctccccggcgtgagcgggtacgttaaacaggggcaacagcaccagctgattgtcggtccgggcaaagcggcgcaggtggttgatgccatgcgcgccctgatgacgggcagtgaaacggctcccgcctttgacgacgcggaacgcaccaaagcgcaggcgaaagccaaatacaaagcccccatgagcgatgcgctgcgccagctggcaaacgtctttattcctctgatcccggcgtttatcgcatcggggctgatcaccgggattatcaatatcctcaagcgtccggatattgtcgggaatttcgccacccagtatccgaacctgctgggtattctggcgattttcggcagcgcggtgtttgccatcatgaacattctggtgggggtaaacacggccaaagtgttcggcggctcgctggcgatgggcggcgtaatggcgggtatcctctccagcccgcagctggcgcagattacgctgtttggcgaggcgcttcagccaggccgcggtggggtgattgccgtgctgctggtggtcattctgatgtgctggatcgagaaaaagctgcgtgcgttgctgccaggctcgattgagctgatcctcaacccgctgctgaccacattgattaccgggagcgtggcgattgtggcgctgcaaccgttaggcggcgcgatctctgaagccatcgcccacggcgcgtctctggcgatcgatcgcggcgggctgctggtgggggccgtgctgtccgggaccttcctgccgttagtgctgaccggtctgcatcaggggctggtgccgatccacgtcgaactggtacaggcgcacggctataacgcactgctgccgatcctgtcgatggcgggcgttgggcaggtcggcgcggccatcgcggtgctgatgaaaacccgcaacgcgcgtctgaaaaaggtcattaaaggggcgctgccggtcgggttactcggtatcggcgaaccgttgattttcggcgtgaccttgccgctgggtaagccgttcctggccgcctgcctcggtggcgcggtgggcggggcgttaatcagctactggaaagtggcgaccgtcattaccttcgggatctccggtttaccgctggcattaaccatcgtgaccggaaaagtgatgctctatctgttaggctatctggtagcggtgatcgccgggttcctgtttacctggctgttaggattcaacgacccagaggagtaa

SEQ ID NO: 116007 - DNA, 636 bp, Enterobacter cloacae
ttggccagtcacgagcgtcgcgttgtcttttttgatctggatggaacgctgcatcagcaggatatgttcggcacctttatgcgctacctgctgcggcgccagccccttaacgcgttgctggtattacccctgttacccgttattggtatcgcgctgctggtgaaaggccgtgcagcgcgctggccgatgagcctgctgctctggggatgcacgtttggtcatagcgaagcgcgccttaagcagctcgaacaggattttgcgcactggtttcgcgggcacgtcgccgcgtttcccgtggtacaggcgcgcctgaccagctatctcgacgccaacgatgccgatatctggctgattaccggctccccgcagacgctggtggagcatgtctattttgatacgccctggctgccgcgcgtgaatcttatcgcgacacaaatcgcgcgcggctacggcggctgggtgctgactatgcgctgcctcggacatgaaaaagtggtgcagctggagaaacgcatcggtacgccgctgcgtctgtacagcggctacagcgacagcaagcaggacaacccgctgctctatttttgccagcaccgctggcgcgtcacgcctctgggcgaacttcagcaactcgaatag

SEQ ID NO: 116008 - DNA, 540 bp, Enterobacter cloacae
atgccgcccgcttttcgactggagtatcagcccttgtccaaccctgaacacaatcatgaatactggatgcgccatgcgctggcgctggctcagcgcgcctgggacgagggcgaagtgcccgtgggcgcggtactggtccataacaatcaggtgattggggaagggtggaaccgtccgattggccgtcacgatcctaccgcgcatgctgaaattatggcgctgcgtcagggcggactggtgctgcaaaactatcgtctgcttgataccaccctgtatgtcacccttgagccgtgcgtaatgtgctccggggcgatggtgcacagccgaatcggtacgctggtgtttggcgcgcgggatgaaaagacgggcgctgctggttcactgatggacgtatttgggcatccggggatgaaccaccaggtgaaaactatcggcggggtacttgcaccagaatgttcgggtctgttaagtgacttttttcgaatgcgtcggcagcagaaaaagcaacaaaaggcagaattgaaaccgcaggatgattaa

SEQ ID NO: 116009 - DNA, 1551 bp, Enterobacter cloacae
ttgaaaaaattaaagattaattatctgctcatcggcattgttacgttgctgctggcagtggccctctggccgtctatcccctggttcggcaaggccgaaaaccgtatcgccgccattcaggagcggggggagttgcgcgtcagtaccctctcctccccgcttatttacgacgatatcaacggtaaaactatcggtcttgattacgaactggcacagctgtttgcggactatctgggcgtgaagctgaaagttaccgtgcggcagaacatcaaccagctgtttgatgatttggaccatgaccgtgccgatattctcgccgcaggtctggtgtacaacagcgaacgcagcaaaaactatcagccgggcccgacctattactccgtgtcgcagcaggtggtttatcgtgtgggtagcctgcgcccgcgctcactggccgacatcaccgaccagcaattgaccattgcgccaggccatgtggtgattgacgatctgcgggcgttgaaagagaaaaaatacccgaacctcagctggacggtcgatcctaaactcggcacgaccgaattactggagcaggtaaaagataaaaagctggcctataccattgctgattcggtggcgatcagccttttccagcgcgttcatcctgaaattgccgtggcgctggatgtgaccgacgaacagccggtgacctggtttacccagctggacgacgatcaaaccgtctctgcggctatgctcgatttctttaattccatcaatgaagacggcaccctggcgcgcctggaagagaaatatctcggtcacggagacgattttgattacgttgacacccgcaccttcctgcgcgcggtggacagcgtgctgccggatctgcaaccgctgtttgagaagtacgcccaggagattgactggaagctgctggcggcgatttcctaccaggaatcgcactgggatgctcaggccacctcccccacgggcgtgcgcgggttgatgatgctgaccaaaaataccgcccagagcctcggcatcagcgaccggaccgatgcggaacagagcatcagcggcggcgcgcagtatttacaggatatgatggcgaaagtgccggagacggtcccggaaggggagcggatctggtttgcgctggccgcctataacatgggttatgcgcacatgctcgacgcgcgggcgctgacggcgaaaaccaaaggtaacccggacagctggtcagatgtaaaacagcgcctgccgctgcttagccagaaacagtggtaccagaagctgacgtacggctatgcgcgcgggcatgaagcgtatgcctacgtggaaaatattcgtaagtaccagataagcctggtgggatatctgctggagaaagaaaaagaggcggccgaggcgcaacagctggctgaaagctatccggtggtcgcaccggacgagcttaatcatcctgcggtttcaattctgccttttgttgctttttctgctgccgacgcattcgaaaaaagtcacttaacagacccgaacattctggtgcaagtaccccgccgatag

SEQ ID NO: 116010 - DNA, 3888 bp, Enterobacter cloacae
atgatggaatttctgcgtggttcgcctgcactgtctgccttccgtattaacaaactgctggcacgttttcaggcggccgaccttccggtaagcaatatttacgctgagtatgtccattttgctgacctgaatgcccccctgaatgcagaggagcgcgtacagctggaacgcctgcttaaatatggcccaagcctgagcagccatacgccgaccggcaaattaatcctcgccacgccacgccctggcaccatctccccctggtcttccaaagccaccgacatcgctcacaactgcggcctgagccagattaaccgtctggagcgcggcgtggcgtactatgtggaagcatcaaccctgagcgacgcgcagtggcaggtggttgccgcagagctgcacgaccgcatgatggagagcgtgtttgactctctggatgatgcgcagaaactgttctcccaccatcagcctgcgccgttacagagcgtggatctgcttgggcaggggcgtcaggcgctgatcgacgcaaacctgcgtcttggtctggcgctcgcagaagatgaaatcgactaccttcaggatgcattcgttaagctgaatcgcaacccgaacgacatcgaactgtatatgttcgcgcaggccaactccgagcactgccgccacaagattttcaacgccgactggattatcgacggcgaacagcagccgaagtcgctgttcaaaatgatcaaaaacaccatggagcaaacccctgaccacgtgctgtctgcctataaagacaacgccgcggtgatggaaggttccgaggtgggccgcttcttcgccgaccgcgaagcggggcgctatgacttccaccaggagcctgcgcatatcctgatgaaagtggaaacccacaaccacccgacggcgatctccccgtggccgggtgcagcgaccggctccggcggtgaaatccgtgacgaaggtgcgaccggtcgcggcgcgaaaccaaaagcgggtctggtcggtttctccgtttccaacctgcgtattccgggctttgagcagccgtgggaagaagacttcggcaagccagagcgcattgtcaccgcgctggatatcatgaccgaaggcccgctgggcggcgcggcgttcaacaacgaatttggtcgtccggcgctgaacggttacttccgtacctacgaagagaaagtggacagccacaacggcgaagagctgcgcggctaccacaaaccgatcatgctggcgggcgggatcggcaacattcgcgccgatcatgtgcagaaaggcgagatcgtcgtcggcgcgaagctgatcgtgctcggcggcccggcaatgaacatcggtctgggcggcggggcagcctcgtctatggcttccggccagtctgatgcggatctcgacttcgcatccgtgcagcgcgacaacccggaaatggagcgccgttgtcaggaagtgatcgaccgctgctggcagctgggcgatgccaacccgattctgttcatccacgacgtgggcgcgggtggcctgtccaacgctatgcctgagctggtgagcgacggcggtcgcggcggacgcttcaacctgcgcgatatcctgagcgatgagtcgggcatgagcccgctggaaatctggtgtaacgaatcccaggagcgctacgtgctggcggttgccgccgatcagctgccgctgtttgacgagctgtgccgccgcgagcgcgcgccgtatgccgtcatcggtgaagcgaccgaagagcagcacctttccttaagcgacacccattttgacaaccagccgatcgatctgccgctggacgtgctgctcggcaaaacgccgaagatgacccgcgacgtgcagactcgcaaagcggcgggcaaagcgctggatcgccagggcatcaccgtggcagaagcggttaaccgcgtgctgcacctgcctgccgtggcagagaaaaccttcctggtcaccatcggcgaccgtaccgtgaccggtatggtatcgcgcgatcagatggtcggcccgtggcagatcccggtcgctaactgcgccgtgaccaccgcgagcctcgacagctactacggcgaagcgatggcgctgggcgaacgcacgccagtggcgctgctggacttcgccgcttctgcccgtctggcggtcggtgaagcgctgaccaacatcgccgcgacgcagattggcgatatcaaacgcatcaaactttccgcgaactggatggccgctgccggtcacccgggcgaagatgccggcctgtacgaagcggtgaaagcggtgggtgaagagctgtgtcctgcgctcggcctgaccattccggtgggtaaagactccatgtcgatgaaaacccgctggcaggaaggtaacgagcagcgcgagatgacctctccgctgtcgctggtgatcaccgcgtttgcgcgcgtggaagacgtgcgtcataccgttacgccgcagctttccactcaagataacgccctgctgttgattgacctcggcaaaggccataacgcgctgggcgccaccgcgctggcgcaggtttaccgccagctcggcgataagccagccgacgtgcgcgatgtcgcccagctgaaaggcttctacgacgcaattcaggcgctggtggcgcatcgtaagctgctggcctaccacgaccgttccgatggtggcctgctggtgacgctggcagagatggccttcaccggtcactgcggcgttgaagcaaacattgcaacgcttggcgaagaccgcctggcggcgctgtttaacgaagagcttggcgcggtcattcaggtacgcgccgcagatcgcgacgcggtggaagcgattctggcgcagcacggtctggcagactgcgtacactatctcggtaaagcggtgcagggcgaccgcttcgtgattgaagccgacggccacgcggtgttcagcgaaagccgcaccacgctgcgtatgtggtgggcggaaaccacctggcagatgcagcgcctgcgtgacaatccggaatgcgccgatcaggaacacaacgcgaaggcgaacgacaacgatcctggcctgaacgtgaagctcagcttcgacattaacgaagacattgccgcgccgtacattgcgaccggtgcgcgtccgaaagtagccgtgctgcgcgagcagggcgttaactcccacgttgagatggcggcggccttccaccgggcgggctttgacgccatcgacgtccacatgagcgacctgctggccgggcgtaccgggctggaagatttccaggcgctggtggcgtgcggcggtttctcctacggcgacgtgctgggcgcgggcgaaggctgggcgaagtctattctgttcaacagccgcgtgcgtgacgagttcgaaaccttcttccatcgtccgcagacgctggcgctgggcgtgtgtaacggctgtcagatgatgtctaacctgcgcgagctgatcccgggcagcgaagcctggccgcgctttgtgcgtaaccagtctgaccgcttcgaagcgcgcttcagcctggtagaagtgacccaaagcccgtctctgctgttgcagggaatggtcggttcacagatgccaatcgcggtttcgcacggtgaaggtcaggttgaagtgcgtgatgcggcgcacctggctcagcttgaaagcaaaggactggtggcgctgcgctttgttgataacttcggcaaggtcaccgaaacctatccggctaacccgaacggttcggcaaatggcattaccgccgtcaccagcgacagcggtcgggtgacgatcatgatgccgcacccggaacgtgtcttccgtaccgtgagcaactcctggcacccggaaaactggggcgaggacagcccgtggatgcgcattttccgcaacgcgcgtaaacaactgggttaa

SEQ ID NO: 116011 - DNA, 1437 bp, Enterobacter cloacae
gtgttgaaacgctggcccgctttccctcgctccctgcgacagctcgtaatgatggccttcctgctgatcctgctacctttactggttctggcgtggcaggcatggcaaagcctgaatgcgttaagtgcccaggcggccctgactaaccgcaccacgcttattgatgcccgccgtagcgaggcaatgaccaacgccgcgctggagatggagcgtagctatcgccagtattgcgtgctggacgaccgcacgctggagagggtttatcagaaccagcgtaaacgctacagcaaaatgctggatgcccatgccggggtcttgccggatgacaaactctatcaggcgctgcgtcaggatctgaacgatctggcgcagctccagtgcaaaaacagcggtcctgatgccgccgccgccgcccgacttgaagccttcgcgaacgccaatacggagatggtgcagtccacccgtacggttatcttttcccgtgggcagcaactccagcaggagattgccgagcgcggccagttcttcggctggcaggcgctggtgctgttcctcgtcagccttgggctggtactgctctttacccgcatgattatcggccccgtaaaggggatccagcggatgattaaccgcctgggggagggcaaatctctcggggatacggttgtttttaaaggcccgcgcgagctgcgctcggtcggtcagcgtatcatctggctttctgaacgcctggcgtggctggaatcgcagcgtcaccagttcctgcgccatatctcacacgaactcaaaacaccgctggccagtatgcgtgaaggtacggagctgctggcagacgaagtagcggggccgttaacccctgagcaaaaagagatcgtggcgattctggatgacagtagccgcaatttacaaaaacttattgaacaactgctggactataaccgcaagctggcggatggtgctgtggtgcttgaaagcgttgagattgaaccgctggtggacatggtgatctccgcccatagcctgccagcaagagctaaaatgatgcatacccaggtggatctcaatgcaccttcctgcctggcagagccgatgctgttaatgagcgtactggataatctttattccaatgcggtgcactatggtactgaatccggtaccatttatatcagaagcaataacaacggttcgcgggtatgtattgacgtagcgaatacgggaagcccgattccggatgatgaaaaaacgatgatctttgagcccttcttccaggggagtcatcagcgaaaaggtgcggtaaaaggaagtggtctggggctgagtattgcccgcgactgcatacgacgcatgcagggtgagcttaacatcgtgagtgatgaacgcgccgatgtctgttttcgtatcgaactgcctcttgagccggaaaaatcaatgaaatga

SEQ ID NO: 116012 - DNA, 753 bp, Enterobacter cloacae
atgaataacaacctggtgagtatgtcacacgtcttttaccgcgcactgcgcgcggtgttttccagcaaaaatgtgcgcctgagcctgccctgcttactgctggccggctgtgtaacccatgcgccgaaaagtgcaattagccacaaacaggaagataaatggccgcaaaaacagctggccgatttcctttcaacacgttgcgatgatatctggaacctgtcggggcgtgatgttgaatccaatccgctgttctggctgcgcggaatagactgcgcccagcggctggcgcccgccgaggcccgtgcccaggcggcgatgctggtggacgatacctggcaggacgcgtttaaacgtgggatcgtgatggcggatgccagaatcacgcctgtcgaacgccgcgccaacgtgacgcggctggatacttacgtgatcaatattcccccgcaggtgcgcccggtctatcagctctggcgggatggacaaaccctgcaattacagctgtctgaagagcgtttccgctacagcaaattgcagcagtcgagcgacagcgagcttgatgcgcttcgccagcagcaggagtcgctgcgcgagcagctggaaaccaccacccgcaagctcgaaaatctgaccgatatcgaaagacagctctcgacgcgtaagccggcaggcagctatctgcccgatgggtcgaaaggcaactctgccacgacgccagacagtgagacgccgaaacaagaggatgtgaagccatga

SEQ ID NO: 116013 - DNA, 1338 bp, Enterobacter cloacae
atgacaagccgtaaacctgcccatctgttactggtggatgacgatcccgggctgttaaagctgctgggaatgcgtctggtcagcgaaggctacagcgtggtcatcgctgaaagcgggcaggaggggctgaaagtgctcagccgcgagaaaatcgatctggtgatcagtgatttgcgcatggatgaaatggatggcctgcaactgttcacggagatccagaagcagcagcccgggatgccggtgattatcctcaccgctcacggatctattcctgatgcggtggccgcgacgcagcagggggtattcagcttcctcaccaaaccagtggataaagacgccctctataaagcaatcgacagcgcccttgagcatgcggcgccatccggcgacgacgcctggcgtgaatccatcgtgacgcgtagccctgtgatgctgcgcctgctggaacaggcgcggatggtggcgcaatccgacgttagcgtgctgatcaacggccagagcgggaccgggaaagagatcctggcccaggctatccacaacgccagcccgcgcagtaaaaatgcctttattgccatcaactgtggcgcgctgccggaacagctgcttgagtctgagctcttcggccatgcccgcggcgcctttaccggcgcggtgagcagccgtgaagggctgttccaggcggctgaggggggcacgctgtttcttgatgaaattggcgatatgcccgcgccgttgcaggtcaaactgctgcgcgtgttgcaggagcgaaaagtgcgtccgcttggcagcaaccgcgatatcgatatcaacgtgcgtattatttccgctacccatcgcgatttacccaaggtgatggcgcgcaacgagttccgtgaagatctttactatcgactgaatgtcgtcaacgtgaaaatcccggcgctggccgagcgtgcggaagatatcccgctgctggcaaatcaccttttgcgccaggccgctgaccgccacaaacccttcgtgcgcgcgttctccaccgatgcgatgaaacgtctgatgaccgcaagctggccgggcaacgtacgtcagctggtgaacgtgattgagcagtgcgtggcgctgacgtcatcgccggtgatcagcgatgcgctggtggagcaggccctcgagggggaaaacacggccttgccgacctttgcggaagcgcgaaaccagttcgagctgaactatctgcgcaagctgctgcaaatcaccaaaggcaacgtaacccatgcggcgcgcatggccgggcgtaaccgtaccgagttttataaattgctctcacgccacgagctggaagcgaacgattttaaagagtaa

SEQ ID NO: 116014 - DNA, 339 bp, Enterobacter cloacae
atgaaaaagattgatgcgattattaaacctttcaaactggatgatgtacgtgaagcgctggcagaagtaggcatcaccgggatgaccgtaactgaagtaaaaggttttggtcgtcagaagggccacaccgagctataccgtggcgcagagtacatggtggactttctgccgaaagtgaaaatcgagatcgtggtgagcgatgatatcgtcgatacctgtgtggacaccatcatccgcacggcgcagaccggcaaaattggcgacgggaaaatcttcgtctttgacgtggcgcgtgtgatccgtatccgtaccggcgaagaagacgacgcggcgatttaa

SEQ ID NO: 116015 - DNA, 1191 bp, Enterobacter cloacae
atgctcgacgcccaaaccatcgctaccgtgaaagccacaatccccctgctggttgaaacgggtcctaaactgaccgcccatttctacgatcgcatgttcgcgcataacccggagctcaaagagattttcaacatgagcaaccagcgtaacggcgatcagcgcgaagcgctgtttaacgctattgccgcctatgccagcaacatcgaaaacctggcggctctgctgcctgcggtggaaaaaatcgcccagaagcacaccagcttccagatcaaacctgagcagtacaacatcgtcggcagtcatctgctggcaaccctggacgaaatgttcagcccgggccaggaagtactggatgcctggggtaaggcctatggcgtactggcaaacgtattcatcaaccgtgaagcgcagatctacagcgaaaacgccagcaagaatggcggctgggaaggcacgcgcgccttccgcatcgttgagaaaaccccgcgcagcgcactgatcaccagctttgagtttgagccagtggacggtcagccggttgccgattaccagccgggccagtatctgggcgtctggctgaagcctgaaggcttcccgcaccaggagattcgccagtactccctgacccgcaagccagacggcaaaggctatcgcattgcggttaaacgtgaggaaggcggtcaggtatccaactggctgcataacgaagccagcgtgggcgacgtggtccatctggcggcaccggcgggcgatttctttatggccgttgaaacgaataccccggtgacgttgatctccgcaggcgtaggtcagacgccaatgctggcaatgctggatacgctggcgaaagcaaaccacagcgcgcaggttaactggttccacgcggcggagaacggtgatgtgcacgcctttgcggatgaagtcaaagcgctcggagcgaccctgccgcgtttcaccgcgcatacctggtatcgcctgccgacggaggcagaccgcgcagcggctcgtttcgacagcgaaggcctgatgaatttagggcagcatgaaggggcgttcagcgcaccggggatgcagttctacgtttgtgggccagtagcgtttatgcagtatgccgcgaagcagctggtagacctgggcgtgaataaagacaacattcattacgaatgtttcggcccgcataaagtgctgtaa

SEQ ID NO: 116016 - DNA, 1254 bp, Enterobacter cloacae
atgttaaagcgtgaaatgaacattgccgattatgatgccgaactgtggcaggctatggagcaggaaaaagtacgtcaggaagagcacatcgaactgatcgcctccgaaaactacaccagcccgcgcgtaatgcaggcgcagggttctcagctgaccaacaaatatgctgaaggttatccgggcaagcgctactacggcggttgcgaatacgttgatatcgttgagcagctggcgattgaccgtgcgaaagaactctttggcgctgactacgcgaacgtccagccgcactctggctctcaggctaacttcgctgtttacaccgcgctgttgcagccgggcgatactgttctgggtatgaacctggcgcagggcggccacctgactcacggctccccggttaacttctctggcaaactgtacaacatcatcccttacggtattgatgagtccggtaaaattgactatgaagacatggcgaagcaggccaaagagcacaagccgaagatgatcatcggtggcttctctgcttactccggcatcgttgactgggcaaaaatgcgtgaaatcgctgacagcatcggtgcgtacctgttcgtcgacatggcgcacgttgccggtctgattgcggcaggcgtttacccgaacccggttccacatgcgcacgttgtgaccaccactacccacaaaaccctggcgggtccacgcggtggtctgatcctggcgaaaggcggtgacgaagagctgtacaaaaagctgaactccgccgtgttcccaagcgcccagggcggcccgctgatgcacgttattgccgcgaaagccgtcgcgctgaaagaagcgatggagccagagttcaaggtttatcagcagcaggttgctaaaaacgccaaagcgatggtggaagtgttcctgaaccgtggctacaaagtggtctctggcgggactgaaaaccacctgttcctgctggacctggttgataagaacctgaccggtaaagaagctgacgcagccctcggtcgcgccaacattaccgtcaacaaaaacagcgtgccaaacgatccgaagagcccgttcgtgacttccggtatccgtatcggttctccggccgtaactcgccgtggctttaaagaagcggaagtgaaagagctggcgggctggatgtgtgacgttctggacaacatcaatgacgacgcggttatcgagcgcgttaaaggtaaagttctggacatctgcgcacgcttcccggtgtacgcataa

SEQ ID NO: 116017 - DNA, 423 bp, Enterobacter cloacae
atgaacaacttacgttatttcgatttcggctcctctcgttctttcctgcttttaattgcccgcattgctattgtggtcctgtttattattttcggttatcccaagctgacggggtttagcggcaccgttcagtatatgacgtcgctcggcgcccccatgcccatgctggccgccattgttgcggtggtgatggaagtccccgccgcgattctgattgtgctgggctttttcacccgccccctcgcggtgatctttgtcttctatacgctgggaacagcggtgattggtcaccactactgggatatgacgggcgatgcggttctgccaaatatgattaacttctacaaaaatgtaagtatcgctggcggctttattttgctggcgattaccgggccgggggccatctccctcgaccgacgttag

SEQ ID NO: 116018 - DNA, 1140 bp, Enterobacter cloacae
atggtcttgcattccacgcgctggctggcgctcagctatttcacctatttctttagttacggtatttttttgcctttctggagcgtctggctcaagggaattggtctgacgcctgagaccattggcatccagctgggcgcggggctggtggcacgtttcctgggtagcctgctgattgcgccccgcgtcagcgatccctccttactgattaaagcggtgcgaattctggccctgctgacgctggtctttgcggcctgcttctgggtcagccatcagtttgcctggctgatggtggtaatggttggctttaatctgttcttctccccgctggtgccgctgacggatgccctggcgaacacctggcaaaagcagatcatcatggactatggccgcgtgcgcctgtggggatcgattgccttcgtgatcggctctgcgctggtcgggaaactggtcagcctctatgactatcgtgccattctggcgctgttaacgctcggcatcgcctcgatgctgctcggtatgttgctgcgtccgtcggtaatgccgcagggcgaaagccgccatcaggagagcgccggctggcccgcctggcgctcgctggtggcgcaaagctggcgtttcctggcctgcgtctgtctgctccagggggcacatgcggcctattacggcttcagcgccatctactggcagggggcgggctactcggcttctgcggtaggctacctgtggtcgctcggggtggtggcggaggtcattatcttcgcgctgagccaaaaacttttccgtcgtttcggggcgcgtgacctgctgctgctttccgccgtttgcggcgtggtgcgctggggcatcatgggctggacgacggagctgccgtggctgattgtggcgcaaattctgcactgcggaaccttcaccgtgtgccatctggcggcgatgcgctacattgcggcgcgagagggtggggacgttattcgtcttcaggcggtctattcagcggtggcgatgggcggcagtattgcggtgatgaccgtatttgccggtttcctctatcagcacctggggcacggtgtgttctgggtgatggcgctggtcgctttacctgccatcgtcatccgcccaaaggtggctgctcgctcgtaa

SEQ ID NO: 116019 - DNA, 1278 bp, Enterobacter cloacae
atgatgacgacgcttgaaattccatctgtgctttccagttcgcagcgccgctgccaggtgcttttgatgctttacctgcccgatgctgccatcaccgcacagagcataatcgctgccaacggcgtggacgacgtcatggcacggcaagatatagccgagacgcgcgatgaaatccagcgctatcatcggcttgatatcgtcacgcaccatgatggctgctaccgaattgagggttccgcccttaatcaacgtttgtgcctgctgcactggctgcgcagggcacttcggctctgtccacattttgtcgcccaacagtttacccctgccttaaaaaccgcgcttaaacagcacggcattgcccgcccgctttatgacgatgcgaaccttcgggcgcttatcaacttttgcgcgcgcaagcttcagcgccagtttgagtcccgcgacgtacagtttttacagctttatctgcaatattgtctgattcagcatcatctgggcaatacgccagagttttcgcccgttcagcgcagctggacgcagtcccgaggggaatactttacggcgcaggaaattgtccgccactggaaacggcgcgtcccgcagggaacgcacagcgatgaacagctgttcctggcgctgctatttatgatgcttcgcacacccgacccggtgatggataaacaccagcaggatcagcgcctgcgtcgcgccatcgtgcgtatgattgcccgcttccgggcgcaaaccgggatgaacttcagcgatgagcaggggctgaccgatcagctttatattcatctggctcaggcgctggaccgctccttatttgacatcggcatcgacaacagtctgccggaagagatccaccgtttatacccccggctgctgcgcaccactaaagaggcgctgtttgagctggaagccgaatttggtctgcgattctccggtgaagagatggctctggtggcggtgatttttggtgcctggctgatgcaggagaccgacctgcatgaaaaacaggtggtcctgttaacgggggaagataaagcctgcgaagcgttaattgagcagcagcttcgcgagctgacgctgctgccgctcaatattcgttatcttagcctggaggcgtttaagaaggagggcgccccccgcgaggcggcgctggtcattacgccttatccaaccgccttgccgctgttctcgccgccgctcattcatgccgttgaggccctgaacacgcagcagcaggaacatattcgcgttatgctcgaatcatag

SEQ ID NO: 116020 - DNA, 639 bp, Enterobacter cloacae
atgcaaatagttaaacaaagcgcggtagcgttatttttggcggttttcacttgtgccgccggcgcacatcctcacagttttatcagcctgaaaaccgaactggtgacggacggcacgcagctcagcggcctgaaaatgcgctggacgatggatgaaatcacctccgccgacctgctgtacgatgccggtaacgccaggcctggcgatgagatctggaaaaagctggcggcggaagtcatggccaacgtactcggccagcactatttcaccgagttctggcacaacagacaaaaggtgaagtttcttaatcgtcccacggagtacggcatgacccgcgacggtcatcaggctgtgctgacctttatccttccgctggcgcaccctcagccgctggccgggcagaagtacaggttttccacgtttgacccaacctactatgtcgatatgcattacgcccaggacagcgacgtgcagctgccggaaaatttgcaaaaaatctgcaaaattgccgtgcacaccccgaaacccagcgaagagatgctgaactttgccgtttctcttgataaagaggatgcgccccccgaagacatggagttaggtaaacagtttgcgcaggaggtgacgttacaatgtcagtga

SEQ ID NO: 116021 - DNA, 981 bp, Enterobacter cloacae
atgtcagtgatctcctctcccgtcagtaagccgcgtcgctggctgcacctctggcctctggcgctctttttgttgtttgcggttggcggcgcgctctggctgtggcaggcatggccgcaggtgatggtgaaaagcatcctctggcagcgggaagttaatcagcagatgagcggtctgctgaaagccgtggcggaaaatccgaccaaagcgggcggcgctcttctggcgttcagcttcatctatggcgtgctgcatgccctgggaccgggacacggcaaaatcgttatcacgacctggcttgccacgcatccgtcgaagctgaaatcgagtatcggcctgacgctggcgtcctctttacttcagggcggtgtggcgattgcgctggtcgtggtcgtcctttcgctgctacagctgccggcccgccagctgcatatgagcagcttctggctggagaaggggagttacgcgctggtaggcgtgctggggctgatcctctgctggcgggcgctgaaaaaattgcgcgcgttactgcaaaaaccaaaattcaaagcctttacgccacatcacgttcaccatgaaaactgcgggtgcgggcatcagcatctgccgacgcaggaacaattacagaacggtgaggactggcgtgcgcgcctgatgattgttctctcaatggggatgcgtccgtgctcgggtgcgatcatggttctgctgttcagtaaggttattggcgtgtttggctggggcatgctgtccgcgctggcgatggcggcaggaacgtctctcaccatttcgtctttagcgttgctggtacacagcttccgtcagctggcggtcaaactcagcggcaataaaacgccggtattgtggcgacaggttggctggacaacgcttgcgctggcgggcggggtgattctgctggtggctgcggttacgatgtggatgagcgcggtgccggtgggaagggggttgcggcctttctag

SEQ ID NO: 116022 - DNA, 804 bp, Enterobacter cloacae
atgcatccgatgctgaccatcgccgtgcgcgcagcgcgcaaggcgggtaatgtaattgccaaacactacgaaaccccagactccgtagaaaccagccagaaaggcagcaatgatttcgtgacgaacgtcgataaagccgcagaagcgattattatcgaaacgattcgcaaatcttacccgcagcacaccatcatcaccgaagaaagcggtgaacatgaaggtaccgatcaggatgttcaatgggttatcgatccactggatggcaccaccaacttcgtcaaacgcctgccacacttctctgtgtctatcgcagtacgcatcaaaggccgtactgaagtcgccgttgtttacgatccaatgcgtaacgaactgttcaccgcaacccgcggtcagggcgcgcagctgaacggctaccgtctgcgttgcagcaatgcacgcgatctggacggcacgattctggcgaccggcttcccgttcaaggcgaagcagcacgcaaccacttatatgaatatcctgggcaagctgttcaccgaatgcgcggacttccgtcgcaccggctctgctgcactggatctggcctacgtggcgaccggccgcgttgacggttactttgagctgtcactgaagccgtgggactttgcggcgggcgagctgatcgctcgtgaagctggcgcgattgtttgcgacttcaccggcggccataactatatgtctaccggcaatatcgttgcaggtaacccgcgcgttgttaaagccatgctggcaaacatgcgtgatgaactgagcgatgcgctgaagcgttaa

SEQ ID NO: 116023 - DNA, 792 bp, Enterobacter cloacae
atgtctctcgtttatgataatatgcccgaatattcttcagacactgaatccagacatttaaaaattatgctgcaaaacattcgaatcgtgctggtcgaaacatcgcacaccggcaacatgggctctgtggcccgcgctatgaaaaccatgggcttaacgaacctgtggctggtgaatccgctggtgaaaccagactctcaggctattgctctggcggccggcgccagcgacgtgatcgggaatgcgcagatcgtggacaccctggatgaagccctggccggttgcagcctggtggtggggacaagcgcgcgctcccgtacgctgccctggccgatgctggacccgcgcgaatgcggcctgaaaagcatctcagaagcggaacaggcgccggttgcgctggtgtttggccgtgaacgtgttggcctgaccaacgaggaattacagaagtgccactatcacgtggcgattgccgccaacccggaatacagctcgctgaatctggcgatggcggtgcaggttattgcctacgaagtgcgcatggcatggctggcgacgcaggagaaaccggtcgaacctaaagaagagacggcctacccgctggtggacgacctcgagcgcttctacggtcatctggagcagacgctgctctcaaccggctttatccgtgaaggccacccgggccaggtgatgaacaagctgcgccgtatgttcacccgcgcgcgtccggaaagccaggagctgaacatcctgcgcgggattctggcgtcgattgagcagaagaataaggaatag

SEQ ID NO: 116024 - DNA, 492 bp, Enterobacter cloacae
atgagactgacatctaaagggcgttatgccgtgaccgcgatgctggacgttgcgctcaactccgaagcgggcccggttccgttggctgatatttctgaacgacaagggatctccctctcttacctggaacagctgttctccagactgcgtaaaaatggactggtgtccagcgttcgtggcccgggtggcggttatctgctgggtaaagacgcaggcagtattgcggttggcgaagtgattagcgcggttgacgaatccgtcgacgcgacccgttgccagggtaaaggcggctgccagggcggcgataaatgcctcacccacgcgctgtggcgcgatctgagcgaccgtctgaccggcttcctgaacaacatcaccctgggtgaactggtgaataaccaggaagttctggacgtgtcgggtcgtcagcaaagccatgaatcacagcgcagcacccgttcgcaggacgctatcgacgttaaactgcgcgcgtaa

SEQ ID NO: 116025 - DNA, 1215 bp, Enterobacter cloacae
atgaaattaccgatttatctcgattactccgcaaccacgccggtggacccgcgtgttgccgagaaaatgatgcagtgtctgaccctggacggaaactttggtaacccagcttcccgttctcaccgttttggctggcatgctgaagaggcggttgatatcgcccgtaatcagattgctgacctggtcggtgccgatccgcgtgaaattgttttcacctccggtgcgaccgaatccgacaacctggcgatcaaaggtgcagccaacttttatcagaaaaaaggcaagcacatcatcaccagcaaaaccgaacacaaagccgtgctggacacctgccgtcagctggagcgtgaagggttcgaagtgacttacctggcgccgcagagcaacgggatcatcgacctgaaagagctcgaagcggccatgcgtgatgacaccattctggtttccatcatgcacgttaacaacgaaatcggcgttgtgcaggacatcgcaaccatcggcgaaatgtgccgtgcgcgcggcatcatctaccacgtggatgcgacccagagcgtgggcaaactgcctatcgacctgagccagctgaaagtggacctgatgtccttctccggtcacaaaatctatggtccgaaaggtatcggcgcgctgtacgttcgtcgtaagccacgtatccgcatcgaagcacagatgcacggcggtggtcacgagcgcggcatgcgttccggtacgctgcctgttcaccagatcgtgggcatgggcgaagcgtatcgcatcgcgaaagaagagatggaaaccgagatggcacgcctgcgtacgctgcgtaaccgtctgtgggacggcgtgaaagatatggaagaagtgtatctgaacggcgatctcgagcagggcgcgccaaacatcctcaacgtcagcttcaactatgttgaaggcgagtcgctgatcatggcgctgaaagacctggcggtttcttccggttctgcctgtacgtctgcaagcctggagccatcctacgtgctgcgcgcgctgggtatgactgacgagctggcacacagctctatccgtttctctttaggtcgttttactaccgaagaagagattgactacaccatcaaactggttcgtaactccattggccgtctgcgcgacctttctccactgtgggaaatgttcaagcagggcgtggatctgaacagcattgaatggtcacatcactaa

SEQ ID NO: 116026 - DNA, 387 bp, Enterobacter cloacae
atggcatacagcgaaaaagttatcgatcattacgaaaacccgcgcaacgttggctcttttgacaacagcgatgaatctgtcggtagcggtatggttggcgcgccagcgtgtggcgatgtgatgaagttgcagattaaagtcaacaatgaaggtatcattgaagacgcgcgcttcaagacctacggctgcggttctgctatcgcttccagctccctggtcaccgaatgggtgaagggcaagtctctggacgaagcacaggcaatcaagaacacggatattgctgaagaactcgaactgccgccggtgaaaattcactgctcaattctggcagaagacgcgatcaaagccgccattgcggattacaaaagcaaacgtgaagcaaaataa

SEQ ID NO: 116027 - DNA, 324 bp, Enterobacter cloacae
atgtcgattacccttagcgacagcgctgccgcgcgagtaagctcttttctggcgaaccgtggtaaaggctttggcctgcgactgggcgtacgtacctccggctgttctggtatggcttacgtactggagtttgttgacgaaccggcgtctgatgacaccgtgtttgaagacaagggcgtgaaggtggtggtcgatggcaaaagcctgcaattcctcaacggcactcagctggacttcgtaaaagaaggcctgaacgaagggttcaaattcacgaatccgaacgtcaaagacgagtgtggttgcggcgaaagcttccacgtttaa

SEQ ID NO: 116028 - DNA, 516 bp, Enterobacter cloacae
atggattacttcactctcttcggactacccgctcaatacccgatcgatctccaggcgctgacggtccgttttcaggatctccagcgtcagtaccatccggataaattcgccagcgggacgcaggcagagcagctggctgcggtatcacactccgcaaccatcaaccaagcctggcaaacgctgcgtcatccgctggcgcgtgcagaatatctgctctcgctccacggtttcgatctggcgagcgaacagcataccgtgcgcgacaccgcctttctgatggaacagctggagctgcgcgaagagctggatgaaattgaacaggctaaagacgaagcgcgcctggaaagctttatcacgcgcgtaaagggcatgttcgatacccgccatcagcagatggtggagcaactgaacaacgagacctgggacgtggcggcagacactgtgcgcaaactccgttttctcgataaactgcgaagcagtgctgaacaactcgaagaaaagctgctcgatttttaa

SEQ ID NO: 116029 - DNA, 1851 bp, Enterobacter cloacae
atggccttattacaaattagtgagccaggcttaagcgccgcaccgcaccagcgtcgtctggcggtcggtattgacctgggcaccaccaattccctcgtggcgaccgtgcgcagcggccaggcggaaacgctggctgacgagcagggccgccatctgctgccttccgtggtccactaccagcagcagggtcacgcggtcgggtttgatgcccgcaccaacgccgcgcgcgatccggccaataccatcagctcggttaagcgcatgatgggccgctcgctggctgatatccagacccgttacccgcatctgccgtatcggctgcaggccagtgaaaacggcctgccgatgattgccaccgcggccggtctgctgaacccgattcgcgtttctgctgacatcctcaaagcgctggcggcacgcgccacggcgacactcggcggcgatctcgacggcgtggtaatcaccgttccggcctacttcgacgatgcacagcgtcagggcaccaaagacgctgcgcgtctggcgggcctgcatgtgctgcgtctgctgaacgaaccgacggcggcggccattgcctacggcctcgattccggtcaggaaggggtgattgcggtttacgatctcggcggcgggacgtttgatatttcaatcctgcgcctgagccgcggcgtgttcgaagtgctggcgaccggcggggattccgcgctcggcggcgatgacttcgaccatctgctggcggactacatccgcgagcaggcgggcatcagcgatcgcagcgatgcgcgcgtacagcgtgaactgctggatgcggccatcgacgccaaaatcgccctgagcgacgcgcagtcggtcacggttaacgttgcgggctggcagggtgagatcacccgcaatcagttcagcgaactgattgcgcctctggttaagcgtaccctgctggcctgccgtcgcgcattgaaagatgcgggcgtggaggccagcgaggtgctggaagtggtcatggttggcggctcaacccgcgtgccgctggtgcgcgagcgcgtgggcgaattctttggccgcacgccgctgacctctatcgacccggacaaagtggttgccgtgggcgccgctatccaggccgatatcctggtcggcaacaagccggacagcgaaatgctgctgctggacgtcatcccgctgtctctgggtttagaaaccatgggcggcctggtggagaaagtcattccgcgtaacaccaccattccggtggcgcgcgcgcaggagtttactaccttcaaagacggccagaccgcgatgtccatccacgtgatgcagggcgagcgcgagctggtgcaggactgccgctctctggcgcgctttgcgctgcgcggaattccggcgctgccggcgggcggggcgcatattcgcgttaccttccaggtggatgcggacggcctgctgagcgtcacggcgatggaaaaatcgaccggcgtggaatcgtccatccaggtgaagccgtcctacggcctgaccgatggcgaaatcgcctccatgattcaggactcaatgagctacgccgagcaggatgtgaaggcgcgtatgctggccgaacaaaaagtggaagccgcacgcgtgctggaaagcctgaacggcgcgctcgctgccgatgccgcgctgttaagcgccgctgagcgccaggtgattgacgacgctgccgcgcgcttaagcgcagtcgccgaaggcaatgacgctgacgcaatagaagaagccattaaaaacgttgataaacaaacccaggacttcgctgctcgccgcatggacaaatctgtccgcgtcgcgctgaaaggccagtccgtggacgaggtttaa

SEQ ID NO: 116030 - DNA, 336 bp, Enterobacter cloacae
atgccaaagattgtaattttgcctcatgcggacctctgtccggatggcgctgttctggaagcgaagaccggtgaaaccattctcgatgtagccctgcgtgcaggtatcgaagtggaacacgcctgtgaaaaatcctgtgcctgcacaacgtgccactgcatcgtgcgtgaaggtttcgactcgcttgcagagagcaccgaagacgaagacgacatgctggacaaagcatggggtctggagcccgacagccgcttaagctgccaggccgcggtgaccgatgaagatctggtcgtagagttcccacgttacaccatcaaccacgcacgcgagcattga

SEQ ID NO: 116031 - DNA, 201 bp, Enterobacter cloacae
atgggactgaagtggacagacagccgtgaaatcggcgaggcgctctacgacgcgaacccggatctcgatccgaagaccgtacgattcaccgatatgcatcagtggatttgcgatctggaagattttgacgacgatccaaacgcatccaatgaaaaaattctggaggcgattctgttagtctggttagatgaagcagaatag

SEQ ID NO: 116032 - DNA, 1287 bp, Enterobacter cloacae
atgaccgaagcgatgaagattacgctctccacgcagccagccgactcacgctggggcgaaaaagccacctacagcatcaacaacgacggtattaccctgcacctgacgggcaatgatgatttgggcctgatccagcgcgccgcgcgtaaaattgacggccttggcattaagcatgtgtcgctggaaggcgaaggctgggacaccgaccgcagctgggcgttctgggcaggctacaaagggccgaaaggcacccgcaaaatcgagtgggcgaacctcgacgaagccggtcagaaagagctggaaagccgcctgcaaatcatcgactgggtgcgcgacaccatcaacgccccggcggaagagttaggccctgagcagctggcgcagcgcgccgtcgacctgctgtgcggcgtggcgggcgacaagatgtcttaccgcatcaccaaaggtgaagacctgcgcgagcaaaactacatgggcattcacaccgtgggccgtggctccgagcgtcctccggtcctgctggcgctggattacaacccaaccggcgataaagaagcgccggtctttgcctgtctggtcggaaaaggcatcactttcgacaccggcggctacagcctgaagcagagcgcgttcatggattccatgaagtccgacatgggcggtgcggccaccattaccggcgcgctggcgttcgccatcacccgtggcctgaacaagcgcgtgaagctctacctgtgctgcgcggacaacatggtgagcggcaacgccttcaagctgggcgacatcattcgctaccgcaacggtaaaaacgttgaggtgatgaacaccgacgccgaaggccgtctggtgctggccgatggcctgatcgacgcctctgcgcagaagccggagctgattatcgacatggcaaccctgaccggcgcggcgaaaacggcgctgggtaacgactatcacgccctgttcagcttcgacgacaagctggccgctcgcctgctggccagcgcggcggcggaaaacgaaccgttctggcgtctgccgctggccgagttccaccgcagccagctgccgtctaacttcgccgagctgaacaacaccgcgagcgcggcgtacccggcgggggcaagcaccgcagcaggcttcctgtctcacttcgttgagaactaccatgaaggctggctgcacattgactgctccgcaacctaccgtaaagcggcggttgagcagtggtctgcgggtgcgaccggtctgggcgtgcgtaccgtggcgaacctgctgacggctgagtga

SEQ ID NO: 116033 - DNA, 777 bp, Enterobacter cloacae
atgtcagaaaccaaaaacgaattagaaaccctgctggagcaggcggcgaccgaacccgcccaccgtccggcctttttccgcacgctgctggaatccaccgtctgggtgccgggcaccgcggcggaaggggagcaggttgtcgaagacagcgcgctggatctgctgcactgggagaaagacgacggcacctcggtgatcccgttctttacttcgctcgaggccttgcaggaagcggtagaagacgaacaggcgttcgtggtgatgccggtgcgcacgttgttcgaaatgaccctggggcagacgctgttcctcaacgccaaactgccgaccgggaaagagtttactccgcgcgaaatcagccacctgattggtgacgagggcaacccgctcagcactcaggaggtgctcgaagggggcgaaacgctgctactgtctgaagtggccgagccgcccgcgcagatgattgactccctgaccacgctgtttaaaaccatcaagccggtaaaacgcgcgtttctctgctccatcaaagagagcgctgacgaaaagcctgttctgctgatagggattgaggccgacggcgatatcgacgagatcatccaggcggcgggaagcgtggcaaccgacaccctgccgggcgatgagccgattgatatctgtcaggtgaagaaaggtgagaaggggatcagccactttattaccgagcacatcaccccgttctacgagcgtcgctggggcggcttcctgcgcgatctcaagaccaaccgcattatctga

SEQ ID NO: 116034 - DNA, 771 bp, Enterobacter cloacae
atggataaccgcctggcaacgctgttaacgcgcggatcgtcgctgacccgcgcggagtatcgcgtcctcgcccacctcactgagcatccattgctggtgggcaacatcacggtgcgcgagctggcgcaggcgacatttgtctctaccgcgacgattatgcggctgtgtcagaagctggggtttagcggctttagcgagtttatctggcactgcaagcagctgctttctgacacgccgcatatcaccgtacagcctgagcaacatgcggaaatgcccgcgctttttgcccggttcattgccaactatcagcagaccttccagtgggtcactcagaacaaacgccagcagtttgccagcctgctgcgccagaaagagagcttctttctctacggcgccgggttttcgtacctttttgccgagtacctgaccaagaagttgcaggtgctgggaaaaacggcgttcatctccgggccgggagacagccggaatatttttctcagtaacgccgcgcgctatcaggtgtttattgccgtttcacgcagcggcgaaacggagcaggtactggataaagcgcggatcgccaaaaacgtcggcatgacgatcgtcgcgtttacccgcgcgtcggccaatacgctggcaggcatggcggacgtgcattttgccctctatgacgaagcggtacatttcgccgccgaagccgcaggggtgacgtcgtttgagtcgaatctggtgctgctgatggatttactgctgctggaagcaacggggtga

SEQ ID NO: 116035 - DNA, 846 bp, Enterobacter cloacae
atgtccacctcatattttgtcgctgccgactggctgattgagcacggcgacgacccggaagttcagattatcgacgcgcgcatggcccctccgggccaggagcatcgtgacgttcccgctgaataccgtgcagggcacctgcctggcgcggtattttttgatatcgaagccctctccgatcacacctctcccctgccgcacatgctgcctcgcccggaagcgttttccgtggcgatgcgcgagctgggcatcagcaaagataaacatcttgttgtttacgatgaaggtaatctgttttccgcgccgcgagcgtggtggatgctgaaaaacttcggcgtggaaaaggtatcgattctggcgggcggacttgcaggctggaagcgcaacgaactaccgcttcagcagggtgacgtcacgctgccggaaggggaatttgatgccacgtttgacgctaacgtggtcaagcgcctgaccgacgtgctggtcgtgagccacgaaaacacggcgcaaatcgtcgatgcgcgtcccgctccacgtttcaacgcagaagcggacgagccgcgtccgggactgaaacgcggacatatcccgggggcgctgaacgtaccgtggggcgatctggtgtttgaaggcgagctgaaaaccaccgatgaattgcgtgccatttttgaacgtcagggcgtggatttgcatcgtccggttattgccagctgcggctccggcgtgacggcctgcgtggtgatcctggcgctggcaacccttggcgcgaatgacgtgactctgtacgacggcgcctggagtgaatggggtgcacgggacgatctgccggttgaaccggcaaaataa

SEQ ID NO: 116036 - DNA, 1368 bp, Enterobacter cloacae
atgtttacacccccatttattctgtcgattgccggcggcggtagcacctacacgccaggtattgtgaaaagcctgatggtacgtctgcatgatttccctctggcagagatccgcctgtatgacattgacgaggcgcgccagaacaccattgcgcccgtggtggagaaggttattcgcgaccacagccagagcatcaaattcaccgtcaccagcgacccagaagtggccttcagcggcgcgcattttgtttttgcccagatgcgcgtcggacagtacaaaatgcgcgagcaggatgaaaagatcccgctgcgccacggggtggtcggccaggaaacctgcggacccggcgggctggcatatggcctgcgtactatcctgccgatggtagagctgatcgatcgggtggaacgctacgcgcacgaaaaggcgtggatcgtgaactactccaacccggcggcgattgtcgctgagggcgtgcgtcgcctgcgccccaacgcacgcgtgctgaacatctgcgatatgccggttgccgcgatgcgcaatatgggcgccattctgggcgtggatcgccataaactggaggtggactattttggcctcaaccacttcggctggtttacccgcgtgcgggtggacggcgaggacaagctgccggatctgcgtaaacatatcgcgaagtttggcctgctgacggaagatgccgcgaaaaccgacccgcagcactcggatccgtcgtgggtgaaaacctggcgcaacatcaagccgattatggataacttcccggagtacctgccgaacccgtatctacagtactacctgatgccaaaccagattgtggagcatcagaaccctgactatacccgcgccaacgaagtgatgaacgggcgtgagaaaaagctgtttgccgccgccgaagagtaccagcgcaccggaattttaccggacgccttccacgtaggtgttcacggcgaatttatcgtcgatgtcgcctgctcactggcgttcaacctgcgccaacgccatctggtgatggtggaaaaccgcggggcgattaccaacctgccgtacgatgcggtggtggaagtgcctgcctatatcacctccgaagggccggagcctgtccgcgtgggtcaggtaccgctgttccaccagacgctcctgcaacagcagctggcctctgaacagctgctggttgaggcaaccatcgaaggcagctacgagaaagcgttgcaggcgttcactctgaaccgcaccgtgccgaccatggagcacgcgaaagcgattctggatgagatgatcgaagccaaccgcgactactggcctgcgctgcaaaaggcctggcaggacggtgaagcggtgaaaaaatag

SEQ ID NO: 116037 - DNA, 1545 bp, Enterobacter cloacae
atgaaacgagccgtgaacgccctacaaaatttcggaaaatcattgtacggacctgtacttatcttacccatcgtcggcctgtttatcgccttcgggaatgtactgggtaacggcaatctggccgagtacctgccgtttctcggccacccgctgatccagagtgtcggccagctgatcgccaaatctgccgtgtcggtgctggtcaacctggcgctggtgtttgccgtcgggatccccattggactggcaacacgagacaaaggctacgcggcgttgattgggctggtgacctttatcgtattcattaacgcgatgaacgtgacgttacagcttcagggagaactggcccctgcggaacagatgaaagccgccggacaaagcatggtgctgggcgtccaggtgctggagatgggcgttttcgccgggatcctgaccggggcgctctccggttatctgtacaacaaatattccggtgtccagtttaacggcgcgatggcgatttactccggtcactgctttgtcgcgattgtgatgctgcctgtctctatgctgctcggcgtggtcatgagcgaactctggccgtacgcacagcatggaataagcgctctggcgctggcgatcaaagggtccggtccgtttggcgtggcgatctacggtttccttgaacgcattctggtgccgacgggcctgcatcatctggtctatacgccgttcctgtataccgaactgggcggtacgcaggaggtgtgtggcgcaacctatcagggcgcgcgcaatatctacttcgccgagatggcctgcccggacgtgaagcagctcagcagtaccgtggtgtgggatgcgcgcggcatcagcaagatgttcggccttcctgccgccgcgctggcgatgtacatgaccgcgaagccagagcgtaaagcgattgcgaaagcgattctgatcccggcggcgctgacctcgctgctggtcggcgtaaccgagccgattgaattctccttcctgttcgtcgccccgctgctgttcgtggtgcatgcggtgctgaccggcatcggcatgatgctgttctcgctgtttggcgttcacgccatcggcgccaacgggattatcgatttcatcctctacaacctgccgctcggcacggagaagtccaactggcccatgtacatcgtggtcgggctgatcatgttcgccctttatttcgtggtattccgcttcctgatcctgcgcttcaacatgaaaacgccggggcgtgaagatgaggaccaggagacacgcctttacagcaagcaggagtaccaggcgaagggcaataacgacgagctgggcgaatccatcgtggtgggtctgggcggtcgggaaaatatagaggtagtggataactgctacacccgcttacgcgtcacggtgaaggacgtcgctatcatcgatgaaccgcgcctgaaagcgaccggcgcgaaagggataatcaaacaaggtaacaacgttcaggtggtctacgggctgcatgtcaaaaaaatgcgagaagccgttgagacgtttctctga

SEQ ID NO: 116038 - DNA, 4953 bp, Enterobacter cloacae
atgaaaccgtttcgcttagctgcgatctctctcgcgctgctcaccacctttacgcttgtcggctgtgataacagcgacgacaaacctcaggccgctgcccccgcagcgtctactgcatcagaacagaaaaccccggcaaaaccggatcctgaaaagctggctaagctggccgcgcagagtcagggcaaggcgttgacgctgctggatgcctctgaagtgcaactcgacggcgctgcgacgctggttctgaccttctctgtaccgctggatcccagccaggattttgcgaaaacggtgcatgtggtggataaaaaaagcggcaaagtggacggcgcctgggaactggcccccaatctgaaagagctgcgcctgcgccatctggagccgaatcgtaatctggtcgtcaccgtcgaacgtaatttgctggcgctgaacaaagcgacattcggcatcgactatgaaaaagcgatcaccacccgggatgttgaaccgacggtcggattcgccagccgcggatcgctgctgccgggtaaggtggtggaaggattgccggtgatggcgctcaacgtcaacaatgtggatgtgaacttctatcgcgtgaagccggagtcgctggcctcgtttgtcagccagtgggagtaccgtaactcgctgaccaactgggaatctgacaacctgctgaagatggcggaactggtctacaccggccgtttcgacctcaacccggcgcgcaatacgcgtgaaaaactgctcctgccgctcaaagatattaagccgctccagcagtctggcgtctatatcgccgtgatgaatcaggctggtcactataactacagtaacgccgcgacgctctttaccttaagtgatattgggctgtccgctcaccgttatcataaccgcctggacatcttcacccagagtcttgaaaacggtgcggcgcagtcaggtgtggccattacccttctgaacgataaagggcagaccctggccgaggcgaacagcgacgccgatggtcatgcgaaactggaaaccgataaagaagccgcgctgatcctggccagtaaagatggccagaccacgcttctcgacctcaaacttccggcgctcgatctggcggagtttgatatcgccggtaacccgggttacagcaaacagttctttatgtttggcccgcgcgatctctatcgtccgggtgaaacggtgatcctgaacggcctgcttcgcgacagcgatggcaaaccgcttcccgatcagccggtaaaacttgacgtgctgcgcccggacggacaggtggcgcgtacggtcgttgtgcaacctgagaacggcctttatcgcttcaactatccgctcgatagcggcgcccagaccggcatgtggcatattcgcgcgaatacgggcgataaccagcagcgcatgtgggatttccacgtcgaagattttatgcctgagcgtatggcgctgaatctgaccgggcaaaaaacgccagtttccccgcaggataatgtcgactttaacgttgtgggctattacctgtatggcgcgccggctaacggcaattctctgcaaggccagcttttcctgcgtccgctacgtgacgcggtgcctgcgctgcctggcttccagttcggtgatattgccgaggagaacctgagccgcagcctggatgaagtgcagcttacgctggacgaacaggggcgtgggcaggttaccaccgaaagccagtggaaagaggcgcactcgccgctgcaactgattttgcaggccagcctgctggaatcaggtgggcgtccggtaacgcgacgcgccgagcaggctatctggcctgcggctgaacttccggggatccgcccacagttcgccagcaaggccgtttacgactaccgtaccgataccaccgtcaatcagccgattgtcgatgaaaacggcaacgccagctttgacatcgtctatgccgatgccagcggggcgaaaaaagcggtatccggtttgcaggtgcgtctgatccgtgagcgtcgcgactacttctggaactggtccgagagtgagggctggcagtcccagtttgatcaaaaagatctggttgagggcgagcaggagctaaacctcaaggccgatgaaaccggtaaagtcaccttcccggtggagtggggctcataccgtctggaagtgaaagcccctgatgacatggtcagcagcgtgcgcttctgggcggggtacagctggcaggataacagcgatggcacgggcgctgctcgcccggatcgtgtgacgctgaaactggacaagccatcctatcagccaggcgataccatcaacctgcatattgcagcgccggccgcaggcaagggctatgcaatgatcgaatccagcgaaggaccgctgtggtggaaagagatcgacgtgccagcaaacggtctggatctcgccattccggtggacaaggactggaaacgtcacgatctctacctcagcacgctggtggttcgtcctggcgataaatccaaatccgccacgccaaaacgggcggttggcctgctgcatctgccaatgggggacgaaaatcgtcgcctggccatcgcactggataacccgcaaaaaatgcgtccgaaccagacgctttctgtgaaagtgaaagccagcgtaaaggaggggactgtgccacagaaggtgaacgtactggtctcggctgtcgatagcggcgtgctgaagattaccgactacgtcacgccggatccgtgggaagctttcttcggtcagaagcgctatggcgcggacatctatgatgtttacggccaggtgattgaaggtcagggacgtctggccgcactgcgctttggcggagacggcgatgaactgaaacgcggcggtaagccaccggtgaaccatgtcaccataattgcccagcaggcgcagccggttacgcttgctgccaacggagaaggcaccatcacgctgccgattggcgatttcaacggcgaactgcgtctgatggcgcaggcctggacggaagacgatttcggcagcagcgaaagcaaaatcattgtggcggctccgattatcaccgagcttaacacgccacgattcctcgccagtggcgatacctcccgcctgacgctggacctgactaacctgacggaccagccgcaaacgctgaacattgcgttaaccgcaaccggtaagttgtcgctcgaaggcgctcagccagagccggttaagctgccgcctggcgcacgtagcaccctgtttattccggtgcgcgccctggaaggctatggtgatggtgaagtgactgctcaggtgacggggcttcagctcccaggtgagacgtttgcgccgcagcagaaaagctggaaaattggcgtgcgtcccgcattcccggcgcaaacggtgaatacgggcacgatgctgaaccctggcgaatcctggagtgcaccagcacagcatatcaacggtttctcgcctgccacgctacaggggcagctgttgctcagcggtaaaccacctttaaatctggcgcgctacattcgtgaacttcaggcctatccatacggatgtcttgagcagaccaccagcggcctgttcccgtcgctttacaccaacgcggcacaacttaaggcactgggtattaaaggcgataccgacgataaacgccgtgcggccattgatatcgggatctcccgtctgctgcaaatgcagcgtgacgatggcggttttgccttgtgggataaaaacggcccggaagagtactggctgaccgcctatgtcacggacttcctggtgcgggcaggggagcagggttacagcgtgcctgccgaggcagtgaataacgccaacagccgactgctgcgctatttacaggatccggggatgatgtccatccgctacagcgacgacacccaggccagcaaatttgctgttcaggcgtacgcttcgctggtgctggctcgtcagcaaaaagcgccgctcggtgcgctgcgtgaaatctgggagcgccacgctcaggctgcttccgggcttccgttgatgcagctgggcatggcactcaaactgatgggggatgcaccgcgcagccagcaggcgctggatctggctctcaaaactccccgtaacgacagccgaaactggatggcggattacggcagccaactgcgtgataatgccctgatgctctccctgctggaagagtacaagctgctgccggatgcgcaaaacaggctgctgaacgcgttatctgaagacgcgttcagccagcgctggctgtctacccaggagagcaatgcgctgttcatggccggacgttcactgcaaaccttgtcaggcgcgtggacggcaacgaccagcctctctgaacagacccagagcagtgataaagcgcaggtagaaaacctgaacggcgaccagcttgatgccttgcaggtgacgaataccggcactacgccgctgtgggtacgactggacacgactggctatccggagtacgcgcctcagccatcctctaatgtcttgcagattgaacgtcatatcctggcgacagacggcagcagcaagtcgctctcttctctgaagagcggtgagctggttctggtgtggctggaggtgaaggccagccagaacgtgccggatgcgctggtggtggatctgctcccggcaggtctggagctggaaaaccagaatctggcgagcagcagcgccagcttgcaggacagcggcagtgaagtgcaaaacctgctgaatcagatgcaacagtctgatattcagcacatggaattccgcgacgatcgctttgtggccgcggtgccggtcaatgaaggtcagccggtcacgctggtttacctggcccgtgccgttacgccgggaacctaccaggtgcctgttccgatggtcgagtccatgtacgttccgcagtggcgggcaacgggggcggccagtggcccgctgatcgttgttccgtaa

SEQ ID NO: 116039 - DNA, 2328 bp, Enterobacter cloacae
atgcggatagcacgcctgattcgctcccgctggctgtggctggcgggagcgcttctcgtttcaggggggctgattgtcgtcgctgaccgcgtgtggccgttgcccctgaaagaggtcaacccagcgcgagtggtggtggatgagcagggtgttccgctgtggcgttttgccgacagcgaaggcatctggcgctatccggttaccattgaagaggtttccccacgctatcttgaggcgctgatccagtatgaagatcgctggttctgggatcacccgggcgtcaatccgctttctgtactgcgtgccgcctggcaggatctcacctccgggagagtggtttccggcgggagcacgcttaccatgcaggtggcgcgcctgctggatccgcatccgcgtacctttggcggcaaaatccgtcagctgtggcgggcgatgcagctggagtggcatctctccaagcgtgaaatcctgacgctgtatctcaaccgtgccccgtttggcggcacgttgcagggcgtgggcgcggcaagctggacttaccttggcaaaccgccgtctcagctgagctattccgacgcggcgctgctggcagtgctgccgcaggcacccagtcgtctgcgcccggatcgctggccgaaacgtgccgaagcggcgcggaacaaagtgctcgaccgtatgctgactcagggtgtctggtctgagaagcaggtgaaagagtcccgtgaagagccggtctggctggctccccggcagatgccgcagctggcgccgctcttttcccgcatgatgctgagtaaaagtcgtgacacaaaaatagtcaccacgctggatgcagctttgcaacgacagcttgaagagctggcaatgaactggaaatcacgcctgcctgcccgcagttcgctggcgatgatcgtcgtggatcatacatccatgaaagtgcgtggctgggtaggctcggtagatatcaatgatgacagccgtttcagccacgtggatatggtcaatgcgatccgatcgccgggatcggtcctcaagccattcatctatggcatggcgctggacgatggtctgatccatcccgcttcgttattgcaggatgtgccaagaaaaacgggggattatcgtcccggcaactttgacagcggcttccatgggccggtcagtatgagcgaagccctggtgcgttccctcaacctgcctgcggtgcaggttctggaagcgtacggcccaaaacgttttgccggaatgctgagcaacgcgggattaccgctcattctgcctgcgggggcacagcccaacctctctctgatcctggggggcgcaggcgcacgcctggctgatatcgctgccgcctatagcgcctttgcgcgtcagggtaaggcgggccggctgcgtttacagccgggcgatccgctgatcgaacgtccgctgctgtcgcagggggcggcgtggatcattcgacgcattctcgctaatgaagcacagcccctgccggacagtgcgttgccccaggttgcgccgctggcgtggaaaacgggcaccagctatggctaccgggatgcctgggccatcggcctgaatgcccggtatgtcattggaatctggaccggacgcccggacggcacgcccgttgccgggcagtttggtttcgccagcgcggtaccgctcctgaatcaggtcaataacatgcttcagtcccgctcgatggtggatgaagcgcgcctgccgcgcgatccgcgtcctgcaagcgtaggacggggcgtgatttgctggccggggggccagtccctgcctgaagggagcgaaaactgtcggcgtcggctgtcaacctggctgctggaaggcagtgaaccgcctacgctgttgctgccggaacaggaaggtattcgcgggatccgtttcccggtctggctggataaagaaggcaaacgcgttgcggcggattgtcctgatgcgacagagaaagtgctggatgtctggccgctaccgctggagtcctggctgcctgctgctgaaaaacgggctgctcgtcttcccgcccgttcagctatttgccctccgctggataaccataatgcggcgccgatgatgttgtcaggcgtcagagaaggggcggtaattaaacgtcttccgggtgagaaaaatatgacccttaacgtttcaaccagcggcggggagggacaacgatggtggtttttgaatggcgaaccgctggacgggcatcagaagaattattcactgcaattatatttgccgggtaaatatcaattaattgtattagatgaaacaggacaaacggcgacagtgaattttgaattagatcgctaa

SEQ ID NO: 116040 - DNA, 2379 bp, Enterobacter cloacae
atgaaaaaaaataaacatcagggagaagggcttattcccgccatatcccggcgtcagtttattcaggcagggtcggcgctcgccgccctgccgtttgtcgtcaaaaccggcaaagtacaggcacagggcgcggcggtttcagacgctacgcctgaagaaaaagtggtgcaaacctgtagtacgtttgactgcggcggcaaatgtgatattcgtgctcacgtcagtgatggcgttgtgacccgaatttcaacgcgtccggataacgcgctggatccgcagatgccagtaatgcgcgcctgcgttcgtggtcgggcttatcggaaatttgtttatcaccccgatcgactgaaatatccaatgaaacgcgtaggtaaacgtggcgaaggaaaatttgagcgtattacctgggatgaagccaccaccctcattgcgaatcaattaaaaactattacgcaaaaatacggtgctgcgtcacgctatgttcatgtgggcaccgcggtgtccggcgggaccttttccggcgataaaatggttcgtcgtctgctcaacttaaccggcggctatctcgaaagctatcactcggtcagtatgggtaacacggcggcggcaacgccgtatacctatggcaccgccgccagcggcagctctctggacacgctgctggacaccaaactggtcattctctgggggcataacccgacggaaaccatcttcgggcacagcaaccacttctaccagaagatgaagcaaaacggcacgcgcttcattgttgtcgacccacgctattccgatacggtttcctcccttgccgatcagtggatcccgctgcttcccacgacagacaacgccctgatggacgcgatgatgtatgtgatcgtcacggagaatctgcacgatcgcgactttattcaacgctacaccctgggctttgacgaagacgccatgccagagggcgttccggccaatgaatccctgatggcttatctgagcggtgcaaaggatggcgtggcgaaaacgcctgagtgggcagagaaaatcacccacgtgcctgcacaaactattcgtcagctggcgcgtgactacgcaaccaccaaacccgccgcgctgatccagggctggggaccgcagcgtcacaactgcggcgagcgcaccgcgcgcggctcgacgatactggccacgctaacgggtaacgtcggggtgaaaggtggctgggcagcaggctatggcggctgcgcaaaccgcaaatttgcggccgggccagagatgccggacaacccggtcaacgccaaaatttcggtcatgaactgggtgcaggccgcggatgatgcttctaaggtaaccgcggaagatggcctgaaggatgctgagaagctggacagcaatatccgcatcctgttctcgctggcgggcaattatctggctaaccagaacccggatcttcatcaggcaacccgtgtcctggaagacgagtcgaaaatcgagtttatcgtcgcaagcgatctgtttatgacgccgagcgccagatacgccgacctgcttttgccggaaaccagcttcatggaacgctggaatatcggcgaaacctggggcacggcaagctatctgatcctgtcagaaaagctgattgaacctgaatttgaacgccgttcagactacgactggctacgggaggtcgctgctaagcttggcgtcgagccagcgttcagcgagggccgtgacgaaaaagcgtggattgagcacatctgggagcagacgcggctgtccatgccggatgaaaacctgccggacttcgcgacgctacagaagacgcgtcagcatcttttcaaaagcgcgccgtacgttgcctttgaagacaacattcgcgatccgcagaatcatccgttcccgacgccgtccggaaaaattgagatcttctcgaagcgtctgtacgacatgcagcacccggaaatcccggcgctgtcgcactacgtgcctgcccatgaagggccggaagacgagctggtcaaaaccttcccgctccagctgatcacctggaaagggaaaaaccgcgccaactccacccagtacgccaacccgtggttaattgaggcgcagcagcaaaagctgtggatccacccgcaggatgcgcaaaagcgcggcattgcgcagggggataccgtgcgtattcataacgcgcgcggcatttgtgagatcccggcggaggtcacgccgcgcatcattccaggcgtggtggccatgcaggcaggcgtctggtggcagccggacgcgcagggtatcgataaaggcggctgcgcaaacgtgctcagttccgcccgtattaccgcgcttgcgaaagggaattcccatcaaaccatgctggtggaggtagctagagcatga

SEQ ID NO: 116041 - DNA, 630 bp, Enterobacter cloacae
atgagtcagtttaaacattacgcaccggtgagcgacaaacagctgggtttttatatcgactcttctcgctgctcgggctgcaaggcatgccaggtggcgtgcaaagataaaaacaaccttgaggtcggacgtcgtttccgtcgcgtttatgaagtcaacggcgggagttttatcccgaccgggcagggcggcgtcagcaacaacgtttttgcctacacgctctctatttcctgtaaccactgcgcagaccctgtctgcaccaaaaactgtccaaccaccgcgatgcataagcgtccgggggacggcattgtgcgcgttgatactgataagtgtgtcggctgcggctactgcgcatggtcttgcccttacggcgcgccacagctcaacgagcagaccgggcagatgtccaaatgtgatttctgcgtggatctccaggcgaagggagagcagcccgtctgtgtggcaacctgtccactcgaagcgattaaattcgggccgattgatgaactgcgggcgaagtatggtgcggtctgtgatgtgaaaggcttgcctgattcctccatcaccaaaccaaacctggtgatcaaagcgcatcagggcgcagagaaagaggggaaacgtcatgcatga

SEQ ID NO: 116042 - DNA, 780 bp, Enterobacter cloacae
atgcatgagttaccgctgctgatttttacgctgttcctgcaaggatcggttggcgttacgctgtggctggcgttcggaagcacgcaacgcagcgcgctgctgccggcagccggagcgtttgtgctggcgagtctggggctgctcgcctccgcgctgcacatgggctatccgcttaatgctcttaacgcgctgcgccacgtatccagctcctggctgagccgtgagattatctttgccagtctttatcttgcggcgcttggcttcgcaacgctgctgatgtttgtcaaaaagccaggctggaagccactgttggttgtggcaggtctggttggtttagtcgacgtgttctgcatggcgcagatctacatgcacgcatctgtggtgacatggcagcacgtaaacacgctggtgctgtttttcggttcggtggggattatcggctcagcctgcatggccgttgggacgcgttcccagactaccgtgcgtgcggcggttgtcattatcacgctgctggtgcttgtgcgtctggtgatgcagcccgtctggctggcagatattacggctatggacaacaccgtggtgacgttccctcacgcaccgctacagatgctggagcaactgcgaaccgttcatctgctgagctggtgcgtatccgttgcgggtatgctgtgctttgctgcgggcggtctgaaagcggcgcgatctcccatgctgctgggaagcgcattgctgattgtcggtgagctgatgctgcgcttcgttttcttcagtattggctga

SEQ ID NO: 116043 - DNA, 876 bp, Enterobacter cloacae
atgagtggattgacctttgccccggcgatggacgtgacgcatgcgtgcgtccgtcgccgttttcgccacgcttcctgcctcgcctgcgcggacgtctgtcctgtgcaggcttttacttttaccgactcaagcgtctcggttgatgacagccgctgtattgaatgcggtgactgcctgttcgtctgccccgctgaggccatcaccggcatcacgccgcgaaaacgctttctgtgtggcgatacgcttgttgggccgtttactgaccgtgcgccaggggtgaatgagcttctgctgtggcacgcgcagtaccacgttcgttttatcagtatcgacgcggagcagaatcctgactggttgctggcgattgcccggctgaatctggcgcttcgccgacgcggtgaagcggcgtgggcgtttaaatatatacccgtcaacgaggttaataccgcccggcgtgtgctgatgcacgttccccgagaggatgtccaggcctgtagcgtcgtgcccggtcagcgtgaactgcgcagggcgttttctgcgtttagcgaggcagagataactctcgataccgaatcctgcgtactgtgcggcgcgtgctggcggagttgtacggaaaacgcgattcggtttgagaacgctgaactggtcgtggaaaccggacgctgtacggggtgcggcggctgcgaagcggtatgccagcatgcggcgataaacgtgacgcaaacagaaggaacagcgaaaagcgtgaccataccggcatatgaagccgtttgcctgacgtgccaccgtcatttctggtcatttaggtctgatgaaaagcagtgtccgctctgttttcatcatcaacacggcatgcgaaatacgagctgttgctaa

SEQ ID NO: 116044 - DNA, 432 bp, Enterobacter cloacae
atggctattgaacgtactttttccatcatcaaaccaaacgcggtggcaaaaaacgttattggcagcatcttcgctcgctttgaatcagcagggtttaagatcgttggcaccaaaatgctgcacctgaccgttgagcaggctcgcggtttttacgctgagcacgaaggtcgcccattctttgatggtctggtcgagttcatgacctctggcccaatcgtggtatccgtactggaaggcgaaaacgcggtacagcgtcaccgcgatctgctgggtgcaaccaacccggacaacgcgctggcaggtactctgcgcgccgactatgcagacagcttcaccgagaacggcacccacggttccgactctgttgaatctgctgcgcgcgaaatcgcgttcttcttcgctgaaggcgaagtgtgcccgcgcactcgctaa

SEQ ID NO: 116045 - DNA, 1167 bp, Enterobacter cloacae
atgtctgaattagtgaatacctccgaagtcgccattcctgcggttcccaataaaaatggaaaaattaacctgctggacctgaaccgtcagcagatgcgcgagttctttaaagagatgggcgagaagccatttcgtgccgatcaggtcatgaaatggatgtaccactattgcagcgacaactttgatgacatgacggacatcaacaaagtgctgcgcaataagcttaaagaagtggcggaaatccgcgcaccggaagtggtggaagagcagcgctcttcagatggcaccatcaagtgggccattgccgttggcgatcagcgcgttgaaaccgtgtatatcccggaagacgatcgcgccacgctgtgcgtctcttctcaggtgggctgtgcgcttgagtgcaaattctgctctacggcgcagcagggctttaaccgtaacctgcgcgtgtcggaaatcatcggccaggtctggcgtgccgcgaaaatcgtgggcgcggcgaaagtcaccggtacgcgtccaatcaccaacgtagtgatgatggggatgggtgaaccgctgctcaacctgaccaacgtcgttccggcgatggaaattatgctcgacgatttcggttttggtctgtccaagcgccgcgttacgctctctacttccggcgttgtgcctgcgctggacaaactgggcgacatgattgacgttgcgctggccatctcccttcacgcgccaaacgacgccatccgtgacgaaattgtgccgatcaacaaaaagtacaatatcgaaaccttcctggctggcgtgcgccgttacctggagaaatctaacgcgaaccagggccgcgtgaccattgaatacgtgatgctggatcatgttaacgacggtaccgaacatgcacatgagctggctgaactgctgaaagatacgccatgtaagatcaacctgatcccatggaacccgttcccgggcgcgccgtatggccgtagctcgaacagccgtatcgatcgcttctcaaaagtgctgatggagtatggtttcaccaccatcgtacgtaaaacgcgtggcgatgatattgacgcagcctgtggtcagctggcgggtgacgttattgaccgtaccaaacgtacgctgcgtaagcgcatgcagggtgagtcaatcgcggtcaaaaccgtttga

SEQ ID NO: 116046 - DNA, 1011 bp, Enterobacter cloacae
atgaatactgaagccactcacgatcaaaatgcagcactctccactggcgttcgtcttcgcaacgcccgtgaacaactcggactcagccagcaagccgttgcagaacgcctgtgcctgaaggtttccaccgttcgcgatattgaagaagataaggcacccgccgatctggcttcaacgtttctgcgcggttatatccgttcttacgccaaactggttcatatccctgaagacgaattactgccgatgatggagaagcaggcgcctgtgcgtgcggcaaaagttgcgccgatgcagagcttctctctgggtaaacgtcgtaaaaaacgcgatggctggctgatgagctttacctggctggtcctgttcgtggttgtcggcctgacgggcgcatggtggtggcaaaaccataaagcgcagcaggaagagatcacgacgatggccgatcagtcctccgctgagctcaatcagtctggtaataacggcgcgcaaagcgtgccgctgagcaccgaaggagctgcgacctccagcgaacctcaggcggcagcaagcagcacgcctgcaaccgagccagcgacgacgccagaagcgacggcgaataccgcaccagccacccagacccaggatcagaacgcggtcgtatcaccttcacaggccaatgttgataccgcccctgcggcaacggcaccggcagataacaccgcggcgtcactgccaactgacccggcgggtacggcggcacctgccgttgacccgaatgcgctggtgatgaatttcacggcggattgctggctggaagtgactgatgcgacaggtaaaaagctgttcagcggcctgcaacgtaaagatggcacgttaaatctaacgggccaggcaccttacaagcttaaaatcggcgcaccggcagcggtacagatccagtatcaaggaaaacctgtcgatctgagccgctttatcagaactaaccaggttgcgcgtcttaccgttaatgccgaacaatcagcagcacagtaa

SEQ ID NO: 116047 - DNA, 1119 bp, Enterobacter cloacae
atgcataaccaggctcctattcaacgtagaaaatcgaaacggatttacgttgggaacgtgccagtcggcgatggggcgcctatcgccgtccagtcgatgaccaatacgcgtactacggatgtagaagcgacggtcaatcaaatcaaagcattagaacgcgtaggcgcggacattgttcgcgtctctgtaccgaccatggatgccgccgaggcgttcaaactgatcaagcagcaggtgagcgttccgctggttgccgatattcacttcgattaccgtatcgcgctgaaagtcgctgaatatggtgtcgattgcctgcgtattaacccaggcaacatcggcaacgaagagcgcattcgcatggtggttgactgcgcccgcgataaaaacattccaatccgtatcggcgtgaacgctggctctctggaaaaagatctccaggaaaagtacggtgagccgacgccgcaggcgctgctcgaatccgcaatgcgtcacgtcgatcatctggatcgccttaacttcgatcagtttaaagtgagcgtgaaagcgtctgacgtcttcctggccgttgaatcgtatcgtctgctggcaaaacagatcgatcagccgctccaccttgggatcaccgaggcgggcggtctgcgcagcggttcggtaaaatcggcgattggtctcggcctgctgctctctgaaggcatcggcgacacgttacgcgtctccctggccgccgatccggtggaagagatcaaagtcggtttcgacatcctgaaatcactgcgtatccgcgcgcgtgggatcaacttcattgcctgcccaacctgttcacgtcaggagtttgacgtgatcggcaccgtgaatgctctggagcagcgcctggaagacatcattaccccgatggacgtttccatcatcggctgcgtggtgaacggtccgggtgaagcgctggtgtccacgctgggcgtgaccggcggtaacaagaaaagtggtctctatgaagatggcgttcgtaaagatcgtctggataatagtgatatgatcgaccagctcgaagcccggattcgcgcgaaagcgacgatgatggacgaagcgaagcgcatcagcgttcagcaggttgaaaaataa

SEQ ID NO: 116048 - DNA, 1275 bp, Enterobacter cloacae
gtggcaaaaaacattcaagccatccgcggcatgaacgattatctgcctggcgaaaccgccatctggcagcgcattgaaggcacactgaagcaggtgctcggcagctacggttacagcgaaattcgtttgccgattgtagagcagaccccgttattcaaacgcgcgatcggcgaagtaaccgacgtggttgaaaaagagatgtatacctttgaggaccgcaacggcgacagcctgaccctgcgtcctgaggggacggcgggttgcgtacgcgccggcatcgaacatggtctcctgtacaatcaggagcagcgcctgtggtatatcggcccgatgttccgccacgaacgtccgcaaaaaggccgctaccgtcagttcaaccagcttggcgtggaagtgtttggtctgcaagggccagatatcgatgccgaactgattatgctgactgcccgctggtggcgtgcgctcggtatttctcagcacgtatccctggagctgaactctatcggttctctggaagcgcgtgcgaactatcgcgatgcgctggtggcgttcctggaacagcacaaagagaagctcgacgaagactgtaagcgtcgtatgtacagcaacccgctgcgcgtactcgattccaaaaatcctgacgtacaggcgctgctgaacgatgcgccagcgctgggtgactacctggatgaggattcccgcgaacactttgctggcctgtgcaagctgcttgaagcggcgggcattgcttataccgttaaccagcgtctggtgcgcggtctggactactacaaccgcaccgtatttgagtgggtcaccaccagcctcggttcgcagggcaccgtctgtgccggtggtcgttatgacggtctggtcgagcaactgggtggtcgcgcagcaccggcagtaggcttcgcgatgggccttgagcgacttgttttgctggttcaggcagttaatccggaatttaaagccgatcctgttgtcgatatatacctggtggcctcaggtgcggatacgcagtctgcggcgatgcagcttgccgaacgcgtgcgcgatgcgctgccgggcgttaagctgatgaccaaccacggcggcggcaactttaaaaaacagtttgctcgtgccgataagtggggcgcaagtatcgcactggtgctgggtgagtccgaagtggccaacggcgaagtggtagtcaaagacctgcgctctggtgagcaaactacggtaacgcaggatggcgttgcggcgcacttgcgcactctattgggctaa

SEQ ID NO: 116049 - DNA, 621 bp, Enterobacter cloacae
gtggaaatttacgagaacgaacacgaccaggttgatgcggttaagcgcttctttgctgaaaacggcaaggcactggttgtaggggttattttaggtgttggtgcgctggtaggctggcgttactggaacaatcatcaggctgactctgctcgcggttcgtccctgaactacgaaaataccgttagcgcaattcgtgccgatcagccgcaaacgttgacggctgcggagaaatttgccgctgacaacaaaaacacctacggcgcgctggctgcgctggaagtggctcagcagtatgttgataaaaacgaactggacaaagccgctgcgcaactgtctcaggggcttgctgctgccagtgacgaaaatctgaaagcggtgatcaatctgcgtctggcgcgtatccaggttcagcagaaaaaagccgacgacgcgctgaaaacgcttgataccatcaaaggcgaaggctttgccgctattgttgccgatcttcgcggtgaagcactgctgagtaaaggtgataaagcgggcgcgcgtaaagcgtggcaagctggcgtggatagtaaagcttcacctgcgctgagcgaaatgatgcagatgaaaataaataatttgtccgtctga

SEQ ID NO: 116050 - DNA, 1179 bp, Enterobacter cloacae
atgcaattgcgtaaattacttctgccaggactgctttctgttacgttattgagtggttgttcactgttcagtggcgaagaagacgttgttaaaatgtccccgctgccgacggttgaaaaccagttcaccccatccaccgcctgggacacctctgtgggagatggtattggcgatttttattccaacctgcacccggcatttgctgacggcgttgtctatgcggccgatcgcaaaggcaccgttaaagcgctgaacgctgatgacggaaaagaagtgtggtccattaacctggcggaaaaagacggctggttctcccgtaaacctgcactgctttctggcggcctgaccgttgctggcggtcacgtgtatgtgggtagcgaaaaagcgcaggtttacgcgctgaatgccagcgacggttcggttgcatggcagaccaccgttgccggtgaatccttgtcgcgtccggttgtcagcgacggcctggtgctgatccataccagcaacggccagttgcaggcgctgaacgaagccgatggtctggtaaaatggacggttaacctggatatgccagcgctgtctctgcgtggtgaatctgctccggcgaccgcctttggcgccgccattgtgggcggtgacaacggccgtgtcagcgcggtactgatgcagcagggccagatgatctggcagcagcgtatttcccaggcgaccggttcaactgaaattgaccgtctgagtgacgtggacaccacgccagttatcgtcgacggtgtggtttacgcgctggcgtacaacggcaacctgacggcgctggacctgcgtagcggccagatcatgtggaaacgtgagctgggttccgtgaacgatttcatcgtcgacggcaaccgtatttatatggtggatcagaacgaccgtctgctggcgctgagcaccgaaggtggcgtgacgctgtggacgcagagcgatctgctgcaccgtctgctgaccgcaccagcactgtataacggcagcctggtggtgggcgacagcgaaggctatatgcactggatcgatccagagaatggtcgcttcgtggcacagcagaaagtggatagctcaggcttcctgacggagcccgttgtggctgacggcaaactgctgattcaggcaaaagacggcacgctgtacgcgatcacgcgttaa

SEQ ID NO: 116051 - DNA, 1473 bp, Enterobacter cloacae
atggtacctgtggtcgcgcttgtcgggcgccctaacgttggaaaatccactctttttaaccgtttaacacgcacccgtgatgcgctggttgcggatttcccggggctgacgcgtgaccgtaagtacggtcgtgcagaggtggaaggacgcgagttcatctgtatcgataccgggggtattgacggtacggaagacggcgtagaaacacgcatggcagagcaatctctgctggctatcgaagaagcggatgtggttctgtttatggtggatgctcgcgctggcctgatgcccgcggattctgctattgctaaacatctgcgttcacgcgaaaagcctaccttcctggtggcgaacaaaactgacggcatcgatgccgatcaggctgttgcggatttctggtctttaggtctgggcgatatttatcctatcgcggcctcgcatggtcgtggcgtcaccagcctgctggaaaccgtgctgctgccgtgggttgatgaagtaaacccgccggaagaggtggacgaggacgctgaatactgggcgcagtttgaagccggagaggaaggcgaggaagagccggaagacgacttcaacccgcaggatctgcctatcaagctggctatcgtgggtcgcccaaacgtaggtaagtctacgcttactaaccgtattctcggtgaagagcgcgtggtggtttacgacatgccaggcacaacgcgtgacagcatttacattccaatgcagcgcgatgaacgtgagtacgtacttatcgacaccgcaggggtgcgtaagcgtgggaaaatcaccgatgtggtagaaaaattctcggtgatcaaaacccttcagtcgattgaagacgccaatgtggtgctgctggtcatcgacgcacgtgaaggtatctccgatcaggatctctctctgctcggctttatcctcaatagtgggcgctcgctggttatcgtcgtcaacaagtgggacggtttgagcaatgaagtgcgcgagcaggtgaaagagacgctggacttccgtctgggctttatcgactttgcccgcgttcacttcatctctgccctgcacgggagtggtgttggcaacctgttcgaatccgttcgtgaagcctatgacagctctacccgccgtcagagcacggcgatgctgacccgtatcatgaacatggctgctgaagaccaccagccgccgctggtgcgcggtcgtcgcgtgaagctgaaatatgctcacgccggggggtataacccgcctatcgtggtgatccacggtaaccaggtgaaggatctgccggactcctacaaacgctacctgatgaactacttccgcaagtcgctggacgtgatgggtacgcctatccgtattcagttcaaggaaggggagaacccgtttgcgaataaacgcaacaccctgacgccgaaccagatgcgtaagcgtaagcgtttgattaagcacattaagaaaagcaaataa

SEQ ID NO: 116052 - DNA, 1542 bp, Enterobacter cloacae
atgcaatcctctgttaatcaaaaagagagccgaaccttcttcggccatccttatccgctcggttcgctgttcttcaccgagatgtgggagcgtttttcgttttacggtattcgcccgctactgattctgtttatggccgccaccgtgtatgacggcggaatgggcctggcgcgtgaaaacgcctcggcgattgtcggcatctttgccggcaccatgtacctcgctgcgctgccgggcggctggctggcggataactggctcggccagcagcgggccgtctggtacggttcgattttgattgcgctcgggcacctgtcgatcgccctgtcggccatcatgggcgacaacctgttcttcatcggcctgatgtttatcgtgctcggctccggcctgttcaagacctgtatctcggtcatggtcggcaccctgtataaaaaaggcgatgcgcgtcgtgacggcggtttctcgctgttctatatgggcatcaacatgggctcgttcattgcccctctgatttccggctggctgattaaaacccacggctggcactggggctttggtatcggtggtatcgggatgctggtcgccctgattatcttccgcgtgtttgccgttccggccatgaagcgctacgacagtgaagtcggtctggactccacctggaacagtccggtagtgaaacgtaacggcgtgggtgcctggctgctggcgctggctgtgggtgttgcaatcatcgtaacgttgattgcccagggcgtgattgtgattaatccggtcgcggtcgccagcgtgttggtgtatgtgattgccgcctccgtcgcgctctacttcatctatctgttcatcttcgccgggctgaatcgcaaagagcgcgcaaggctgctggtgtgctttattctgctggtctccgccgcgttcttctggtccgcgttcgagcagaagccaacctccttcaacctgttcgccaacgactacactaaccgcatgatcggtgattttgagatcccggcggtgtggttccagtcgatcaatgccctgttcatcattctgctggccccggtatttagctgggcatggccgaagctggcgagcaaaaacattcgtccgagcagcatcaccaagttcgtgatcggtattctgtgcgcggcggcgggctttggcctgatgatgctggcggcgcagaacgtgctgagcaacggtggggcaggggtttctccgttctggctggtgggcagtatcctgatgctgacgctcggggaactgtgcctgagtccgattggtctggcgaccatgaccctgctggcgccggagagaatgcgcggccagatgatgggcctgtggttctgcgccagtgcgctgggtaacctggctgcggggctgattggtggtcacgtgaaggccgaccagctggatatgctgccagacctctttgcccgttgctccattgcgctgctgatttgtgctgcggtgctgatcgtcctcattgttccggtgcgccgcatgctggaaaatgcgcagactaaaccggccgctaacgcctga

SEQ ID NO: 116053 - DNA, 1035 bp, Enterobacter cloacae
atgctgttagggtttgttgggcttggtgctgtggttgaaacggcttacttaccggcaatacgaaatctttttcctgatactccgcgctgtttaggttttgatattcatcccgagaagcagcctgaaggggtcacacgttgcgcgtcgctcggtgaacttctttcccacccgctggataccctgtttatcaccacttcctccctgtaccacctcgaggtacttgagcaggcgctggcctcacccgcgtcgcgtattgtggtagaaaaaccgattgtcgccacgctgccccaaattgaaaaactgaaagcgctgctggctcaaccgggagccgccgaccgcgtgctggcgctcgatcactggatggcgcgtctcgatagcgtaaagcaatcactggtcgctcatatttctgacatcgtcaaaatcgaaggctttttgcaggagccaagcgggtataacgccgaaggagagcccattgcgctcaacttcgccaccggcgagccagacgcgcgaacgcttcgccatccagatggtgtgattctggatatcggtacgcacgtgctggcgatgctgcgtgaaacggtgctttacctgggcggcagtgacgatatgacgttgcaggtggtgacagcaaaagaccgcctgggccgcgaaatcgcaacgggcgatctgaccacggcggaaggcgaggcgcatttgcagggaagcatcagcggcgtgccggtggacatctggcttaacaaatacgcggggccagcgggcgggcaaaagggattacgcttccatttgcgcgacgggcgcatcgtcagccacgaccgacgcggcgcagaagatgtgctggagctgattaagggtaaagaaattcagcgctggcatattcccggtacgatctacgagcattgccttgcggagcatattctgggagcaaaaagtctctttgaacgggatccgcaccaggtgagccgcacgacgcgccgcagggtcgaggaggtgacgctgctgctgaccttacagcaacagttgcgtggcccgcactga

SEQ ID NO: 116054 - DNA, 222 bp, Enterobacter cloacae
atgacgattacctgcccggattgccagacaccgctggagcccctgaacggggtagcgcactgcgaaaattgtaataaagatatcgcgctcgaagcccgctgcccggagtgtcatcagccactccaggtactaaaagcctgcggtgcggtggactatttttgccagaacggccacggtcttatctctaaaaaacgcgtggagtttgttcgggctgaaggttaa

SEQ ID NO: 116055 - DNA, 351 bp, Enterobacter cloacae
atgcaggttccggaactgacggatgacgccgtggttgagctggcccgggaaggcggcgtcgcctttatccctaagctgagcggccagcgcaccattgcgctctcctcgcttaatgaggcccagcgccagcgcctggtgagcattcttgagcaggctttcccgcgcggccagccgcccgggcaagcctcttcccccggcagcggtgaccagcgctatttccgcatccagattatctggaccggccaaaatcaggcgcactacgccgatatcatcgtgctggtacccgagcaggaagcacccgagtcgctggtggaactgtggcagaaaggtgaaggctgcgtgtgcgattaa

SEQ ID NO: 116056 - DNA, 1020 bp, Enterobacter cloacae
atgccccattttcatagcgtcatccctccgtatattcttcgccgtattatcgaaagcggttctgagccgcagcagcgctgcgcccgtcagaccttaacccacgtccagacgctgatggcccatatgccgggcaaacccgccgcgccgcatgtgaataaagccggtcagcttgagcgtgacatctacgatgcgaaacagacccaggagctgccgggtacccaagtgcgctatgaaggccagccctccaacggcgatgtggcggtggatgaagcgtacgattatctgggtatcacccatgatttcttctggaaagaatatcagcgcgattcgctcgataacaaagggctgatcctcaccggcaccgtgcactatggccgggaatatcagaacgccttctggaacggccagcagatggtctttggcgacggtgacggagaaatcttcaaccgcttcaccattgccatcgacgtggtggcgcatgagctgagccacggcgtgaccgagaccgaagccggactgatctattttgaacagtcgggcgcgctgaacgagtcgctgtcagacgtgtttggctcgctggtgaagcaataccatcttaagcaaaccgccgataaagcagactggctgattggcgagggtctgctggcggagggtatcaacgggaaagggctacgttccatgtctgaacccggtaccgcctacgacgatccgctgctcggcaaagacccgcagcccgcgcacatgaaagacttcatcaaaacgcgcgaggataacggcggcgtgcatcttaactccggcatccccaaccgcgcgttttacctggccgcaacggcgatcggtggctacgcctgggaaaaagcgggttatgcctggtacgacacggtttgcgatcgcaacctggcgcaggatgcggattttgatgcctttgcaaaactgacgatcgcgcacggcgagaaacgctccggtagcgacgttggggcggccattaaacaagcctgggaacaggtgggagtactgtaa

SEQ ID NO: 116057 - DNA, 1374 bp, Enterobacter cloacae
atgttatcctctcaatccccctcaatttatactgtcagccgccttaatcagacggtacgtttgctgcttgagcaggaaatgggacaggtctggatcagcggtgaaatctctaacttcacgcagcctgcttccggtcactggtactttacgctgaaagacgacaccgctcaggtgcgctgcgcgatgttccgcaacagcaaccgtcgcgtgacgttccgtcctcagcatggccagcaggttctggttcgcgccaacattaccctgtatgagccgcgcggcgattatcagattatcgtcgagagcatgcagcccgcgggcgaaggcttgctgcaacagaagtacgagcagctcaaagccatgctttcggctgagggattgttcgaccagcagtttaaaaagcccctgccctcacccgctcactgcgttggggtcattacctcgaaaaccggtgcggccctgcacgatattttgcacgtcctgaagcgccgtgacccttccctgcccgtcattatttacccaactgccgttcagggtgacgatgcgccggggcagatcgtgcgcgcgattgaactggcaaatgcccgtcaggagtgtgatgtcctgatcgtcgggcgcggcggcggctcgctggaagacctttggagctttaacgacgagcgcgtggcgcgggcaatctttgccagccttatcccggtggtaagcgccgtcggccatgaaacggatgtgacgatagcggattttgtcgcggatttacgcgcgcccacgccgtccgcggcggcagaggtagtcagccgtaaccagcaggagctgctgcgtcagatccagaacgggcagcagcgcctggagatggcgatggactacttcctcgccaaccgtacccgccgctttacccagcttcaccatcgtctgcaacagcagcatccgcaattgcgtctggcgcgtcagcaaaccgtgctggaacgtctgcgtcagcggatgaacttcgcgctggataaccagcttaagcgggcggtatctcgccagcagcgcgtcacgcagcgtctgaaccagcaaaacccgcagccgaagatttatcgcgcacaaacgcgtatccagcagcttgagttccgcctcgcggaaaatatccgctcacgcctgagcaccacgcgcgagcgttttggcaatgcggtcacccatctggaagccgtcagcccgctctcaacgctggctcgcggctatagtgtgaccactgcgacggacggcaaagtgctgaaacaaacgaaacaggttaaagccggggatgtgctcaccacccggctttctgacggctgggtcgagagtgaggtgaaagagatcaaaccggtgaaaaaaacgcgccagcgtaaaagcggataa

SEQ ID NO: 116058 - DNA, 1467 bp, Enterobacter cloacae
atgctacgtatcgctaaagaagcactgacgtttgacgacgtcctcctcgttcccgctcactccaccgttctgccgaatactgccgacctcagcacgcagttgacgaaaaccattcgtctgaacattcctatgctctccgcagcaatggacaccgtgactgaagcgcgtctggctatcgccctggcacaggaaggcggcattggctttatccacaaaaacatgtctatcgagcgtcaggcggaagaagttcgccgcgtgaagaagcatgaatccggtatcgtgtccgatcctcagaccgttctgccaaccaccacgctgcacgaagtgaaagccctgaccgagcgtaacggctttgcaggctatccggtagtcactgaagacaacgaactggtgggtatcattaccggtcgtgacgtgcgtttcgtgactgacctgaaccagcctgtcagcgtctacatgacgccaaaagagcgtctggtgaccgtgcgtgaaggcgaaacccgcgacgtggtgctggcgaaaatgcacgaaaaacgcgttgagaaagcgctggttgtggacgcgaacttccacctgcgcggcatgatcaccgttaaagatttccagaaagcagaacgtaaaccgaacgcctgtaaagacgagcatggccgtctgcgcgtcggcgctgcggttggcgcaggtgcgggtaacgaagagcgcgttgacgcgctggttgctgcgggcgttgacgtgctgctgattgactcctcccacggccactccgaaggcgttctgcaacgtattcgtgaaacccgtgctaaatacccggatctccagatcatcggcggtaacgtggcaaccggcgcaggcgctcgcgcgctggcggaagcgggttgcagcgcggtgaaagtgggtatcggtcctggctctatctgtaccacccgtatcgtcaccggcgtaggcgtgccgcagatcacggcggtttctgacgcggttgaagcgctggaaggtaccggtattccggtcatcgcggacggcggtatccgtttctctggcgacattgccaaagcgatcgccgcaggtgccgcagccgtgatggtgggctccatgctggccggtaccgaagaatccccgggtgaaatcgaactctaccaggggcgttcttataaatcctaccgcggtatgggctccctgggcgcgatgtctaaaggttcctctgaccgttacttccagaccgataacgccgcagacaaactggtgccggaaggtatcgaaggtcgtgtggcgtataaaggccgcctgaaagagatcattcaccagcagatgggcggcctgcgctcctgtatgggtctgaccggctgtggtaccattgacctgctgcgtaccaaagcggaattcgtacgcatcagcggtgcgggtatccaggagagccacgttcacgacgtgacgatcaccaaagagtccccgaactaccgtctgggctcctga

SEQ ID NO: 116059 - DNA, 1578 bp, Enterobacter cloacae
atgacggaaaacattcataaacatcgcattctcatcctggactttggttctcagtacactcagctggtggcgcgccgcgtgcgtgagctgggcgtttactgtgagctgtgggcgtgggatgtcacggaagcacagattcgcgagttcaatccaagcggcatcatcctgtccggcggcccggaaagcaccaccgaagagaacagcccgcgtgcgccgcagtacgtgttcgaagcgggcgtaccggtgttcggcgtttgctacggcatgcagaccatggcgatgcagctgggcggccacgtagaaggctctaacgagcgtgagttcggctacgcacaggttgaagtcgtcaccgacagcgcgctggtgcgcggtatcgaagactccctgaccgcagacggcaaaccgctgctggacgtgtggatgagccacggcgacaaagtcaccgctatcccgtccgacttcgtgaccgttgccagcaccgaaagctgcccgttcgcgatcatggcgaacgaagaaaaacgcttctacggcgtgcagttccacccggaagtgacccacacccgtcagggtatgcgcatgctggagcgcttcgtgcgtgacatctgccagtgcgaagccctgtggaccccggcaaaaatcatcgacgatgccgtggagcgtatccgccagcaggttggcgatgacaaagtgatcctcggcctctccggcggcgtggactcctccgtgaccgcgatgctgctgcaccgcgccatcggtaaaaacctgacctgcgtcttcgtggacaacggtctgctgcgtctgaacgaagcccagcaggttatggacatgtttggcgaccacttcggtctgaacatcgttcacgtggaaggcgagcagcgcttcctggacgcgctgaaaggcgagaacgatccggaagcgaaacgtaaaatcatcggtcgcgtgttcgtggaagtgttcgacgaagaagcgctgaagctggaagacgtgaagtggctggcgcagggtaccatctacccggacgtgatcgagtctgcggcctccgcaaccggtaaagcgcacgtcatcaaatctcaccacaacgtgggcggcctgccgaaagagatgaagatgggcctggttgaaccgctgcgcgagctgttcaaagacgaagtgcgtaagatcggtctggaactgggtctgccgtacgacatgctctaccgtcacccgttcccgggtccgggtctgggcgtgcgcgtgctgggcgaagtgaagaaagagtactgcgacctgctgcgtcgcgcggacgctatcttcatcgaagaactgcacaaagctgacctgtacaacaaagtgagccaggcgttcaccgtattcctgccggttcgctccgtcggcgtaatgggcgatggccgcaagtacgactgggttgtctccctgcgtgcggtggaaaccatcgacttcatgaccgcgcactgggcgcacctgccgtatgacttcttaggccgcgtgtctaaccgcatcatcaacgaagtgaacggtatttcccgcgtggtgtatgacatcagcggtaagccaccggcgacgatcgagtgggaatga

SEQ ID NO: 116060 - DNA, 1191 bp, Enterobacter cloacae
atgttgactgacaccaggctgcgtcaccttaagccgaaggagaaactctataaagttaatgaccgtgatggtctgtatgttgcggtcactccggctggaactatttcatttcgttataactattcaataaacggaagacaggagaccgttacttttggccgctatggtgttggagggatcacgcttgcagaagcgcgtgaacggctcaatgaagccaaaaaaatggttgccagtggaagatcgcctgcgagggaaaaagccagagataaagcgcgtatcaaagatgcggagacttttggtgcgtgggctgagaaatggttacgcggttatcaaatggctgaatcgacgcgtgatatgcggcgttcggtatatcaaagggagttgaagtcaaaatttgcccagcagaaacttagtgagattacacatgaagacttacgagcattaaccgataacattgtcgagagaggggcaccggcgacagctgtacacgccagagagattgtattgcaagtctatcgctgggctattgagcgcggtcagaaggtggagaatccagctgatctggtacggcctgcaagcatagcgaaatttgagcctcgagacagggcattgacgccaattgaaattggtctgatgtatcgatacatggaacgggtaggaacgacgccatcaatcagagcagcggttaaacttttgctgttaacgatggtacgtaaaagtgagcttactaacgcaacctggaacgagatcaattttagtgaggcattatggacgataccaaaggagaggatgaaacgacgtaatccacatttggtttttctttccagacaggcaatggatattatgattgctctcaaaacctttgccggtagctctgattttatccttccttcgcggtacgattccgatgcgccaatgagtagcgctactttaaaccgggttttgacactgacgtatcgtctggctcagaaagaaggggagttgttgcctaagtttggtccccatgacttacggcgtactgccagcaccttgctacatgaggccgggtacaatactgactggattgagaagtgccttgcccatgaacaaaaaggggtacgagctgtttataacaaggcagaatatcgtgagcagagggctgagatgctacaagattgggcgaatatgattgatgaatggactagtaagtag

SEQ ID NO: 116061 - DNA, 630 bp, Enterobacter cloacae
gtgcctgagttgtctgtaattatacaatggatgaatcaataccctaagaccggctggctattgctgtgtatctatattgcactcggtgtagttcgtcacagagtaattaatgctgaatctggaagtgtatttcgtggactactcaatcttaggaagcgacggctagagaaaatgctgacacagccatatttaaataaaaatgcggtccgtctggcaaagcgtgagcttcgtcagcgcagcctttatcggctcacaggcttgtataattatcggctgcaggatttggctgtaataatgtgtgatcgttatgggttgcgggctggttatctcaagccgtggcgtaactggctcgaagaacgggatggacggattgtgttcaacaggaaatggcattgttttcgctggcgtctttttctggtaggtcagattgtaaacacagttctactaatattattcattatgtatatcgtttctcattcttcggccgaaatgatcgcaccgcttatgttactcttcatgcttgtatggtggtttccttggctaatgatcacctcggtacctacccctaggtggactcgcgaaatggaagtctatcttgagaaatttaacgctgaacagaccatggtttaa

SEQ ID NO: 116062 - DNA, 972 bp, Enterobacter cloacae
atggttgacatgaaaattactatctgggaaggctgtgacctcacagttgcagctgcaattaaattatttgtagagcgtagttatccgtactccatattttcacggaggtatccaatactgcgtctcatacaggaagttattgatccagcagtagctgcttatgtaaattccctgccaccaagtaataaagactacatttctggagtaaatctaggatttagtgatgtacttaaaaaagtgggcttaaacgtcgtagtacaggcacaaagacttcttttgcgtaatttcgttctgactttagatcaacaaaattctcttgataaatgctttaccgctacgattgagtctcttattgaattagtcagtgagtgcgcatccaagcggccgaagaagtcctctcctgcaaaaggagtaactataaattcacagcgtaagctcggttattgcgagttctgcggtaatctaaccgaattttccaagttgatcagtgagatatcagaatttgttgctaacgataatgagttccccgttcatgaaaaacaggtccttagtcatcgatattgttctgaccataggcccaaactcaccaatggtctatggaatcccaaatacagacaaggaaagcggtctctcgaacagttcaataaagaattaataaggcttagacggcaatgcgctaaaccgcataaagctaacgcaaacacaggggatatattgattgatacatattttcatgagtggatgcagggtcaaactttaaccccagcagatctagataaacttaggaatatcgccagacgaatggttgactccaaattcactgatactaagaaaaaaataatcatattaaaacaccaaggttttaaccagtttgaaaccgcacaggttttagaaaaaaatcactacacaactatgacaaagcaggctgtgtccaaggccttagcgtctgtgaggaaagaattttatatttaa

SEQ ID NO: 116063 - DNA, 231 bp, Enterobacter cloacae
atgcaaacaaaggcacatagcacgctcattaacagaaaaacacttctggaaatgatcccattgtcagcccgcaccatttataaccttgaacagcgaggcgagtttcctcgccgtatagcacttactagccgaaatgtagcatggcagttatccgaagtagaacagtggattgcggatcgtaaatcagcaatgtttaaagcggccagacccggtgttgttttaggcaggtaa

SEQ ID NO: 116064 - DNA, 858 bp, Enterobacter cloacae
atgtcattgaacataatggaagcatttgaagctaagccgcaaccaattgattacgtcttacctaatttggctattggtactatcggagcgattgtttctccgggaggcgttggaaagtcaatgctggcattacaattggctgtgcagattacttgtggtgtagatcttttaaactttggtgaatatccgactgggttggtggcatatttacctgtggaggactctgaaaccatcgttcaccatcgtttatatgctttgggaaaatatctaacagcacgtcagcagcagattgttgctgataagctacttgtcgaacctttggtagggaagtgtccaaatattttctcgccaggttggagcaacttgattaatgagatttcaaaaagtagacggttaataattttggatactcttcgccgtttccaccaggaagatgaaaataatagcggagcaatgtccaaagtcattggaaagctagaaggtattgctgctgatactgggtgttcgattatatttctacaccattcaaacaaaggcgctgccacgatgggtgttggtgatatacagcaagcaagcaggggtagtagcgtcctggttgataatatacggtggcaatcttatctggcaggcatgaccgccttagaagcgaagacgtatggtatttctgatgatgttcgaggtcaatttgttagatttggaataaataaagcaaattatggagaacgtgcgccagatcgttggttacagagacatgaggggggagtattaaggataacgcaactcaaatcgaagaataaaaaacaaatagcaaaagaatgtatgtcttcatggagtggtgcagaaaatgataactggtaa

SEQ ID NO: 116065 - DNA, 762 bp, Enterobacter cloacae
atgataactggtaataaagttacacctactagtacagctctgcaggctagagtcattctgtaccaaccaagtcaacgtcccttggcgctgaaggggcagtggatggagactagttttggtcgttgtcgagttaccggaagactaggacaacgtcatgcggatattgtggaaacaatgctctatgtggccgagaaacgtcgagaaatttctgatggaggaatcgagttattagtagatccagcgaaagtacgccgaactctatccgatgcacaatacagttatgatcgaattaaaaaactactcgttgatctacgagtggcaactgttgaaatagtaacaccagatttagaaaaaaacggttattgcattctaggcggtttaattgaccatgtcgtaccctcaccaatgaccagacgtaatcctctaactggtggtgaacgtaacctatggagagtacgcttgggtgttgcattggtaatgttgttgaagcgagatttgcattttcatcatgatccaggtcctattgctcgtctccagcatggtattagccaagcagttgcacgtcatatattgacacataagcacgatcctaaaggcggctggcatattgatacattaattttagctgtcagtggtgaaggtactaataatatgacattacgtaactatcggcggagattaaaagaagatagcaaacaatttctagcgattggcattgagatacaaaattctaggataaaacgagctacaacggcccggtag

SEQ ID NO: 116066 - DNA, 795 bp, Enterobacter cloacae
atgaatttaaagttccgagtggtttcttcacaaagaggcattttagccgctaaaaaagctttaatagttcctttcgtggcgtccgtcatggcattaccggtgaaggccggaattcccgttattgatggcactaatgtggttcagaccacaatcagcgcagttaacaacgttcaggctgtgactaaacaaatccagcagtaccagacgcagctgcagcagtatgaaaacatgctgcagaacaccgtagctcctgcggcctatatctgggaccaggcaaattcaacaattaataaattgttgcaggtgcaggatactcttaattactacaagaatcaggccgggagtctcgatgcgtacctgaaacgctatcaggatgttaactactacaggacatcgccttgctttaacagcaatgttgaatgtaccgcgtctgaaattagtgcactacgtgaagctgaacagaatagctcaggggcacgtaaaaaggccaatgacgcagtatttaaggtaattgacgagcagcagaacaccctgcagagcgatgctgataatcttgccgaattacaaactcaggcaagcggcgcacaagggcaaatggaagctattcaggcggcaaaccagcttgccagtgcacagacaaatcagttactgcaaatccgctcacttctggtagcccaacaaaacgctgcagcaacactggcacaggctcaggcagataaagaatcacaacagatagccgctgatgaaaaagcgttagctggagagaatacaccaagcccgaagcgaatttggtga

SEQ ID NO: 116067 - DNA, 1392 bp, Enterobacter cloacae
atgaaaatagtaagtaagctcacctttttaggtatcatacttttcttttctataaatgcctatgctggtcaattagatagtagcgggctacttgatactttattagataagtttcaacaaatagccagtacatggacagcagtaattgctgactatgcaaattggctcttctgggggctggtattaataagtatggtttggacatttggtatgatggcgatgcaaggggaagggttgacaggggtacttgctgaaatagttcgcttttttgccgtcattggttttttttattatcttttaatcaacggtccatccatatcgcaatccataattaattcaatgagacaacttgcagcaaacgctttaggaataagtactggtatttctccctcaagcatagttgatatggcgtttgcgatattaacaaaggtcagttcagccgcatcaatttggtcgccaatgatatccaccattatgataacagtcgcgataatcgttttggtagtgatgtcccttatagcgataaatatgctaatcatgttggtttctgcatgggtgttatgttatgcaggagttatattgcttgggtttggtggttcgaaatggacctctgatatagcaattaattacttacgaactgttttatcgattggcattcaattattcacgatgacattaattattgggattggacaatcatttatagatcaatatttttctcttattaaagatgatgttcctgatcttaatagtcttatagttttgcttctggcgtcaattatcttgttagtattaactaataagctaccactgttgttatcaggtgttgtaggaggggcttctttacaagggattggtggatttggggcgggtatgattaccggcgcagccgctactgccatcagcggtgctggagcaatggcaatgggggcatcagctcaagtcagcggcggagcctctgcattaaaggcagcgttcgagtctgcgcaagctgccatggccgaagaatctggttcaggcggtggaggcggttccggtggcggatttggcggcggggaagataccggttctgtagatacttctggaggccaaccctcaggcagttccggtggttcgtcagcagggagcagttcagttaacgccagcggaggaagtcaggggtttgcttcattctcacgaactggccgcatggcaagccatatgggaagcatcatggccaacggagttgctgagtaccagaaaatgaagcgaagtagcaattcttctcgtgtccaacaaactattggaggggagctggcgactcagatacgtaagcagacagctactcatcgggataaccgcgaacatgatgattttgccgatgatagcttatcgggtaataataaatcttga

SEQ ID NO: 116068 - DNA, 456 bp, Enterobacter cloacae
atgtccaggactccctatactcggttacgcattgagggcttccgcaaagcagaggcttccctgagacttgaaggaatggaccccagtggtacgccactgtacgagtccattaaggcgcgtattatttcaggtgagcttacgtatgagcaggggcgttcagagattcttgcatactacacaaaagcagataccgccgggcctgtgacagtgggagaaattctgacagaggaatttttaaaaccaatgaacatgtctgatgatgaactagcagaagctatgggtatttctcgacaaaatgttgaagatattatctgcggtatgcgccgccttacggattgtgaggcccgtatccttgctgacatatttgggactgatgaggacttctggtgcaatttacgggggctgcaagatcgccgaggccacatgtcagttttagaccgaaaacaaggggcataa

SEQ ID NO: 116069 - DNA, 1005 bp, Enterobacter cloacae
atgtttgaagaaacaattcgcgcactaaaaacgctaggcgacgaagcatctatcgtctcaatttctacagacgatggcgattactttgatcgcgaatgtccctcaccagaatgcttagctcagttcaaggtcctgatggaagattggaagggcaaggttagggatgaagaggtattttgtccattctgcggccatatcgctgatgctcagaagtggtggacgcaggagcagttgaatcacgtgcgggacgttgctctggcgaaggtacaagcgactttaggtggtgcacttcgccttgatgcgcaaaggtttaatcagaatcaacctaagggcggattcgtctctatgagcatgaagattgacagcagacctcaacatgttccgatcccctatgcagcggcagaacccatgcgactcaagatcacgtgcggagaatgcggatgtcgatatgccgttgttggagctgcgtatttctgtccttcttgcgggaaaaacgctgctgagcttgtcttcgatctcacggcacaaggtattcggcagtcgctagaagcggttgacgtcatcagagatgctattgcagacgcagacactgctgagaacacgtgccgtcttatcgttgagagcgctctgctaaacgtagtgacggcatttcagagatttgcagaagcactttacgcgcgtatagcgccagcagtgaagaccaggcgcaatgcatttcagaaccttgccgaggggtcagctctttgggccgctgcgttaggaggtggttacgataagcatcttacggacgtcgaaatggaacaattgacaatggtcttccaacagcgtcatttactcgctcatactcagggcgttgtcgataatgattacattcggaaaaccggtgacacacggtataaatctgggcagcgtttggttatcaagcgcgaggccgtggttgaagcgcttaatctggtcgaacaattgacgttttgcatccgtcaggacaccagagatatagtgtga

SEQ ID NO: 116070 - DNA, 2760 bp, Enterobacter cloacae
atgaattttagcgaactatcaacactgccgatactttcatggattgatgttgcaagacgactttccgcaacacctatgagagggagtatcaataaatcaactcaatatgatcctcctataggacttattgcctctgaggtcttctggaccggactgactctgaccctggaaagcccagagaacattgatgatgtcaataagtggttgcagagtgttttcggcacatggctaatttttaacgacgggattccatctatacggctggacggcccatcagccagatctgttttacgtgtgacttacgaatattcgggtgtcagcaaatctaaaccagtatttagaccaagcgcatcacttgaaggaaatcgaccttactcaatagaatacccggtacgcaactgcatatcccccacagttgttgcatttcacagcgtaaagggaggggttggacgtaccactgctgcgatggctttcgcgcagaacatgatttccattctaggagcttctgaaacagtattattcgtagatgctgacttcgaagctccaggggccagctacctctaccgaacacgcaaaccagaggttaacatttcacttgaggatctaatggctatagcgcatgcagatgcgtctacagacctcagttcaaccattgatttcgtggctgcgcaaatgcttgatcagcgcataggtaacgtattcgtcttgccagtaaagcgcctacttgacgacctaacagggttcactattaggcccgagcacttagttaacgcgcgccgcaatcaaccttatctcattgtagatcttatccgtaagctcgcggagaaattgagctgcaaacttgctgttgtagatcttcgtgctggtctagtggatatcgcgattcagtttttgactgacccaacagttgaacgcgtcttcgtatctacggcaagcggacagtcaattaacgcattaaaaggaatgctccatactattgggcaggtcgaaaaacaagccggcgaggctggacggcaaccttttgttttaataaatcaaatcccccgattgcagtacgatgaccccgtatttcgaggaaaattacaagctcagttagaggtccaagcagaaatatcattctttaccccgcaaatttcagaagaccaagatgaattcactgtaactcccgctcgagagagttcgcttgtatttggctttcactttcactcttccgatcttgtggcctctgctgacgactgggaaacctacgttacagacctgaagaaaacaggcttttcaactagcttaatgtctgaaatggaaagctgggtagttgggcgtcgaattgcgacccctaatattccagcaccatcagagttgaaaattgccacagatgaccgtgcaaatgcatgcgccaagcttgcgacgtttgcgaacgaatttgagtttgcagagacggcaaaaagtgtacagcgtcctttaattactcctccgttacagcgcttgttaggtgactttgttcagcacccccccattgcagttatggaaggcactaagggaacaggcaagactcttacttttcggtatcttttagaacataagacttgggctaaagcagcagcagcgatggtaggggctcaggcacctacatttgaaggtctgtttttacctgtcctcggctcgatcaatagctcggagaacatgcaaagtctcgttgcagagggccgtgctcaagtagcatcacgactagggaatccttcaccaggtcttttttctactacaacaactaagattcgtgagggaatcaattcaggttgggatattactaaatggaccgatttctggcttacatcaattgctcaagctgcggggttcgatacttgggaaactttcgtagaagcggtccgtacctcaggcatgattcgaccaattgcgatgtttgaaggactcgaagaggtattcaccaatccttacaccgaagaggtacaaggagatgcactgagggcacttcttcgtgagataccgatccggctccgagaggaggctggacgtccaatcggcgttctaatcttcgtgcgcagcgatatggtagaggcggtaattgaacaaaacgtccagcaatttagagcctcttatcgcagctacgcgctaacgtggctcgacattgacattcaagagcttgctgtctggcttgtaggtaatagtggagcaataccggagctctggagtccagattggcgagctcgttccgaactacagcgagaggctgatttacagcaaatatggggaatgaaattaggaagcgactcaagtagggaggctcgttcgaccgaatgggtgcttgctgttttaaccgatctcactggtcgtttgactgcgcgtgatcttgtcaggttcatgcatacagccgctcaaagtgcacgtgaacaagtagttaatgaccgcttactatctccaagttcaatgcgtaaagcagtggaatatacaagtaaacaaaaggttgacgaatatccgaaagaagttcgtgaactcttacccatctttgataagctgaagtcactccagagcctgacaactccctttgatcgtgctgaagcggcggcaaacggcttagaagcaaaagaactagatattcttgaaaaatatggtgttgcctatgctgaagatggaagctttgaggttccagagcttttcagaattggactaaatatgaagcgaaaaggtgcgagaccaaacatcattagtcttacacgtaaagcccgagagagagctagagcgtag

SEQ ID NO: 116071 - DNA, 2331 bp, Enterobacter cloacae
atggaagaagaacgaaagaaggccgttgcttctttattaaaggatatggaatccaatgctgcccgaatgcatgaattgattgtcaaaatgcctccgcatgatttgctcggctacatctacgctcagaacatgatgaaaacaatgggaaaccaaattgggggcgaaaagcaaggccaagagggtagcccagctgacgtagttaatgaaacccagttcttactggagtatgttcacgcggttctggcatctgaggccgctcctgcggatatggaattcgacgaagcactgtgcgctgagttgtttgaatgtagccgaaaactgagagagctggccatgttctatgctatggccacctctgctgataccaaagatggcatcttcggtcctaatacggccgacattgaattccgtgctaaatccacttgggtcatgatacgcgggaatcgttatcaagttttggagggcgagttctatcgctacgttctggcgcctcacaatgatgttttggaggaggtttacggcattggtgccaccgatattgcggaaggctttcaggccatggccgacgctactcgctctgggcaggccaacgcaatcattgagatgatgaagcagtttgaggcggtaaaagctttttctatagagcaaagtaagtctatggaagacgctatggagtcatggattgctgaaaatgaggagcaatccaaagcggcccggggggcgatggaggatatgcttcgcggcggtattgccaatgtaagccgtcacacgaagttgccaccgacattgctagcagacttgtcataccagcgaggagaagatactgagttcttcgcagcgggcgattttaaggggacaccctttcggacactgccagcacgtaagaaacctctaattcagcttgggtcggactacttcgcggtcgatccctgttttgctcgcgatgcggggtatcgtgcgctcctatttaatctccttcagcgaaagccggattacaataaggcctttaaagataggcagaaaatgatgagcgaagcagcctttgccgacattctctatgcccagcttccgggagccacagttcttcaggaggtttactacaaggatcctgatagcaagcagtggtccgaaaacgatactctaatcctggtcgatgatgtgctgttactagttgaggctaaggctggtgcagctgccaccattgcatcaccggcgcttgattttggccgccatgctcaatcagtgcaggacttagtactcaaggcatataaacaatgtgcgcgcttcttcaattatatgaattcggcggatgaagtgtctctctatcacctcgtgaatggcaaatacgaagagtgttgtcgtgtgcgtcgctctgactaccgggtgatggtgccgattgggttgacagtcgagtcgttctcgcccttttccacgtactgtaaagaattaccgcaggttgagcctttgcttggaaagcatgctttcatttcactgtccatcgacgatttgtttgtgctcaagcgactcttgcccacacccggggagttcgtccattacttggaggtgcggcaagccgtggccggaatacgcggggctcatctcttcgacgagttcgatcacttgggtgcttacctgaagaagaaccgttttgatcaggatattatcgagcagttgaaggaagagaaagcgaacatggttatctgggatggcatgagtgacatcgtcgacaggaccttcgaaggtgaggagtgggaaagcaaaccgttcccaagtcagaagttcccggaggaggttctgaagctgcttggggcactcgatagcacccgagctagcggctggctttcagcagagagtcatatccgtgacctaggagaggaaggccggaataatctggccaagatgctgtccgaccttcgaaaaacattgattcagcatcccgttcgttactttgttctgggcggggacggtgtaccgctcttcgtttggcttcaacggcatggtcatccaattgactggactaaggtgaacaataaggctagcgcagttgcgttgagcgccaaggctactaacgtcattggcgttgtggctgaagttagtgccgatggtacttatgtccaggcgcggtctttcaaaatttacataccgacggagcaaacagcagaaaacgcacacgtttatgaagacgcggcgagaatggccaatcctgaacgtacggtcaatctcgaacgggaaaaacaagtccactttggtcgcaagagcaaaaagattggccgtaatgtcccttgtccatgtggcagtggcatgaaatacaagagatgtcatggacggtag

SEQ ID NO: 116072 - DNA, 354 bp, Enterobacter cloacae
atgaacacgggtgcattcattcacgatttactcgactggatcgacaataacctcgatagccgtctggacattgaaaccgtctccaggcgagccggctattcgaaatggcacctccagcggcttttcaaagagcataccggctcccctctcgccgaatatattcgcgcgcaaaagctgcaaaaatcggttgagcgcctggcccacagcgatgaaccgattctgaacgtggcgatcgcgctgggctttgactctcagcagtccttcaaccgcagctttaagcgtcagtatggtcaggcacccggcgcatggcgacgcagtatcggctgccgtgaatcgcggcagatgagccagtag

SEQ ID NO: 116073 - DNA, 1176 bp, Enterobacter cloacae
atgagcctgcaaaaaacctgggttaactttcatctgagcgcgatgggggtggttttactctccgcgcttctcgtcgggtgcgatgacagcgtcgcgcaaaatgccgcgccgcaagcgcccgttgtcagcgctgctgacgtggtggtgaaatccattagccagtgggacagctttaacggtcgcattgaagcggtggaaagcgttcagctgcgtccgcgcgtctccggctacattgagaaagtgaattacaccgacggccaggaggtgaaaaagggcgaggtgctgttcacgattgatgaccgaacctatcgcgccgcgctggaacaggcgcaggcgaacctggcgagagccaaaacgcaggccagtctggcgcgaagcgaggctaaccgtaccgataaattagtcaataccaacgtggtgtcccgcgaagagtgggagcagcgccgttccgccgctacccaggcgcaggccgatattcgcgccgcgcaggcggcggtagacgctgcgcaacttaacctcgacttcaccaaagtgaccgcgcctatcgacggtcgcgccagccgggcgctgatcaccagcggtaacctggtgacggcgggcgacagcgccagcgtgctcaccaccctggtctcgcagaaaacggtttatgtctacttcgacgtggacgagtcaacctaccttcactatcagaacctggcccgcagcgggcagcgggtgtccggcgatcatgcggcgctgccggtggagattggcctgacgggcgaggagggctatccccatcagggcaaagtggatttcctggataaccagctcacaccgggtaccggaacgatccgcatgcgcgcgctgctggataactcacagcgtcagttcacgccaggactctttgcccgcgtgcgtctgccgggcagtgcggaatttaaagccacgcttgttgacgataaggcggtgctgaccgatcaggatcgtaaatatgtctatatcgtggataaagacgggaaagcgcagcgccgcgacattacgcccgggcgtctggccgacggtttacgtatcgtacagcaggggctgaatcccggggataaagtcatcgtcgatggtttacaaaaagtgtttatgccgggtatgccggttaacgcgaaaaccgttgccatgaccgccagcgccgccctcaactga

SEQ ID NO: 116074 - DNA, 3153 bp, Enterobacter cloacae
atggacttttcccgttttttcatcgacaggccgatttttgccgccgtactgtcgattctgatttttatcacaggattaatcgccatcccgctgctgccggtgagcgaataccctgacgtcgtgccgccaagcgtgcaggtgcgcgccgagtacccgggcgccaacccgaaagtgattgccgagaccgtggcaacgccgctggaagaggcgatcaacggcgttgagaacatgatgtacatgaaatccgtcgcgggctccgacggcgtgctggtgactaccgtcaccttccgtccgggcaccgacccggatcaggcgcaggttcaggtgcaaaaccgcgtcgtgcaggccgaagcgcgtctgccggaagacgtgcggcgtctgggcatcacgactcagaaacagtcgccaacgctgacgctggtggtgcatctgttttcgcctggcggtaagtacgattcactgtatatgcgtaactacgccacgctgaaggtgaaggacgagctggcgcgtctgcccggcgtggggcagattcagattttcggctcgggtgaatacgcgatgcgcgtctggctggacccgaacaaggtcgcggcccgcgggctgaccgcttcggacgtggtcacggcgatgcaggagcagaacgtgcaggtgtccgccgggcagcttggcgccgagccgctgccgaaagagagcgatttcctgatctccattaacgcccagggccgcctgcataccgaagacgagttcggcaacattgtcctgaaaaccacgcaggatggtacggtcgtccgactgcgcgacgtggcgcgtgtcgagatggggtccggcagctacgcgctgcgctcccagttgaacaataaagacgcggtcgggattggtatcttccagtcgccgggggcaaacgccatcgatctgtctaacgcggtacgcgccaaaatggacgaactgtccacacgattcccggacgatatgaaatgggcggcgccttacgacccgacggtgtttgtacgcgactcgatccgcgctgtggtgcaaacgctgctggaagcggtggtgctggtcgtgctggtggtgatcctgttcctgcaaacctggcgcgcgtcgataatcccgctgattgcggtgccggtatcggtagtgggcacgttcagtattctctacctgctgggcttttcgctgaataccctgagcctgttcgggctggtgctggcgattggtatcgtggtggacgatgccatcgtggtggtggaaaacgtcgaacgaaatatcgaagaggggctcgccccacttgcggcagcgcatcaggcgatgcgtgaagtgtccggaccgattattgccattgcgctggtgctgtgtgcggtattcgttccgatggcgttcctctccggcgtgaccggtcagttctacaagcagtttgcggtaacgatagccatttccacggtgatttccgcgatcaactcgctgacgctctcgccagcgctggccgcgctgctgttgaagccgcatggcgccccgaaagatttcccgacccggcttatcgatcgtctgttcggctggattttccgtccgtttaaccgctttttccaccgcagctcgactggctatcaggggctggtgggcaaaacgctcggccgacgcggggcagtgttcgtggtttatttgctgctgctttgcgctgcgggcgtgatgtttaaagccgttcccggcgggtttattccgacgcaggataagctgtacctgatcggcggcgtgaaaatgccggaaggctcgtcgctggcgcgcaccgatgcggtgatccgcaaaatgagcgaaatcgggatgaataccgaaggcgtggattatgcggtcgcgtttcctggcctgaatgcgctccagttcaccaatacgccgaacaccgggacggtcttctttggcctgaagcctttcgaccagcgtaaacatactgcggcggaaataaacgcggagatcaacgcgaaaatcgcgcaaatccagcagggctttggcttctcgattctgccgccgccgattttaggtctgggccagggatcgggctattcgctgtatattcaggatcgtgctggtctgggctatggcgcgctgcaaaacgcggtgaacaccatgtccggggcgattatgcagacgccggggatgcatttccctatctcaacctaccaggcaaacgttccgcagctggatgtacaggttgaccgtgataaggcgaaagcgcagggcgtgtcgctcaccgatctcttcgggacgctgcaaacctatctgggctcgtcttatgtgaatgacttcaaccagttcggtcgcacctggcgcgtaatggcacaggccgacgggcagttccgcgacagcgtggaagatatcgcgaatttacgcacccgtaatagccagggtgaaatggtgccgattggcagtatggtgaaaatcacgaccacctacggtccggacccggtgatccgctacaacggctacccggcggcggatctgattggcgatgccgacccgcgcgtgctctcttccgcgcaggcgatgacgcagctggacggtatgtctaagcagatcctgccgaacgggatgaatattgaatggacggacctgagcttccagcaggccacccagggcaacacggcgctgatcgtcttcccggtcgcggtgctgctggcgttcctggtgctggcggcgctgtatgaaagctggacgctgcccctggcggtgatcctcatcgtgccgatgacgatgctctccgcgctgttcggcgtctggctgaccgggggcgataacaacgtcttcgtgcaggtagggctggtggttctgatggggctggcctgtaaaaacgcgattcttatcgtggagtttgcccgcgagctggaaattcagggcaaaggcattatggaggccgcgctggaagcgtgccgcctgcgtttacgcccgattgtaatgacctctatcgcctttattgccgggaccattccactgatccttggtcacggggcaggggcagaagtgcgcggcgtcaccgggatcaccgtgttcgccgggatgctgggtgtgacgctgtttggtctgttcctgacgccggtcttttacgtgacgctgcgtaagttcgtgacgcgcggtaaagcggaaagagaggtgttgcctgcgtag

SEQ ID NO: 116075 - DNA, 480 bp, Enterobacter cloacae
atgttagattatcgcttcccgacagctttgcagatggttctcagcgtagcgatggcggagcaatcgggtgaacgttcgacgagtgcaatcctggcttacggcctggaagcgaatccgagctttatccgcaaattaatggttcctctcgcccgcgacggcattatcgtctccacgcttggccgcaacggctctattcaccttggccgcccggcggaagagattaccctgcgtgatatctacctttccgtcactgaagataaaaagctgtgggcgtcccgtcctgacgtcccggcccgctgcgtggtcagcgccaacgcctgctggtacttcaaatcaatcgctgatgaagcggagcaggcttcgttagcggttttagcgcgccataccgtcgccagcgcgctggaagaggtgaaaaaagccgataccagcgggtgcgatccggtgccggaactctgcacacagcataaaaaagcgccctaa

SEQ ID NO: 116076 - DNA, 1389 bp, Enterobacter cloacae
atgcgtaatttttggcaccacctccggcttcccacgctggtcaggcgaatgctggtcgcccagatgctgctgcttacgttgctctggtgtctctttttaaccttcattttgctggaagacctgcgtagccctcccatactgacgggcagtgagacttatgaaaccctgttttccctggtagagagcatggacgatcgtccgcaggcgcgtgatgctgtgctggcagcgttcagcaaggcgctgcgggagggctatggcggcggcgaagatccggagctgtccatcaacctcattgttcgcaagaataacgagattattttttcttcggatggtgcgccaacgggggtaaaaaatagccgtctgggggtcatgcagcatgtccagagtgaggaccatacatggacgagccgtaccctcaaatccgcgcactccgacgtggaagtcaccctttttacccctgccggtagctggaatttctttatctatctgaactcgcgcggctactacgtcatgccgctgatgatatgcatcccttttcttctgttccccgcgtggctgtccatccgcatcgcgatgcgcccctggaacaaggtggtgaatgaaatttcattgcgcacgccggacgatctctcgcctttaaaagccgtccccagacacagggagcttcgccagacagtcgacgcgattaatgactttctggccagggtgcgggaaagcgccgaaagggaaagaatgtttattgccgatgccgcacacgaactgcgtacgcctctggccgcgatgcggatcaacgtcgaggcgttgcagtcctgggtcatcagcgaaagccagcaggagctgcttgcgggcattgttcgcagcaatagccgtgctgcgcgtctcgtcaatcagcttctgctgatgatgcacagcgaagcgcacatcagcacggtgatgtcgcctgtgccgctgacgacgcttattcaggagcgaatggctgccctggaaccgctggcgtccgggcgcagaattgagtttgaattcatcgccgatgatgaaatccatatcacaggcattcgggaacgtctggtatcgctgatcgacaatttaattgagaatgccgtgaagtacagccctgagggtggacgcattgaggtacaactgcaatcgcgtgataagtccgctcagctgcgcgtctcagacgcgggtcccggcattccggttgaattgcgggagcgtgtgttcgacaggttcttccgcgatcctaatcagacccaaagcgggagcggactggggcttgccatcgtcaaagccgttacgcaacaacacaacggcagggtcaatctgagtacgtcagccgaaggcggtcttatggtgaccgttgatttcccgaatccggcgttcgcatga

SEQ ID NO: 116077 - DNA, 678 bp, Enterobacter cloacae
gtgaaaattctactaattgaagacgacctggatctcggcaatggcgtgcgtatcgcccttgcagatcaaggatttgatgtcatatgggtacgccgcaaagaggatgcgctgcatcagcttgggatctgcgtgccggaacttattttgctcgacctggggctgcccgatggcgatggcatgagcctgatgacgcgcctgcgtcaacagcttaagggcgtccctgtcatcatcctgacggcgcgaggcacgctacaggaccgcctgtgcgggctggatgcaggtgcagacgattatctggtcaaaccttttgttctcgccgaactgctggcgcgcgtgagagcccttgcgcggcgcagttacggttttgaaaatgaggcaatagaaattcgcggtttgtcgcttcatattccgacgcgtcgcgtaacggtgagcgcacgccacgttgagctgacggcaagcgaatatgcgctgcttgaaacgttaatgctgcgcgccgatcgcgtgcttacgcgacggtatctggaagaaaggatatttggcacgaaagaaaacctcagcaacgcgcttgacgtgcatatgggtaacctgcggcgaaaaattggcgatggctttgtgcgaacggtaagaggcgttgggtatgtcatcgataccgtacccgttcagaaggcagcaggttga

SEQ ID NO: 116078 - DNA, 837 bp, Enterobacter cloacae
atgagaaacatcacactgcgtaatagtttcccccgttcacgcatccgtcgcagcatgaaaagcatcttgccgggggccgtcctggcgttactggctaccccgaccctggcggcagatcagcctcagggcaacgtgttaaccctgggaggcggcgtggatgttgcgccacgctattccggttcggacaagagccgggtctctgcggctcaggtggttgattacgcgatggccaatggtttttttgtcagcaccacgcgggggatcggctacggcaacagctttggtaacctggactacaacgcagcgctgagctatcgcgctggacgtaaggatcgcgacgtaagcagcgattcgatcgcctccggcagcgacgacctgcgaggaatgggtgacattaaaggctcagctatcgttgtgccagggctgggatacagggtgactgactggctgaccgtgcagttgcaggcagaggtcccggtttctgagagagacaatggtgaagctgtgcatttcggcattgccagcccgctctatacatctccgaaaaatgcgttaacgctggcgctgaccggtagctggggatccagtaagtatgtgcaaacctactacggggtgaatgccgcccagtcggccgcatcgggttttgcccgacacgatgccggatcgggaatatatgcgtattcgctgaacctggactggacccataagcttacctcccgctggagcctgcttgccgcagctggcgttacgcagctgacgggagaggctggcgatagccccattgttcagcgaaaaacgtctcctgtgggaagtttgaaggtgacgtacagcttctga

SEQ ID NO: 116079 - DNA, 747 bp, Enterobacter cloacae
atgaaagcattgtctgtattaacagcgatggtgctggcggtttccaccagcgcgctggcagagacgaaagccagcgtagtgctggtgcacggggcgtttgccgacggcagcagctggaataaggtgattacccggctgcaaaaacaccataccgaggtcattgcggtacaacttccgctcacgtctctgaaagatgatgtcgccaccacgcagcgtgctatcgcccgggctcatggggatgtggtgctggtcggtcactcctggggcgggacggtaatcagcgaggcgggaaacaatgcccgcgcgaagtcactggtttacgttgccgcttttgcgccggattccggccagtcgacggcagctctggcaaatagcttccctgctccgccagggagcgccagcctcgctaaaaccacagaggggtatttatatctgccgataaaagcggtcagcgagaatttcgcccctgacgtgaaggacgttgagcgcagcgtgattgccgcgacgcagagccccattaaggccgatgcgtttggggagaaaatcgcgcatgccgcctggcatgacaaaccgagctggtatgtggtcagcaaaaatgaccggatgatcaatcctgagctagagcgcgcaatggcgaagaaaatcaacgccaacaccacggaggtagcggcaagccatgtatcgatggtcagccagccagacgtcattacccgtacgattgaacaggcgttatcgggtcaacagtga

SEQ ID NO: 116080 - DNA, 468 bp, Enterobacter cloacae
atgattcgtcgatatttcctgcttcctgtatttgcgctgacgtcctttgctggcgcaatggccgcaccgttgcatggcctgagcgccgctgatgtcaacggtccagccgccgtcgccccgcctgaacacgcccagccgccagcaaaactgattgtcgatccgccgctggcgggaccgctaagtaaaggtgcggtctttattcagtaccgtgtcgaaaacctgcgcattgaacctgtatttggacccgacgcgctgaaagtcactccgcgtatcggccatatttacgttgtggtggatgacgcgccctggcactgggctgataccagcggcgagccggtgatcctggtcgggctgcccgcaggaaagcacaaggtgacgatcgtcgttgccgacccgacgcataaacccatcgaccataaaaccgttgaattcaccgtgccgccacacgccgcggttcatcacttttaa

SEQ ID NO: 116081 - DNA, 189 bp, Enterobacter cloacae
gtgagtcaggctacgcgtatgcgaaaacgacatcgatttaacacccggatgacccgcatcatactgcttatcagtttcctgtttttctttggccgctttgtttattcctccattggcgcctggtatcaccatcaggacaaaattcagtcgcagcaatcaggtcttgtggtggattcgcccgagcgctaa

SEQ ID NO: 116082 - DNA, 2241 bp, Enterobacter cloacae
atgaatattcaccacatcctgaagcaaaataaagaccgctggtgggcacttcctcttattttacccgtcgtgttactcccggtgcttagtgtggctaataccttaacgcagttgggcgacggtatcgttgcgctctattatctcccgctctcctttttgctgacgctgatgttattctttggcctggaagccctccccggggtggtggtgtcgctgtttttacgttattacccctccgttgggttatttgaagccatggccggcattctgcattttatcgttcctctggtgctcagctggggcggttatcgcgtgtttgcgccccggcgcaatatgaccgcttacggtgacatacgcctgatggggcagcgtattttctggcaggtgttttgcccggcaacgctatttctgctgctgtttcagtttgcggtctatctcggcgtctatgagagccgccagagcctcgcaggactgaatcccctcaatattcggacccttattaactatcaggggctgctggtgagcgggctgacgggcgtgccgctaagctacctgctgatccgcctgatacgtcatccgcgctatatcaagggactgatgtcccagctccgcgcgcaaatagacaaaaaggtgacggcctttgagtttgtggtgtggtttatagccctgggcgggttgctggtcatgctgctgctgcccatgaatgcaaacagttccattttcagtaccaactacaccttgtccctgctgatgcccgtgatgctctggggggcgatgcgctttggctacaagctgatgtcactcatctggacgccggtcctgctggtgtcgattcactttttttatcactacattccggtgcaagagggttatggcattcagctggcgatcacctcatccagctatctggtcttttccttcgttgtgacgtacatgtcgatgctggcgacacgccagcgggccatcaatattcgctcccgcagtcaggcttttctcgatccggtggtgcatatgcccaacctgcgggcgctgtcgcgcgagctggccagtcatccgtggtcagcgctctgtttactgcgcgtgcccgagctggaggtgctgggacgcaattacggcgtgatgctgcggatccagtataaacagcagctggcgcaatggataaacggtacccttcagcccaatgagcgagtctatcacctcacggggtatgacatggcggtgcgtctggaggcggagtcgcatcaacagcgcattgaaacgctggacgagcatatcaagcagtttgtttttatctgggatggtatgccggtacagcctcaggtcggcgtgagctattgctatgtacgctcacccgtcaatcatctctatctggtgctgggggaactgggcatcgtggccgatctctccctttctaccaaccacccggaaaatcttcagcagcgcggggctgttcatttgcagcgtagcctgaaagataaggtcgcgatgatgagtcgtttgcaggccgcgctggagcaggacgcttttaccctgctggttcagcccgttcgcgggctgcgcggtgattgttatcacgaggtgctgctgcgaatgcgtgatgataacggggcgctgatctttcccgagcagttcctgcccattgcacaggagtttgggttatcgtcgcgtgttgatttatgggtactggagcgtacgttgagttttctggcacagcaccgccagcgtttgccgggccagcgctttgcgatcaacctcgcaccttctaccgcctacagggcgcagttcccgcttgaagtgagccgcctgttagccaaatacgccgttgaagcatggcaactgatctttgaagtgaccgaaagcagcgcctttggtcatgcggatctggcggcgtcgaccctcaggaaattacaaaaaatgggcatccggatcgccattgatgattttggcacgggctacgccagctatgcgcggttaaaaagcgtggacgcagacattctcaaaatcgatggcggttttattcgcaatattgtcagcaacagcctggattaccagattgtggcttccatttgccatctggcccggatgaagaaaatgctggtggtggcggaatatgtggaaacggaagagatacgtagcgcggtgcacgcgctaggtatcgattatgtgcagggctatttgattgggttgccggctgagcttgatacgttgctcaacacgcagccttctcaggagagcgcctga

SEQ ID NO: 116083 - DNA, 1539 bp, Enterobacter cloacae
atgccaataaacgataataccccacgcccgcaggagttcgccgcggtcgatcttggctcaaacagtttccatatggtcatcgcccgcgaggtggatggcgcgatgcagatcatcggtcgtctgaagcagcgtgtgcatctagccgatggtctcgacgcgcgtaacatgctgagcgaagaggccatggagcgcgggctgaactgtctgtcgctgttcgcagaacgtttgcaaggcttttcgccgtccagcgtctgcatcgtcgggacgcatacgctacgccaggcgctgaacgcgccggagtttcttaagcgcgcggaaaaggttatcccctacccgatagagatcatctccggtaacgaagaagcgcgcctgatttttatgggcgtggagcatacgcagccggaaaaaggccgcaagctggtgattgatatcggcggtggttccacggaactggtgattggcgaagacttcgagccgcgtctggtggaaagccgccgtatgggctgcgtcagcttcgcgcagatgtatttcccgggcggcgtcatcacccgcgaaaacttccagcgcgcgcgcatggccgccgtacaaaaactcgaaaatctggcctggcaataccgtattcagggctggaacgtggcgctgggcgcatcgggttcgattaaagcggcccatgaagtgctgctggcaatgggtgaaaaagacgggtttattacgcctgagcgcctggtgaaactcaccgaagaggtgcttaagcataagagcttcgacgccctgagtttgccgggtctgtccgacgaacgtaaagccgtgttcgtaccggggctggcgatcctctgcggcgtgtttgacgcgctggcgatcaaagagctgcgcctctctgacggcgccctgcgtgaaggcgtactgtatgagatggaaggccgtttccgtcatcaggatattcgcagccgcaccgcgcagagcctggccaaccagtacaacatcgaccgcgaacaggcgaaacgggtgctcgaaaccacggttcagatgtacgagcagtgggaggagcagaatccgaagctggcgcatccgcagctggccgcgctgttgaaatgggccgccatgttgcacgaggtggggctgaacattaaccacagcggaatgcatcgccattcagcctatattctgcaaaacagcgatctgcctggtttcaaccaggagcagcaaaccatgatggcgacgctggtgcgctatcaccgcaaagccatcaagctcgacgatctgccgcgctttacgttatttaagaaaaagcagttcctgccgctcattcagctgttgcgcctgggcgtgttgctcaataatcagcgacaggcaaccaccacgccgccgacgctgaagctaaaaacggatgactatcactggacgctgagcttcccgcacgactggtttagccagaacgcgctggtgctgctggatctggaaaaagagcagcagtactgggaagcggtcaccggctggctgttgaagattgaagaagagagttctgaggcggcagcgtaa

SEQ ID NO: 116084 - DNA, 2061 bp, Enterobacter cloacae
atgggtcaggaaaagttatacatcgagaaagagctaagctggttagcattcaacgaacgtgtacttcaggaagcggccgataaaagcaacccgctgattgaacgtatgcgttttttaggcatctattccaacaatctggatgagttctacaaggttcgcttcgccgaactgaaacgccgaatcatcatcagcgaagaacagggcttgaactcccactcccggcatctgcttggaaaaatccagtctcgcgtcatgaaagccgatcaggaatttgatggcctctataacgagctgctgctggaaatggcacgcaaccaaatcttcctgatcaacgaacgccagctctccgcgaatcagcaaaactggctgcgccactatttcaaacattatctgcgccagcatatcaccccgattctgatcaaccgtgaaaccgatctggtgcagttcctgaaagatgattacacctatctggcggtagaaatcattcggggtgagaccattaactacgcgctgctggaaataccgtctgataaagtcccacgctttgtaaacctgccgccggaaaccccgcgccggcgtaagccgatgatcctgctggataacatcctgcgctactgcctggacgatatcttcaaaggcttcttcgattacgacgcgctcaacgcctactcgatgaagatgacccgtgacgccgagtacgatctggtgcatgagatggaggccagcctgatggagctgatgtcttccagcctcaagcagcgcctgacggcggagccggtgcggtttgtctatcaacgcgatatgccggacgcgatggtggagatgctgcgcgataagctgaccatctcccgctacgactccattatccccggtgggcgttaccacaactttaaagatttcattggcttcccgaacgtcggcaaggccaatctggtgaacaaaccgctgccgcgcctgcgccatatctggttcgataagttccgcaacgggttcgacgccatccgcgaacgggatgtgctgctctactatccgtatcacacctttgaacacgtgctggaattgctgcgtcaggcctcgttcgatccgaacgtgctggcgatcaaaatcaacatttatcgcgtggcgaaagattcccgtatcatcgatgcgatgatccacgcggcgcacaacggcaagaaagtgaccgtggtggttgagctccaggctcgcttcgacgaggaggccaacatccactgggcgcgccgactgacggaagcgggcgtacacgtcatcttctccgcgccagggctgaaaattcacgccaagctgttcctgatctcccgtaaagagggcgacgacgtggtgcgctacgcccatatcggtaccgggaactttaacgagaaaaccgcgagaatctacaccgactattcgctgctgactgccgatgcccgcatcaccaacgaagtgcgtcgggtgttcaacttcattgagaacccgtaccgcccggtgagcttcgattatctgctggtgtcaccgcagaactcacggcgcctgctgtacgatatgatcgataaagagattgccaatgcgcagaacggcttgtcgtccggcatcacgctgaagctcaacaatctggtggacaaagggctggtggaccgcctgtacgcggcctccagctccggcgttccggtaaatctgctcattcgcggcatgtgctcgctcattccggaactggaaggcatcagcgacaatatccgcgtgatcagcattgtggatcgctatcttgaacacgatcgcgtctatattttcgataacgccggtgataagcgcgtatacctctcgtccgccgactggatgacgcgtaacattgattaccgtattgaagtggcggcaccgctgctggatcctcgcctgaagcagcgtatcctggacattatcgagatcctgttcagcgatacggtgaaagcacgttatatcgacaaagaactcagtaatcgctatgtaccgcgcggcaaccgccgtaaagtgcgctcgcagctggcgatttacgattacattaaatcacttgagcaatccgattaa

SEQ ID NO: 116085 - DNA, 642 bp, Enterobacter cloacae
atgaaaaacatcgtggtgctcatttccggcaacggaagcaatttgcaggcaatcatagacgcctgcaaacagaagaaaatcaatggcaccattcgggcagtattcagcaacaaggccgatgcattcggccttgagcgcgcgcgggaagcgaacattcctgcgcacgcgctggaagccagccagttcgccgggcgtgaagcctttgaccgtgagctggtgcaggagattgacgcctacgcacctgacgtggtggtgctggcaggctacatgcgcatcctgagcccggcttttgttgcacactacgccggacgactgctcaatatccacccttccctgctgccaaaataccccggtctgcacacccatcgtcaggtgctggagaacggcgatgaggagcatggtacctccgtgcatttcgtcaccgacgagctggacggcggtccggtcattttgcaggcaaaagtaccggtctttgacggcgacaacgaagacgacgtgaccgaacgtgtgcagacgcaggaacacgccatttatccgctggtggtaagctggtttgtcgatggacgtctggagatgcgcaacggcgcagcctggctggacggcgtgaagttgcccccgcagggttatgcggctgaagagtag

SEQ ID NO: 116086 - DNA, 1038 bp, Enterobacter cloacae
gtgaccaacaaaacttctctcagctacaaagatgccggtgttgatattgacgcaggtaatgcgctggttgaccgaatcaaaggtgtggtgaaaaaaacccgccgcccggaagtgatgggtggcctgggtggattcggcgcactgtgcgcgctgccgcaaaaatatcgtgaacctgtgctggtctcgggtacggatggtgtcggtacaaaactgcgcctggcgatggatcttaagcgtcacgatacgattggtatcgatctggtggcgatgtgcgtcaacgacctggtggtacagggcgccgagccgctgttcttcctcgattactacgcgaccggcaagctggacgtggataccgcagccagcgtcattaacggtatcgccgaaggctgcctgcaatccggctgtgcgctggtcggcggtgaaaccgcggaaatgcctggcatgtatcacggggaagattatgacgtcgcaggcttctgcgtcggcgtggtagaaaaatcagaaattatcgacggcagcaaagtggctgacggcgatgtgctggttgcgctggcctccagcggtccgcactccaacggctactctctggtgcgtaaaatcctcgaagtgagcggttgcgacccgctgaccaccgagctggacggcaaaccgctggccgatcacctgctggccccgacgcgcatctacgtgaaaaacgtgctggagctgattgagaacgttgacgtgcacgccatcgctcacctcactggcggcggcttctgggaaaacattccgcgcgtgctgccggacaatacccaggcggtgatcgacgcatcctcatggcagtggccgtccgtcttcaactggctgcaaaccgcaggcaacgtgagctctcacgaaatgtaccgcacctttaactgcggcgtgggcatggttatcgccctgcccgccagcgaagcggataaagcggttaaactgctgacagaaaaaggtgaaaacgcgtggaaaatcggtacgattaaagcttccgattccgaacagcgtgtggtcattgaatga

SEQ ID NO: 116087 - DNA, 1431 bp, Enterobacter cloacae
atgtcaggatttaaagcaggttttctgtggggtggggccgttgcggcgcaccagctcgaaggcggctggaaagagggcggcaagggcgtgagcgttgccgatgtcatgacggcaggcgcccacggggtaccgcgtgaaatcaccaacggcgtgctggaggggaaaaattacccaaaccacgaagccatcgacttttatcaccgctataaagaagacatcaaactctttgccgagatggggttcaaatgcttccgcacctccatcgcctggacgcgtatcttcccgaaaggcgacgagctggagccgaacgaagcgggactcaaattctatgacgatctttttgacgagtgcctgaagcacggcatcgagccggtgatcacgctttcccacttcgagatgcctttccacctggtgacggaatacggcggctggcgcaaccgtaagctgatcgacttctttgttcgcttcgcgaaggtcgtttttgagcgctaccagcataaagtgaagtactggatgacctttaacgagatcaacaaccaggccaacttccacgaagactttgcgccgtttaccaactccgggctgaaatatgcgccgggagaagatcgcgagccggtgatgttccaggcggcgcactatgagctggtggccagtgccctggcggtgaaggcggggcgcgagatcaacccgtcgctgcaaatcggctgcatgattgccatgtgccccatctatccgctgacctgtgccccggacgatatgatgatggcgatgaacgccatgcatcgtcgctactggttcaccgacgttcacgtgcgcggcaagtatccgcagcatctgctcaactactttgaacgtcgcggcttcgcgctggatatcaccgaagaagataaagtggcgctgacgcagggctgcgtggattacatcgggttcagctactacatgtctttcgccaccaaagcgacggcggacaacccgcagctggactacgacgagagcaagagcctggtctctaacccgtacgtgcagaaatcggactggggctggcagattgacccggtggggcttcgctactccctcaactggttctgggatcactaccagctgccgctgtttatcgttgagaacggctttggcgcgatcgacgtgcaggagagcgacggcacggtgaacgaccagtaccgcatcgactacctttccgcgcatatccgcgagatgaaaaaagcggtggtggaggatggcgtagacctgatgggctataccccgtggggctgtatcgacctggtctctgccggcaccggcgagatgaaaaaacgctacggctttatctttgtcgataaagataacgaaggtaacggcacgctgaaccgcagcaagaagaaatcgttcgactggtataagcaggtgattgccagcaacggagagcagctataa

SEQ ID NO: 116088 - DNA, 627 bp, Enterobacter cloacae
atgaaaattgtggaagtgaaacacccactcgttaaacacaagttgggcctgatgcgtgagcatgacatcagcacgaagcgttttcgcgaactggcttctgaagtgggtagcctgctgacctacgaagcgacctctgatctggaaacggaaaaagtgaccatcgaaggctggaacggtccggtacaggttgagcagatcaaaggtaaaaaaattaccgtggtgccaatcctgcgtgcgggtctgggcatgatggaaggcgtgctggagcacgtcccaagcgcgcgtatcagcgtggtggggatctaccgtaacgaagagacgcttgagccggtcccgtacttccagaagctggtctctaacatcgacgagcgtatggcgctggtggttgacccgatgctggcgaccggcggttcgatgatcgccaccatcgacctgctgaaaaaagcgggatgcagcagcatcaaagtgctggtgctggttgcggcgccggaaggtatcgcggcgctggaaaaagcgcacccggacgttgaactctataccgcgtctgtcgaccagggactgaacgagcacgggtacatcatcccggggctcggcgatgccggcgataagatttttggtactaaataa

SEQ ID NO: 116089 - DNA, 1290 bp, Enterobacter cloacae
atgacgcgccgtgctatcggggtgagtgaaagaccgccgcttttacagacaatcccgcttagtttgcagcacctgttcgccatgtttggcgcaaccgtgctggtgccaatcctgtttcacattaacccggctaccgtgctgctgtttaacggcatcggtacgctactttacctcttcatctgtaaaggcaaaatcccggcctatctcgggtcgagcttcgcgtttatctccccggttctgctgttgctgccgctgggttatgaggtcgcgctgggcggctttatcatgtgcggcgtgctgttctgcctggtctccttcatcgtgaagaaagccggtaccggctggctggacgtgatgttcccgcctgcggcaatgggggccatcgttgccgtcatcggcctggagctggcgggcgtggcggcgaacatggccgggctgctgcctgcggacggtcagtcaccggattccaaaaccatcattatttcgctggtgacgctgggcgtgacggttttcggttccgtcctcttccgcggctttatggcgattatcccgatcctgatcggcgtgctggcgggttacgcgctctccttcgtgatgggcgttgtggataccaccccgattgccgaggcgcactggttcgcgctgccaaccttctacaccccgcgctttgaatggttcgccattttcactattctgcctgccgcgctggtggtgattgctgagcacgtcggccacctggtggtgacggcgaacatcgtgaagcgcgacctgatccgcgacccgggcctgcatcgctccatgtttgccaacggtttctccaccatcatctctggtttcttcggctccacgccaaacacgacttacggtgagaatatcggcgtaatggcgatcacccgcgtctacagcacctgggttatcggcggcgcggcgatcatcgccattctgctctcctgcgttggtaaactggcggcggcgatccagattatcccggttccggtgatgggcggcgtttccctgctgctgtacggggtgatcggtgcctccggtattcgcgtgctgattgaatccaaagtggattacagcaaggcgcagaacctgatcctcacttccgttatcctgattatcggcgtgagcggcgcgaaggtgcacatcggcgcggcagagctgaagggtatggcgctggcgaccatcgtcggcgtcggcctgagcctgattttcaagctgatctcggtgatccgcccggaagaggtggtgctggacgcggacgaaagcgaaaaagcgccacattga

SEQ ID NO: 116090 - DNA, 594 bp, Enterobacter cloacae
gtgctgcgccaggaacacagcggatacatctatatctggtcacgcgaaggcgcgggacgcagccacctgctgcatgccgcctgtgcggagctttcggcgcgcggtgacgcggtaggctatgtgccgctggataaacgcacctggtttgtgcctgaggtgctggagggcatggaacatctctccctggtctgcatcgataatatcgaatgcgtggcgggggacgaaccgtgggaaatggcgatctttaacctctacaaccgcatcctggagtcgggcaaaacccggctgctgatcactggcgatcgtccgccgcgtcagctcaatctggggctgccggatctggcgtctcgtctggactggggacaaatctacaagctgcaaccgctgtcggatgaagacaaactccaggcacttcagttgcgcgccagactgcgcggatttgaactgccggaagacgtgggtcgtttcctgctcaagcgtctggatcgcgaaatgcgcacgctgtttgatacgctcgatcagctcgatcgcgcctccattaccgcccagcgcaagctgaccattccgtttgtaaaagatattcttaagctttga

SEQ ID NO: 116091 - DNA, 1419 bp, Enterobacter cloacae
atgatcacataccagtttatcaacgcgctttcagacgcgaagccgcaaagccatttgattgcgcgcgctgacagttccctgttaccggatagtgctcttatcgctgaaatgcgccagcagagcaccgtcgcggatgcgcgctttggctgcgcgccgtttgcccgcatcaccctgtttccggatgcgctctggcatgacgccctgaccgaagggttgctcaccgccctgcgaccgctgcttgccgcccccgccagcgccgaactcgtgctggacgtgacggatattgacgatgtggtgctggcgcaggtactgcgttttctctttaatcaggcgcacaggctcagtgacctgaagctgaagaagacggacgaagcgctgcgtcttacctgcatcactgccctctgcttgccggaacagcaggcgaagctggagacgaccttccgccagcagcagaccattgcgctcggcatggttgcggcgcgacgtctggcggatatgccgtccgaccgctgcacgccgcagtttgtggtggaagaggcgcaaaaactgtgtgccgccagccctgccctgcgctgcgaggtgttggatgaaaagcaaattgttgagcaggggctggggctactgcacgccgttggcaaaggggcgaactgcccaccgcgtctgctcgctattcactataacggcgtgtctgatggcccggtgcgctgctacgtgggaaaaggcattacctttgacaccggcggcctgtggctgaaggaaggcgcgggcatgtacaccatgaaatatgacatgtgcggcgcggctaacgtgctcgggctgatgctgaccgttgcggagctgaaattacccgtgcgcatcatgggcgtgctggcgctggcggaaaacgccatcggccccgacgccatgcagcccggcacggtggcgacggcctgcaacggcaccaccgttgaaatcaacaataccgatgccgagggccggctggtactggcagacgctatcgcctgggcgagtcagcgccatccgcaggcgcactatatcattgatatggcgaccttaaccggagcggtggtgaaagcgctggggtatgagctgagcgggctgatgacccaggatgagccgttgcgtcaggcactgacgctcgcgggcaaacgaagcggcgacgaggtgtggtccctgccgctggatgcgcggctgagaaagcagaccgacagcgccattgccgatctatgcaacacgccgaccaacaatgcggcgatcagcgcctcggcggcgtggctgctgcatcacttctgcccgccgaccattccgtgggcgcatctggatatcagcgggacggcgctgtggcgtgagaacggcagaagcgtggcatcgggaagaccgattccgctgctggtggagcacttgttgggggatctttag

SEQ ID NO: 116092 - DNA, 957 bp, Enterobacter cloacae
atgtggggaattatcgcaacctggcgaatggcgcttgaaggcgtcacggaatctgcgtctgcgctggctgcgggcaaacctgtcgctccggcggtggtggatgccgtcgccgccgtcgaggactttccgttttataaatccgtcggctacggcgggctgccgaccgagaacggcgaggtagagctggacgcggcctatatggacggcgacacgctggcgttcggcgccgtgggcaatctggtggatatcgccaacccggtacgcgtggcgcacgcgctcagccgccagcgctataacagcctgctggtcggccagggcgcgcgcgaatgggcgctgagccagggctttgccgacaaaaccatgctcacggatcgcgccatgcaacactaccgtaagcgctgccgcgaaacgctggataaggggttaagcccctacgacggacatgacaccgtcggtatcatcggcctcgataaacagggatcgatgagcgtcgccacttccaccagcggcctgtttatgaaaaaacgcggtcgcctcggtgactcacccatcatcggctccggcttttactgcgacagcgaaaccggcgcggccaccgccacgggcgtcggtgaagatctgatgaagggctgtaccagctacgaaatcgttcgccggatggcgcaagggatgacgccgcagcaggcggcggattcggtggtgttcgaactggaagacaagctgatgtcgcgcttcggtcgcgcgggcgatgtctccgtggtgtgcatgaacagcaaaggagaatttggcgccgcaaccaacatcaaaaccttctcgtttgtggtggcgacggctcgccagcccctcaccgttttccgtactgaacgcctgcgggagaaaacgcactatcacgcggtagatgaggagtggatgcaggcctatgccgcgcggatccgcgcaccgattgaggagtcatga

SEQ ID NO: 116093 - DNA, 1320 bp, Enterobacter cloacae
atgaacaatgttctgggatttcttgaagcaaaactgatgccgctggcggcgaaaacggcccagcagcgtcatcttggggccattcgcggcgcctacgtgtcattcatgccgtttatcatcgtcggctctattctgctggtgatctcctccttcccgaatcaggcctatcagcagtttatgtctcaggcctttggtgagagctggagtgcaattatagagatcccgtttaacgcggtgttctcaaccatgtcgctgtttatcagcttcctggtggcctaccgcctggctgagcattatggtgaggaccgcatctcctgcggcatcctggcgctggtcgcgtttctgatcctgacgccctttatcaaagtggcggaaaacggcggcattaccgtgatgccggtggagtggattggcagcaaagggctgttcgtggcgatgatcggttccctgctgtggacggaactgttctgctggctgaagcgcaaaaagctggtcatcaaaatgccggacggcgtgcctccggcggtgcaggagtcattcgcggccctgatcccggccctgctggtaatgattctggtgctgcttatccgcatcatctttgaaaacacccactaccacaccatccaccagtttatttatgaagtggttgccaccccggtacgccactacggcacctcttatttcggggcgctgatgaccgtattcagcatcaccattctgtggtcagtgggcattaactccggttcgatgatcaacgggattattcgcccgctgtggatggagaaccagaccgacaacatcgccgcgatccaggcgggaacgacgccgccgcacatcatcaccgaacagttttttgacatgatctggatgggcggcgcgggcgccacgctgtcgctggtgattgcgatgctgattttcgcccgcagcaaaaacatgcgcgaagtagcgcgcctcggtgcgggcgcgtcggtgtttaacatcaacgaaccgatcctgtttggcctgccggtgatcatgaacccgatcatgctcatcccgttcaatctggtgccgctggtgctggtcaccgtgcagtatgcggcgatgaaaattggtgcggtcgccgtcactaccggggtgtttatcccctggacgctgccgccggttatcagcggctttatcgtcaccgggcacctgagcggcagcgtgatgcagctgatcaacctgctgattggcgccatgctgtacctgcctttcatgcgtatcctggataaacagtaccgcgccgcggagctgactaccgctacgcaaaccgacaccacccttgcaaaacaggagtaa

SEQ ID NO: 116094 - DNA, 825 bp, Enterobacter cloacae
atggaaatcaaactgcatgccaacgccaccaccacaccgcgtatccgtcgttatcttcagcagtcagataaaagcgacagggaacttgccgttgagctggggatctcggtcaccaccgtcaggcgctggcgcaaccgcgaccaggtttcggataaccacacaacgccaaaagtgatacacaaagcgctgagacaagagcaggcggcactgataaatgccctgcgggatatcaccggggcaccgctggatgaactgctgctgctggtgaatgacggactcgggatcgccgtttcccgcgcgaccctgaaccgctacctcaaaccagcttcggtaaaacaaaagggggcgtcgttgcagggcaaaaaggcgctgaaggccggtatcatgccgcagaagctgtttctgcatcatcagccgctgtcgctgcatatggacgacggtggcgagcaacacctgctctgggcgcgtgaacccgtcagcggctggtgttacgcccggctttatgctggcgtatcgccgcagttgctgacccgctggacgaacgaggtgctggctgcctgtccggctgatattcaatctgttgagacttttgggctggaagtgaacttgccggagcataacgtcaccgtaaaagtgcattcacagtattatctcgcccttcaggtcaccgtgccgttacgcgaaatcattccgcgggtgaacagtgaaccgatgggagagctgttgatccaattgtgtgagttttacaaccggggaaaagcgcagaaaaagctgggagagcgtacgccgcaggcgtttctggaagcgctgcggcgtaacgattag

SEQ ID NO: 116095 - DNA, 357 bp, Enterobacter cloacae
atgacagacgcggtaaaaatttaccataaccctcgccgctccaagagccgagacaccctcagcctgctgaagtctaacggcatcgaaccggaagtggtgctgtacctggagacgccgccggacgcgcagactatccgccagctgctgaagatgctgaacatgggcagcgcacgcgacctgatgcgtcagaaagaagatctgtataagtcgctcaatctgaacgataccagtctcactgaagatcggctgattcaggcgatggtcgacaatccaaagctgattgagcgcccgattgtagtggcaaatggcaaggcgcgtatcggccgtccgccggaagacgtgctcgagatcgtctaa

SEQ ID NO: 116096 - DNA, 1464 bp, Enterobacter cloacae
atgttcaggcagttgagaaaaacactggttgcgacactgattgccgccgtgacggtgggtcaggtgttgcccgctttcgctgactcgtccgattcattgccggacatgggcaccacggcaggaagcacgctctccatcgggcaggagatgcagatgggtgattattacgtacgccagttgcgcggcagtgctccgctgattaacgaccctttgctggtgcaatacattaacggcctggggatgcgtctggtggcgcacgccgactcggtaaaaacgcccttccacttctatttaatcaataacgacgaaatcaacgccttcgccttctttggcgggaacgtggtactgcattcggcgttgttccgttattccgataacgaaagccagctggcgtccgtcatggcgcacgaaatttcgcacgtcacccagcgccatctggcgcgtgcgatggaagatcagaagcgtaacgccccgctaacctgggtgggcgcgctgggctctattctgctggcgatggccagcccgcaggccgggatggcggcgcttaccgggacgctggcggggacgcgtcaggggatgatcagctttacccagcagaatgagcaggaagcagaccgcatcggcattcaggttttacagcgttccggctttgacccgcaggccatgccgagcttcctggaaaagctgctcgaccaggcacgctactcgtcgcgtccccctgaaattctgttgacccacccgctgccggaaagccgcctctcggatgcgcgtaaccgtgccaaccagatgcgtccggtcgtggtgcagtcttcgcaggatttctacatggccaaagtgagaacgcttggcatgtacaactccggacgtaatcagctcaccagcgatctgctggacgcgctggcgaaaggcaacgtgcgcgagaaaaacgcggcgcagtatggtcaggcgctccaggcgatggaggccagcaaatacgatgaagcgcgaaaagcgctacagccgctgctggcggcggcgcctgacaatccgtggtatctcgacctcgccaccgatatcgatctggggcagaaaaaagcgaccgatgcgattaatcgcctgaaaggggcgaaagatcttcgtaacaatccggtattgcagcttaacctggcgaacgcctacctacagggcggccagcccggcgaggcggtgaccattctgaaccgctacacctttaacaataaagatgaccagaacggctgggagctgctcgcccaggcccaggggcaactgggtaaccgcgatcaggagctggccacgcgtgcggaaggtctggcgctggcgggtcgtctcgatcaggccatttccctgctgagcagcgccagctcgcaggtgaagcttggcagcctgcaacaggcccgctacgatgcgcgaatcgaccagctgcgcggcctgcaacaacgctttaagccgtacgagaagatgtaa

SEQ ID NO: 116097 - DNA, 1065 bp, Enterobacter cloacae
atgctcgaaatgttaatgcagtggtatcggcgtcggtttagcgacccggaagccattgctttgctggtcattctggttgccggattcggtatcctgttcttctttagtggcctgctggcaccgctactggtggcaattgtgctggcgtatctgctggagtggcccaccgcgcgtctggaacatatcggctgttcccgccgctgggcgaccagcattgttctggtgctgtttgtcggcattctgctgctgatgtccttcgtggtgatgcccatcgcctggcaacaggggatctacctgatccgcgatatgcccggcatgctgaataaactgtctgattttgccgccacgctgccgcgccgctatcctgcgctgatggacgccgggatcatcgatgcgatggccgaaaacatgcgcgcccgcatcatgaccatgggtgattcggtggtgaaatactctctggcctcgctggtcggcctgctgacgctggcggtttaccttgttctcgtgccgctaatggtgtttttcctggtcaaagataaagagcagatgctgaacgcggtacgccgtgtgctgccgcgcaatcgcggtctcgccggtcaggtctggcaggagatgaaccagcagatcaccaactacattcgcggcaaagtgctggagatgattgtggtgggcgtggcgacctggattggcttcgtgatcttcggactgaactactcgctgctgctggcggtgctggtcggattctcggttctgatcccgtatatcggcgcgtttgtggtgaccattccggttgtgggggtggcgctgttccagtttggtttgggtacggagttctggagctgtttcgccgtatacctgattattcagggactggacgggaacctgctggtaccggtgctgttctcagaagcagttaacctgcatccgctggtgattatcctttcagtggtgattttcggcgggctgtggggattctggggggtattcttcgccattccgctggcgacgctgattaaagccgtggtccacgcgtggccggatgtgccagcggtggaagagaagtag

SEQ ID NO: 116098 - DNA, 471 bp, Enterobacter cloacae
atgaacccactgaaagccggtgatatcgcaccgaaatttagcttaccggatcaagacggcgagcaagtaaatttgaccgacttccagggacagcgtgttctggtctatttctacccgaaagccatgaccccgggctgtaccgtacaggcctgcggtctacgcgacaacatggatgagttgaaaaaggtcggtgtggaagtgctgggcatcagcaccgataagccagagaagctgtcacgctttgcggaaaaagagctgctgaacttcacgctgctttccgatgaagaccaccaggtttgcgagcagtttggcgtctggggtgagaagtcctttatgggcaaaacgtacgacggtattcaccgcatcagcttcctgattgacgctgacggtaaagttgagcacgtgtttgatgatttcaaaaccagcaaccaccacgacgtagtgttgaagtggctgaaagagaacgcgtga

SEQ ID NO: 116099 - DNA, 570 bp, Enterobacter cloacae
ttgacaacctcatcacaacattacctggttatcactgcgctgggtgctgacaggccgggtatcgtgaataccatcactcgccacgtgagcagctgcggctgcaacatcgaagatagccggctggctatgcttggcgaagagttcacgttcatcatgctgctttccggaacatggaatgccattaccctcattgaatctaccctgccgctgaaaggcgcagagctggatttactgattgtgatgaagcgcaccaccgcgcgcccgcgtccggctctgcctgccacggtctgggtacaggttgaagtgcctgattcacctcatctgattgaacgttttacggcgctgtttgacagccatcagatgaacattgccgaactggtttcccgcacgcagccgggcgatgaaaacgcaatcccgacgctgtttattcaaattaccgcacacagccctgcctcgcaggatgcgtcaaatatcgagcaagcgttcaaagccctctgtacagaattacatgcgcaaggcagtataagcgtcgtcgattattcgcagcacgaacaggatggagttgagtaa

SEQ ID NO: 116100 - DNA, 879 bp, Enterobacter cloacae
atgttcacgggaagtattgtcgcgcttgttacaccgatggatgaaaaaggtaatgtctgccggtcaagcatgaagaagctcattgattaccatgtcgccaatggaacctcggcgatcgtttcggtagggactaccggtgaatccgctacgctgagccacgaagagcacggcgacgttgtgatgctgaccctggaactggcggacgggcgtattccggtcatcgcgggtacgggcgcaaacgcaacggcagaagcgattagcctgactcagcgttttaacgacagcggcattgtcggctgcctgacggtgaccccttattacaaccgtcctactcaggaaggtttgttccagcatttcaaagccatcgctgaacatactgacttgccacaaattctgtataatgtgccgtcccgtaccggttgcgatatgctgccggaaaccgttggccgtctctcgaaagtaaaaaatattatcgggattaaagaggcgacagggaacttaagccgcgttcatcagatcaaagagctggtttcagacgactttatcctgttgagcggtgatgatgcgaccgcgctggactttatgcagctcggtggtaatggcgtgatttccgttacggcgaacgtggcggcgcgtgatatggctgacatgtgcaaactggccgcagccggtcactttgatgaagctcgcgtgattaatcagcgtctgatgccgttgcacaataaattatttgtcgaacccaatccgatcccagtgaaatgggcatgtaaggagttggggcttgtagcaaccgacacgctgcgtctgccaatgacaccgattaccgaccacggtcgtgaaattgtcgctggcgcgctgaagcatgccggtttgctgtaa

SEQ ID NO: 116101 - DNA, 1035 bp, Enterobacter cloacae
atggcttattcagtacagaagtcgcgcctggcgaaggttgcgggtgtttcgcttgttatgctcctcgctgcctgtagttcagactcgcgctacaagcgccaggtgagcggtgatgaatcctatctggatgcgccgccgcttgctgaacttcacgcgcctgccggcatgatcctgccgatccagaacggtgattataatattccggttaccaacggcagtggcctggtgggtaaagcgcttgatattcgtccgccggctcagcctctggcgctggtgagtggcgcgcgcacgcagtttaccggtgatacggcctctctgctggtggaaagcgcacgcggtaccacgctgtggccgcaggttgtgagcgttattcagtcgaaaaactatacgattgataaacgcgacgacgccagccagactttaaccaccgactggattgagtggaaccgtctcgatgaagaccagcagtatcgtggtcgttatcaagtctccgttaagccgcagggttatcagcaggcggttaccgtcaagctgttgaatcttgagcaggcaggtaaaccggttgccgatccggccgccatgcagcgctacagcactgaaatgctgaacgtgattgccgctggtctggataagaacgctaccgatgccgcaaacgccgcgcagaaccgtaacggttcaacgtttgatgtgcagagcggtgcagacgataccggcctgccaatgctggtggtgcgtgcgccgtttaatcagacctggcagcgcctgccagcaacgcttgaaaaagtgggcatgaaggtgaccgacagcacccgttcaacgggcagcatcacagcgacctataagccgctgtctgatagcgcctggcaggagctgggggcaagcgatccacagctgccttccggtgactacaaaatccaggttggcgacctcgataaccgcagcagcctgcaatttatcgatccgaaaggacacacgctgacccaggcgcagaacgatgcgctggtcgctgccttccaggccgcattcagcaaataa

SEQ ID NO: 116102 - DNA, 714 bp, Enterobacter cloacae
atgcagaagcaagctgagttgtatcgtggcaaagcgaaaaccgtatacagcacggaaaacccggatctgttggtgctcgaattccgcaatgatacgtcagcaggagacggcgcacgcattgagcagttcgatcgtaagggcatggtgaacaacaagttcaaccacttcattatgaccaaactggccgaagccggtatcccgactcagatggaagcgttgctgtccgatacggaatgtctggtaaaaaaactggatatggtgccggttgagtgcgtgatccgtaaccgtgccgcaggctccctggtgaagcgtctgggcattgaagagggtatcgaactgaatccaccgctgttcgatctgttcctgaaaaacgacgccatgcacgacccgatggtcaacgaatcctactgcgaaaccttcggctgggtaagcaaagagaacctggcgcgcatgcaggaactgacctacaaagccaatgacgtgctgaaaaagctgtttgatgacgcgggcctgatcctggtcgacttcaagctggagttcggtctgtacaagggtgaagtggtgctgggcgacgaattctcgccggacggcagccgcctgtgggacaaagagacgctggataaaatggacaaagaccgtttccgccagagtctgggtggcgtggtcgaagcgtacgaagcggttgctcaccgtttaggcgttaagctcgactaa

SEQ ID NO: 116103 - DNA, 870 bp, Enterobacter cloacae
atgcgctggcaagggcgtcgtgaaagtgacaacgtagaagacagacgcagcagtggtggcggtggtccgtctatgggcgggccaggtttccggttacccagcggcaagggcggcattattctgctggtcgtcgtgctggtggcgggctactacggcgtcgacctgaccggtttgatgaccggtgaaaccgggcaacagcagcagtattctcagcgctccatcagcccgaatgaagatgaagcggcgaaatttacttccgttattctcgcgacgaccgaagatacctggggtcagcagttcgagaaaatggggcggacttatcagccgccaaaactggtgatgtaccggggcgcaacccgcaccggctgcggcaccgggcagtccgttatggggccgttctactgcccggcggacagcaccgtctatatcgatctctccttctatgacgacatgaaaagcaagctgggcgccgacggcgattttgcccagggctacgtgatcgcgcatgaagtcggccaccacgtgcagaagctcctcggcattgagcctaaagtgcgtcagatgcagcagaatgcttctcaggcggaggtgaatcgtctgtccgtacgcatggagcttcaggccgactgcttcgctggcgtctggggacacagcatgcagcagcagggcgtgctagaaacaggcgatctggaagaggccctgaatgccgcacaggcgattggtgacgatcgcttgcagcagcagagccaggggcgcgttgtgccggacagctttacccatggcacctcagagcagcgctacagttggtttaagcgtggcttcgacagcggcaacccgtcgcagtgtaataccttcggcaaagctatgtga

SEQ ID NO: 116104 - DNA, 1947 bp, Enterobacter cloacae
atgttggggtttgaacagctggtcaaccagcttcagcgtaccgggcaccgccggctggtggtgctcagcggcgatgaagcgtggacgttgagccaggcgaccattctgcgcgatacgttaccaggagactggctgtggctggaggaaaacccctctaagaccatcagcggcctgctgggacgtgaatacctgcacgccgtttttgacgcgcgtcgcgggtttgacgtctcggccttcgccgccctcagcgggaccctgcgcgccggaagccttctgatgctgctggtgccgccgttctccgtctgggctaacaggcccgacgcggattctctacgctggagcgacagcgccgagccgatcgccaccccgcactttgttcaccacttttgccggacgcttgccgccgattcagatgccatcgtctggcatcaacatcgtcctctgtgccttcccgttacgtcagatttacccgcctggcagcctgccagcggtgaaccgcagcgcgagcaagctgagatcctcgacgctcttctgaccatgcctgcgggcgtggccgccgtgacggcaccgcgcggacgcggaaagtccgccctggcgggcatgttgctcaacggcattcaggggagtgcagtcgtgacggcaccggcaaaaggggcgacggatgtcatcgcgcgtttcgccggggaacattttcactttatggccccggatgcgctgctggcctccacaacagaagctgactggctgattgtcgatgaggcggccgccatccccggcccgctgctggagaagctggcgtcgcgctttccccgcgtgttgctgaccaccacggtgcagggttatgaaggcacgggcaggggattcctgctgaagttctgcgcccggtttagcgggctgcggcgttataccttatccacgcctgttcgctgggctgccggatgtccccttgagcggatagtggcgaacgcgctgctgttcgacgatgcgcttatcgatcgcaaaccggaaggcgaggtacgtttaacgtcgctggagcccgggatgtgggagagcgatccgacgcgcggggcaggcgtgtatgaactgctttgcgccgcgcactaccggacgtcacccctcgatttacgccggatgatggacgcccccggccagcactttgctattgctcaggcgggcgcggagatcgcgggcgcgctctggctggtggaggaggggggattaccccctgaacttagccgcgcagtctgggcgggctttcgtcggccgcgtggaaatctggtggcgcagtcgctggcagcgcacggcggctcgccgctcgcggcgacgctgaaaggccgacgcgtcagccgcattgcggttcatccccatcgccagcgggaaggcatcggccagcggctgatccgcagtgccagcggagaagattatctctcggtcagctttggctataccgacgagctgtggcgtttctggcggcagtgcgggtttgtgctggtgcgaatgggcagccaccgggaagccagcagcgggtgctatacggcgatggcgttgctgccgctgagcgaggcggggcatcagctctgcgaacaggcgcatcagcggttatgtcgtgatatgcgcgtcctgtcggcctggaatggcgaaaagatcccggtgacggatgcatgggaagctacccttaatagtgacgactggctggagctggcggggtttgcctttgctcaccgggcgttttcaacttcggttgcggcgctgacgcggttgttgttagccgtggacatgccgctcccggcactgcgggggaaagtggaagggaatatgcacgatttcgggcgcaaagcgttgctggcgaagctacgcgaggaaaccgctcacgcgcttgaaaggcttgattactcccgtagccagcagctgaaagccgacattttgcaatggcaattttttcaatga

SEQ ID NO: 116105 - DNA, 696 bp, Enterobacter cloacae
atgaaacatgaccattttgttatgcaaagcccggatacacctgctaaacagctcctgcttctgtttcatggcgtgggcgacaatgccgtcaatatgggacaaattggcagctggtttgcacccgttttcccacacgcgctgatcgtcagcatcggcggcgtggagccgtgcggtccggacgggcggcagtggttttccgtcgagggcgtgacggaggagaatcgtcaggcgcgtattgatgccgctatgccagcctttatcgataccgtgcgttactggcagcagcagagcggcgtaggcgccgacgcaacggcgctgattggcttctctcagggctcaatcatgtcgctggaaagcgtaaaagcgcagcccggactggtgtcccgcgtgattgcctttaacgggcgttttgcgacgttaccgcaaagcgcgaccacgcagaccacgatccatctcattcatgggggggaagaccgggtaattgagctttcgcatgcggttgctgcccaggagacgctgatgcgcgagggcggagatgtgacgctggatatcgtagacgatctggggcatgccattgacgatcgcagcatgcagttcgcgctcgatcatctgcgttataccgtaccgaagcactactttgatgaagcgctcagcggcggtaagccgaatgacgatgatatcgtcgagtttatgtga

SEQ ID NO: 116106 - DNA, 198 bp, Enterobacter cloacae
atggactggctttcaaagtactggtggattctggtgttggtatttctggtaggcgtgctgcttaacgtgattaaagatctcaagcgcgttgaccacaaaaagttccttgccaacaaaccggatcttccgccgcaccgtgattttaacgacaagtgggacgatgaagacgactggccgaagaaggaccagaagaagtaa

SEQ ID NO: 116107 - DNA, 1128 bp, Enterobacter cloacae
atgtcatgcccggtcattgagctgactcagcagcttattcgccgtccttcccttagcccggacgacgcaggttgtcaggcattaatgattgagcgcctgcgtgccatcggttttaccgtggagcacatggattttggcgatacgcagaacttctgggcatggcgcggtcagggagagacgctggcatttgccggacatactgacgtagttcccgcaggcgacgcagaccgctggatcaacccgccttttgagccgaccatccgcgacggcatgcttttcggacgcggcgctgcggacatgaaaggttctctggctgcgatggtcgtggcggcagagcgtttcgtcgcccagcatccgaaccataaaaaccgtcttgcgtttttgattacctccgatgaagaagccagcgcccacaacggcaccgtgaaggtcgttgaggcgctgatggcgcgcaatgaacgtctggactactgtctggtgggcgaaccgtccagcaccgaagtggttggcgatgtggtgaaaaatggccgccgtggatccctgacctgtaatttgactattcatggcgtgcagggccacgttgcctatccgcacctggcggataacccggtacaccgcgccgcgccgatgctgaacgaactggtaggcattgaatgggataaaggcaacgaatttttcccgccaaccagcatgcagatagccaacatcaaggctggcaccggcagcaacaacgtcattcccggcgatctcttcgtccagtttaacttccgcttcagcaccgaactgaccgacgagatgatcaaagcgcgcgtgattgcgctgctcgagaaatatcagctgcgctataccctcgactggtggctgtctggccagccgttcctgacgcagcgcggtaaactggtggatgcggtggtgaacgccattgcgcactataatgaaattaagccacaactgctgacaacgggcggcacgtctgacggacgctttatcgcccgcatgggcgcacaggttgtcgaactgggtccggttaacgcgacgattcacaaaatcaatgaatgcgtgaatgctgccgatttacaactgctggcccgcatgtatcaacgtattatggagcagctcgtcgcctga

SEQ ID NO: 116108 - DNA, 357 bp, Enterobacter cloacae
atggttgtgatgtacggcattaagaattgcgacacgattaaaaaagcccgccgctggctggaagcacacaacatcgactatcgcttccacgattaccgtgccgacgggcttgaccccgcgtttctccattccgccatcaacgaactgggatgggaagcgctactgaatacacgcgggaccacctggcgaaaactggatgaatctctccgggccacgatcaacgacgccgacagcgcagccaaactgatgcttgaaatgccggcaatcatcaaacgcccattgctctgcaagccaggtcagcctatgctgctgggtttcagtgaaaccctttattcagatttattcgttgaggtgtag

SEQ ID NO: 116109 - DNA, 3114 bp, Enterobacter cloacae
atggcgaattttttcatcgatcgccccatttttgcctgggtgcttgcaatcctgttgtgtctgacgggtgtcctggcgattacgtcccttcctgttgagcaataccctgacctcgcgccccccaacgtgcgtatcacggcgaactaccctggcgcctcggcacagacgctggaaaataccgtcacccaggttatcgagcagaacatgacgggtctcgataacctgatgtacatgtcctcacagagcagcgccacgggccaggcgacggtaaccctgagctttacggcgggcacggatccggatgaagcggtgcagcaggtgcaaaaccagctgcaatcggccctgcgtaaactgcctcaggcggtgcagaaccagggggtgaccgtgcgtaaaaccggtgacaccaatattttgaccatcgcgtttgtttcaaccgatggctcaatggataagcaggacatcgcggactacgtcgccagtaatattcaggacccgctcagccgtatcaacggcgtgggtgatatcgacgcctacggctcgcagtactccatgcgtatctggctggatcccaacaagctgaacagcgtgcagatgaccgccaaagatgtcaccgacgctatcgaatcgcagaacgcccagattgccgtggggcagctcggcggtaccccgtccgtggataaccaggcgcttaacgccaccatcaactcccagtcgctgctccagacacctgaacagttccgcaatatcacgctacgcgtgaatcaggacggttcggaagtgcgtctgggggatgtcgccaccgtggaaatgggggcggaaaaatatgactacctgagccgcttcaacggtaatgccgcgtccgggctgggggtgaaactggcctccggtgccaacgaaatggcgaccgcgcagcgggtgctagagcgtctggatgagctgtcgcatttcttcccgcacggactggagtacaaagtcgcctacgaaaccacctcgttcgtaaaggcctccatcgaagatgtggtgaaaaccctgctcgaagctatcgcgctggtgttcctcgtgatgtacctgttcctgcaaaacttccgcgctacgctgatccccactattgcggtgccggtggtgctgctgggtacctttgcggtgctgtatgccttcggttacagcatcaacaccctgaccatgttcgccatggtgctggccatcggtctgctggtggatgatgccatcgtggtggtggaaaacgttgagcgcatcatgagcgaggaagggctttcgccccgcgaggccacgcgcaaatcgatgggacagattcagggcgcgctggtcggtatcgccatggtgctgtcggcggtatttatcccgatggcgttttttggcggcaccacgggcgcgatttatcgccagttctcgatcaccatcgtttctgcaatggtgctctccgtactggtggcgatgatccttacccctgccctgtgcgcgacgctgctgaaaccgctgcataagggcgaacaccacggtcaaaaaggcttcttcggctggtttaaccgcatgtttaaccgcaatgcggcgcgctatgaagcgggcgtgggtaaagttctgcaccgcagcgtacgctggatggtggtttatgttctgctgctcggcggcatggtcttcctgttcctgcggctgccaacctcgttcctgccgctggaagatcgcggcatgtttatcacctccgtacagttacccagcggctcgacccagcagcagaccctgaaagtggtgcagaaggttgagaactacttccatactcaggagaaagataacgtggtctccgtcttctccaccgtcggctctggccctggcggtaacgggcagaacgtggcgcgtatgtttgtgcgcctgaaagactgggaccagcgcgacagcgataccggctcctcctttgccatcattgaacgtgcaaccaaagcgttcaacaaaatcaaggaagcgcgcgttttcgccagcagcccgcccgccatcagcggcctgggcagctcagccgggtttgatatggagcttcaggatcacgctggtgccgggcatgacgcgttgatggctgctcgcgacaagctgctggagctggccgggaaagatccgcagcttacccgcgttcgtcataacggtctggatgacagccctcagctacaggtggatattgaccagcgtaaagcgcaggcgctgggcgtctccatcgacgacattaacgacaccctgcaaacggcatggggctcaagctacgtgaatgactttatggatcgcggccgcgtgaagaaggtctacgttcagtctgccgccaaataccgcatgctgccggacgatatcaaccgctggtatgtgcgcaataacaccggcggcatggtgccgttctcggcgtttgcgacgtcacgctgggagaccggttcaccgcgtctggagcgttacaacggctattcggcgctggagattgtcggtgaagccgcgccgggcgtcagtaccggtaccgcaatggatataatggaaaaactggttcagcagttaccgaccggctttggcctggagtggacggcgatgtcctaccaggaacggctttccggcgctcaggcgcctgccttgtatgccctttcgctgctggtggtgttcctctgtctggcggcgctgtatgaaagctggtcagtgccgttctcggtgatgctggtggtgcctctcggggtcatcggagcgctgctggcaacctggatgcgcggcctggaaaatgatgtctatttccaggtcggactcctcaccgtaatcggattgtcggcgaaaaacgccattctgatcgtcgaatttgccaatgagatgaatgccaaaggtcacgaactgatggccgccacgctgcacgcctgtcgtcagcgcctgcgtccgatcctgatgacttctctggcgtttgtgtttggcgtcctgccgatggccaccagctccggcgcaggctccagcagccagcacgcggtgggaacgggcgttatggggggaatgatttcggcgacgattctggctatctatttcgtaccgctgttctttgtgctggtacgccgtcgtttcccgctgaaggataagccggaataa

SEQ ID NO: 116110 - DNA, 1695 bp, Enterobacter cloacae
gtgaccgttaaacgccccgtatcgggaagcctggctcgggctttcttttcgatgattgtcttgtccgttctgatcagcgccattgcgctggtcacactcgccagcagccagcgcgacgccgaggcgattaacatcgccggctcgctgcgtatgcagagctaccgcctgggctacgaaatgcagcgcgccagcccgtcgctggcggagcaccgcgcggtctggcagaaaacgctgagcgcgcctgcgttgcagaagctaaaccgctggtatgtgcctgaggacgtcaaacagcgttaccagcagttgtaccttggctggcaggagatggacacgcgcatcgccagcggcgataccgggtggtatcagaaccacatagaggatttcgtgggccggatagatgcctttgtgctggcgcttcagcactacaccgaacataaaattcagctggtgatttgcatgtcgctgacgggcggcctgggcatcctgctgctggcggtggtgaccctgcggcgcatccgccgtcaggttgtgctgccgctgaataatctggtggcggcgagcgagcgtatcgaacaggggcaattcgacactcccgcgccggatactacgcttcccaacgagctgggccagctttcccgcgccttcaaccatatgtcggcggaattacacaccctgtaccgttcacttgagcgctccgttgctgaaaaaacccgccacctgaatgaagcgcatcagcagctcgaaatgctgttcaaatgctcacaggcgttgaataccgggcagatagacagccactgcttccggcatattttgcagattgtgcatgactatacgcagatgaattacctgcaattgcgcaccagtgacgactggcagctttacgaaggacaggagtccccgggcgagaaaatgcacaatttaccggtgttaatgcaggacaccctgtacggcgaactgcgctggcaaagcgcgaccggggatgttccgctgccgctcatggaaagcgtggcgacgatgctgggccgggggctctatttcaatcaggcgcagaaacattatcagcagttgctgctgatggaggagcgcgccaccatcgcgcgcgagctgcatgattcgctggcgcaggtgctctcctatttgcgtattcagcttacgctgctgaagcatgccgtgccgggcgacaatgctccggcgcagaccatcattacggacttctcccgcgagctgaataatgcctggcatcagctacgcgagctgcttaccaccttccgcctgacgctcaatcacgccaatcttcctgccgcgctacaggagtctctcgacgggttgcaaagccagacccgcgcgaagctggtgctcgactgccgtctctcatcgctggcgctggacgcacaaaaacaggtgcacctcttacagattgtgcgtgaggcagtgctgaatgcgattaaacatgccgacgccagcgagattgtggtcagctgcgtcaccaccgcggacggcactcacacggtcacgatccgcgacaacggcattggtatcggcgacgccagtgaaccgccggggcattacgggctgaatatcatgcgcgaacgcgcgggacggctcggcgggacattacacttttctcagccgccacagggtgggacacaggtcagcgtaacgttccggacgcctgcggcgcaggctgaaaaatag

SEQ ID NO: 116111 - DNA, 1977 bp, Enterobacter cloacae
atgaatcgttttattatggccaatgctcagcagtgtatcggttgtcgcgcctgcgaagtcgcctgtgtgatggcgcacaacggggaacagcacgcgctgagcgagcgccattttcatccccgcattacggtccttacttctggcttgcgaaaaagtcccgtgacctgccaccactgtgaaaatgcgccctgcgcgcaaagctgcccgaacggagccatcacgcaacacaacgacagcgtacaggtcaatcaacaaaaatgcattggctgtaaagcctgcgtggtggcctgtccgtttggcacgatggacatgctgatcgccccgctggaaaacgacagcgttaaggcctcggcgcacaaatgcgacctctgcctggaaaggccgcaaggcccggcctgcgtggaaaactgcccggtggaggtgcttacgctcgccaccccagccgtactggataagctggttaagcagcgccgacagcgcagcgcaaggctggacgcgttgccgtggcacagcgaggcggttcagtcagcccctccgcaaaccaaacggcaacagatgcaaaacaccccggcgcgcggtgagccggataagctcagccccgaagcacgcgcataccattttaacgagatctacctgccgtttcgcccggaacaggcgcagcgtgaggcatcccggtgcctgaaatgtggcgagcatagcatttgcgagtggacctgcccgctgcataaccacattccccagtggattgagcggatcggggcgggggatatcgtcggtgcggctgagctttctcaccagactaactgtttaccggaaattaccggccgcgtctgcccacaggatcgattatgtgaaggcgcctgcaccctgcgggatgcgtcaggggcagtaaccatcggtaatatcgaacggtatatctcggatcgggcgctggcgatgggctggacgccggacgtcagccacgttaagccggtcggtaagcgcgtcgccatcatcggcgccggtccggcagggctggcctgcgccgacgtgctggtgcgcagcggcgtcggcgtgacggtctacgaccgccatccggaaatcggcggattgctgacctttggtattccggccttcaagctggataaatccctgttagcgcggcgcagagagatattcagcgcgatgggcatccgcttcgagctgaactgcgaggtgggaaaagacgtgtcgatggcccaactgcaaaacgactacgatgccctgttcatcggcgtagggacctatcgttccatgaaagcgggtatccctcacgaagacgcgccgggtgtgtacgacgcgctgccgtttttagtggcaaacacgcggaacgtgatgggccttgatcctgccgcagacgaaccgtttatcgacacacagggtttaaacgtggtggtgctcggcgggggcgatacggcgatggactgcgtgcgcaccgcgctgcggcatggcgcggcgaaagtcacctgcgcctatcggcgggacgaggccaacatgccgggctcaaagaaagaggttaaaaacgcgaaagaagagggcgcagcgtttgaatttaatgtccagccggttgagctcacgctggataccgacgggaaggttaacggtatccggatgctgcgcaccaggctgggcgagccggatgcgcaggggcggcggcgtcctgtcccggtggcgggcagtgagtttgtcatgccagcggatgcggtgatcatggcgtttggttttaatccgcacgccatgccgtggcttcaggcgcagggcgtcgacaccgacgactgggggcgcatcagggcctccgtggagagccgttatcgctaccagacctcgaatccgcagatttttgctggcggtgatgcggtacgcggtgcggatctggtggtcaccgcgatggcggaagggcgtcatgccgggcaggggatcatggactggcttggcgtgccgccgcgcaacatgcattaa

SEQ ID NO: 116112 - DNA, 594 bp, Enterobacter cloacae
atgtccctgaacattaccgttattaaagacaaaatcctttctgaaaattactttgtcctgcgtaacatcacttacgatctcacccgtaagaacggggacgtcattcgccataaacgcgaagtctacgaccggggcaatggtgcaaccatcgtgctgtataaccgtgaaaagcaaagcgtggtgctgatccgccagtttcgcatcgcgacatgggtcaatggcaacgcggacggacgtctgattgaaacctgtgcaggtctgcttgatgacgatgagccggaagtgtgtatccgcaaagaagccattgaggagacgggttttgaagtgggtgcggtgcagaaagtctttgagctgtttatgtcccctggcggggttaccgagctggttcacttcttcattgcggaatataccgatgctcagcgcacgcaccggggcggcggcgtggacgatgaagacattgaagtgctggaaatgcctttcgctcaggctgtcgacatggtgaaacgcggcgagatccgcgacggtaaagcggtgatcctgttgcagtatctgcaaaccagcgggctgatgaatgcggcggcggaagcgcgataa

SEQ ID NO: 116113 - DNA, 1044 bp, Enterobacter cloacae
atgcgctactgcgtttatcttctcttcttcatttgcgtgcttcccgcgcctttggtgtgggctgcgcctgcgcagcagtctttttcagactggcaggtgacctgcaataaccagaacttctgcgtagcgcgcaataccggcgagcatcgcggtctggtcatgacgctgagccgcagtgcgggggcaaaaacggacgcctgcctgcgcatcgatctcggcgggctttcggcgccaccggtgaaagagcctgacatcgccccgcgcctgctactcgacaatgtgccgcttaaactcacgtcgcaacactggcagttagccccctggcatcttaaaacagacgatacgtccaccatcaccacgtttctgaaaaccattcaggaagggcaggcgctgaccctgcgcggggggaagcagacaatttctctggccggtctgaaagcggcgctgctgtttatcgatgcccagcaaaaacgcgtcggaagtgaaacggcgtggattaaaaaaggggatagtccaccgctgagcgtgccgcctgcgccggcattaaaaaaggtggcggtggtgaaccccacgccaacgccgctgacgcataacgaactcaacgatctgctggattacggtacctggcgcatgaaccatagccagtgctctctcgatccgaaccggcgtgaagtgcgcgtgaccgcgctgaccgatgacaaagcgctgatgatcatcagctgtgaggcgggggcgtacaacaccgtcgacctggcgtggctggtgtcgcgtaaaaaaccattttcggccaggagcgtgagattgcgcctgccgtttaccccttccagccagagtagcgacatggagctgatgaatgccagcttcgacgaaaaaacgcgcgagctgaccacgctggcgctgggacgcgggattggcgactgtgggatccagacccgctggcgttttaacggccagcgcttccgcctggtacgctacgcggaagagccaagctgtgataactggaatgggccagatgcctggcccacgctgtggatcacaaggtag

SEQ ID NO: 116114 - DNA, 2352 bp, Enterobacter cloacae
atgaaatacgtcctcacgccgctggcctgcgcgctggcgctcagtttttcggctcacgccgccaccgcaactgacttcaaaaacgtcatcaaccgtaccggcgcaccgctcttcatgcaggatttcgactacgacgaccaccagcggtttaatcccttttttgatatgggtgcctggcatgggcatttgctgccggacgggccgcagacccagggcggatttcccggcgtagcgctgctcaccgaagagtacatcaactttatggcgacgaattttgatcgcctgtccgtgtaccagaacggcaaaaaagtggatttcacccttgaagcctacagcctccctggcgcgttggtgcagaaactgagcgccagggatgttcagatcgtgatgacgctgcgctttgcttctgcgcgtacttcgctgcttgaaacccgtattaccagcaaaacgccgctggagttggtgtgggatggcgagctgctggaaaaactggaggccaaagagggcaagccgcgttcggataaaaccatcgacagcgcatatcctgattatcagcgtaaaattgtagccacgcgcgacggcctgaaggtgaccttcggcaaggtacgctccacctgggatctgctcacctccggcagttccgaatatcagttacaccgctctcttcctgccgagaccaccgttgacggacatcgctttaccagccgggcacagatttccggcagcaccacgctgtacactacctactcccatctgctgaacgccgatgacgtcgcgcgtgaacagccgcagatccgcgacattctggcgcgtccggcctactttatggccgcctcgcaagcgcgctgggagaggtatttacaacaagggttaaccaacccgcacgcgactccagaacaaacgcgcgtggcggtgaaagccatcgagacgttgaacggtaactggcgttcgccaggcggcgcggtgcgttttaacacggtgacgccctccgtaaccggacgctggttctccggcaaccagacctggccgtgggacacctggaaacaggcatttgccatggcgcatttcaacccggagatcgccaaagagaacatccgcgcggtcttctcctggcagatcaaacccgacgatccggtgcgcccgcaggataccggatttgtgccggatttaatcgcctggaacctgagcccggaacgaggcggcgacggcggtaactggaacgagcgtaacaccaagccgagcctggcggcatggtcggtgatggaggtgtataacaccacgcaggataaagcctggcttgccgagatgtatccaaaactggttgcctatcacgactggtggctgcgtaaccgcgatcataacggcaacggcgtgccggagtacggtgcgacgcgtgataaggcccataacaccgctaccggcgagatgctgttcacggtgaaaaaaggtgataaagaagagtcgctttccggcctgaataactacgcacggataatcgataacggccagtacgacagcctggagatccccgcgcaggtggccgcctcgtgggagtccgggcgcgatgatgccgccgtattcggatttatcgataaagcgcagctggataagtacgttgaaaacggcgggaaacgcagcgactggacggttaaatttgccgaaaacaggagtaaaaaaggcgatctgttagggtattccttattacaggagtccgttgaccaggcaagctatatgtacagcgacaatcactatctggcgcagatggcgagcctgctgggtaaagagcaggaggccagccactatcgccagctggcagataagctcgcaacctatatcaacacctgcatgttcgatgcgaaaagcgggttttactatgacattcgtatcgaggataagccgctggcgaacggctgtgcgggcaaacctatcgtcgagcgtggtaaagggccggaaggctggtctccgctgtttaacggtgccgcgacgcaggaacatgcggatgccgtggtcaaggtgatgctggatccgaaggagttcaatacctgggtaccgctcggcaccgccgcgctgacaaacccggcgttcggcgcagacatatactggcgcggccgggtctgggtcgatcagttctggtttggactaaaaggcatggaacgttacggctatcgtgagcaggcgcaaaccctcgccgaaaccttctttaagcatgcgaaagggttaacctcggacggcccgattcaggagaactataaccccctgaccggagcacagcagggcgcacctaacttctcctggagcgcggcgcatttgtatatgctgtataacgactttttccgtaagagcgatcggtga

SEQ ID NO: 116115 - DNA, 423 bp, Enterobacter cloacae
atggcgaatggctatattcagtacgacatcctgaaagatgtcacctggatgaacggtcttgaaattaccgacggcacaggccagctctttttaacaggcgttttgacacccaacctggcggcacgcgcgtggcatcataccggacgggcagatggacagaacgtctccggcacggagagcggatttatggtcagcgccatggtggaagccctgaaaggcgcttatctctccactgcttacagctacgcgaaacatcgtccggacgatgcggctgaagaaactacctcgtttatgcagttcgggatctggtacgagtacggcggcgggcgttttgccaccgctgccgacagccgcttctatatgaaaaatgcctccggcgacccgagcgatcaggtcttcctgatgcaatacttctactggtaa

SEQ ID NO: 116116 - DNA, 669 bp, Enterobacter cloacae
atgaaaattaaacaaaaaacattgtgggcactcgctgccctctctttctgctgccctgctattgccgcagaagatgcccggcccgctgaacatgacgataccaaaacaccggcaataacctccccgtcatttcgtttttatggcgagatgggcgtcggtgggtatatggatttagaaggtcaggataaacataaatacagcgacggtacttatattgagggcggtctggagatgaaacaggggaactggttcggcctgatttacggcgaaggctggaccgtacaggcggatcatcagggcaacgcctgggtgcccgatcacagctggggcgggtttgaaggtgggattaaccgcttctacggcggttacaaaaccgataacgacaccgagatcatgctcagcctgcgccaggactcgtctctcgatgacctgcaatggtggggcgattttacgccggatctgggctatgtgatccccaacacccgcgacatcttgtacgcactaaaggtgcaaaacctctccggcaacctgcgctatagcgtcaccgccacgccagcgggtcaccatgacgaaagcaaggcctggctgcacttcggcaaatacgatcgttatgacgacaaattacctatccggcaatggcgaatggctatattcagtacgacatcctga

SEQ ID NO: 116117 - DNA, 1437 bp, Enterobacter cloacae
atgtctgaaaccaccaaacgcaataccatcggcaaattcggcctgctgtcgctgacctttgccgccgtgtttagttttaacaacgtgatcaataataatatcgaactcggacttgcctccgcgccgatgttctttttagcaaccctgttctattttatcccgttctgcttaattatcgctgagtttgtctcgttgaataaaaactcagaagctggagtttatgcctgggtaaaaagttcactcggcgggcgctgggcatttattaccgcttatacatactggttcgtgaatttattcttcttcacctcgttattaccgcgcgtcattgcctatgcctcttatgcctttcttggctatgagtacattctcacaccatttgccacaacggtgctaagtatggtgctgttcgccttctcaacgtgggtctccaccaacggggcgaagatgctggggccaattacgtctgtaacctccacgctgatgctgctgctgacgctctcttacattctgctggcgggcgcggcgctaatgggtggggtgcagcccgctgatccgattaccgtcgacgcgatgatcccgcattttaactgggcattcctcggcattaccacctggatatttatggctgccgggggcgcggaatccgtcgcggtgtacgtaaacgatgtgaaaggcggttcgaaatctttcgttaaagtgatcatcctggcggggatctttatcggcgtgctgtactccatctcctcggtactgatcaacgtctttatcagcagcaaagcgttgaagtttaccgggggttcggtgcaggtgttccacggtctggcggtgtggtttggcctgccggaagtgttgatgaaccgtttcgtcggtctggtttcctttaccgccatgttcggttccctgctgatgtggacggcgacgccggtcaaaatctttttctcggagatcccgaccggcatttttggtccgaaaaccgtggcgctgaacgaaaacggcgtaccggcgcgcgcggcctggatccagtatttgattgtgatcccactgatgattatcccgaccatgggctccagtaccgcgcaggagctgatgaacaccgtcatcaatatgaccgccgcagcctcaatgttaccgccgctgtttattatgctggcctacctcaacctacgtcgtaagctcgatcacctgccgcgcgatttcaggatgggttcacgaaccacgggtataaccatagtgtcgatgctgattgttattttcgccattggttttgtggcatccactttccctaccggtgccaatattctgacgattattttctataacgtcggtggcattgttttattcctcggatttgcctggtggaaatacagcaaatacgtaaacggattatcaaaagaacaacaacaaattgaagcatcacctgcctcgaatattaactga

SEQ ID NO: 116118 - DNA, 450 bp, Enterobacter cloacae
atgatcgttcttgagagcctggaacagtttcaacagcattaccgcacgggtcgcaaatggcagcgctgctcagaagccattaacaatatcgataatatctcgcccggcgtagcccattcgattggcgattcgctggcctaccgtgtgaccaatgatgccagcaccgacgcgctgtttgtcgggcatcgccgctatttcgaggtgcattactaccttcagggcgcgcagaaaattgaatatgccgccaaagatgcgcttcagacagtggagtgctaccgcgatgagaccgatcgagaatacctgaaaggcgtgggtaccaccgaacaggtgcgcgaggggcagatcgtaatttgtgagaaccatgaggcgtatcgctttatcagcgaggagccggtcaaaaaagtcattctcaatgtgaccatcgaagacggttatttccataacaaataa

SEQ ID NO: 116119 - DNA, 3084 bp, Enterobacter cloacae
atgaatcgctgggaaaatattcaactcacgcatgaaaaccggctcccgccgcgtgcgtacttcttctcttatgacaccgtttcccgggcgcgcacgtttgcgcgtgaagccagcagccactttctgtcgctaagcggaaagtggaactttcgcttcttcacgaacccgctgcttgtcccggaaaactttacctcagaatacatggccgactggggcgatattaccgtgccgggcatgtggcagatggaaggtcacggtcagttgcagtacaccgacgaaggctttcctttcccggtggacgtaccatgggtgccgtcagacaacccgaccggggcataccagcgctggtttacgctttctgaaagctggcaagagaaacagacccttatcaagtttgacggcgtcgaaacctatttcgaagtctacgtgaatggccgctatataggctttagcaaaggcagccgactgtctgccgagtttgatatcagcgatgcggtacacagcgggcaaaacctgttgtgcgtgcgggttatgcagtgggcagattccacctacattgaggatcaggacatgtggtggacggcggggatattccgcgacgtctacctgctgggaaaatcactcacgcatgtccgcgatttcacggttaaaaccaccttcgacgaggcataccgggatgccaccctcttctgtcagcttgagctggaaaaccttgctgcacgccctggctgtgttcaactggattataccctgtacgacggcgagacagtgctgcacaagggaacaaccgacaacctgaccgtcagcgagcgtgcggaaaccgccttcagcattgaggtgaggcaaccccgccagtggtccgctgaatcgccggatctttatcatctggtcatgactttaaaagataaccatggccagacgctggaaatcatcccgcagcgcatcgggtttcgggatatcaaggtgaaagacggcctgttctacgttaacaaccgttatctgaagctgcacggcgtcaatcgtcatgacaacgatcatctgaggggccgcgcggtggggatggatcgcgtggagcgcgacctgatcctgatgaagcagcacaatatcaactcggtacgtaccgcccactacccgaacgacccgcgcttttacgagctttgcgacctgtacggcctgtttgtaatggctgaaacggatgtggagtctcacggcttcgccaacgtcggcgacctgagccgcattacggacgatccggtgtgggagccggtctacgttgagcgcatcgaacgccatattcacgcgcagaaaaatcatccgtcgatcatcatctggtcgctcggaaatgagtccggctacggctgtaacatccgcgcgatggcccgtgcggcaaaagcgctggatgatactcgcctgcttcactacgaagaagatcgcgacgccgaggtggtggacattatctccaccatgtatacccgcgtaccgctgatgaatctgtttggcgaatacccgcacgccaaaccgcgcattatctgcgaatacgcccatgcgatgggcaacggtcccggcgggttgaccgagtatcagaacgtgttcgatcgccacgactgcattcaggggcattatgtctgggagtggtgcgaccacggtattcagaaaacagacgccagcggcaacatctggtacgcctatggcggcgacttcggtgattaccccaataattacaacttctgcctcgacgggctgatctactccgatcaaacgcccgggccaggtttgcgtgagtacaagcaggtgatcgccccggtcaaactgcgctggcaaaacggtgagctgcacgttgataaccgcttatggttcaccagcctggatgattacaccctgctcacggaggtgcgtgcggaaggtgaaacgctgcacagcgagccactgaacatcaccgggttggcccccaacagctcccgcagcgtcagcctgcacgtgccggaactggacgagcgcgaagcatttctgactgtacgtattatcaaaaacagtcccacgcgctacagcgaggtcgggcacgagatcgcggtgtatcagttcccgttaaaaggccgcacggcacgcccgacaccgtttatcaacaccagtgccactccgctgcgtctggaggaagatcgcctgagctgcaccgtgaccgggcataacttccgcgcgagcttctctaaagtatcgggaaaactcagcgcctggcaggtgaacggtgaggaataccttacccgtgagccgaagattaacttcttcaagcccatgattgataaccataagcaggagtatgaagggctgtggcagccgtatcatttccagatcatgcaggagcacctgcgcggtttcgaggttgagcagcatgacgatgcgatcatcgtcaccacccgtaccctgattgccccgccagtgtttgattttggcatgcgctgtacctatcgctggcgcatcgccgccgacgggcaaatcaacgttgagctatgcggtgagcgctacggcgagtacccgcacatcattccgtgcatcggctttacgcttggcatcaacggcggtttcgatcaggtgagctactacgggcgagggccgggtgaaaactatccggacagccagcaggccagcaccatcgacctgtggcacaccacggttgataagatgtttgaaaattatccgttcccgcaaaacaatggcaaccgtcagcaggtgcgctgggcctccctcgcggatcgtcatggcagcggcgtgctggtcgtaccgcaacagcctctccacttcagcgcctggcactacacggctgagaatattcacgccgcacagcactgcaacgaactgcgccgctgcgatgacatcacgcttaatcttgaccaccaggtgctgggcttaggctccaattcctggggaagtgaggtactggagagctggcgcgtctggttcagtccgttccgctacggcttcacattgctcccgctcaatggcggccgcatcgcctcgatggcgctggcacgccagcaattcggcaccggtttcttctccatggatttgcacagcgaggcagacaaatga

SEQ ID NO: 116120 - DNA, 984 bp, Enterobacter cloacae
atggcaacgctgaaagacatcgcgacggaagctggcgtctcgctggcaacggtatcccgggttttaaacgatgacccgacgctgaatgtgaaagaagagacgaaacaccgcattctcgagattgccgagaagctggaatacaaaagcacgacctcccgtaaaatgcagtctgtcgctgccggtcagcaacatattctggcgctctacagctaccagcaggaactggagatcaacgacccttactatcttgccattcgccacggcattgagacgcagtgcgaaaaactgggggtcgaactgagtaactgctacgctaatgccaccctgccggagctgaaaaagctcaccggggtgttgattgtaggcaaaccctcccctgcgcttcgacgtgcggcaatgtcgttgaccgacaacgtctgttttatcgactttcacgagccaggcagcgagtacgattctgtcgatattgacctttcgcgcatcagcaagcagatcgtggatttctttattgctcagggagttaagcggattggctttatcggcggcgaagatgagccaggcaaggctgatattcgggaagccgccttcgtggagtacgggctcctgaaaggggtggtatcggaacaggacatctggcgcggcggtttttccagttcgtccggttatgaactggcaaaaatcatgctggcacaacagtgctggccttccgccttgttcgtggcctccgattccatcgccatcggggtgttacgcgccatccacgaaaaagggctggcgatcccggaagatatttcactgatcagcgtgaacgacattccaaccgcccgctttaccttcccgcctctttccaccgtgcgcattcactctgaaatgatgggcagccagggcgttaatctgctgctggaaaaggcccgcgatggccgcgcactaccgcttcaggtctttgtcccgagcgtactgaagctgcgcggcaccacccgctga

SEQ ID NO: 116121 - DNA, 333 bp, Enterobacter cloacae
gtggaaacggtagcatacgatgattttgcaaagctcgagatccgcgtggggaagattgttgacgttaaacgtcacgccaatgcggacaagctctatattgcgcagatagaggtgggagacagaacgttgcaaaccgtcaccagcctggtgccgtattaccgggaagaggagctgatgggcaaaacggtggtggtgttgtgtaacctggcaaaggctaaaatgcgcggtgaaacatctgaatgcatgttgctctgcgcggaaaccgatgacgcccgagaaagtgtgttattaacgccggagtgggtgatggcggcaggggtaagagtggtgtga

SEQ ID NO: 116122 - DNA, 1989 bp, Enterobacter cloacae
atgtcccgtaaagagctcgccaacgccattcgcgccctcagcatggatgccgtacaaaaagccaattccggccaccctggcgcccccatgggtatggctgatatcgccgaagtgctgtggaacgacttcctgaagcacaaccctaccgatccgacctggtacgaccgcgaccgttttattctttccaacgggcacgcctcgatgctgctctacagcctgctgcacctttccggctacgatctgccgcttgaggaattaaaaaacttccgccagctgcactccaaaacgccgggccacccggagatcggctatacgccgggcgttgaaaccactaccggcccgctgggccaggggctggcgaatgcggttggcctggcgattgccgaacgtacgctggccgcgcagttcaaccagcccgaccacgagattgtcgatcactatacctatgtctttatgggcgacggctgtctgatggaggggatctctcacgaggtctgttctctggcgggcaccctggggctgggcaagctgattggcttctacgatcacaacggtatctccattgacggggaaaccgagggctggtttaccgacgatacggcgaaacgctttgaagcctatcactggcacgtggtgcacgagatcgacggtcacgatccagaggcggtgaaaaaagcgattcaggaagcgcagagcgtgaaggacaaaccgtccctgatcatctgccgcaccaccatcggcttcggctcgccgaacaaagcgggcaaagaggaggcgcacggcgcggcgctgggtgaagaggaagtggcgctgacccgccagaaactgggctggaaacacccggcctttgagatcccaaaagagatctacaaggcctgggatgctcgcgaaacaggtgaaaaagcgcagcaggcctggaacgagaagtttgccgcctacaaaaaagcgtatccggagctggcggctgagtttacccgccgcatgagcggcggcctgccggaagactgggaagagaaaacccaggcgctgattgaaaacctgcaatccaacccggcgaaaattgccacccgtaaggcatcacaaaacacccttaacgcgattggcccaatcctgcccgaactgctgggcggctcggcggatctggcgccaagtaaccttaccatctggtccggctctaaatccctgaaggaggacattgccgggaactacatccactacggcgtgcgcgagtttgggatgaccgccattgccaacggcatcgcccaccatggcggcttcgtgccgtacaccgccaccttcctgatgtttgtcgaatatgcccgtaacgcggcgcgtatggcggccctgatgaaggcgcggcaaatcatggtgtacacccacgactctatcgggctgggtgaagatgggccgacgcaccaggcggtagagcagctggcgagcctgcgcttaacgccaaacttcagcacctggcgtccttgcgatcaggtggaagcggcagtgggctggaagctggccgtagagcgtcataacggacccacggcgctgatcctgtcgcgccagaacctggcgcagatcgagcgcacgccggagcaggtgaaaaatatcgcccgcggcgggtacatcctgaaagacagcggcggcaagccagacgtgatcctgatcgccaccggttccgaggtggaaatcacggtaaaagcggcggagaaactgaccgccgagggtcacgcggtgcgcgtggtttcactcccttcaacggatatctttgatgctcaggatgaggcgtaccgcgaatcggtgctgccttcaaacgtcgcggcgcgcgtggcggttgaagctggcattgccgactactggtacaaatacgtgggcctgaaaggggcaattgtcgggatgcatggttacggtgaatccgccccggccgacaagctgttcccatatttcggctttaccgttgagaacgtggtggagaaggcgctaagcgtgctgtag

SEQ ID NO: 116123 - DNA, 951 bp, Enterobacter cloacae
atgaaccagctagacggcatcaaacaatttaccaccgtggttgcagacagcggcgacatcgaatcgattcgtcactaccagccggaagacgcgaccaccaacccctcgctgctgctcaaggcggccggtcttgcgcactttagtcatctgattgatgacgcccttgcctacggcaaacagcgcgggaaaacgcaggagcagcaggtcgccgaggccagtgacaagctggcggtcaatatcggtgcggaaattcttaaaagcataccgggacgcgtctccaccgaagtggatgcccgcctctcattcgaccaggaaaagagcattagcaaggctcgccgcctggtggaactctatcaggagcaggggatcgataaatcacgcatcctgatcaagcttgcctccacctgggaaggcatccgcgcggcggaagtgctggagaaagaggggatcaactgtaacctgacgctgctgttctccttcgcccaggcgcgtgcctgcgccgaagcgggcgtgttcctgatttcaccgtttgtcggacgtatctacgactggtatcaggcgaaacagccgatggatccgtatgtggtggacgaagatcccggcgtgaaatcggtgcgtaatatctacgattattacaagcagcaccgctacgagaccatcgtgatgggggccagcttccgccgcaccgagcagatcctcgcgctcgcgggctgcgaccggctgaccatctcccctgacctgctgaaaaagcttcaggagagtgaagagacggtgatccgcaagctggtgccaacctccaccgttctgccaaaaccaaaacccatgaccgaagcggaattccgctgggagcacaatcaggatccaatggccgtggaaaaactggcggacggcatccgtcagttcgccgtcgaccagcgcaaactcgaagatcttctcgccgccaaactttaa

SEQ ID NO: 116124 - DNA, 2280 bp, Enterobacter cloacae
atggatgatcagttaaaacaaagcgctctcgattttcacgagtttcctgttccgggtaaaatccaggtatccccgaccaaaccgctcgcgacccagcgcgatctggcgctggcctactcgccaggcgtagctgccccgtgccttgaaatcgaaaaagatccgctggcagcgtacaaatacaccgcccgtggcaacctggtggccgttatctctaacggtacggcggtactggggttagggaacattggcgcgctggccggtaagccggtgatggaagggaagggcgttctgtttaagaaatttgccggtatcgacgtctttgatatcgaagtggacgaactggacccggataaattcatcaacgtggtggcggcgctggagccgaccttcggcggcatcaacctggaagacatcaaagcgccggaatgtttctatatcgagcagaagctgcgcgagcgtatgaacattcccgtgttccatgacgaccagcacggcacggcgattatcagtaccgccgccattctgaacggtctgcgtgtggtggagaaaaacctctccgacgtgcgcatggtggtctccggcgctggcgccgcggccatcgcctgtatgaacctgctggtggcgctgggcatgcagaaacacaacatcgtggtctgcgactccaaaggcgtgatttacaaagaccgcgagccaaacatggcggaaaccaaggcggcctatgcggtggaagacgacggcaagcgcacgctagaagacgtcattgaaggtgccgacattttcctcggctgttcaggcccgaaagtactgacccaggagatggtgcagaagatggcgcgtgcgccaatgatcctggccctggcgaacccggagccggaaattctgccgccgctggcgaaggcagtgcgtgaagacgcgatcatctgtaccggacgttcggactacccgaaccaggtgaacaacgtgctctgcttcccgttcatcttccgcggtgcgctggacgtcggcgctacggcaatcaacgaagagatgaagctcgccgccgttcatgctatcgcagagctggcgcacgccgagcagagcgaagtggtggcctccgcctacggcgatcaggatctgagcttcggcccggactacattatccctaaaccatttgacccgcgtctgatcgtgaagatcgcgccagcggtggccaaagcggcgatggactctggcgtggcgacgcggccgattgaagatttcgatgcctacgtcgataaactcaccgagttcgtctacaaaaccaacctgtttatgaagccgatcttctcccaggcgcgcgctgacgcgaagcgcgtggtgctggcggaaggggaagaggcgcgcgtgctgcatgccactcaggagctgatcaccttagggctggcgaaaccgatcctgattggtcgtccgagcgtgatcgagatgcgtattcagaagctgggcctgcaaattaagccgggcgtcgactttgagatcgtcaataacgaatccgatccgcgcttcaaagagtactggaacgaatactattcgatcatgaagcgtcgggggatcacccaggagcaggcgcagcgggcggtgatcagcaacaccacggtgatcggcgcgatcatggttcaccgcggtgaggcggatgcgctgatctgcggcaccatcggcgagtaccatgagcatttcagcgtggtgcaggagatcttcggctatcgcgagggtgtccatactgccggcgcaatgaacgcgctgctgctgccaagcggtaacacctttatcgccgatacctacgtcaacgacgatccttccccggacgaactggcggaaataaccgtgatggcggcggaaaccgtgcgccgctttggtatcgagccgaaagtggcgctgctgtcgcattctaacttcgggtcatccaaatccgcggcggcgtgcaaaatgcgccagacgctggacctggtgcgcgagcgtgcgccggaactgatgatcgacggcgagatgcacggcgacgccgcgctggtggagagcattcgtaatgaacgtatgccggacagcccgctgaaaggctccgcgaacgtgctgattatgccgaacgtagaagcggcgcgtatcagctataacctgctgcgcgtgtcgagttctgaaggggtgaccgtagggccagtgctgatgggggtgtcaaaaccggtacatgtattaacgccgattgcctccgtgcgtcgtatcgtcaacatggtggcgctagcggtggttgaggcacagacgcagccgctgtaa

SEQ ID NO: 116125 - DNA, 900 bp, Enterobacter cloacae
atgaaaccgaatgcacagctggtcaaaactttcctgatgcagttacaggacgcgatttgccagaaactggccgccgcagacggcggtgaattccaggaagatgcctggcagcgcgaagcgggcggcggcgggcgcagccgcgtgctgcgtaacggtggcatttttgaacaggccggggtcaacttctcccacgtccacggtgatgcaatgccggcgtccgccacggcgcatcggcctgaactggcgggccgcagcttcgaggcgatgggcgtctcgctggtggtgcatccgcataacccgtttgtgccaaccagccacgccaacgtgcgctttttcatcgcggaaaaaccgggggccgatccggtctggtggtttggcggcggtttcgacttaacgccttactatggcttcgaagaggacgccgtgcactggcacaccaccgcgcgcgacctctgcctgccgtttggcgaagacgtttacccgaaatacaaaaagtggtgcgatgattatttctatctgaagcatcgcgacgagcaacgcggcatcggcgggctgttctttgacgatctcaacacgccggattttgataccgcgttcagctttatgcgcgcagtgggtgaaggctttaccgatgcctatctgccgattgtcgaacgccgcaaaaacaccgactacggcgttcgcgagcgtgagttccagctgtaccgccgcgggcgttacgtggagtttaacctggtatgggatcgcgggacgctgtttggcctgcaaaccggtgggcgcacggagtccattctgatgtcgatgccgccgctggtgcgctgggaatacagctttgaacccaaagaaggcagcccggaggctgccttgcgtgattttattcgggttcgggactgggtgtaa

SEQ ID NO: 116126 - DNA, 876 bp, Enterobacter cloacae
atgagcacattcaaaccattaaaagcactcacatcgcgtcgtcaggttctcaaagcggggctggcggccttaacgttaacaggcatcgcaaagcaggctcaggcaaaagaagagagctcgcttaaaaccagtaacggacacagcaagccgaaaaccaaaaaagccggggcaaagcgtctggtcatgctcgatccgggccacggcgggatcgacaccggcgccattggccgaaacgggtcgaaagaaaaacacgtcgtgctggcaattgcaaaaaatgtgcgcgcaattttacgcagcaacggcattgacgcccgcctgacgcgcacgggcgacacgtttatcccgctgtacgatcgcgtggaaattgcccataagcacggcgccgacctgtttatgtccattcacgcggatggcttcacaaacccttccgccgcaggcgcatcggtgttcgccctctccaaccgtggcgccagtagcgccatggcgaaatacctctccgatcgcgaaaaccgggcggatgaagtggccgggaaaaaagccaccgacaaagaccatctgttgcagcaggttctgtttgatctcgtgcagaccgataccatcaaaaacagcctgacgctcggctcgcatatccttaaacggattaagcccgtgcaccgtctgcacagtaaaagcaccgagcaggccgcgtttgtggtgctgaagtccccgtccattccgtccgtgctggtggaaacctcgttcattaccaacccggaagaggagcgtttactcggcaccacggcgtttcgtcagaagatcgcgaacgctatcgcctccggggtcatcagttatttcaactggttcgataatcaaaaagcgcactccaggaaacgttga

SEQ ID NO: 116127 - DNA, 426 bp, Enterobacter cloacae
atggagatacgcgtttttcgccaggaagatttcgaagaggtgatcaccctttgggagcgctgcgatctgctgcgtccgtggaacgatccggaaatggacatcgaacggaaggtgaatcacgacgtcagtctgtttctggtcgctgaggtcaacggcgaggtggtcgggacggtaatgggcgggtacgacggccaccgcgggtcggcctactatctgggcgtgcacccggaatatcgcgcgcgcggcatcgccaacgcgctgcttaaccgtctggaaaagaaactgatcgcccgtggctgcccgaaaatccagattatggtgcgggaagataacgacgtggtgctgggcatgtatgaacgtctgggctacgagcacgcggatgtactgacgctgggtaagcgcctgatcgaagatgaagagtactga

SEQ ID NO: 116128 - DNA, 450 bp, Enterobacter cloacae
atgaagagtactgagttccaccctggcgactatgatgttcacggtcgtctgcgtctgccttttttattctggtgcgttctgctgttgcaggcccgcacctgggtgctgttcgtgatggctggcgcgtcacgcgggcagggcgatacgctactgaatctcttttatcccgatcacgatgcgttctggctggggttactgcccggtgtaccggcggtgctggcgttcctgtgcagcggtcggcggcagttcctcccgcgcttctggcgcgcgcttcgctggctgttgattctggcgcaggttgtgctcctgatctggcagcccgtgctctggctgtacggcgagccgctttccggtatcgggattgcgctggtggtggcggatattgtcgcgctgctgtggctggtcacgaacccccgtttacgcgcctgttttacgcaagagtcagattaa

SEQ ID NO: 116129 - DNA, 576 bp, Enterobacter cloacae
atgaaatcgctgcgtttacttttatgcgctctcccgctggcgttaaccggctgttccacgctctcatccatcaactggtctgcggcctatccgtggaactggtttggctcctcaacggaagtgaccgagcagggcgtgggcaaaatcaccgcctcgacggcgctggatcaggatgccattcaggaggccatcggcagtgattatcgcctgcgcagcggcatgaaaaccgagaacggcaacatcgtgcgctatttcgaagcgttgaaagacgacaaggtggcgatggtcatcaacggcgataaaggtacggtcaaccgcattgcggtgatggatgaagagatcccgacctcaggtggcgtgaaggtaggtacgccgtttggcgagctctaccagaaagcgtttggccactgcgccagcgtgccgtcggatgatagcgtggcggtcgagtgtaaggccgacggcagccagcacattagctatgtattcagcggcacctggaacggtccggaagggttaatgccctctgacgacaccctgaaaaagtggaaagtgagcaaaattatctggaagcagtaa

SEQ ID NO: 116130 - DNA, 900 bp, Enterobacter cloacae
atgtctcaggttcagagtggcattttgccagaacattgccgcgcggcgatttggattgaagccaacgtcaaaggggacgtggatgccctgcgcgcggccagcaaaattttcgttgataaactggccacctttcaggccaaattccccgaagcccatctgggcgcggtggttgcctttggcaacaccgtctggcgtcagctgagcggcggcgaaggcgcagaagagctgaaagactttattccttatggcaaaggtcttgcgcccgccacccagtatgacgtcctgatccatatcctctccctgcgccatgacgtgaatttctccgtcgctcaggcagcgattgaggcctttggtgacagcatcgacgtgcaggaagagatccacggtttccgctgggtggaagagcgcgatttgagcggcttcgtcgacggcaccgaaaacccggccggggaagagacgcgtcgcgaggtggctgtaatcaaggatggcgtggacgcaggcggcagctacgtgttcgtccagcgctgggagcataacctcaggcagcttaaccgcatgagcgtgcatgaccaggagatgatgattggccgcaccaaagacgccaatgaagagattgacggcgatgcgcgtccggtcacgtcccacctgacccgcgttgaccttaaagaagacggtaaggggctgaagattattcgccagagcttgccgtacggcaccgcgagcggtacgcacggcctgtacttctgcgcttactgtgcgcgcctctacaacatcgaacagcagctgctgagcatgtttggcgataccgacggcaagcgtgacgccatgctgcgcttcacccgtccggtgaccggcggctactactttgcgccgtccgttgagcgcctgctggcgctgtaa

SEQ ID NO: 116131 - DNA, 1014 bp, Enterobacter cloacae
atggccgttactgtactgaaaaaaggatcgctggcactggcaggtttactgctggtggcgcaggcgcaggcaaccgagttgctgaacagttcttatgatgtttcacgcgagctgtttgccgcccttaatcccgcatttgaacagcagtgggcgaaagagaacaacggcgacaagctgaccatcaaacagtcgcacgctggttcatccaagcaggcgctggccattttgcaggggctgaaagcggatgtggtgacctacaaccaggtcacggacgtgcagatcctgcacgacaaaggcaagctgatcccggcggactggcaaagccgcctgccgaacaacagttcgccgttctattccaccatgggcttcctggtgcgcaagggcaacccgaaaaacattcacgactggaacgacctggtgcgttctgacgtcaagctgattttcccgaatccgaaaacctccggcaacgcgcgttatacctatctggcggcgtggggcgcggcggacaaagctgacggtaacgataaagcgaaaaccgaacagtttatgacccagttcctgaaaaacgtcgaagtgtttgacaccggcggccggggcgcaaccaccactttcgccgagcgcgggctgggcgacgtgctgatcagctttgaatccgaagtgaacaatattcgtaaacagtacgaagcgcagggcttcgaagtggttatcccgaaaaccaacattctggccgaattcccggtggcgtgggtggataaaaacgtcaaagccaacggcacagagaaagcggcaaaagcctatctcaactatctgtacagcccgcaggcgcagacggtgattactgactattactaccgcgttaataatccggacgtgatgaacaagctgaaagacaaattcccgcagaccgagctgttccgcgtggaagatcatttcggcgcctggcctgaggtgatgaaaacgcattttgccagcggcggtgagttagacaaattgctggcggcggggcgtaagtaa

SEQ ID NO: 116132 - DNA, 834 bp, Enterobacter cloacae
atgtttgcaggatcaacaagacgtgtgctgccgggttttaccttaagcctcgggaccagcctgctgttcgtctgtctgattttattgttaccgctcagcgctctggtgatgcagctcgctgagatgagctggtcccagtactgggaagtggtcaccaatccgcaggtggtggcggcctacaaggtcacgctgctgtctgcattcgtggcctcgatttttaacggcgtgtttggcctgctgatggcatggatcttaacccgctatcgcttccctggccgcacgctgctcgacgccctgatggatctgccgtttgccctgccgacggcggtggccggtctgacgctggcgtcgctgttctccgtgaacggcttttacggcgaatggctggcgaagtttgatattaaagtgacctatacctggatcggtatcgcggtggcgatggccttcaccagcatcccgtttgtggtacgtaccgtgcagccggtgctggaagagttaggccccgaatacgaagaggctgcggagaccctgggcgccacgcgctggcagagtttccgtaaggttgtgctgccggaactttctccggccttgctggcgggggtggcgctctcctttacccgcagtctcggtgaatttggcgcggtcatttttatcgccgggaacatcgcgtggaaaaccgaagtgacctcgctgatgatttttgtccgtttgcaggagtttgattatccggccgcgagcgcgattgcctcggtgatccttgccgcgtcgctgctgctactgttttcgattaacactctgcaaagtcgctttggtcgacgtgtggtaggtcactga

SEQ ID NO: 116133 - DNA, 876 bp, Enterobacter cloacae
atggcggaagttacgcaattgaagcgctatgacgcgccccgcatcaactggggcaaatggtttctgattggtaccggcgtgctggtctccgcattcattctcgtcgtgccgatggtgtacatcttcgtgcaggccttcagtaaagggattatgcccgcgctgcaaaacctggccgatccggacatgctccacgccatctggctgacggtgatgattgccctgatcaccgtcccggtgaatctggtgtttggcgtattgctggcctggctggtaacgcgctttaacttcccggggcgtcagctgctgctgaccctgctggatatcccgtttgcggtgtctccggtggtggcgggcctggtttatctgctcttctacggctccaatggcccgctgggcggctggctggatgagcacgacctgcaaatcatgttcgcctggccggggatggtgctggtgaccgtctttgtcacctgtccgttcgtggtgcgcgagctggtgccggtgatgctcagccagggcagccatgaagatgaagccgcggtgctgctcggcgcttccggctggcagatgttccgccgcgtcacgctgccgaatatccgctgggcactgctttacggcgtggtgctgaccaacgcccgtgcgatcggtgagtttggcgcggtgtcggtggtatccggctcgattcgcggcgaaaccctgtcgctgccgttacagattgaattactggaacaggactacaacaccgtcggttcctttactgccgcagcgttgctgacgctgatggcgattttgaccctgtttttgaagagtgtggtgcagtggcgtttagagaatcaggaaaaacgtcagcatcaggagggaaatcatgagcattga

SEQ ID NO: 116134 - DNA, 1095 bp, Enterobacter cloacae
atgagcattgagattgccaatattaagaagtcttttggtcgcacccaggtgctgaatgatatctcgctggatatcccttccggacaaatggtggcgctgctggggccgtctggctccggtaaaaccacgctgctgcgtattatcgccgggcttgaacaccagaccagcggacatattcgcttccacggtacggacgttagccgcctgcacgcccgcgaccgtaaagtgggctttgtatttcagcattatgcgctgttccgccacatgacggtattcgacaacatcgcgtttggcctgaccgtgctgccgcgtcgtgaacgtccagatgccgccgccatcaaagcgaaagtgaccaaactgctggagatggtgcagcttgcgcatctggcggaccgcttcccggctcaactttccggcgggcagaagcagcgcgtggcgctggcgcgtgcgttagccgttgaaccgcaaatcctgctgctggacgaaccgtttggcgcgctggatgcacaggtgcgaaaagagctgcgccgctggctgcgtcagctgcatgaggaactccagttcaccagcgttttcgtgacccacgatcaggaagaggcgatggaagtggccgatcgcgtggtggtaatgagtcagggcaacattgagcaggttgacgagccagagcagctctggcgtgaaccggcgacccgctttgtgctggagtttatgggggaagtaaaccgccttcagggtaccattcgcggcggtcagttccacgttggcgcgcaccgctggccgctggggtatacctccgcgcatcaggggccagtggatctgttcctgcgtccgtgggaagtggacgtcagccgccgtaccagcctggattcaccgcttccggtgcaggtgctggaagctagccctaaagggcactacacccaattggtggtacagcccctgggctggtacaccgagccgctgaccgtggttatgcgtgacgacgtgccgccgcaccggggggagcgcctgtttgtcgggctgcaacacgcgcgcatttatcacggtaacgagcgcattgaaacgcgcgaggatattgctctggcggagtcagcctga

SEQ ID NO: 116135 - DNA, 912 bp, Enterobacter cloacae
gtgaatacactcgaacacaccatcggcaacacccctctggtcaaacttcagcgcatggggcctgataacggcagcgaaatctgggtcaaactcgaaggcaataacccggcggggtcggtaaaagaccgggcggcgctgtcgatgattgtccaggccgaaaagcgcggtgaaattaagcccggcgacgtgctgatcgaagccaccagcggtaacaccggtatcgcgctggcaatgattgccgccctgaaaggctaccgcatgaagttgctgatgccggataacatgagccaggagcgccgggccgccatgcgcgcctatggagccgagctgattctggtgagcaaagagcaggggatggaaggggcgcgagatttagcgttagcgatggcggagcgcggggaaggcaagcttctcgaccagttcaacaacccggacaacccgtacgcgcactacaccaccaccggcccggaaatctggcagcaaaccgacgggcgcatcacccactttgtctccagcatggggaccacgggcacgatcaccggtgtgtcacgctttctgcgcgaacaggagaagccggtgacgattgtcggcctgcaaccggaagaggggagcagcattccgggcatccgccgctggccggcggagtatatgccgggcatctttaatgcgcagcttgtggaccaggtgctggatattcatcagcgcgaggcggaaaataccatgcgtgagctggccgtgcgtgaaggtatcttctgcggcgtcagctctggcggtgccgtagcgggtgcgatccgggtggctgagtccacgccgggggcggtggtcgtagcgattatttgcgatcgcggcgaccgttatctgtctaccggcgtctttggtgaagagagttattcgcagggggcggggatttaa

SEQ ID NO: 116136 - DNA, 837 bp, Enterobacter cloacae
atggagatgattttattccgggataacacccgggcgcagcaaaccgatattgtcgccgttcagtcgcaggtggtgtacggcagcgtgggaaacagcatcgcggtgccgaatattcgcacccaccggctgaacgttaccgccgtgccaacggtgctgttcagcaatacgccgcactacgacaccttctacggcggggtgatcccggacgagtggttcagcggctaccttaaggcgctggaagagcgcgagatcctgcgcgagcttaaagcggtcaccaccggctatatgggcagcgccagccagatcgcgctgctggcgcagtggctgaaggcaatcaaagtgcaacatcccgatctgctggtgctggtcgacccggtaattggggatatcgatagcgggatgtacgtgaagccggatattcctgaagcctaccgtgagcatctgctcccgctggcccagggcattacgcccaacgtgtatgaactggaagtgctgagcggcaaaccgtgccgtacgccggagagcgccattgccgccgcgcaggggctgctgtccgactcgctgaaatgggtagcgatcaccagtgcgccagtgtctgacgatccgcagaatatccacgttgtgctggtgagcgaagaaggtgttaccgtaagcgcgcacccgcgcgtagagacggatctgaaaggaacgggcgatctgttctgttcggagctggtcagcggcattgtgggagggaaaaccgttgccgatgccattcgcatggcgggcgatcgggtgactgacgttatgatctatacgcagtcgaaaggctatgacgagcttatcctgccggcataa

SEQ ID NO: 116137 - DNA, 510 bp, Enterobacter cloacae
atgggtttgttcgataaactgaaatctctggtttctgatgacaagaaagactccggaactattgagattgttgctccgctctccggcgagatcgtcaacatcgaagacgtgccggatgtagtgtttgctgagaaaatcgttggtgatggcattgctatcaaaccaactggcaacaaaatggttgctccagttgacggcaccatcggtaaaatttttgaaaccaaccatgcgttctctatcgaatccgatagcggtatcgaactgttcgttcacttcggtattgacaccgttgaactgaaaggcgaaggcttcaaacgtatcgcagaagaaggccagcgtgttaaagttggcgacccggtaattgaattcgatctgccgctgctggaagaaaaagcgaagtctaccctgactccggttgttatctccaacatggacgaaatcaaagaactgatcaaactgtctggcagcgtcaccgtgggtgaaaccccggttatccgcatcaagaagtaa

SEQ ID NO: 116138 - DNA, 1728 bp, Enterobacter cloacae
atgatttcaggcattttagcatccccgggtatcgctttcggcaaagcattgctgctgaaagaagacgaaatcgtcattgaccggaaaaaaatttctgccgacaaggttgatcaggaagttgaacgttttctgagcggtcgtgccaaggcatctgcgcaactggaagcgattaaaactaaagctggcgaaactttcggtgaagaaaaagaagccatcttcgaagggcacattatgctgctcgaagatgaggagctggagcaggaaatcatagccctgattaaagataaaggcatgacggccgacgcggctgcgcatgaagttatcgaaggtcaggcatctgccctggaagagctggacgatgaatacctgaaggaacgtgcggctgacgtacgtgacatcggtaagcgcctgctgcgcaacatcctgggtctggccatcatcgatctgagcgcgattcaggacgaagtcatcctggttgccgctgacctgaccccgtctgaaaccgcacagctgaaccttaacaaggtgctgggtttcattactgatgcaggtggacgtacctcccacacctcaatcatggcgcgttctctggaactgccagccattgtgggtaccggtagcgttacctcccaggtgaaaaacgacgactatctgattctggatgccgtaaacaatgtggtttacgtcaacccaactaacgatgtgatcgagcagctgcgttccgttcaggagcaggttgctaccgagaaagcggaactcgctaaactgaaagatctgccagccatcacgctggacggccatcaggttgaagtgtgcgctaacatcggtaccgtacgtgacgttgacggcgctgagcgcaacggcgcggaaggtgtaggtctgtatcgtactgaattcctgttcatggatcgcgacgctctgccaacggaagaagagcagtttgcagcgtacaaagcggttgcggaagcgtgcggctcgcaggctgtaatcgtccgtaccatggacatcggtggcgacaaagagctgccgtacatgaacttcccgaaagaagagaacccgttcctgggctggcgtgccgtgcgtatcgccatggatcgcaaagagatcctgcgtgaccaggttcgcgctattctgcgtgcctccgctttcggtaaactgcgcatcatgttcccgatgatcatctctgttgaagaagtgcgtgcactgaagaaagagatcgaaatctacaaacaggaactgcgcgacgaaggtaaagcatttgacgaatccattgagatcggcgtgatggtggaaacaccggcagccgcgaccattgcgcgtcatttagccaaagaagttgatttctttagtatcggtaccaatgatttaacgcagtacaccctggcagttgaccgtggtaatgatatgatttcacatctctaccagccaatgtcaccgtccgtactgaatttgatcaagcaagttattgatgcttctcatgcagaaggtaaatggactggcatgtgtggtgagcttgcaggcgacgaacgtgctacacttctgttgctgggtatgggtctggacgaattctctatgagcgccatttccatcccgcgcattaagaagattatccgtaacacgaacttcgaagatgcgaaggtgttagcagagcaggctcttgctcaaccgacaacggacgagttaatgacgctggttaacaagttcattgaagaaaaaacaatctgctaa

SEQ ID NO: 116139 - DNA, 258 bp, Enterobacter cloacae
atgttccagcaagaagttaccattaccgctccgaacggtctgcacacccgccctgctgctcagtttgttaaagaagcgaaaggcttcacttctgaaatcactgtgacttccaacggcaaaagcgctagcgcaaaaagcctgttcaagctgcaaactctgggcctgactcagggtaccgttgttaccatctccgctgaaggtgaagacgagcagaaagcagttgagcatctggttaagctgatggctgaactcgagtaa

SEQ ID NO: 116140 - DNA, 972 bp, Enterobacter cloacae
atgagtaagatttatgaagacaactcgctgactatcggtcatacgcccctggttcgactgaaccgtatcggtaatggacgcattctggcgaaggtcgaatctcgtaacccaagcttcagcgttaaatgccgtatcggtgcgaatatgatttgggatgctgaaaagcgtggcgtgctgaaacctggcgttgagctggttgaacccaccagcggcaataccggtatcgctctggcctatgttgcggcggcgcgtggctataagctgacgctgactatgcctgaaaccatgagcattgagcgtcgtaagctgctgaaagcgctgggtgcgaacctggtcctgaccgaaggcgcaaaaggcatgaagggcgcgattcagaaggccgaagaaattgttgccagcgatccggcaaaatatctgctgctccagcagttcagcaacccggccaacccggaaattcatgagaaaaccaccggcccggaaatctgggaagataccgacggtcaggttgatgtgtttatctccggcgtaggcaccggcggtacgctgaccggtgtgtctcgctatattaaaggcacgaaaggtaaaaaagatctgattaccgttgccgttgagccaaccgactcaccggttatcgctcaggcgctggcaggcgaagagatcaaacctggccctcacaaaatccagggtatcggcgctggctttattccaggcaacctggatctgaagctgatcgataaagtggtcgccattaccaatgaagaagccatctccacggcgcgtcgcctgatggatgaggaaggcattctggcgggtatctcttccggtgcggcggttgcggcagccctcaaactgctggaagatgaaacctttaccaataagaacattgtggttatcctaccgtcttcgggtgagcgttacttaagcacagcactgtttgccgatctcttcactgagaaagaactgcaacagtga

SEQ ID NO: 116141 - DNA, 762 bp, Enterobacter cloacae
atggtttcaacatcttcttctgccccacgcagcggggtctggtacttttctcagggctggaaactggtctccctgccgggcattcgacgcttcgttattttgccgttactgatcaacattattctgatgggcggggccttctggtggctgttcaccagactggaaagctggatcccttccctgatgagctatgtgccggactggttacagtggctagactacctgctctggccgattgcggttatctccgtgctgctggttttcggctatttcttttcgacgatagcaaactggatagccgcgccgttcaacggtctgctggccgaacagctggaagcgcgcctgaccggtgcgacgccacctgacacgggcgtactggggatcgtgaaagatctcccccgcatcatgaagcgtgaatggcagaagttcgcctggtacctgccgcgggcgattgtgctgcttattctttattttgtacccgggattggccagacggtcgcgcccgtgctgtggttcctgttcagcgcctggatgctcgctatccagtactgtgattatccgttcgataaccacaaagtgccgtttaaagagatgcgcactgccctgcgcactcagaaggttgccaacatgcagtttggcgcgctgaccagcctgttcaccatgatccctttcctgaatttgttcatcatgcccgttgccgtttgcggcgcgacggcgatgtgggtggactgctaccgtgctaagcacgcgttatggaagtaa

SEQ ID NO: 116142 - DNA, 1026 bp, Enterobacter cloacae
atgatgcaggatttgcgtctgatattaatcattgttggcgcgatcgccataatcgctttactggtacatggtttctggaccagccgtaaagagcgttcctctatgtttcgcgatcgtccactgaagcgcatgaagtccagtcgtgacgacgatgacgttgaagacgacatcgacggtcctgacgacgacggcgtgggtgaagttcgtgttcatcgggtcaatactgcgcccggcgcagcgcatggagagcatgaagccccccgcgctccgcagcaccagtatcaaccaccgtatgcctctgcccagccgcgccagccagcgccgccgccagtggaagaacctgttcgtcatccgccgcagcagcctgtgcaacagcagcccgttgcgccacagcctgtacagccacagcctgtacagccgcaacctgtacagccgcaacctgtgcaacagcctgcacagccagtgcatcagccacagcctgttcagcagccgcagccggtacaacaaccgcagccgcagcctgaaccgcctgcgccacagcccgctccgcgtgttgagccagagccggtcgcagagccagaaccggttgttgaaaagccgcagcgtaaagaagcggtgatcatcatgaacgtggctgctcatcatggcacccatctgaacggtgacgtgctgcttaacagcatccaacaggcaggcttcaagttcggcgacatgaatattttccatcgccacctgagtcctgacggtagcggtccggcgctgtttagcctggccaatatggtcaatccaggcacgtttgacccggaaatgaccggtgatttcgtcacgccgggggttacgatctttatgcaggtgccgtcctacggtgacgagctgcaaaactttaagctgatgctacagtccgctcagcacatcgccgacgaagtgggcggtgtggtgctcgacgatcagcgtcgaatgatgacgccgcagaaactgcgcgagtatcaggaccgcatccgcgaagttaaggaagcgaacgcgtaa

SEQ ID NO: 116143 - DNA, 1929 bp, Enterobacter cloacae
gtgccggatgcggaatatgaccgcctgatgcgtgaactgcgcgagctggaagcgcagcaccccgaactgattacgcccgattccccaacgcagcgcgtcggcgcggaaccgctgggcgctttcagccaggtgcgccatgaagtgccgatgctgtcgctggataacgtgtttgatgaagagagttttctggctttcaacaagcgtgtgcaggatcgcctgaagagcatcgacaatctgagctggtgctgcgagctaaagctggatggtctggccgttagcattctttatgagaacggcgtgatggtgcgtgccgcaacgcgcggcgacggcactaccggggaagacatcaccactaatgtgcgcactattcgtgcgatcccgctgaaactgcgtggcgataacattcccgcccggctggaagtgcgcggggaagtgttccttccgcaggcgggcttcgagaagatcaacgaagaagcgcgtcgtaccggtgggaaagtgtttgcaaacccgcgtaacgcggcggcaggttcgctgcgtcagctcgatccacgaatcaccgcgaagcgaccgcttactttcttctgctacggcgtcgggatcctggaaggcggtgacctgccagatactcacctgggtcgtttaatgcagttcaaagagtgggggttaccggttagcaaccgcgtgcagctctgcgactctccggaggcggtgctggcgttctatcacaaggttgaagaggatcgtcccacgctcgggtttgatattgatggcgtggtgatcaaggttaactcgctggcgttgcaggaacagttaggatttgtggcccgtgcgccgcgctgggcggtagcctttaagttcccggcgcaggagcagatgaccttcgttcgcgacgtggagtttcaggtagggcgtacgggggcgattacgcctgtggcgcgtctggagcctgtgcaggtggctggcgtgctggtaagtaacgccacgctgcataacgccgatgaaattgcccgcctgggcctgcgcattggtgacaaagtggtgattcgccgcgcgggcgacgtgatcccacaggtggttaacgttgttgagtctgaacgtcctgccgatacccgtgccatcgagtttccagcccactgtccggtatgtggttcggacgttgagcgcgtggaaggtgaagcggtaacgcgctgtacgggcgggttaatctgcggcgcgcagcgtaaagagtccctgaagcactttgtctcccgccgggcgatggacgtcgacggaatgggtgacaagattatcgaccagttagttgagaaagagtacgtccatacgccagcggacctctttaccctgacggcaggtaagctgaccggtcttgatcgtatggggccgaaatctgcccagaacatcgttaacgcgctcgaggcggccaaaaacaccacctttgcccgtttcctttacgcgcttggcattcgtgaagtcggagaggcgacggcggcagggctggcggcgtatttcggcacgctggacgcgctggagaaagccaccatcgacgagctacagaaagtccctgatgtcggcattgtggtcgctacccacgttttcaacttcttcgccgaagagagcaaccgtgaagtgatcggtaaattactggaacagggcattcactggcctgcaccggtagtggttaatgccgaagagatcgacagcccgtttgccggtaaaacggtggtgctgaccggcagcctgagccagctctcgcgcgatgacgcgaaagcgcgcctggtggcgttgggggcaaaagtggcgggcagcgtatcgaagaaaaccgacctggtgattgccggggaagcggccggttcgaagctggcaaaagcgcaggagcttggcatcgaggtaatcgacgaagcggaaatgatgcgcctgttaggagagtga

SEQ ID NO: 116144 - DNA, 216 bp, Enterobacter cloacae
gtggaaaaagagcagctcgttgagatcgccaatacggagatgccgttcggtaaatataagggtcgcaggctgattgatctaccggaagagtatctgctgtggtttgcccgtaaggatgagttccccgccgggcgtctgggcgagctgatggctatcacgttactgatcaaaacggaggggctgacccagctggttcagcccctgaaacgtccttaa

SEQ ID NO: 116145 - DNA, 996 bp, Enterobacter cloacae
atgaaactttttcgtatccttgatccgtttacgctgaccctgattagtgtcgtcttgctggcctcgttcttcccggcgcggggcagtttcgttccggttattgaaggactgaccacggcagccattgccctgctgttctttatgcatggcgccaaactctcccgggaagccattattgcaggcggtagccactggcgactgcacctgtgggtaatgtgcagcacctttatcctcttcccggttttgggcgtgctgttcgcctggtgggcgccggtgaatgtcgatccggcgctgtataccggtttcctttatctgtgcattttaccggccaccgtgcagtctgctattgcctttacctcgctggcgggcggtaacgtcgcggcggcggtctgttctgcttctgcttccagcctgctggggatctttgtttcaccgctgctggtcggtctgctgatgaacatgcacggggcggaaggcaatctggagcaggtgggtaaaatttgtctgcaactgctgctgccgtttgtgctcggacacttatcccgtccctggattggggcgtttgtggcgaaacataaaaaatggatcgggaaaacggaccaaagctcaattctgctggtggtttacacggccttcagcgaagccgtggtgaacggtatctggcacagggtgggcgctggatcgctgctgtttattgtggtggtaagcatcgttcttctggccattgtcatcgcggttaacgtctttgtggcccgcaaatgcggcttcaacaaggccgatgaaatcaccattgtattttgcggatcgaaaaagagcctggccaacgggatcccgatggccaatattctgttcccgacgtccgtcattgggatgatggtgttgccgctgatgattttccatcagatccagctgatggtgtgtgcggtactggcgcggcgttacaaggcgcagactgaaaagctggcgcaggaagagacccgcgccgcgaaagtttaa

SEQ ID NO: 116146 - DNA, 942 bp, Enterobacter cloacae
atgaattattcgttacgtcagcttcgcgttttcgtcaccgtcgcgcaggcccgcagctttagccgggcaggggagatgattggcctcagccagtcggcggtgagccatagcgttaaggagcttgaaacgcaaacgggcgtgaagctgctcgaccgtacgacgcgagaagtggtgctcaccgaagcgggacagcagctggcaacgcgtctggaaaggctgctggatgaactgaacagtacgctcagggatgtcggccggctcggacaacagctttccggcaccgtgagagtggcggcgagccagacgatttcagcgcatcttattccccagtgcatcgctgaaagtaatcaccgctatccggatatcgattttgttttgcatgacaggccgcagcagtgggtactggagagtatccgtcagggggatgtggattttggcatcgttattgatcccggggcggtaagcgacctggaatgtgaagtggtgctctcggagccctttttactgctctgccgcgatgatgatccgctggcatcgctgccgcaggtggcctggcaggccttgcagggggcaaacctggtgttacaggattatgcatcaggtagccgcccgctgatagatgccgcactgaccgcgcagggcgttaaggcaaccattgtgcaggagatcgggcatcctgccacgctcttccccatggtcgaagcggggattggcatcagcgttctgccggcgctggcgctgccactgccgcaggggagtcgtttaacggtgaagcgtttcgtaccctgtgtcgaacgccagctgatgctggtacgccgtaaaaacaggtcactttccggcgcggcgcacgcctgctgggatgtagtacgtatgcaggccagacgtttgatggaggcccgcacacgcgatccactctttaacgaaaccaataatcagatgtag

SEQ ID NO: 116147 - DNA, 342 bp, Enterobacter cloacae
atgacaactcttaagcccgtttctctgtcggcgatggaaatcggcagcgtagataacagctccggcggaaacgacattgcttctcaaatcacccgtctgaccaaacagataacgaaagtcactcagcagctcaaagaagtggccatgggtgatgccacagcagaagagaagcaaaagcagcaggaattactcgaatctcagctggctatgttgcaggcgcagctggcgcaattgcagcgtcagcaggccgaagaggcgatgccaaagcaggaaaacggtcaggccgtggcggaaggcatcaataagccctccgcggagcatcagattaatatctacatctga

SEQ ID NO: 116148 - DNA, 2445 bp, Enterobacter cloacae
atgaaaatcaaagcgcctgaagcgttaatggctgccgaggtcactcgccgtgggttgatgaaaaccacggcaataggcggtctggcggttgccagcagcgcctttacgctcccttttacccgtctggcgtcggcggcggaggctctgtctcccgcttcagccccggaaaaagtggtgtggagtgcctgtaccgttaactgtggtagccgttgtcctctgcgtatgcatgttgtggacggtgaaatcaaatatgtcgaaacagacaataccggcgatgataactacgaagggttacatcaggttcgtgcctgtctgcgtggccgttcaatgcgccgtcgcgtttataacccggatcgtctgaaatacccaatgaagcgcgtcggtaagcgtggggaagggaagttcgagcgtattagctgggacgaagcctacgatattatcgcgactaacatgcagcgcctgatcaaagagtatggcaacgaatccatctacctcaactacggcaccgggacgctgggcggtaccatgacccgctcctggccgccgggtaaaatgctggtggcgcgcctgatgaactgctgcggcggctatctcaatcattacggcgactactcttccgcacagattgctgcgggtctgaactacacctacggcggctgggcagacggtaacagcccgtcggatatcgaaaacagtaaactggtggtgttgttcggtaacaacccaggcgaaacccggatgagcggcggtggggtaacctattatcttgagcaggcgcgcgccaaatccaacgcacgtatgatcatcgtcgatccgcgctataccgataccggcgcgggacgtgaagacgagtggatccctattcgccctggtaccgatgcggcgctggtcaatgcgctggcgtatgtgatgatcactgaaaacctcgtcgatcagccgttccttgataaatactgcgttggttatgacgagaagaccctgccagccagcgcaccggctaacgggcattacaaagcgtacattcttggtcagggcagcgacggggtagcgaaaacccctgagtgggcatccaccattaccggcattccagtcgagcgtattgttcagctggcccgtgaaattggttcagcaaaaccggcttatatcagccagggatggggaccacagcgtcacgcgaacggcgaaattgccacccgcgctatttctatgctctcgattctgactggcaacgttggtattcacggcggtaatagcggggcgcgtgaaggctcgtatgaagtcccgtttgaacgtatgccaacgctggataacccggttcagaccagcatctccatgtttatgtggacggacgcgatcgagcgcggcccggaaatgaccgcgctgcgtgacggtgttcggggcaaagataagctggacgtgccgatcaaaatgatctggaactacgccggtaactgcctgatcaaccagcactctgaaatcaaccgcacccatgaaattttgcaggacgacaagaagtgcgaaatgattgtggtgatcgactgccacatgacctcatcggcgaagtatgccgatattctgcttccagactgcaccgcgtctgagcagatggatttcgcgctggacgcctcctgcggcaacatgtcctatgtgatcttcactgaccaggccatcaaaccgcgcttcgagtgcaaaaccatttatgagatgacttccgagctggcgaaacgtcttggcgttgagcagcagttcactgaaggacgtactcaggaagggtggatgcgccatctgcacgagctctcacgcaaagccattcctgacctgccggacttcgataccttccgcaagcagggcatgtacaagcagcgcgatcccgaagggcatcacgtggcgtataaagccttccgcgacgatccgcaggccaatccgctgaccacgccgtcgggcaaaatcgagatctactccgaagagctggcaaaaattgctgcaacgtgggaattgccggaaggggatgttatcgatccgctgccgatttatacgccaggcttcgaaaactacaacgatccgctgacggcgaaattcccgcttcagttgaccggtttccactacaaagcgcgtgttcactccacctacggcaacgttgacgtactgaaagcggcctgccgacaggagatgtggatcaacccgatggatgcgaaagcgcgcggcatcagtaatggcgatcgcgtacgtatcttcaacggacgtggcgaagtgcatatcgaagctaaagtgactccgcgtatgatgcctggcgttgtcgcgctgggggaaggggcctggtataacccggatgcgaaccgtatcgatcaggcgggctgcatcaacgttctcactacgcagcgtccgtcgccgctggcgaagggcaacccatcccacacaaacctcgttcaggttgaaaaggcgtaa

SEQ ID NO: 116149 - DNA, 1293 bp, Enterobacter cloacae
atgctcgatcccaatctgctgcgtaatgagccagacgcagtcgctgaaaaactggcacgccggggctttaagctggatgtagataagctgcgcgctcttgaagagcgtcgtaaagttttgcaggtacaaactgaaaatctgcaagcagagcgtaattctcgatcgaaatccattggccaggcgaaagcgcgcggggaagatattgagccattacgcctggaagtgaacaaactgggtgaagagctggatcaggcgaaagctgaactggatgttcttcaggctgaaattcgtgatatcgctctggcgatcccgaacattcctgacgacagcgtgcctgtcggcaaagacgaaaacgacaacgttgaagtgaaacgctggggcacgcctcgcgagtttgacttcgaggtgcgcgatcacgtcacgctgggcgaaatgcacgcgggcctggactttgcggctgcggttaagctgacgggttctcgctttgtggtcatgaaaggtcaaattgcccatctgcatcgcgctctggcgcagttcatgctggatctgcacaccgagcagcacggctacagcgaaacctacgttccgtatctggttaaccacgatacgctgtacggtacaggccagctgccgaaatttgccggcgatctgttccacacccgtccgctggacgaggaagcagacagcagcaactatgcgctgatcccaaccgcggaagtgccgctgaccaacctcgtgcgtgatgagatcatcgacgaagacgatctgccaatcaaactgaccgcgcactctccatgtttccgttctgaagccggttcttacggtcgcgatacgcgcggtctgatccgtatgcaccagttcgataaagttgagatggtgcagatcgttcgtccggaagagtctatggacgcgctggaagagatgaccggtcatgctgagaaagtgctggagctgctgggcctgccgtaccgccgtatggcgctgtgcaccggcgacatgggcttcggtgcctgcaaaaccttcgaccttgaagtctgggtgcctgcgcagaacacctaccgtgaaatctcctcctgctccaacgtctgggatttccaggcgcgtcgtatgcaggcgcgttgccgcagcaaatctgacaagaaaacccgtctggttcataccctgaacggttccggtctggcagtaggccgtacgctggttgctgtgctggaaaactaccagcaggctgacggacgcattgagatcccggaagtgctgcgcccttacatgaaaggccagcagttcatcggctaa

SEQ ID NO: 116150 - DNA, 1344 bp, Enterobacter cloacae
gtgagcaacctgtcgctcgatttttcagataatgcgtttcaacctctggccgcccgtatgcggccagaaaatttagcgcagtacatcggccagcaacacctgctggctgcggggaaacccttgccgcgcgccatagaggcggggcatctgcactccatgatcctctgggggccacccggcaccggcaaaacaaccctcgctgaagtgatcgcccgctatgctaacgcggacgttgagcgcatctcggcggttacctccggcgtgaaggagattcgtgaggcgatcgagcgcgcgcggcaaaaccgtaatgccgggcgccgcaccattctgtttgtcgatgaagtccaccgcttcaacaagagccaacaggatgcgtttctgccgcacattgaagacggcacgattttcttcatcggcgcaaccacggaaaacccgtcgtttgagctgaactctgcgctcctttcccgcgcccgcgtttacctgcttaaatccctgactacagaggatatcgaaaaggttctgacccaggcgatggaggacaaagcgcggggttacggcggacaggatatcgttctgccggacgacacgcgtcgtgcgatcgctgaactggtcaacggcgatgcgcgtcgggcgctgaatacgctggaaatgatggccgatatggccgaagtggatgatgccggcaagcgcgtactgaaacctgaattgctcaccgaaatagccggtgaacgcagcgcacgcttcgataataaaggcgatcgtttttacgacctgatctcggcattacataagtccgtgcgcggcagcgccccggatgcggcgctctactggtacgcgcgtatcattaccgccggtggcgatccgttatatgtcgcgcgtcgctgcctggccatcgcgtcagaagatgtcggtaatgccgatccacgcgccatgcaggtcgctatttccgcctgggactgctttacccgcgtcggacccgcggaaggtgagcgtgccattgcgcaggcaattgtctatctggcctgcgcgccgaaaagtaacgcggtgtataccgccttcaaagcggcgatgtcagatgcacgtgaacgtccggactacgatgtgccggttcatctgcgcaatgcgccaaccaaattgatgaaagagatgggttacgggcaggagtatcgctacgcccatgatgaacccaatgcctacgccgccggggaagagtatttcccgcaggagatggcacaaacccgctattatcatcccacaaacagaggtcttgagggtaagattggcgaaaagctcgcctggcttgccggacaggatcaaaatagccctataaaacgctaccgttag

SEQ ID NO: 116151 - DNA, 615 bp, Enterobacter cloacae
atgaaaaaaatcgccatcgcctgtgcattactctccagttttgttgccagcagcgtctgggctgatgcagccagcgaccttaaaagccgactggataaagtgagcagcttccacgccagcttcacgcaaaaagtgactgacggcagtggcaacgcggtgcaggaaggtcagggggatttgtgggtgaaacgcccgaatctcttcaactggcacatgacccagccggatgaaagcgtgctggtgtccgacgggaaaaccttatggttctacaacccgtttgttgagcaggcgaccgccacctggctgaaagacgcgaccagcaatacgccgtttatgctcattgcccgtaaccagtccagcgactggcagcagtacaacattaaacaaaacggtgatgagttcgtcctgacaccaaaaggcagcaacggtaacctgaagcagttcaccattaacgtgagcagcaacggtaccattaatcagttcggtgcggttgagcaggacgatcagcgcagtagctatcagctcaagtctcagcaaaacggcgccgtagatgcttcgaaattcacctttaccccgccgcagggcgtaacggtggacgaccaacgtaataagtaa

SEQ ID NO: 116152 - DNA, 3669 bp, Enterobacter cloacae
ttgagccaggaatacactgaagacaaagaagtcacattatctaagctaagcagcggacgtcgtctccttgaggcgttactgattgttattgccctttttgccgtctggctgatggctgccttactcagtttcaacccctcagaccccagctggtcgcaaaccgcatggcatgagcctatccataatttaggtggcgttcccggcgcctggcttgcggacacactcttcttcattttcggtgtgatggcctatacccttcccgtcatcattattggcggatgctggtttgcctggcgtcatcgacagaacgacgactacatcgattattttgccgtttcgctgcgcctgattggcgccctggcgctgatcctcacctcctgcggactggcggcgatcaacgccgatgacatctggtacttcgcctccggcggggtgattggcagcctgttgagctccgcgctgcaaccgatgcttcacagcagcggcggcacgctggcgctgctttgtatctgggcagcgggcctgacgctgtttaccggctggtcctgggtgagcattgccgaaaaaatcggcagctttattctgactctgctgacgtttgccagcaatcgcacccgtcgtgacgatacgtgggtcgatgaagatgaatatgaagatgagtacgaagaggaagacgaggcacccgtgcagcgtcgtgaatcccgccgtgcccgtattctgcgcggtgctctggcgcgccgccagcgcgttgctgaaaaattcgctaacccgttaggccgtaaaacggatgccgcgcttttctccggcaaacgtatggatgaagaggagcagattgagtatcgcggcgcggccgtcgatcctgatgatgtgttgttctctggtcatcgagctacgccgggtgagtatgacgaatacgatccgctgttgcatggtcattccgtgactgaaccggtagccgctgctgctgccgcaacgacggctgcgcaggcccatgttgcgcctgttgaagccgtgatgccgtcctcgcctgttccggcaccggagtccgcgatccagcaaccgcaggtggactggcagactgcgccaggcgtccatacgcctgaaccgaccattgcgccggagcctgaaagctatattcctgtgcagcaggaacagtggcagcaaccgtatcagccgcctgagcctgccagcgagccgcaacagccgtatcaggcctatacgcccgaacctgctgagcctgaacagccatacgttgcgccggtgtctgaacccgaaatggtggaggaagcgaagccatcccgtccgccattgtactattttgaagaggtggaagagcgccgtgcccgagagcgcgagcagcttgccgcctggtatcagcccgtgcctgagccggtgcaggagcctgttgtaaaagcgccttctgcgagcgttgcacctgtagacccagcgccagccgttgcgtcgagagcggaaaccgtgaagcaggcaacggcagccgctgccgcgtccgctccgctattcagcccggcaaccgatggtgcgccacgtcctcaggtaaaagagggcattggtccacaattgccgcgtcctaatcgcgtgcgcgtaccgacgcgccgggagctggcctcttatggcattaaactgccttcccagcgtatggcggaagagaaagcccgtgagtccgactacgaagatgatgccgacgaactgcatcaggatgagctggcgcgtcagtttgccgcccagcagactcaacgctacgggaatgagtaccaacacgatgttcattctcagcaggatgaagatgatgctgccgaagcggaattagcgcgtcagtttgcggccacgcaacagcaacgttattccggtgagcagccttcgggggcaaacccgttctcgctctcggattttgaattttcaccgatgaaagatctggtggatgacggtccgagcgaaccgctgttcacgccgagcgtgatgccagaagcggaaccggtgcgtcaggcgccagcgccgcaggttaatgcgcagccacaacagccagcgccgcaggcttatgcgcagccgcatacaccgtcggcccaaccgccgcagccgcagttccagcagccagcaccacagccgcaggaaagcctgattcacccgctgctgatgcgtaacggagacagccgtccgctgcaacgaccaagtacgccgttgccgtcgctggatctgttaacgccgccgccagcggaagtcgaaccggtggatacttttgctcttgagcagatggcccgtctggtggaagcgcgtctggctgacttccgtattaaagcggacgtggtgaactactcacctggcccggtgatcacccgtttcgaactgaatctggcgccaggcgtaaaagcggcgcgtatttctaacctctcccgtgacctggcgcgttctctgtcgaccgtggcggtacgcgtggtggaagtgatcccaggtaagccttacgttggccttgagctgccaaacaagaaacgccagaccgtttatctgcgtgaagttctggataacaccaaattccgcgacaacccgtcccctctgaccgtggtgttgggtaaagatatcgctggcgatccggtggttgccgatcttgcgaagatgccgcacctgctggttgcgggtaccaccggctccggtaaatcggtcggggtgaacgccatgatcctcagtatgctctacaaagcgcagcctgaagatgtgcgtttcatcatgatcgacccgaaaatgcttgaactgtccgtctacgaaggcattccgcacctgttaacggaagtggtgaccgacatgaaggacgccgccaacgcattgcgctggagcgtcaatgaaatggagcgtcgctataagctgatgtctgcgctgggcgtgcgtaacctggccggttataacgagaaaatcgctgaggcggcacgtatgggccgtccgattccggacccatactggaagccgggggacagcatggatacccagcatccggtgctggaaaaactgccttacatcgtggtgctggtggatgagttcgccgacctgatgatgaccgttggcaagaaagtggaagagctgattgcgcgtctggcgcagaaagcgcgtgcggcgggcatccatctggtactggcaacgcagcgtccgtccgtagacgttatcaccggtcttattaaggcaaacatcccgacccgtatcgcgtttaccgtgtcgagtaaaattgactcgcgtactatccttgaccagggcggtgcagagtcgctgctgggtatgggcgatatgctctattccggcccgaactccacctcgccggtgcgcgtacacggtgcgtttgttcgcgaccaggaagtgcatgcggtggtgcaggactggaaagcgcgcggtcggccgcaatacgttgacggcatcacctccgacagtgaaagcgaaggtggcggcggtggttttgacggcggcgaagagctggatccgttatttgaccaggcggttaatttcgttaccgaaaaacgtaaggcgtccatctccggcgtccagcgccagttccgtattggctacaaccgcgcggcgcgtattatcgagcagatggaagcccagggtattgtgagcgaacaggggcataacggtaaccgtgaggtgctggcgccaccgccgtttgattaa

SEQ ID NO: 116153 - DNA, 495 bp, Enterobacter cloacae
atggtagatagcaagaagcgccctggcaaagatctcgaccgtatcgatcgtaacattcttaatgaattgcaaaaggatgggcgtatttccaacgtcgagctttcaaaacgtgtgggactttccccgacgccgtgccttgagcgtgtgcgtcgactggaaagacagggttttattcagggctatacggctctgctgaacccgcattatctggatgcctcacttctggtatttgttgagattactctgaatcgtggtgcaccagatgtgtttgagcaatttaacgccgctgtacaaaaacttgaagaaattcaagagtgtcatctggtttccggtgattttgactacctgttgaaaacccgtgtgcctgatatgtccgcctaccgtaagctgctgggtgaaaccctgctgcgtctgccaggcgtgaacgacacccgtacttatgtggtgatggaagaggtcaaacagagcaatcgtctggttattaagacgcgctaa

SEQ ID NO: 116154 - DNA, 969 bp, Enterobacter cloacae
atgggcacgaccaaacacagtaagctgctaatccttggttctggacctgcgggatataccgcagcggtctatgctgcacgcgctaacctgcaaccggtactgatcaccgggatggaaaaaggcggtcagctgaccaccaccacggaagtggaaaactggcctggcgacccgaacgacctgaccgggccgctgctgatggagcgcatgcacgagcatgccgccaaattcgaaaccgaaatcctgttcgaccacatcaataaagtggatttgcagaaccgtccgttccgcctgacgggtgacagcggcgaatacacctgcgatgcgctgatcatcgccaccggcgcctctgcccgttaccttggtctgccatctgaagaagcgttcaaaggccgaggcgtatctgcctgcgctacctgcgacggtttcttctatcgcaatcagaaagtcgccgtgatcggcggcggtaacaccgcagtggaagaagcgctctacctggcaaacatcgcctctgaagtacacctgattcaccgtcgcgacaccttccgcgcggagaagatcctgattaaacgcctgatggacaaagtggcgagcggcaacattgtgctgcataccaaccgtacgctggaagaagtgactggcgatcagatgggcgtggcgggactgcgtatccgtgatacccagaacaccgataacgtcgaaacgctggaagtggcgggcctgtttgtggcaatcggccacagcccgaacaccgctatcttcgaaggccagctggagctggagaacggctacatcaaagtgcagtctggcattcacggcaacgccacccagaccagcgttccgggtgtcttcgcagctggcgacgtgatggaccatatttatcgtcaggcgatcacctctgcgggcaccggctgtatggccgcgctggacgcagaacgctatctggacggactggctgaacaaggtaaataa

SEQ ID NO: 116155 - DNA, 1767 bp, Enterobacter cloacae
atggaaaaaacccgtcaacaagagttaacccgctggctgaaacagcaaagcgttctgtcccgccgctggcttatgatttcccgcgttttgggattcatcagcggtctgttgattgttgcccaggcatggctgctggcccgcattctcaaccatatgatcatggagaacatcccgcgcgaagcgctgctgttgccgtttatcgttctggtgctggttttcgttctgcgtgcgtgggtggtctggctgcgcgagcgggttgggttccacgccgggcagcacatccgctatgagattcgccgcaaggtactcgatcggctttcggaagccggacctgcgtggatccagggtaagccagccggcagctgggcgacgctgatccttgagcaaatcgacgatatgcacgattactacgcgcgttatcttccccagatggcgctggcggtgtttgtgcccctgatgattgttatcgccatcttccctgttaactgggtggcggcgttgatcctgctaggcaccgccccgctcatcccgctgtttatggcgatggtcggcatgggcgcggcagatgctaaccgtcgtaacttcctggcgctgggtcggttgagcggtcatttcctggaccgtctgcgcggaatggaaaccctgcggatcttcggtcgtggtgaagcggaaaccgaaaacattcgcctggcgtcgcaggatttccgtcagcgcaccatggaagtgttgcgcatggcctttctctcttctggcgtgctcgaatttttcacctccctgtcgattgcgctggtggcggtttactttggcttctcctacctcggcgcgctggactttggccactacggtacggcggtcacgctttccgccgggttcctggcgctgatcctggccccggaatttttccagccgcttcgcgatctcggcaccttttaccatgccaaagcgcaggcggtgggtgctgccgacagcctgaaaaccttcatggaaacgccgctggcgaatccggagcgtggtgaggtaacgctgaatacgaacgatccggtgaccattgaagcacaggatttttctgttctgtcgcctgaaggcaaagtgctggccggtccgctgaactttaccctgcctgccgggcaacgtgtggtgctggtgggtaccagcggctcaggtaaaagctcattgttgaatgcgctgtcaggttttatggcgtacaccggatcgctgcgtatcaataaaacggagctgcgcgagctcgatcctgatgcctggcgtaaacagctgagttgggtggggcaaaaccctcagctgccagctccgacgctgcgcgagaatgtgctgctggcacgcccgaatgcgcatgaagatgagctgcaatcggtcctcgaccgcgcctgggtcagcgagtttctgccgctgcttgcgcagggtgtcgataccgtcattggcgatcagtctgccgggctgtcagttggccaggcacagcgcgtcgcggttgcccgtgcgctgctgaatccctcttcgctaatgctgctggacgaacccgccgccagcctggacgctcacagcgagcagcgcgtgatggatgcgcttaacgcagcctcacgccagcaaaccaccctgatggtgactcaccagctggaaggtattgccgactgggatcagatctgggtgatggaaaacggacacattgttgaacaaggcgattacgccgcgcttgttgccgcgcaggggccgtttgcgaccctgctggcgaaccgtcaggaggatatctga

SEQ ID NO: 116156 - DNA, 1722 bp, Enterobacter cloacae
atgcgcgccctgcttccgtatcttgcactgtataaacgccacaaatggatgctgacgctcgggatcgtgctggcgatcgttactctgctggccagcatcggtctgcttacgctttccggctggttcctctccgcgtctgcggccgcaggctttgccgggctgtacagctttaactacatgctgcctgccgccggggtgcgcggcacggcgattacgcgaactgccggacgctacttcgaacgtctggtcagccacgacgcgaccttccgcgtgctgcaacacctgcgtatttacaccttcagcaaactgctgcccctctcccctgccgggctggcacgttttcgacagggcgaattactcaaccgcgtggtcgcagatgtggatacgctggatcacctctatctgcgcgtcatttcacctatggtgggcgcgtttgtagtgattgtcgtggtcacgctggggttgagtttcctggatgttcccatcgcactgacgctcggcggcatcatgctgatgacgctgattattctgccgcccctgttttatcgtgcaggtaaaaccaccggggaaaacctgacgcgcctgcgaggggaatatcgccagcagctcaccgcctggttgcagggacaggccgagctcaccctttttggtgccagcaaacggtaccgcgcccgcatggaaaatacggagctgaactggcatgaagcccagcggcgccagtctgaactgaccgcgttctcccaggcgctgatgatgttaattggtgggattgccgttatcgccatgctctggatggcctccggtggcgtgggcggtaacgcgcagcctggcccgctgattgcgctgtttgttttctgtgccctggcagcctttgaagccttagccccggtcacgggcgcctttcagcatctcggccaggtgattgcctctgcgctgcgcattacggatattgccgagcaggagccggaagtgaagttcagcgcgggtcaaaccgctgtgccagagcaggtcgcgctgacgctcagcaatgtcactttcgcctacgacaagcaggcgcaaaacgcgctggaagacatcaccctttctgttgatgccgggcagcgcattgcgatccttggccgtacgggatgtgggaaatcgacacttctgcaacttctcacgcgcgcgtgggacccacagcagggcgagattctgtttaacgacgttccgctgtctggttttagcgaagcggccttgcgtaaaacggtcagcgtcgtgccccagcgggtgcatctgttcagcgctacgctgcgcgataatcttcttctggcggcaccagacgcctccgacgatacgctgcgggcaatgctggagcaggttgggctgcacaagctgcttgaagacgacgggttgaacagctggctgggtgaagggggtcgacagctttccggcggcgaactgcgtcgtctggccattgcgcgtgcgctgctgcacgatgcgccgctgatgctgctggatgaaccgacagaaggactggatgccacgacagagagccaaatccttgatttactggcgaatgtgatgaaaggtaaaaccgtgctgatggtcacgcaccgtctgcgcgggctggtgaatttcgatcagataattgtgatggacaacggacacataattgagcaaggtagtcaagcagagctgctggcaaaacaaggtcgctactaccagtttaaacagcgcctgtag

SEQ ID NO: 116157 - DNA, 705 bp, Enterobacter cloacae
atgcgcctggtgcagctttctcgccataatattgcgttcccttctccggagggggcgctgcgtgaacctaacggcttgctggctctgggcggcgatctcagcccggcacggctcttaatggcttaccagcgcggcatctttccgtggttttctcctggcgacccgatcttatggtggtctcctgacccgcgagccgtactgtggcctgggcagtttcacctgagccgcagcatgaagcgttttcatacaaaatcaccctttcgcgtcacgcttaatcacgccttcggccaggttatcgaaggctgcgctgaagatcgtctagaaggcacctggataacccgcgatatcattatcgcctatcaccagcttcatgagctgggttacgcgcattcgatcgaagtgtggagcggcgacgacctcgtcgggggcatgtacggcgtggcgcagggtacgctgttctgcggcgagtcgatgttctcccgcgccacgaatgcgtcgaaaaccgcgctgctggtttttagccaggaatttgcccgacgtggaggacagttaatggattgtcaggtgctgaatgagcataccgcctcgctcggcgccgttgaaatctcccgccgacactatatcgaacacctggaacagtgccgaaaggagaccctaccacgcgatttttgggttcccagaacgctctttatacccaatgcctaa

SEQ ID NO: 116158 - DNA, 219 bp, Enterobacter cloacae
atggccaaagaagacaatattgaaatgcagggtaccgtacttgatacgttgcctaataccatgtttcgcgtagaactggaaaacggtcacgtggtaactgcgcacatctccggtaaaatgcgcaaaaactatatccgcattttgacgggcgacaaagtgactgttgaactgaccccgtacgacctgagcaaaggccgcattgtcttccgtagtcgctaa

SEQ ID NO: 116159 - DNA, 2280 bp, Enterobacter cloacae
atgctcaatcaagaactggaactcagtttaaacatggctttcgccagagcgcgtgagcaccgacatgagtttatgaccgtcgagcacctgctgctcgcactgcttagcaacccatctgcccgcgaagcgctggaagcctgctccgtggatctggtggcgctacgtcaggaactcgaagccttcatcgaacaaactacaccggtgctgccagccagtgaagaagagcgcgacacgcagccgacgctcagcttccagcgcgtgttgcagcgcgcggttttccacgtccagtcttccggacatagcgaagtgactggcgccaatgtcctggtcgccatcttcagcgagcaggagtcccaggcggcctacctgctgcgtaaacacgaagtcagccggctcgacgtggtcaacttcatctctcacggaacgcgaaaagacgagcctaaccaggcatcggatcccagcggacagatcaacagcaatgaagagcaagcaggcggggaggatcgtatggaaaacttcaccaccaaccttaaccagcttgctcgcgttggcggtatcgacccgctgattggtcgcgacaaagagctggagcgtgccatccaggtgctgtgccgccgccgtaagaacaacccgctgctggtgggggaatctggcgtgggtaaaaccgcgattgccgaagggctggcctggcgcattgtgcagggcgacgtgccggaagtgattgccgactgcaccatctactcgctggatattggctcgctgctggcgggcaccaaataccgcggtgatttcgaaaaacgtttcaaagcgctgttaaaacagctggagcaggacaccaacagcatcctgtttatcgatgagatccacaccatcatcggcgcaggtgcggcctccggtggccaggtggatgccgctaacctgatcaaaccgctgctctccagcggcaagatccgcgtgatgggctccacgacgtaccaggagttcagcaacatctttgagaaggatcgtgcgctggcgcgtcgtttccagaaaatcgacgttaccgagccgtcggttgacgaaacggtgcagatcatcaatggcctgaaaaccaagtacgaagcgcaccacgacgtgcgttacaccgcgaaagcggtacgtgcggcggtggagctggcggtgaaatacatcaacgatcgtcatctgccggataaagcgatcgacgtgattgatgaggcgggggcgcgtgcgcgcctgatgccagccagcaagcgtaagaaaaccgtgaatgtggcggatatcgagtccgtggtggcccgcatcgcgcgtattcctgagaagagcgtttctcagagcgaccgtgatacgctgcggaccctcggcaatcgcctgaaaatgctggtctttggtcaggataaagccattgaggctttaaccgaagcgatcaagatggcccgtgctggcctggggcatgaccacaagccggtcggttccttcctgttcgccggcccgaccggggtgggtaaaaccgaggtgacggttcagctttccaaagcgctgggcattgagctgctgcgctttgatatgtccgagtatatggagcgtcataccgtcagccgtttgattggtgcgcctccgggatacgtgggctttgaccagggcggcctgcttacggacgcggttatcaagcatccgcacgcggtactgctgctcgatgaaatcgagaaagcgcacccggacgtgttcaatatcctgttgcaggtgatggacaacgggacgctgaccgataacaacgggcgcaaggccgatttccgcaacgtggtgctggtgatgaccaccaacgcgggcgtgcgggaaaccgagcgtaaatccatcggcctgatccaccaggataacagcaccgatgcgatggaagagatcaagaagatcttcacgccggagttccgtaaccgtctggacaacattatctggttcgatcatctgtctaccgaggtgattcatcaggtggtggacaagttcatcgtcgagttgcaggttcagctggatcagaaaggcgtgtcgctggaagtgagccaggaggcccgcaactggctggctgagaaaggctacgaccgtgcgatgggcgcccgtccgatggcgcgcgtgattcaggacaacctgaagaaaccgctggcaaacgagctgctgtttggctcgctggtggacggcggccaggtaacggtggggctggatcaggcgaagaacgaactgacgtacgatttccagagtgcggcgaagcacaagccggaagcggctcactga

SEQ ID NO: 116160 - DNA, 321 bp, Enterobacter cloacae
atgggtaagaccaacgattggctggattttgaccagctggcggaagataaagtgcgcgacgcgctaaaaccgccatctatgtataaagttatgttaatgaacgatgattacacgccgatggaatttgttattgacgtgctacaaaagttcttttcttatgatgttgaacgtgcaacgcaactgatgcttaccgttcattatcgtggcaaagcgatctgcggcatctttactgccgaggttgcggaaaccaaagtagcgatggtgaacgactatgcaagggagaacgagcatccgttgctgtgtacgctggaaaaggcctga

SEQ ID NO: 116161 - DNA, 222 bp, Enterobacter cloacae
atggaaatgggtactgttaagtggttcaacaacgccaaggggtttggcttcatttgccccgaaggcggcggcgaggatatcttcgctcactattccaccattcagatggatggttacaggacgctcaaagccgggcagtccgtccggttcgatgtacaccaggggccaaaaggcaatcacgccagtcttatcgtgcccgttgaagcagaaacggttgcatag

SEQ ID NO: 116162 - DNA, 1941 bp, Enterobacter cloacae
atgacggcgctgcttgagctgaatgacattcgtcgcagctatccgtccggcgacgggccggtggaggtgctgaagggcatctccctgcgcgttgaagccggtgagatggtggcgattgtcggggcgtcgggctcgggtaaatcaacgctgatgaacattcttggctgtctggataagcccaccagcggcacctatcgcgtggccgggacggatgtttccaccctggacggcgacgcgctggcgaagctgcgtcgcgagcattttggctttatttttcagcgttaccatctgctttcacacctgagcgcggcgcagaacgtggaggtgccagcggtgtatgcgggcgtcgagcgcaaaaaacgccttgaacgcgcgaaggcgctgttaacgcgtcttgggctggcggagcgtgttgattatcagccttcgcagctttcaggcggtcagcagcagcgcgtgagtattgcccgcgcgctgatgaacggcggacaggtgatcctcgctgatgagccaaccggtgcgctcgacagccattccggtgaagaggtgatggcgatcctgcatcagctgcgcgatcaggggcatacggtgattattgtcacccacgatccgcaggtggcagcgcaggcggaacgcatcattgagatccacgacggcgagctggtcagcaacccgccgccacgtcagtccagagcggcggcgccgaaagaagccttacctgcgtccaccggctggggacagttctccagcggctttcgtgaagcgctgaccatggcctggctggcgatggcggccaacaaaatgcgcaccctgctgaccatgctcggcatcattatcggtattgcctcggtggtgtcgattgtggtggtgggcgatgcggcgaaacagctggtgctggcggatattcgcgccatcgggactaacaccatcgacgtttaccccggcaaagattttggcgacgacgagccgcagtatcagcaggcgctgaaatacgacgatctggcggctattcagaagcagccgtgggtgaactccgccacgcctgccgtgtcgcaaaacctgcgtctgcgctacggcaacatcgacgtggcggccagcgctaacggcgtcagcggagattacttcaacgtctacggcatgaccttcagcgaaggggcgaccttcaacgcggaacagctggcgggcagggcgcaggtggtggtgttagacgctaactcgctcagacagcttttccccaataaaacccgtgtggtgggggaagtgatcctggtgggtaacatgcccgccacggtgattggtgtggcggaagagaaacagtccatgtttggcagcagcaagatcctgcgcgtctggctgccgtacagcaccatttccgggcgcattatgggacagtcctggctcaactccattaccgtgcgagtgaaagagggctacgacagcgcgctggcggaacagcagctcgagcggctgttaacgttgcgccacgggaaaaaggatttcttcacctggaacatggacggcctcttgaaaacggccgaaaagaccacacgtactcttcagctgttcctgacgctggtggcggtgatttcgctggtcgtcggcgggataggggtgatgaacattatgctggtgtcggtgaccgaacgtacgcgggagatcggcattcgcatggcggtcggggccagagccagcgatgtgctccagcaatttttgattgaagcggtgctggtgtgtctggtgggaggcgcgatggggattgcgctctcgatgatgatcgccttcgcgctccagctctttttaccggggtgggagattggcttctcaccgatggcgatcctcaccgcgtttttgtgctccacctttaccggcattttgtttggctggctgccggcacgaaacgcggcgcggctggatccggtggatgcgctggcgcgggaataa

SEQ ID NO: 116163 - DNA, 1116 bp, Enterobacter cloacae
atgaacctgaagggaaaacgcagaaagctgtttctgctgctggcggtagtggtgttagcgggcggattctggttatggaaggtactgaacgcgccggtaccacagtatcaaacgctgattgttcgtccgggcgagctgcaacaaaacgtgctggcgacggggaaactggatgccctgcgtaaggttgacgtgggcgcgcaggtcagcggtcagcttaaaaccctgtcagttgagattggcgataaggttaaaaaaggccagctgctgggcgtgatcgatcctgagcaggcgcaaaaccaaatccgcgaagtggaagcgacgctgatggagctgcgcgcgcagcgcgcgcaggctcaggcggagcgtaatctcgctcaggtcaccctgacgcgccagcaggcgctggcgaaaacgcaggctatctcgaaacaggatctggacacagccgccacggagctggcggtgaagcaggcgcagattggcaccatcgatgcgcaaatcaaacggaatcaggcctcgctggatacggcgaaaaccaacctcgattacacgcaaatcgttgcgccaatggccggggaagtgacgcagataaccaccctgcaaggccagacggtcatcgccgcgcagcaggcgccgaacatcctgaccctggcggatatgagcaccatgctggtgaaagcccaggtatccgaagcggacgtcattcaccttaagccggggcagaaagcctggtttacggtgctgggcgatccgcaaacccgctatgaaggggtgctgaaagatatcctgccgacgccggagaaggtcaacgacgctatcttctactatgcgcgttttgaggtgccaaacccgcagggcgtgctgcgtctggacatgaccgcccaggtgcatatccagctgaccggcgtgaaaaacgtgctgacggttccgctctccgcgctgggtgaatccgccggggacaatcgctacaaggtgaaagtgctgcgcaacggcgaaagccgcgagcgggaagtggtgattggcgcacgtaacgacaccgatgtggtggtggtaaaagggctggaagagggtgaggaagtggtcaccagcgaaaccctgcccggagccgcgcaatga

SEQ ID NO: 116164 - DNA, 957 bp, Enterobacter cloacae
atgtcttccatcgtcgatacaccttattcaacgctgccccagcctaaatcgggctggcaactgtttaaaagcctggcatcgggttccctcacgccggggctggcgtggcaaaatccggcctatcgacgtaagtttatgttgcgctcgctggcaacgccgttcaccactgcgcgcctgcttggaaaccttgcaaaacagccccgtctgatgcagatcctgcgcgtgcagcccggcctgccgtgccgcctgcaccggccgtggctgaccgtcaatatgggccgccagactacgctggacgcactgaacgatcactatgagatgatgagccgccatcttccggcgtcgctgctgaacggctacctctccagccagggcatcacgctggtgacgttaacgggcaaagaggagcagcagtttagcgttcgcctgagcgcggatgcgtttctggacaaagaaggggaagcgaccctcactttttgcgaccaccagaacacggtgctggccgagctgacctttacgctgtgcacataccagggcaagccaacgctcttcatcggcggaatgcagggggcgaaagcgcatgtcccgcacgagcacattcagctggcgaccaaagcctgtcacggactgttcccaaaacgtctgctggttgaagcggtcatgacgctggcaggcgccttcccggtcgagcagatcctcgcggtgagtaacgccacccacatctaccgcagctggcgctatcgcaagaaaaaagagggaaaattgctggctgactatgacagcttctggcgctcccttggcggacagcagcaggataacggcaactttgccctgccactgaccatgccacgcaaaccgatggaagagattgcgagtaaaaaacggtccgaataccgccgccgctatgccctgcttgatagcctgatccaacaggtttcgcaggcgactgcccgttaa

SEQ ID NO: 116165 - DNA, 1659 bp, Enterobacter cloacae
atgctactcgaacgtgtggagattgtcgggtttcgcgggattaaccgcctgtcgctgcaactggaacagaacaacgtcctgataggcgaaaatgcctggggtaaatccagcctgctggatgccctgacgctgctactttcgcccgaagagaacttgtaccacttcgttcatgatgacttctggtttccgccgggggatgtcaacggacgcgagaaacacctgcatatcattctgaccttccgcgaatccgagcccggtcgccatcgcgtgcgtcgttttcgccctatgtcgccctgctgggtgccctgtgaagatggtttccagcgtattttctatcgccttgagggcgaaatggcgcaaaacgacggggtgttaaccctgcgtgaatttcttgatgagaagggaaatccgatcccgctcgataatattgacgagcttgcccgccatcttatccgcctctcccccgtgctgcgcttacgagacgcgcgctttatgcggcggatccgtaacggcaccgtgccgaatatgcccgaggtggaggtgaccgcccgcgaactggatttcctcgcccgtgaactggtctcacggccgcagaacctcaccgacggccagatccgtcagggactgtctgccatggtgcaactgctggagcactatttctccgagcagggaacggggcaggcgcgccaccgtctgatgcgtcgccgctcgcacgatgaacaacgaagctggcgctatctcgatattatcaaccgcatgatcgaccgccccggcgggcgtacgcatcgggtgatcctgctgggattattctccacgcttttacaggcgaaagggacggtgcgcctggatcgggacgcgcgcccgctgctgctggtggaagatccggaaacgcggctgcacccgattatgctttccgtggcgtggcatcttcttaatttgctgccgttgcagcgagtcaccaccacgaattccggagagctgctctctctgacgccggtggagtatgtctgccgcctggtgcgtgaatcctcgcgggtcaccgcctaccggctcgggcccggcgggttaaatgccgaagatggccgacgaattgcgtttcatatccgttttaaccgtgcctcttccctgtttgcccgctgctggttgctggtggaaggggaaacggaaacctgggtgataaacgagctggctcgccagtgcggacaccactttgatgccgaagggatcaaagtgatcgaatttgctcagtctggcttaaaaccgctgatcaaatttgcgcgccggatggggatagagtggcacgtactggtggatggcgatgaggcaggtaaaaaatatgcggcgaccgtgcgcagcctgctcaataacgatcgtgaagaggagcgggaacatctgaccgcgctgcctgcgatggacatggagcactttatgtaccgccagggatttgacgacgtctttcaccgcgtggcgatgatcccggtagatgtgcccatgaatatgcgccgggtgattgccaaagctatccatcggtcgtcaaaaccggatttggccattgaagttgcgacggaagcgggcaggcgaggcgtggagtcggtgcccacgctgctgcgtaaaatgttctcccgcgtcctctggctggctcgcgggagggccgattaa

SEQ ID NO: 116166 - DNA, 798 bp, Enterobacter cloacae
atgttgatggtttcaaaatactggctctttgagtcgtcatccctttatggcgatataacccgcgcgcaggaatgggcgcggacgtttattattgaggtggttatgttcagaaaattagcggcagaatgctttggtacattctggctggtgtttggtggctgcggtagcgcagtactggcagccgcatttccggaattaggtattggctttgtcggcgtcgcgctggcattcggcttaactgtattaaccatggcattcgccgtggggcatatttccggcggtcatttcaacccggccgtcacattaggattatgggcgggcggacgtttcccggcgaaagatattattggctatattattgcccaggttattggcggtattattgccgcggcggtgctgtacgtaattgccagcggtaaagccggatttgacgccgcggccagcggatttgcgtcgaacggcttcggcgaacactctccaggcggctactcgatgctgtctgccatcgtgattgaaattgtgctcaccgcaggcttcctgttggtgatccacggcgcaacggacaaatacgcgcctgcgggctttgcccccatcgctattggtctggcgttgacgctgatccacctcatctccattccggtgaccaacacctccgttaacccggcgcgcagcaccgcggtggctattttccagggcggctgggcgcttgaacagctgtggctgttctgggtgatgccaattatcggcggtattctgggcggcgtgctgtatcgcaccctgctggaaaaacgcgattaa

SEQ ID NO: 116167 - DNA, 900 bp, Enterobacter cloacae
atgttctcaggactcctcatcattcttctgcccctgattgtgggctaccttattccgctgcgtcatgaatcggccttaaagcttattaatcgctttctcagctggattgtttacgtcattctgttctttatggggatcagcctggccttcctggataatctggcgacgaacttgctttccatcctgcattattctgcggttacggtagtggttattctgctgtgcaatattgctgcgctgttctggctggaacgcactattccctggaaaaatcaccaccatcaggaaaagcttccctcccgtattgcgatggcgctggaatcattaaaactgtgcggcgtggtggtactcggttttttactgggtctgaccggctgggcatttttacagcacgcaacggaagccagcgaatatacgcttattttcctgctcttcctgattggtattcagctgcgaaataatggcatgacgctgaaacagattgtccttaaccgccggggcatgatggttgccgttatcgttgtggccagctcactggcggggggagtgattaacgcctttattctcgatctgccgctgaaaaccagcctggcgatggcgtccggtttcggctggtattcgctctccggtattctgctgaccgaatcgtttggtccggtgatcggcagcgccgccttctttaacgatctggcgcgcgagctgatagccatcatgctgatccccggcctggtacgccgcagccgctctaccgcgctgggcctgtgcggggccacctcaatggactttaccctgccggtattacagcgctcgggagggctggagatggttcctgccgccatcgtacacggttttattctgagcctgctggtacccattttgatggcgttcttctcagcctga

SEQ ID NO: 116168 - DNA, 1653 bp, Enterobacter cloacae
atgttttgtgtgcaatgtgaacaaaccatccgtaccccagcaggcaacggctgctcttacgcgcagggtatgtgcggcaaaaccgcagaaacgtccgatctccaggatctgctgattgcggcgctgcaaggcttgtccgcctgggccttcaaagcccgtgaatatggcattgttgatcactatgtcgacagctttgcgccgcgcgcatttttctccacgctgaccaacgttaacttcgattctccacgcattgtgggctatgcccgcgaagcgattgccctgcgtgaagccctgaaagcgcagtgcctgaatgccgacgccagcgcccgcgtggacaacccgatggcggagctacagctggtgagcgacgacctgggcgagctacagcgtcaggccgcagaatttactcccaataaagacaaagcggcgattggcgaaaacatactcggcctgcgcctgctgtgcctgtacggtctgaaaggtgctgcggcctatatggaacacgcgcacgtactcggccagtacgacaacgctatttacgcccagtaccacaaaatcatggcctggctgggcacctggccttccgatatgaacgccctgctggaatgctcgatggaaatcggccagatgaacttcaaagtgatgagcattctggatgccggtgaaaccagcacctacggccacccaacgccaacgcaggtcaacgtcaaagcgaccgaaggcaaatgcatcctgatctccggtcatgacctgaaagatctctacaacctgctgaagcagaccgaaggcaccggcgttaacgtttatacccacggcgaaatgctgcccgcgcacggctacccggagctgcgtaaatttaagcatctgatcggtaactacggcagcggctggcagaaccagcaggtggagtttgcccgcttccctggcccaatcgtcatgacctctaactgcatcatcgacccgaccgtcggcgcgtatgacgaccgtatctggacccgcagcatcgtcggctggccgggcgtgagccaccttgaaggcgacgatttcggtccggttatcgctcaggcgcagcagatggcaggcttcccgtacagcgaaattccgcacctcatcaccgtcggttttggtcgtgaaaccctgctgggtgcggcggattccctgattgacctcgtcagccgtgaaaaactgcgtcacatcttcctgatcggcggctgtgacggcgcgcgcggggaacgtaactacttcaccgatttcgccacccgcgtaccggaagactgtctgatcctgaccctggcctgcggtaagtaccgtttcaacaagctggacttcggcaacatcgaaggtctgccgcgcctggtggatgcgggtcagtgtaacgatgcgtattcagccatcattctggcggtcacgctggcagagaaactgggctgcggcgtgaacgatctgccgctgtcgctggtgctctcctggttcgagcagaaagcgatcgttatcctgttgaccctgctctctctcggcgtgaccaacatcgtcaccgggccgaccgcgccaggcttcctgacgccggacctgctggccatcctgaacgagaaatttggtctgcgttccgtgaccaacgttgaagatgatatgaagcaactgctgagcgcgtaa

SEQ ID NO: 116169 - DNA, 969 bp, Enterobacter cloacae
atgaccatgccaacctcacaatgtccgtggcggatgcaggttcatcacatccatcaggagacgccggatgtgtggacgctgtcgctgctgtgccatgactattatccgtaccgcgcgggccagtatgcgctggtgagcgtgcgtaattcggcggatactctgcgcgcctacacgatctcctccacgccgggcgtgagcgagtacattacgctcaccgttcgtcgtattgatgacggcgcaggatccgagtggctgacccgggacgtgaagcgcggggattacatctggctgtctgacgcgcagggcgagtttacctgtgacgacaagacggaagataaattcctgctgctggcggcgggttgtggcgtgacgccgattatgtcgatgcgtcgctggctggcgaaataccgacctcaggccgacgtgcaggtgattttcagcgttcgttccccggaagatgtgatttttgccgaagaatggcgcaactatccggtgacgctggtggccgagcacaacgcgacgcacggttttgtcgcggggcgcctgagccgcgagctgctgcaaagcgtgccggatattgcgaaccgcaccgtgatgacctgcggcccggcgccgtacatggagatcgtggagaaagaagtgaaagcgctcggcgtgacccgcttcttcaaagagcagttcttcacgcctgtagcggaagcggcgaccagcgggatgaagttcacgaagctgcaaccggcgcagaccttctttgggcgggtgggcaccacgctgcttgaagcgctggaaagcaacaacgtaccggtggcggcggcctgtcgcgccggggtgtgcggatgttgcaagaccaaagtggtttccggtgagtacacggtcaccagcaccatgacgctgaccgacgcagaaatcgcagagggctatgtgctggcatgttcgtgccatccgcagggcgatcttgtgctcgcataa

SEQ ID NO: 116170 - DNA, 1719 bp, Enterobacter cloacae
atgaaacaaactgtggctgcatacatagcgaaaacccttgagcaggctggcgtaaagcgtatctggggcgtcactggcgattctctgaacggactcagcgatagccttaacaagatgaaaactattgagtggatgcccacccgccatgaagaagtcgccgcctttgccgccggtgccgaagcgcagcttacgggtgaactcgccgtctgtgcaggttcctgcggaccgggaaacctgcacctcatcaacggtctgttcgactgtcaccgcaaccatgttccggtgctggcgattgcggctcacattccgtcatctgaaatcggtagcggctattttcaggagacgcatccgcaggagctgttccgtgaatgcagccactattgcgagctggtctcatcgccggagcagatcccacaggtgctggcgatagccatgcgtaaggcgatcctgaatcgcggggtttcggtggttgtgctgccgggggacgtggcgctgaaggccgcacctgaaaccgccaccacccactggtactctgcgccccagccaaccattacccctgccgaagaagagctgaaaaagctggcacagctgctgcgatactccagcaatatcgccctgatgtgcggcagcggctgcgccggcgcgcataaagagctggtggaatttgccggtaagctgaaggcgccagttgtgcacgccctgcgcgggaaagagcacgttgaatacgataacccgtacgatgtcggcatgaccgggctgatcggtttttccagcggcttccacaccatgatgaacgccgacacgctgatcctgctcggcacccagttcccgtaccgcgcgttctacccgacggatgccaaaattatccagatcgacattaatcccggcagcatcggcgcgcacagcaaggtggatatggcgcttatcggcgatatcaaatccaccctcgccgccctgctgccgctgctggaagaaaaaacggaccgcaaattcctcgataaagccctgagcgattatcgcgatgcgcgcaaggggctggacgatctcgccaaaccgagcgaaaaagcgatccacccgcagtatctggcgcagcagatcagccacttcgccgacgacgatgccatcttcacctgcgacgtaggaacgcccaccgtctgggccgcgcgctatctgaaaatgaacggcaaacgtcgcctgcttgggtcgttcaaccatggctcaatggccaacgccatgccgcaggcgctgggtgcaaaggcgacggcaccggaacgtcaggtggtggcgatgtgcggcgacggcgggttcagtatgctgatgggggatttcctgtcggtggcgcagatgaagcttccgctcaaaatcgtggtctttaacaacagcgttctgggcttcgtggcgatggagatgaaggccggaggctacctcacggacggcaccgaactgcacgacaccaacttcgcccgcatcgccgaagcctgcggtatcaccggtattagggtggagaaagcctcagaggtggacgacgccctgcaacgcgccttcgccatcgacggcccggtgctggtggatgtggtggtcgccaaagaagagctggcgatcccgcctcaaatcaagctggaacaggccaaaggttttagcctctacatgctgcgcgccatcatcagcgggcgcggtgacgaagtgatcgaactagcaaaaaccaactggctcaggtaa

SEQ ID NO: 116171 - DNA, 1002 bp, Enterobacter cloacae
atgattgatttacgtagtgataccgttacccgtccgggccgcgccatgctcgaagagatgatggccgccccggtcggggacgacgtctacggcgatgacccgacggtcaacgaactccagcgctatgcggcagagctgagcggtaaagaggctgccctgttcctgcccaccggcacgcaggctaacctggtggcgctgctcagccactgcgagcgcggcgaggagtatatcgtcggccagggggcgcataactacctgtacgaagccggcggtgcggcggtgcttggcagcatccagccgcagccgatcgatgccgcacccgacggtacgctgccgctggacaaagtcgcggcgaaaatcaaagccgacgatattcacttcgcccgcactaaactgctgagcctcgaaaacacccataacggtaaagtcctgccgcgcgaatacctgaaagcggcatgggactttacccgcgagcgtaagctcggcctgcacgttgacggcgcacgtatcttcaacgccgtggtggagtacggctgcgagctgaaagcgatcacccaatattgcgactcgttcaccatttgcctctctaaagggctgggtacgccggtaggttccctgctggttggcagcgcggactacatcaggcgcgccaaccgctggcgcaaaatgaccggcggcgggatgcgtcaggcgggtattctggcggctgccggactgtacgccctgaaaaataacgtgtcacgcctgaaagacgatcacgacaatgcggcgtggatggcagcgcagctgcgtgaaatcggcgctgatgtcatgcgtcacgacactaacatgctgtttgtccgcgtcggcgatgagcatgctgccgcgctgggcgactttatgaaagcccgaggcgtgctgattaacgcctccccggtcgtacggctggtgatgcaccttgacgttaaccgcgagcagctgaccgaggtggtggaacactggcaggcatttttacagcgttaa

SEQ ID NO: 116172 - DNA, 1437 bp, Enterobacter cloacae
gtgccgcaacgtattctggtgctcggcgccagcgggtatatcggtcagcatctgaccactgcgttaagccagcaggggcaccaggtgctggcagcggcacgtaacacggaacgcctgcaaaagctacatttgcctggcgtgacgtgtcacaacgttgaccttagctggccgaaagcgcttcctgcgctgctggaaggggtcgatacgctttactaccttgtccacagcatgggcgaaggcggcgattttatcgcccacgagcgtcaggtggcgatgaacgttcgtgatgcgctgctgcaaacgccggtgaagcaggtgatttttttaagctcgctccaggcgcctgagcacgagcagtcagaccatctgcgcgcccgacagctgacggcagaaacgctgcggagcgcccgtatccccgttaccgaactgcgggcagggatcatcgtcggcgcggggtccgccgcgttcgaagtgatgcgcgatatggtctacaacctgcccgtgctgacgccgccgcgctgggtacgctcgcgcaccacgcccattgcgctggaaaatttactccactatctggtggcattgctggatcacccggcggagcagcatcgcgtgctggaggcggcaggtccggaagtgctgagctatcaggcgcagttcgaacattttatgcgggtgagtggccgccaccgctggctgatccccatccccttcccgacccgctggatatcggtgtggtttttgaatgtgatcacctccgtgccgccgacgaccgccaaagcgcttatccaggggttgaagcacgatctgctggcggacgatctcgcgctgcgcgccttaattccccaggaactcatccgctttgacgacgcggtgcgcaacacgctgaaagaggaagagaagctggtgaactccagcgactggggttacgacgcgcaggcgtttgcccgctggcggcccgagtacggctattatccgaaacaggcgggctgtacggtaaaaaccacggccagcctggcagcgctgtgggaagttgtgaaccagatcggcggcaaagagcgctatttcttcggcaatattctgtggcaaacgcgcggcgcgctggatctgctggtcggtcaccggctggcaaaaggccgccctgcccatccctggctgaaggtgggcgataccgtcgacagctggaaagtgattattgttgagccggaaaaacagctggcgctgctgtttggcatgaaggcgccggggctggggcggctctgcttcaccctcaaggacaacggcgaccatcgtgaactggacgttcgggcatggtggcatcctcacggaatgccgggtctgttttactggttgctgatgatcccggcacacctgtttatcttccgcggaatggcgaaacggattgcgcaactggcagaagaaaagcgggaaaataactaa

SEQ ID NO: 116173 - DNA, 1014 bp, Enterobacter cloacae
atgaaggtactggttaccggggcgaccagcggcttaggccgaaatgcggtcgagtttctgcgcaacaaaggcatcagcgtgagggccaccggtcgcaatgaggcgatgggtaagctcctgcaaaaaatgggcgctgaatttgtccatgccgatctgacggagctggtctcctctcaggccaaggtgatgctcgccggtatcgatacgctgtggcactgctccagttttacctctccgtggggtacccaggaagcctttgatctcgccaacgtgcgcgccacgcgtcgtctgggcgaatgggccgtcgcctggggcgtgcgtaactttattcatatctcctccccgtcgctctatttcgactatcaccaccatcgtgatattcaggaagatttccgcccggcgcgcttcgcctgcgagtttgcccgcagtaaagcggcgggcgaagaggtgatcgacctgctggcccagtcaaacccgcacacccgctttaccgtgctgcgtccgcagagcctgtttgggccgcacgacaaagtctttatcccgcgactggcccagatgatgcaccactacggcagcgtgctgttaccgcgcggcggcgatgcgctggtggacatgacctattacgaaaatgccgttcacgccatgtggctggcgagccagccggaatgcgataagctggtgtcgggccgcgcgtacaacatcaccaacggcgaaccctgtaccctgcgcagcattgtgcaaaggctgattgacgagttaaaaatcgactgccggatccgttctgttccttacccgatgctggacatgattgcccgcagcatggagcgctttggcagtaaatcggcgaaagagcctgcgctgacgcattacggtgtatcgaagctcaactttgattttacgctggatatttcgcgggcggagaacgagctgggatataaaccgattgtatcgctggatgaagggatagtgcgtacggcggcgtggttacgggatcacgggaagttgcaccggtaa

SEQ ID NO: 116174 - DNA, 1812 bp, Enterobacter cloacae
atgaacaaaaggacgttactgagtgtactcattgcgggagcctgcgtggcgccactcatggctcaggctgctaacctgaaggagaccagcagtgagccgtacaccatcaaagccagcgatctggcgaagaaagagaaggaactgacggacttcccgctgatggcttcggttaaagagaccatccagacgctggataacgcgcaggttgaattgattgagccaggccgggcggcgaacccggacaacgttaaacgcgttgaagggattgtgaaagccagcgactgggaatatctcttcccgctgcgcgcgcaggcctatacctacagcaacttcctgaaagccgtgggtaaattcccggcgctgtgtaagacctacaatgacggtcgtgacagcgacgccatctgccgcaaagagctggccaccatgtttgcccactttgcccaggagaccggcggccacgaaagctggcgtccggaagccgaatggcgtcaggcgctggtccacgtacgtgaaatgggctggagcgaagggcagaagggcggttataacggcgaatgtaacccggacgtctggcaggggcagacctggccttgcggtaaagataaagacggcgatttcctgagctacttcggtcgtggtgcgaaacagttgtcctacaattacaactacggcccattctctgaagcgatgtacggcgacgtgcgtacgctgctcgacaaacctgagctggtggcggacacctggctgaacctggcgagtgcgatcttcttcttcgcctatccgcagccgccaaaaccaagcatgttgcaggtgatcgacggtacatggcagccgaacgatcacgataaagccaacggtctggttccgggctttggtgtgaccacccagatcatcaacggcggcgttgagtgcggcggcccgactgaaattgcgcagtctcaaaaccgtatcaagtactacaaagagttcgcgaactacctgaaagtgcctgttccggcgaacgaagtgttgggttgcgccaacatgaagcagttcgacgaaggtggcgcaggcgccctgaagatttactgggaacaggactggggatggagcgcggatactccggacggcaaaacctactcttgccagctggtgggttaccagaccccgttcagcgcatttaaagacggtgactacagcaagtgcgtgcagcacttctttaacgtgaaaattgttaacgacgagggttcttccgagaccccggacgaaacgccggtcacgccaacaccgacgccatccgacgatgaaacgccggcaccaaccccaacgccggatgaaacgccggttgtggtgaaccacgcgccggttgcgcagattgccggtccgatcggtgcagtggaagcgggtgcgcaggtttctctgagcgccgaaggctctaccgatccagatggtaacacgctgacgtatacctggcgttcccaggatggtcagactgttaccggtcaggacaaagcggttgtgacctttacagcaccagagtctgcgacggcgcagcagtatgaagtgagcctgaccgttagcgatggcgaactgagcagcaccacgtcttacctgctgaacgtgaaagcgaaagcggcaacgccatccggagaagatacgtcttacccggcatggagcgcgaacagcaagtacaacgccggtgatatcgtgaacaaccacggtaaactattccagtgcaaaccgttcccgtacagcggctggtgtaacaatgcgccgacgtactatgaacctggcgcaggtctggcatgggctgaagcctggacggcattataa

SEQ ID NO: 116175 - DNA, 441 bp, Enterobacter cloacae
atgaaaaagttgattttgttgttattgataataagccaaagcgctctggcaaactgttggaataaagcggcgcattattatcatgtcgacccttatttactgtacgcgatagcgaatgtggaatccggaatgaacccgtatgcggttgggcaaaaccgcgatggcacgcgggatgtcgggctgatgcaaatcaacagttcgcattttaccgcgctggaaagcagaggaatcgacgaataccggttaatcacggagccatgtacttcgatcatggtcggggcttctatcctcgccgggatgatcagggtgtatggctataactgggaagccgttggcgcgtataacgccggactgaaaaaagaaaattatccgcagaggatgaaatatgcccataaggtctgggccaaatatcagcaactcaaattagcagcacgttattaa

SEQ ID NO: 116176 - DNA, 2703 bp, Enterobacter cloacae
atgaaatttatgaagccaaaatatctggcgctctttattgcggcggcaaccagctccgcatttgcagcagcgccaggggcaccgacgatcggctatggcaatgacaaatttgccctggtggaagtggatcaggcagcccaggattataacaatcttgtcaaagtgcataacgatggcgtggatgtaaaagttgagtggaacgtctggagtggtgatgcgccaacttcagcgaaagttctgctggacggacaaaccgtatggaccggcgcagccggcgcgacgggctctgcaacgtttaaagtgaaaaaaggcgggcgttatcaggagcaggttgaagtctgtaacgccagcggctgtgcgaaaagcgccagcaagctgattattgtggcagacaccgacggtagccacctgctgccgctgaatacgtctctcaaagagaataacaaagcgtttgcgaagcataccgataaagtggttgcggcctacttcccggagtggggcgtttatgaccgtaacttcccggttgataagatccctgcggcaaacctcaaccacattctttacggcttcattccaatctgtggcggtgacggcatcaacgacggcctgaaaaccattgaaggcggcaacagcttccgcgtgctccagaacgactgtaagggccgacctgactataccgtggcgatccacgacccatgggctgcgctgcaaaaaccacaggctggcgtctccggctgggacgacccgtataaaggtaactttggccagctgatggcgctgaaaaaagcgcatccggacctgaaagtgctgccatctatcggcggctggacgctctccgatcccttcttccacatgggtgacccggctatccgcgcacgctttgtctcttctgtgaaagagttcctccagacctggaaattctttgacggcgtggatatcgactgggaattccctggcggcggcggtgtgagcgaaaacctgggcaatccgcagcaggataaagcgacctataccgcgctgatgcatgacctgcgcaccatgctgaacgagctgtctgcacagacgggccgtacctatgaactgaccagcgccatcggtgcaggccgcgataagatcgaagacgtggattacactgccgctcagcagtacctcgaccacatcttcctgatgagctatgacttctacggcggctggagcaacaccgttctcggccaccaggcggcgctgcgcgcgccagcatggcgtccggacactgactacaccactgaaaatggcgttaacgcgctgctttcccagggcgtacaaccaggcaagatcgtggtgggtgcgggaatgtatggccgcggctggaccggcgtgcatggctacaccggtaacaatcctttcaccggcaccgctacaggtatggtgaaagggacctgggaacccggtgtggttgactatcgtcagatcgttaacgaatacaaaggcaaaccaggctgggaatacggctacgacgctgatgcggaagccccttacgtcttcaacaaaactaccggcgacctgatcacgtatgaagatgcgcgttcaaccacggcgaaaggtaagtatgttctggcgaataaactgggtggcctgttcgcatggtctatcgactctgacaccggtgacatcctgaacgcgatgaacgaaagcctgctgggcggcgacgctacgccggttgatccggaggtcaccaaccacgcgccaatcgcgtcctctgccgatcagaacgtgtctggcccggtaaccgtcacgctcgatggctctgcttcaagcgatcctgatggcgatgcgattacctacaaatggacccaggtctctggtccgtcggtcaccatcaccaacagcaccaaagcgaaagcgacctttaacgttgccgccgcgacgtccgaccagaccatggtgttccgcctgacggtgaccgatgcaaaaggcctgagcaacgcgattgatatccaggtggtgaacaaggcgccgaaagctaaccaggcaccggttttaaacccaatggaagcgatcacgcttgaatcaggtgaaacctatgcgctgcatgcccaggccgcggatccagacggagatgcgttgacctacgcctggagtgtaccagcagatatgcacgctaccgggtctgactccgcgaacgtgaacatcactgcgccggaagtgagctcgacgtctacctacaccctgagcgtggtggtgagcgacggtaagaccagcgtgcagtctaacgtccaggtcaccgtgaatccgaaagcggcgcctgcacctgtgccagatgacgaagacactaacccggcggatgacgttacccctccggctgatgatgtgactccaccgtctgacaaagggagctgcgatgcacctgtggatgctaacgccagcaaatatgcggcgtgggaatccagcaaaatctacaacggtggcgataccgtaagcttcgaccatctggtgtggaaagcgaagtactggacccagggcaatcagcctggcttcggtgtggatgcatgggagctggtgagcaacgtgaagatgaactggcgttctgacctggtctacaacggcggcgacactaccacctatgaaggaaacgtttaccgtgcgaaatggtggacccgtggtgataacccagccaacagcgacgtatgggtaaaagaaggcgcatcaacagactgcaaataa

SEQ ID NO: 116177 - DNA, 798 bp, Enterobacter cloacae
atgaataccttttcgctgatgcgggacgcctttccggtagggttcccgataatgagtgcgatcctgggcggcattgtgggcagttttcttggcgttgtcgccgaacgcgtaccggggatggtgatggatgaggaggggagtggcaatctgctctttccggcctcgaactgtccggtgtgccagcacgcacttgccgcgtgggaaaacatcccgctgctcagctggctgttattacggggacgctgccaccagtgcggcagcgcgatcccgctgcgactctttctggtcgaactgatctccgccttgttttttggcatcacggcctggtgcatgccggacgttcaggcgctgttctctttgtggttactggcggcttttttactgccgctggccatgatcgactggcagcatcagctgcttccggactgcctgacccagccgctgctgtgggcggggttagtgctccatgcgtttgaccacacgttgccgctacgcgatgcgctgttcggcgcggtggcgggctatctgtcgctctggctgctctactgggcttttcgtctgatcacgggacgagaaggtctgggttacggggattttaagctactggcggcgctgggcgcctggtgcggctggcaggtgttgccctccattgaactggcggcagcgttaagcggtattgtcggttatttcgccgtaaataatttaaataaaaataacctcactatttcttttggtccttatctcgcctttgctggaatagtggtgtttatgagccagcaatttgctttcacattttaa

SEQ ID NO: 116178 - DNA, 486 bp, Enterobacter cloacae
atgaaagagcgaatcgcgcagctgaagtcacgctatcagaattatagcacccgggaaaaaattattttaaaaatatgtgccgttgccattgtgggggcagtggtgtattacacgggagtgatccccctggataatatgattcaaaatagtaagtcgacgcttaaaagacaaaaagaaacccttaactggatgcgcagtgaaattgataaaaatcatcttcaggtccagatagtcaaaacgaataatccgcgtacggtggtcgagaacagcgcccatgaaattaacctttcactgacggatatgcgccaggaggggcaaactttatcgttcgtgttgaatcgggtgaatgtgtatgaattaagaagctggctgcgtgaaattaatcagacctccggcgtgagactgcaaaaaataaacctcacgccggtggaccacctcagcgacgtgaaagcgcaggtgcagctcacctggtcaaaaaacgcatga

SEQ ID NO: 116179 - DNA, 1134 bp, Enterobacter cloacae
atgaaacaggtactttttgttcgtcccgacagccgcgagggcggaaaaataatgtggtgtgagtccggcagcgagcgcgtcgaggtggtcgacagcctggagatgctggccgaacaccccctggctacgcgcgtttgtctcctgttgcccgccagcgacatgattttccgccattttacgctgccgaaaaaggtggcttctcaggcgatggccttctcgtggatggcggaagagacgctgattggcgacgtggacaacctccactggacggtactccacaaaaaaggggccgacgtcgacgccgtggccattgacgccgaccgcctgcgcgcggcattaacccgctgtcaggaggccggattaaacgtgattcaggccctgcctgatgcctggctgctacccgtgacgacagggggcagcacgctggtcgcacaggatgatagctcctggctgcgtttatcgccccatgtggcaggtgaaatggaggcaaccctgctgccgctgttaatgcagaaagccggggtcggggaagtgtggtgttacggcgatgcgcctgcgaaggtgcacgttgacgtgcagcatgcctggcagcatccgctggcactgattcagccgcagtggcaaacctgccgcgttaacctgcttcacggtgaattcagccttaaggccggtaatgggcgggcggcgaaaagtatgaaagccgcgatggtggcggcgggtgtgctgtctgttgctctgctgctggggccacgcattgcaatggcctggatgctggtgcagcaggaaaatcgggtgcaggaggagatcgtccaggtttatcagcaccatttccccagcatgcgccagcagaccaatatcaaatatcactttggtcaaagcctgaaaaaacagagcaagggattctttcttcagcttgatgagctggagaacgcccggcagtcagtccctgcgatggagatcgagctgctggaatacgatgcgcagcaaaacaccctgacgctgagcgtcagcgcgcaaaaccagcccgcgttgcaggcgtttgttaaccagaccagtgagaattttgattttaccttacagcctgtttcaacaaccgaaccgtataccgccatgatcgcagggaaacataaatga

SEQ ID NO: 116180 - DNA, 1011 bp, Enterobacter cloacae
atgaaacggatccgtcaacaacagggcgtcgccctgctggtggtgctgattttgctggtgatgatgtcggcgctggctgccaaaatcagccagcagttctgccgtaatttgcagaaaacgcattatcaggtaagccagcagcagctgcgctgggcgatgcagacccaggaaaaagtggtgaaggaccggttacagaccgacgccagcggcgagagcaagccactggccctggacggcgactggcatcagccgctggagacgcagggtgaggactatacggtcgtgagccaggtggaagatgcgcaggactgctttaacgtcaataacctgttgaccgccgacatcgcaccccaggggcaaagcgctcccggggtggcggaaaaatcgcgtaaagcgcggattgttgaacaactcctgacggaaagcggcctcagcccgggcacggcggaggcggtctatttccagctggtggattatctcgatggtgacagcaccacggcgaaggagggggccgaaagcgatgcgtgggctggcgtcgtgcccgcgcggcaaccggcaaatcagatgatgcgcagcatcgcggaaatcaaactgctgccggcgttccctgttacggcgtatccgaaggtgagcaagctgttatgcgcgctgccggacgctgccagcaaggtcgatgtcaacaccctgcaaccggaacaggccgccgtgctggcggccatgttccccggaaaactgacgcgggatgacgccgttcgcctgctggatgcgcgtccggaatcgggctgggaaaatatggaagcgttcagcaaagcgctggagcaggccttcccgcagttaaaagacgatctcccgcaggtggcggatcaattttctataaacagccggtacttccgcgtgaattacaccggcaataccgatgaattaacgcttcgcgtggtcagccagcttcaggtgaataacgaagccggtgagatcgtgacgtggcagcgtcgttaccgaatgattgaataa

SEQ ID NO: 116181 - DNA, 609 bp, Enterobacter cloacae
gtgaagaaaacgcgacgccagcgcggatttaccctgctggagatcatgattgcgctgactatcttcgcggtgatcagcaccctggcctggcaaattctggacggcgcgatgcgtaccagctcggccaccgatgccagcgccgcaaagctcaaccagcttcagcgcgcctggagtctgatggagcgtgattttttccagcttcaggcgcgcgccccgcgtaatgagccggagctgtttcgtcaggagggcgatgctcttgaactgaccaccctgaatggcgtgagcggaacggtccagctggagcgcgtgcgctggcggctggaagaggggcgtttgtatcgcgacgtctggccggtcattgacggcccggcggacgttaagcctgacgaggtgccgattgtcagcggcgtaaaatcattgcagtggcggttttatcgtcagggctggctgaccgcctggcacgacgccgcccatctgccggacggcgtggaggttacgttgacgatggaaagcggggatacctggcgctgggtgttcactacaccgggtgatatgccggaggtggccgctgccgcggcgccagcgccttcgccggagaccagaccatga

SEQ ID NO: 116182 - DNA, 381 bp, Enterobacter cloacae
atggctaacggcaacaaaaagcaaaaggggatgacgctgctggaggtgatggtcgctctggtgattttctccaccgccgcgctggcactgatgaactcggtctccctgaacgtgcgttttacccatggcctggccgataccttgcaggccagttgggtggcggaaaaccagctggcggaggcacagctcaccagaactgacttcccggatgctgaacagcaggggacggaaatcatgggcgggcgcagctggaactggcgtaagcagcgggtgaaaaccgccgacaacgtctgggcgaataccctacgcgtatatgcggaaagcgatgagagccagccggttatctccctgcgcatcattccgccgggagagagcaagtga

SEQ ID NO: 116183 - DNA, 486 bp, Enterobacter cloacae
atgaaaaatcaacgcggctttacgttgctggaaattattctggcgctggtgatatttgccagttgcgccatgatggtggtgtccaccattccttcgcgcagcggcgcggatatatttggccagcaattaaaagcgctcgttgattatggttcagaccgtgcggtgatggacggaaatattgtcgggctggtgatcgccaccgataaatatcagctggtgacgatcgccgataaaaaaggcgagcgtcactggatgccattatctgccggacgcattaacaccaaaggtgattttccggaagagatgcatgtgtcgctttcgccgcagcgtctggccgcgacggtgacctccgagccgcaggtgatctttttaccggacggtgaaatcagccgctttacgctgacgctgcaaagttacgacaaacagcaccatttccgcgtggtgtcgcacggtgcggcgccggtatcggtagaaaacgatggctaa

SEQ ID NO: 116184 - DNA, 450 bp, Enterobacter cloacae
atggctttaaaacgtaaaaacctggctcgccaggcgggctttacattgctcgaattaatggtggtcattgttattctcggcgtactggcgagtatggtggtgccaaatttaatgggcaataaggaaaaagccgatacgcaaaaagcaaccagcgatattgtcgcgctcgaaggctcgctggatatgtacaagctggataaccaccgctacccgaccacagagcagggtttgcaggcgctggtgaccaaacctgaaatcgcgccaatcccgaacggctaccgcacggacggctatatccgtcgcctgccgcaggacccctggggcaatgattatcttctggtgagcccgggtgaacacggcgcggtggacgtcttctcagccggtccggacggcgaagccaataccgccgatgacattaccaactggtctctcgataagaaagagaaataa

SEQ ID NO: 116185 - DNA, 1209 bp, Enterobacter cloacae
atggctttctacgcctggacggcaacggatgccgcggggaaaacacagcgcgggacgttacaggccgaggggcagaagcaggttcgccagtggcttcgcgagcaaaagctgatgcccgtcagcatcaccgaaacccgcgaaacggcggctggcgggaaagcgaaaaccggggtgaagctctccactccggtgctgtcgatgtttacccgtcagctttcgacgctggtcaacgccgcgctgccgctggagagcgcgctgaaagcgatctcaaagcagacggaagacaaaaagctggcggcgatggtggtggagatccgcgagaaggtggtggaaggccacaccctgttcgatgccttcagccagtttccgcgcaccttcgacaagctttactgcacgctggtgatggccggggagaaaaccggtcacctgggcgacgtgctggaaaagctggcggagtacaacgagcagcgccagaagatgaaaagcaagctgacgcaggcaatggtctacccgataaccctcaccgtggtcgccatcgcggtcatcagcatcctgctggtggcggtggtgccgcaggtgatcgagcagtttacccacatgaagcagcagctgccgatcaccacccggacgctgattgcggtaagtgatttcctgcaagcctggggcatttatattgtgggcattctggggggcggctttatcggcttcaaaacctggctgaggaatgccaaaaaccgttttcgctggcacagctggctggtgaacggctcgccgattaaaaagctggtctgcgccatcaacagcgcccgctatatccgtaccctgagcattttgcaggccagtagcgtgccgctgctagagggaatgtatatcgcgatggacggtattgaaaaccgctatgcccggcaggtgctggagcaggccgccgacaccgtgcgtcagggggcgtcgctgtatgcggcgctggaacaggcgaaattattcccccccaccatgctgtatatgattgcctccggtgaagagagcggggaattaggtaatttaatggatcgcgcggcggaaaatcaggaatcggccttacaacatcgaattacattaacgctgtcggtctttgaaccggcgctggtggtatccatggcgacgattgttttattcatcgttctgtcaatattacaaccgcttctgcaacttaataatatggtaggttaa

SEQ ID NO: 116186 - DNA, 1479 bp, Enterobacter cloacae
gtggacgaactgactaaaaccctgtgtagcagcaactacgcaaaagataacggcgttctgctttacaacaatgacgtctatatccgtgaggacaccccggcattagcactgctggaggtgcgccgggtgctgggacgcgcattcgtcccgatcaccctggcgccggaagcgtttgacgagatgctggctaaaatctggcagcagagcagcggcgtgtcgcagcagctggtggacgacatggacgcggatatcgatctgatggcgttaaccgaggagatcccggataacgaagatctgctcgataacgacgaaaactcgccggtgatccgcctgatcaacgccattctcggcgaggcggtgaaggacggcgcgtcggatattcatatcgaaaccttcgagcgcaccctgagcatacgctttcgcgttgacggcgtgctgcgcccggtgctgcaaccggcgcgtaagctcgccccgctgctggtgtcgcgtatcaaggtgatgtcgaaactcgacatcgccgagaaacgcctcccgcaggatggccgtatctccctgcgcatcggtcgcaaggccatcgacgtgcgcgtctcgaccattccgtcccagtacggcgagcgcgtggtgatgcgcctgctcgataaaagcaatctcaagcccgacatcaacaagctggggctgattgatgaagagctggagaagctgaaagggctgatcgaccgcccgcacgggatcatcctcgttaccggcccgacgggttccggtaaaagtaccacgctgtacgccatactctcggcgctgaacggccacgaacgcaacattctgaccgtggaagatccgattgagtacgagctggaaggggtggggcagacgcaggttaacccgcgcgtggacatgacctttgcccgcgggctgcgcgccattctgcgtcaggacccggacgtggtgatgatcggggaaattcgcgacggtgagaccgcccagattgcggtgcaggcgtcgctgaccggtcacctggtgatgtcgacgctgcacaccaacagtgccgcaggggcgataacccgtctgcgggatatggggctggagtccttcttaatcggttcatcgctgctcggtgtcattgcccagcgtctggtgcgtcggctgtgtacgcactgccggaccaccagtccgctggacgccaatgaaaaagcgctgttcagctttatggccgcgccgccagacgcgatttaccgcgcggtggggtgcgaacactgccgtcagagcggctatcagggccgcgccggtatccatgaattcctggtggtggacagcgccatgcgccgcgccatccatgaagataaggacgaaatgtccctcgaaacgcagctttttaagcatgcctacagcctgcgtgaaaacgggctgctgaaggtgatcggcggcgtgacgtctctggaagaggtcatgcgcgtcaccgccgaacgtgggggggatgcgtaa

SEQ ID NO: 116187 - DNA, 1917 bp, Enterobacter cloacae
atgaaaaaatttccctgggcatgcgtggcgctgaccgcattgtcgttatattccagttcgctgcttgcagctaactttagcgcaagttttaaaaatactgatattcgcgagtttatcgatacggtaggtcgcaatctcaacaaaactattctggtcgatccgtccgtccagggaaccgtctcggtcagaacctacaacgtgctgacggaggatgagtattaccagttcttcctgagcgtgctggatctctacggcctgtcggtgatcccgatggacaacggcatggtcaaagtggtgcgctcaagcgtggcgcgtaccgccggtgcgccgctggcagacagcaaaaacccgggcaaaggtgacgagattatcacccgcgtggtgcgcatggaaaacgtacccgttcgcgagctggccccgctgctgcgtcagctcaacgatgccaccggcatcgggaatgtggtccactttgagccgtccaacgtcctgctgttaaccggtaaagcctcggtggtgaaccgcctggtggatctggtgcagcgcgtcgataaagacggtattcagcgccgcgaaatcatcccgctgcgctttgcctctgccaaagagctttcggatatgttgaataacctcaacaacgaagagcagaaggggcagaatgcgccgcagctggcgaccaaggtggtggcggatgacgaaaccaatagcctggtgatcagcggctcggaagatgcgcgggcgcgtacccgttcccttatccatcagctggatcgcgagcagaataacgaggggaacacccgcgtcttctacctcaaatatgccagcgccaccaaagtggtaccggtgctgacggggattggcgagcagctgaaagacaagccgggcgcggccaaagcgaaaaccgcgagcgcctcaaccgacctgaacattaccgccgacgagtcgaccaactccctggtgatcaccgcgcagcctaacgtgatgaactccctggagaaggtgatcgacaagctggatattcgccgtccgcaggtgctggtggaagcgatcattgccgaagtgcaggacggcaacggcctggatcttggcgtgcagtggaccagcaagcacggcggcgtgcagtttggcgctaccggcctgccaatcagccagattaaaaatggcaccatgaaaggggcgagcttcacgggccttgcgaccggcttctttaacggtgatttcggtgcgctggtgaccgcgctctccaccgacggtaaaaacgacatcctctccacgccaagcgtggtcacgctggataataaagaagcgtcgttcaacgtcggtcaggatgtgccggtgctttccggttcgcaaaccaccagcggcgacaacgtctttaactcggttgagcgtaaaaccgtggggaccaagctgaagattgtgccgcaaatcaacgatggcgacatgatccacctgaagattgagcaggaagtatccagcgtcgacaacagcgcaacggaagattccagcctcggcccaaccttcaacacgcgcacgatcaataacgaagtgatggtccacagtggccagacggtggtgctcggcggtctgatggaaaatgtgaccaaacagtcggtctccaaagtgccgctgctcggcgatatcccgctggtcgggcagctgttccgctacacctcgcaggatacctctaaacgcaacctgatggtgtttattcataccaccgtcctgcgtgacgacgacaactacagcgcagcctcgaaagagaaatacgaccagatccgggtgcgccagatgcagcgagcggaagagaagaagctgggcattattgaaccgacggacaacgccgtactgccagcgttccctgccgccagcgccgcacccgcgaaaacctccgcggcacgcaatccgtttaaagagtaa

SEQ ID NO: 116188 - DNA, 774 bp, Enterobacter cloacae
atgaggttctcatttctgtcacggtggataacgccttgtattatgtttttgctgctcattttttgcggccagcaaggctatctcacctttaaagattataaaaaagttacgaataagtttgctaattctgacctacagccgctgaaaaaaacgcgcgaagacaaacccttcacgctttttacggctgccgtccgtcaggagaacttatcggctgcggcaaaacccccgctggcggcggagattgaaggcattgtgcgcagtgatgacgcctggctctccttcgctgtcatcaaaaccccgggcggccagcgaagctaccgcgagggtgaaccgctcgccgggtttaacgacgcatttattcaggaaataaacaaagataatgtggtggttaattatgaaggtgctacgcaggtactggcgttaaataaaccggactattttaaggggggcgtggagagcggcccggttacaaaatcgacgaaagatgctggcgcagagagtgtgcatcttgatgattatctggtgttaaaacccatcattgaaaaaggccgactggaaggctaccggataaacccaaggaatgcctccgccttttacagtcagtcaggtctggaaaaaggcgatgtggcgattcaggttaactctgtcgatatgaccgatgaagcaaaagcgaaaagcattattgccaactggtcgaaaatgaaagaagcggaggtcatcgtacgacgtcacgctcaccttgaaaatattcgggttaatgttctaaacaattaa

SEQ ID NO: 116189 - DNA, 1563 bp, Enterobacter cloacae
atgtatcagagtcactttaattttaaaaatccgccattcaggacaatcacccgtttatccggtgattttctggtgccttatcatcaggacgtgttcaacctgctgaaagagaaaacccagctggcgggaattatcgggcttttttgcgacgacgctccgcttctgggtcagttcatcgacgcgcttaaagccagcaacaataccgttcttgccatcaacgcgtttcccaaactgagtgccagtagcctgctgtacaaactcaacccgggaacgaaagcgattaaagatcgcatgcaggcagtggatgccgtcctgcgccagtggcaggaggggaaagcaaaatccagagtgctgacgatcgcccatgccgaagccatgaaggagagctgccgtgaagtcctgggaacgctgctcacgcgcgcccaggagctgaacttccggctcgccgtggtactgacgggtactgcggatcaggagatcctgctaaagcaacctgaaatgcgcgaatatacgcacacgcatcatgccctgcgccccctgacctgccgcgaatacctgagctatgttcaggcccagtgcgaagaacacggctgcgaaaactcgccgttgccgcctgcccgcgtgcgcaaaatgcacacgctaaccaaaggcaacatcagcaaactgaacgcgctggcgcacctgtcaatgctcgccgcctggacggaacgcgcggcgcaggtcagcccacgtcatttacgtctggcggcgggagagatcctgcccgcccaaaaacacggtaagcgcctggcgaccgtggggctgtttgcatccgtgctgtttgccgcctgcggctggtatttgacctcatcgatcggcgcacgcctgccgatccagctgccggtgcccgtcagctggaaacagcaatcgctaaaagtcgaagcgcccgtagtgccggttatcgacaacgaaatagttaatcagccggatgcgatgcatcagttgtatctcatgtgggggtatgacgcctcggccgaagatgcgctgtgccagaacgccgccaaagtgaacctgatgtgtaaacaggggaacgcgtcgccggagacgctggcgcaggaagggtatccgtgggtcagtgaactgaaaaccagcggccatcttaactatgcggtggtcgccagggtcggggacacgtccattgacctgttaatgaataaccggacctggcaggtgagccgcagctggtttaaccggcacgcgaccggcaacttcacccagctgcaccgcctgacaccggaaggtaaagacgcgatcggcgcggccagcgacagcaaagatatggcctggctggatcagcaattaagcctggcgctgagccagcccgaaacgcatgcccggatctggaccacagagatgatgaaacgcacccgcgagttccagcaaaaaatgcatctgcacgtggatggtatccccggtgaagatacgctgatgcagctgatgcgcgtgaccaacagcacgccgggcgtactgattcagaccacccgcaccaccccggacgcgaaaatgcaggagaagaaagcctaa

SEQ ID NO: 116190 - DNA, 639 bp, Enterobacter cloacae
atgtcgaccatctgtcttgcggcccagcgcagctatacaaccggggaagcggtctggttttcgtaccgtctccccagccttaaaaacgtattcggcaaaacagtgttatggctggtcgggctttgcgccatgctggttgtcggcctgtatatgcacgtctactggaacctacgccacccggcgcctgaaccggtcaacgccagcgttgcgaaaccggaaacgcagctttcggatatgcattacgtgtacgtgagtaaaccgttcccgcatccgcagcctaaagctgcgccagtgccagttgatgttccatcgatgcaggatctgccgatcaacagtgatgatggcgactggcagcaggcgcccgacggcgcggtgccacacgacgcctcacgggataccttacccgggaccgaagcgcatgagcacgataacgctcccgccagcacgggcagtgaagagtcatcattaacggaattatttaagcaggcgctaaaagagcaggagcaggattattctcaaggaaaaattcccgagccgccggttgacgaaacgcaggataattcacaagccagtgtaaaaaacagtggaaatagccgttctcctttcagtgaaaaaggagacggcgggagcaggtattaa

SEQ ID NO: 116191 - DNA, 624 bp, Enterobacter cloacae
atgttaagcatctatggaaaaaaattacgtccgcaacatgaaatggaaaagatcatttctgcaacctcaggcgttgaagaaagaacgttaaaaaaatggcagaaaatttccacctctgattccggctatattcatattatcgtcagcggtgaagtcgaatttcgacgtgaatctgacgaactgtgcatgttcaccgtcaccgggcaatgcattttcggcctgtcgtcaatgtattacaacgccacccatatgtacggccttgttcggacgaatacggttgttcgctcgatcaagaaagaggtcttcgcccagctgatgaccgaaaaaaatctgtggccagaactgaccaaagtcctttcctggtacatctgcatgctgagcaaacgtgatgatgttctggttgcccgcagtgcgtattccgttgtccgcgaatttttatatgagattaacgacctgattgttcaacaacagcgtgatattaacgtttatgattacattcaggaatacactaacctggcacgtagcactattattaaaatcctctccgatctgaaaaagggtcaatatattgtggtggaaaaaggtcgactgcttaaccttaccgcactgcctgaaaaatattaa

SEQ ID NO: 116192 - DNA, 831 bp, Enterobacter cloacae
atgaagcgttcgctctcaaccctcctgctggcgatgttgctggcaggatgcgcctcggaagagggcattgttgataaaggcgcgtacgagctggatacgcgccatcaggcgcaggcggcctacccgcgtataaaggtgctggttattcactacaccgccgatgatttcgacacctcgcttgcgaccctgaccgataaaaacgtcagctctcactatctcatccccgcaaagccgccagcttcgcagggcaaaccgcgtatctggcagctggtcccggagagcgaactggcctggcatgcgggcatcagcttctggcgtggcaccaaccgcataaatgatacctccgtcggcattgagctggaaaaccgcggctggcggaaaaccggtgacgtgaaaacctttacccccttcgaaccggggcaaattgcggcgctgatcccgcttgccagagacatcatcgcccgctacgacattaaaccgcagaacgtggtggcacactcggatatcgccccgcagcgtaaagacgatcctgggccactgtttccttggcgcgaactggcgcagcagggtatcggagcctggcccgatccggggcgcgtgaatttttatatcaacgggcgaccgcattatcagcaggttgataccgcagcactgctcgatttgctggcgcgctacggttacgaagtgccagaaaacagtacgcccgaacagcaaaaacgcatcatcatggttttccagatgcatttccgtccgcagttatggaatggcgtagcggatgtggaaaccatggcgattgccgaagcacttttagagaaatacgggcaggggtaa

SEQ ID NO: 116193 - DNA, 324 bp, Enterobacter cloacae
atgcaattttcaacaacgccaaccctggaaggtcaaccgattaccgagtactgcggcgtggtcaccggtgaggcgattctgggcgcaaacattttccgcgatttctttgccggcattcgggatatcgtcgggggtcgttccggcgcgtacgagaaagagctgcgtaaggcgcgcgagattgcttttaaggagctgggcgagcaggccaaagcgctgggcgcggatgcggtggtgggcattgatatcgactacgaaacggtcgggaaagatgccagcatgctgatggtgagcgtaagcggtacggcggtgaaaacccgtcgatga

SEQ ID NO: 116194 - DNA, 519 bp, Enterobacter cloacae
atgcgctactctgctttaacgcttttagtgccatgcgcgctggtgctcagcgcctgcacaacgccggtcacgccagcctttaaggatatcggaacccgcagcggcccttgtattgagggtggcccggatgccgtggcgcaacaattttatgattaccgtattcagcatcacggtaatgacctgaccgccctgcgcccgtacctgagcgataatctggcgaaactgctcaccgacgcttcgcgcgatccgcagcacaacgccctgctgtcatccgatccgttctccagccgcgccacgctgccggacagcgccgacgttgccagcgcgtccaccataccgaataccgacgcacgcaatattcccctgcgcgtgaagctcacccaggggacgcaaacctggcaggatgaggtgctgatgatccgtgaaggccagtgctgggcaatagacgatgtgcgctacattggcggcagcgttcatgccccggcgggcacccttcgccagtcgatcgagaaccgctaa

SEQ ID NO: 116195 - DNA, 729 bp, Enterobacter cloacae
atgagtattaaactaaacggcattaactgcttctacggcgcacaccaggcgctgttcgacattacgctgagttgcccggagggcgaaacgctggttttgctcggcccaagcggcgcgggaaaaagctcccttctgcgagttcttaatctgcttgaaatgccccgttcggggacgctggccatcgccggtaaccattttgacttcgcgaaaaccccgtctgataaagcgattcgtgaactgcgtcaaaacgtgggcatggttttccagcaatacaatctctggccgcatctgacggtggtgcaaaacctgattgaagccccgtgccgcgtgcttggcttaagcaaagaccaggcgatggcgcgtgcggaaaagctgctggaacgtctgcgtctgaaaccgtacagcgaccggtatcctttacacctctctggtggtcagcaacagcgtgtggcgatcgcccgtgcgctgatgatggagccggcagtgctgctgtttgacgagccaaccgcggcgctggacccggaaattaccgcccagatcgtgagcattattcgtgagctggcggaaaccaacattacccaggtcatcgtgacccacgaggtggaagtggcgcgcaaaaccgccagccgcgtggtttatatggaaaacgggtatatcgttgagcagggtgacgcgagctgcttcactaacccgcaaaccgatgccttcaaaaactacttatcacactaa

SEQ ID NO: 116196 - DNA, 732 bp, Enterobacter cloacae
atgaaaaaagtattgattgccgcgctgcttgctagcgtcagcctttccgctaccgcagcccagaccatccgtttcgccactgaagcgtcctaccctccgtttgaatccattgatgcgaacaacaagattgttggcttcgacgtggacctggcaaacgccctgtgtaaagagatcgacgcgacctgtaccttcagcaaccaggcgttcgacagcctgatcccaagcctgaagttccgccgtatcgatgccgtaatggccggaatggacatcactccggagcgtgaaaagcaggttctgttcaccaccccttactatgacaactcggccctgttcatcggtcagaaaggtaaatacgcctccgttgacctgctgaaaggcaagaaagtcggcgtgcagaacggcaccacgcaccagaaattcatcatggataagcatccggaaatcaccaccgtgccgtatgacagctaccagaatgcgaagctggacctgcaaaacggtcgtatcgatgcggtgttcggggacacggctgttgtgaccgaatggctgaaagcgaacgacaagctggccgccgtgggtgacaaggtgaccgataaagactacttcggtacaggtctgggtattgccgtacgtcagggcaataccgagttgcagcagaaattcaacgctgcgctggaaaaagtgaagaaagacggcacctacgaaaccatctacaaaaaatggttccagaagtaa

SEQ ID NO: 116197 - DNA, 717 bp, Enterobacter cloacae
atgaatgaaatttttcctttagcaagcgccgccgggatgaccgtcggccttgccgtttgtgcactgattatcggcctcgtactggcgatgttctttgcggtgtgggagtccgttaagtggcgccctgtcgcatggctcggttcagcgctggtgactgtgctgcgtggactgccggaaattctggtggtcctgtttatctatttcggctcctcacagctgctgttaacgctgtcggacggcttcacgattaatctcggctttgcgcagatcccggtgcagatgcagattgagaacttcgacgtcagcccgttcctgtgcggcgtgattgcgctctccctgctctattcggcctatgcgtcacaaacgctgcgcggcgcgctgaaagcggtaccgcagggtcaatgggaatccggccaggcgctgggtctgtcgaaagcggcgatcttcttccgcctggtgatgccgcagatgtggcgtcatgccctgccagggctgggtaaccagtggctggtactgctgaaagataccgcgctggtgagcctgatcagcgtgaacgatttgatgttgcaaacaaaaagtatcgccacccgtacgcaggagccgtttacctggtacatcgtcgcggcggctatctacctggtgatcacgttgctgagccagtacgttctgaagcgtattgatctgcgcgcaacgcgttttgaacggagaccaggctga

SEQ ID NO: 116198 - DNA, 669 bp, Enterobacter cloacae
atgctggattatttacccgaactgatgaaagggctgcacaccagcctgacgctgaccgtcgcgtctatcatcgtggcgctgatcctggcgctgatcttcaccatcgtcctgacgctgaaaacgccggtgctggtgtggattgtacgtggctacattacgctcttcaccggaacgccgctgctggtgcagatcttcctgatttactacggcccgggccagttcccgtcgttacaggaatatccggttatctggcatctgctctctgagccatggctctgcgccctgattgccctctccctgaacagcgcggcctataccacgcagctgttctacggcgccattcgcgcgatcccggaaggccagtggcagtcctgcggggcgctgggcatgagcaagaaggatacgctggcgatcctgctgccttatgcctttaagcgcgccctctcttcctattccaacgaagtcgtgctggtgttcaaaagtacctctctggcctacaccatcaccctgatggaagtgatgggccacggacagctgctgtacggacgcacctacgacgtgatggtgttcggtgcggcgggtctggtctatctggtggtcaacggtctgctgaccctgatgatgcgtcttatcgagcgtaaggcgctggcgtttgagcgcagaaattaa

SEQ ID NO: 116199 - DNA, 732 bp, Enterobacter cloacae
atgaaaaagttagttctggccgcattactcgcaaccttcgccgctggcgcatccgccgccgataaaatcaatttcggcgtttctgccacctatccgccgtttgaatcgctggatgccagcaaccagatcgtcggcttcgacatcgacctggcgaaagcgctgtgcaagcagatgcaggccgactgcacctttactaaccacgcatttgacagcctgatcccgtccctgaaatttaaaaagtacgacgcggtgatctccggcatggacatcacgccagagcgcagcaagcaggtcgcgttcaccgacccgtactacgcgaactctgcggtggtgattgcgaagaaaggggcttataaatctttcgacgagctgaaaggcaagcgcatcggcatggagaacggcaccacgcaccagaaatacctccaggacaagcatcctgaagtgaaaaccgtggcctacgacagctaccagaacgccattatcgacctgaaaaatggccgtattgatggcgtatttggcgacaccgcggtcgtgaatgagtggctgaaaaccaacccgcagctgggtacagcgacggagaaagtgaccgatccgcagtatttcggcactggcctcggtattgccgtgcgtccggataacaaggctctgcttgagaaactgaacggcgcgctgaaagcgatcaaagctgacggcacataccagaaaatcagcgagcagtggttcccgcaataa

SEQ ID NO: 116200 - DNA, 1470 bp, Enterobacter cloacae
atgatgcgtcgctttagcctgagccagcgcctgacgctgctgtttacggcgttactgctgctctgcgccaccgtcgcctgtgcggtgcagctctacagtagcatgcagtacggcaatgcgatggtgcagcggctctccggcgggctggcgcagcagattgtgcagcgggaagcgattgtggatgcgcagggcagggtggatcgcagcgccttaaaaccgctgttcgaccggctgatgacctttaatccgagcgtcgagctgtatgttgtctcgccaaatggcgatatcctggccgatgccgccccgccagggcacattcagcggcaaaaaattgacctcgtgccgatacagaatttcctcagcgggacggtgatgccggtgtttggcgacgatccccgaagccagaataagaaagtcttcagcgccaccccgctgcggcaggacggtgagctgaaggggtatctgtacattattttgcagggggaggagtccaacgcgctggcggagatggcctggcacaaagcgctctggagtacggcgctgtggtcgatgctgctggtggcgctgtttggtctgctggcggggttgctgctctggtactgggtgacgcgcccggttaaagagctcacgctggacgtggccgggctggagcaggacagcatcagcgcgattaagcagctggcggcccagccgcttgagcctgccggccaggatgaagtggcgatcctgcgcaatacctttatcgagctggcgcgcaaaatcacctctcagtgggatcggctggccgacagcgaccgccagcgccgggagtttatcgccaacatttcgcacgacttacgcaccccgctgacgtcgctgctgggttatctggaaacgctgtcgctgaaatccgcaacgctgtcgccgcaggagcatcagcagtacctcgctaccgcgctgcgtcaggggcaaaaggtacgccatctgtcgcagcagctgttcgagctggcgcgtcttgagcacggcggcatcaagccccagcgcgagcgttttgccatggctgaactgatttccgacgtggcgcaaaagtttgaactcgctgcccgcacgcgtgagttaaatctgcacattgacgtcccgggtccgctgccgcaggtgttggccgatgtttccatgattgaacgggtggtgacgaatctgctggataatgcgatacgccataccccagcaggtggagacattcgtctggcggtgtggcaggagaacgaccggttacaggttgaagtggccgacagcggaacgggtgttgatgccgcattacgggacgatctgttccagcgtccgtcagcgttaaatccacaggcctcgcgggagcaccggggcgggttagggctgttaatcgtgaaaagaatgctggagctgcacggcggggggatcaggctgatggagtccgtgagcggggcacggttcaggttctttgtgccgctttaa

SEQ ID NO: 116201 - DNA, 708 bp, Enterobacter cloacae
atgaagcagatcctgctggtagaagatgaccacgatatcgcggcactcctgcgtcttaacctggaagatgaaggctatgccattacccacgagcccgacgggggcaacgccttacagcgtcttgaaacacagccgtgggacgcggtgatcctcgatctgatgctgccgaatgtcgatggtctggagatttgccgccgtatccgccagatgacccgctacctgcccattatcatcattagcgcccgcagcagtgaaactgaccgtattaccggcctggaaaccggggcggatgattatctggcaaaacctttctcggtgcaggagctgattgcccgcattaaggcgctgtttcgccgtcagcaggcgatgggccaggcgcagacggacggcattattcaggcgcacggactgactatcgatccgctggcgcgcaccgtgcgccttaacggccaacacgtcgatctcaccccgcgcgaatttgaactgctctatttctttgcccgccatcccggagaggtcttttcgcggctggcactgctggagcaggtatgggggtatcagcacgaaggctacgaacacaccgtcaatacccacattaaccgcctgcgcattaaaatagagaaagatgccgccgagccggagatcgttcgcaccgtctggggcaaaggctacaaatttgcggagcagaatcatgatgcgtcgctttag

SEQ ID NO: 116202 - DNA, 1131 bp, Enterobacter cloacae
atgcagtgcgcactctatgacgccggacgctgccgctcctgtcagtggatagaacagccggtctctcaacaactcaccgccaaaatggccgacctgcaacagctgctgacagcacatgcggtgggcgagtggtgcgcacccgtaagtggcccggaacagggctttcgcaataaagccaaaatggtggtcagcggcagcgttgaaaagccgctgctggggatgctgcaccgcgacggcaccccggaagatttaaccgactgcccgctatatcccgcctcgtttgagccggtgtttagcgcgctgaaaccgtttatcgcccgggcggggttaacgccctataacgttgcccgcaggcgcggcgagctgaaataccttttgctgaccgaaagccagatcgacggcgggatgatgctgcgctttgtgctgcgttcggaaaacaagctggagcagctgcgcgcggcgcttccggggttgcaggaacagcttccgcagctcaaggttatcaccgcgaatattcagccggtgcatatggcgatcatggaaggtgagaaagagattttcttcaccgaacagcatgcgctggcggagagctttaacggcgtgccgctgtggatccgtccgcaaagcttctttcaaactaaccccaccgtcgccagcgcgctgtatgccaccgcgcgcgactgggtgcgtgcgttacaggttcatcacatgtgggatctgttctgcggcgtcggcggctttggcctgcactgtgccacgccagacatgcagctcaccggaattgagatctccgccgaagcgattgcctgcgcgaagcagtccgccgcagagctggggctgacgaatctgcacttccaggcgctggactcgacccggttcgccaccggacagggcaacgtgccggagctggtgctggtgaacccgccgcgccggggtatcggccaggcgctctgcgactacctgagccagatggcgccggagtacattgtctactccagctgtaacgcgcagaccatggcgaaggatatcgctcatctaccgggctaccgcattgaacgcgtgcagcttttcgatatgttcccgcataccgcccattatgaagtgctgacgttgttggtgaaaacgcgctaa

SEQ ID NO: 116203 - DNA, 474 bp, Enterobacter cloacae
ttgggattcttacaaaaaacacgtcattcgcacgctcgtccgaacgtccctgcactggtgcaggtggcggcgctcgccattattatgatccgctgcctggatgtgctgatgataatgaacacgctgggtccgcgcggaatgggggaatttattcaccgcagcgcgcagacgtggaatctgacgctggtgtttctcagcagcctgatgctggtgtttattgagatctactgtgcgttctcgctggtgaaaggacgtaactgggcgcgctgggtgtatctgcttacgcagatcaccgccgcaggctacctgtgggccgcctcgctgggctatggctatccggagctgttcagcatacccggtgagtcgcgacgcgagattttccattcactggtgatgcaaaaactgccggatatgctggtgctctgcctgctttatctcccggcttccagtcggcggttcttccgcctgcaataa

SEQ ID NO: 116204 - DNA, 846 bp, Enterobacter cloacae
atgaacaacttaccggtagtacgctccccgtggcgaattgcgatcctgattatcggctttaccttcctgtatgcgccaatgctgatgctggtgatctactcgttcaacagctctaagctggtcaccgtctgggcgggctggtccacgcgctggtacagcgagctgttccatgatgatgcgatgatgagcgcggtggggctgagcctgaccattgcggcgctggcggcgacgatggcctgcgtgctgggcactatcgccgcgctggtgatggtgcgctttggccgtttccgcggggcgaatggtttcgcgtttatgatcaccgccccgctggttatgccggacgtcatcaccggcctgtcgctactgctgctgtttgtcgcgctggcgcacgccatcggctggccagcggatcgcgggatgctcaccatctggctggcacatgtcaccttctgtacggcgtatgtggcggtggtgatctcctcgcgactgcgcgagctggatcgctccattgaagaggcggcgatggatctcggcgcaacgccgctgaaggtctttttcatcatcacgctgccgatgattatgccggcggtgatctccggctggctgctggcgttcacgctctcgctcgacgatctggttatcgccagctttgtgtcggggccgggcgcgacgacgctgccgatgctggtcttctccagcgtgcggatgggggtgaatccggagatcaacgccctggcgtccatcatccttggcgtggtcggaattgtcggatttatcgcctggtatttgatggcgcgcgcggaaaaacagcgtgtgcgcgatatccagcgtgcaagacgcggctga

SEQ ID NO: 116205 - DNA, 954 bp, Enterobacter cloacae
atgagcacacttgaacctccagcccgcgtcaaaaaaccgggcggtttcgcgctctggctggcgcgcatgcagatggcgcatggccgcaagctggtcatcgccatgccctatatctggctgatcctgctgtttctgctgccgttcctgatcgtctttaagatcagcctggcggagatggcgcgggcgatcccaccgtataccgatctgtgggagtgggccgacgggcagctgacgctgaccttaaacctcggtaatttcctgcaactgaccgacgatccgctctatttcgaagcctatttgcagtcgttacaggttgcggccatttctacgatttgctgcttgttgatgggctacccgctggcgtgggcagtggcgcacagcaagccgtcgacgcgaaatattttactgctgttggtcattttaccgtcgtggacgtcgttcctgatccgcgtgtacgcgtggatggggatcctgaagaataacggcatactgaataatttcctgctgtggcttggggtcatcgaccagccgctgacgatcctgcacaccaaccttgcggtgtatatcgggattgtctatgcctatctgccgtttatggtgctgccgatctatacggcgctgacgcgaatcgattactcgctggtggaagcctcgctggatctcggcgcacgcccgttgaagactttcttcagcgtcattgtgccgctcaccaaaggcgggatcatcgccggatcgatgctggtgtttatcccggcggtcggggagtttgtgatcccggaactgctcggcggcccggacagtatcatgattggccgcgtgctgtggcaggagttcttcaataaccgcgactggccggtggcctcggcggtggcgatcgtcatgttactgctgctgatcgtgccgatcatgtggttccacaaacatcagcagaaacagatgggagaccacggatga

SEQ ID NO: 116206 - DNA, 1134 bp, Enterobacter cloacae
gtgaatgacgctatcccccgcccgcaggcgaaagtccgtaaagcgctgaccccgcttcttgaaattcgtaacctcaccaaatccttcgacggccagcatgccgtggacgatgtcagcctgacgatctacaaaggtgaaatttttgctttgctcggcgcatcgggctgcggcaaatcaacactgctgcgtatgctggcaggctttgaacagcctaccgccgggcagatcgtgctggatggggtagacctctccagcgtgccgccgtaccagcggcccataaacatgatgttccagtcctatgccctgttcccgcacatgaccgttgagcagaacatcgccttcggcctgaagcaggacaaactgccgaaagccgaaatcaccgcgcgcgtggcagagatgctgagcctggtgcatatgcaggagtttgcgaagcgtaagccgcatcagctttccggcggccagcgtcagcgcgtggcgctggcaagaagtctggcgaagcgaccaaaattattactgctcgacgagccgatgggcgcgctggataaaaagctgcgcgaccggatgcagctggaagtggtggatatcctcgagcgcgtgggggtgacctgcgtgatggtgacccacgatcaggaagaggcgatgaccatggccgggcgcattgcgatcatgaatcgcggtaagttcgtgcagatcggcgagccggaagagatctatgaacacccgacaacccgctacagcgcggagttcatcggctcggtgaacgtcttcgaagggctactgaaggaacgccaggacgacggtctggtgattgaatcgccggggctggtgcacccgctgaaggttgattctgataactccgtggtggacaacgtgccggtttacgttgccctgcgcccggaaaaaataatgctttgcgatgagccgcccgccgatggctataactttgccgtgggcgaagtggtgcacattgcctatctcggcgatctgtcgatttaccatgtgcgcctgaaaagcggccagatgctcagcgcccagttacagaacgaacaccggtatcgcaagggacagccaacctggggcgacgaagtgagcctctgctgggatgcggacagttgcgtagtcctgacggtataa

SEQ ID NO: 116207 - DNA, 1113 bp, Enterobacter cloacae
atgatcgccttgaataaaaaatggttatcgggtctggttgcgggtgctctgatggccgtctctgccggcacgctcgctgcggaacaaaaaacgctgcacgtctataactggtctgactatattgcgccggacaccgtcgcgaattttgaaaaagagaccggcattaaggttgtctacgacgtattcgattccaacgaagtgctggaaggcaaactgatggcgggcagcaccggtttcgatctggtggtgccgtcggcaagcttcctggagcgtcagctgaccgccggtgtcttccagccgctggacaagagcaaattaccgaactggaaaaacctcgatccggacgtgctgaagctggtggcgaagcacgatccggagaataaatacgcgatgccttacctgtgggcgaccaccggtattggctataacgtggataaagtcaaagcggcgctgggcccggacgtcaagctggacagctgggacgtggtgctgaagccggaaaacctcgagaagctgaaaagctgcggcgtctctttcctcgatgcgccggaagagattttcgccaccgtgcttaactatctcggcaaagatcctaacagcagcaaggccgacgactacaccggtccggcaaccgacctgctcctgaagctgcgtccgaatattcgctacttccactcctctcagtacatcaacgacctggctaacggggatatctgcgtggccatcggctgggcgggcgatgtctggcaggcggcgaaccgcgcgaaagaggccaaaaacggcgtaaatgtttcctacttcattccgaaggagggggcgctggcgttcttcgacgtcttcgcgatgccggctgatgcgaaaaataaagaggaagcgtatcaattcctcaactacctgatgcgtccggaggtgattgcccacatcagcgaccatgtctactacgccaacggtaacaaggcctccgtgccgctggtgagcgaagaaatccgcaataatccggcgatctatccgccagccgatgtgtttgccaagctcttcaccctgaaagtgcaggaaccgaaaattgaccgtgtgcgtacccgcgcgtggaccaaggtgaaaagcggtaagtaa

SEQ ID NO: 116208 - DNA, 477 bp, Enterobacter cloacae
atggatttacaggtcgtacctacactggatacgttacgtcaatggctcgatgatgccggtattactttcttcgaatgcgactcctgccaggcgctgcatctgcctcacatgcaaaatttcgatggcattttcgatgccaaaatcgatctgattaacgacgtgatcctgttctcggcgctggctgaagtaaagccttctgcgctgctggcgctggcgtctgatctgtcagcgatcaacgccagttctttgacggtgaaagcgtttctcgacatacaggatgataatctgccaaagctggtggtttgccagtctttattctccggcgcggggctctccttcaagcaattcgcttggtttatgcgcctgagcgaagagcaaatttcaatggtaatgatggaagccaacgcacatcacctgctgtatagcgcggaagatgatgccgagaataatgatgcatctcccaattttctccactaa

SEQ ID NO: 116209 - DNA, 924 bp, Enterobacter cloacae
atgtctttagagaggtgcagggtgaaaattgccatattgtcccgggatggaacgctctattcatgtaaacgcctgcgagaagcggcggcgaaacgcggacatcagattgagatcctcgatccgatgtcctgctatatgaacatcgaccctgcggcatcgtcgattcattacaaaggccgcaaactcccgcattttgatgcggtgatcccccgcattggctcccagatcacctattacggtacggctgcgctgcgccagtttgaaatgctgggaagctatccgctcaacgagtccgtggcgatctcacgcgcccgcgataagctgcgctcgctgcaactgctggcgcgccaggggatcgatctgcccgtcaccgggattgcccactccccggacgacaccagcgatttaatcgacatggtgggcggtgcgccgctggttattaagctggtggaaggtacgcagggtattggggtggtactggcggagacgcgtcaggcggcggaaagcgtgatcgacgcgtttcgcggtctgaatgcccatattctggtgcaggagtatattaaagaggccaacgggtgcgacatccgctgctttgtggtgggcgatgaagtggtggccgccatagagcggcaggcaaaagagggcgacttccgctctaacctgcaccgcggcggtatcgcgcgggtggcccttattagcgagcgcgagcgcgagattgctgtgaaagcagcgcagacgctgggcctggacgtggcgggggtcgatctgctgcgtgccgggcgcgggccgctggtgatggaagtcaacgcctcgccggggctggaaggggtggaaaaaaccacaggcgtcgatattgcaggtaaaatgatcgcatggattgaacgccatgcgacgccgggattttgcctgaaaacgggcggttaa

SEQ ID NO: 116210 - DNA, 723 bp, Enterobacter cloacae
atgacgccaaccattgacctgcttcgttcccaccgttccattcgccatttcaccgatgagccgattacccaggcgcagcgggaagcgatcatcgacagcgcaagaggcacctccagctccagctttttgcagtgcagctccattatccgcatcaccgatccggcgatgcgtgagcagctggtaacgctgacgggcggacaaaagcacgttgcccaggcggctgagttctgggtgttctgcgccgattttaaccgtcatctgcaaatctgccccgaggccgagctggggctggcggaacagctgctgctgggcgtggtggatacggcgctgatggcgcaaaacgcgttcacggcggcggaatcgctggggcttggcggcgtctatattggcgggctgcgtaacaacatcgaaagcgtgacggaactgctgaagctgccgaaacacgtgctgccgctgtttggtctgtgcctcggctggccggcggataacccggatctgaagccgcgcattcctgctgcgatgctggtgcatgaaaaccactaccagccggtcgaccaggacgttctgcatcaatacgatgaagagctggcgaactactatctgacgcgcgacagcaacaaccgccgcgacacctggagcgaccatattcgtcgcaccatcatcaaggagaaccgcccgttcattcttgattacctgcacaaacagggctgggcaacgcggtag

SEQ ID NO: 116211 - DNA, 270 bp, Enterobacter cloacae
atgtttgcagtaatttttggtcgtccaggatgcccttactgtgtacgcgcgaaagagctggcagagaaactgactgaagaacgtgatgatttcaacttccgttacgtggatatccacgcggaaggcatcactaaagccgatctggaaaaaaccgtgggtaaaccggttgaaaccgtgccgcagatcttcctcgatcagaaacacatcggcggctgcactgattttgaggcctacgccaaagaacacctgggcctgtttgcggctcagtaa

SEQ ID NO: 116212 - DNA, 375 bp, Enterobacter cloacae
ttgaactttaaacgaaactgggctggcgtaatcagctgttttttgctgtttacggtcgtttgcatgtcgctcgcttttaacgtgaaaggcgccttcagagcgtccggtcatcccgagctgggcctgttgttcttcatcctgccgggggtagtcgccggttttctctcgcgtaaaggcgaggtggtgatgccgcttattggggcaatgcttgcggccccgctctgcctgcttctgatgcgcgtgctgtttctctcgtcgagaagcgtctggcaggaagtggcgtggctactgagtggcgttttctggtgtgcgctgggcgcgctctgtttcttatttacgcgcagcctgctgcaacagaggaagcaccgtaaataa

SEQ ID NO: 116213 - DNA, 1773 bp, Enterobacter cloacae
atgcaaagtgattccctgactctgaaaacagtagcccaaatagtcctttcattcaacaacttactggtaaacaagaagttaccctccgtgaatataaacgtcgcagacttgttaaatgggaattacatcctgttattatttgtggtactggcgctgggcctttgtctgggtaaattacgcctgggttcagttcaacttggtaattccattggcgttttagtcgtctccctgttattaggtcaacaacatttcagtattaacacggacgcgcttaacttaggtttcatgctgtttattttttgcgtaggcgtggaagccggtccgaactttttttccattttcttccgagacggcaaaaattacctgatgctggcgctggtgatggtcggtagcgccctgctgattgcgttagggctgggcaaactgtttggctgggacatcggcttaacggccggtatgctggcaggctcgatgacctccacgccggtgcttgttggcgcgggggatacgcttcgtcattctggcatggcaggcacgcagctttcctccgcgctagacaacctgagtctgggctatgccctgacctatctgattggtctggtgagcctgattgttggcgcgcgctatctgccaaaacttcagcatcaggatcttcagaccagcgcccagaccatcgcccgcgagcgcggcctggacacggactccaaacgtaaagtttacctgccggtgatccgcgcctaccgcgtcgggccggagctggttgcctggaccgacgggaaaaacctgcgcgagctggggatctaccgtcagaccggctgctacatcgaacgtatccgtcgtaacggcattctggcaaacccggacggtgacgcggtgctccagatgggcgatgacatcgcccttgttggctacccggacgcccacgcgcgtctcgatccgagcttccgcaacgggaaagaggtgtttgaccgcgacctgctggacatgcgtatcgtcaccgaagagattgtggtgaaaaaccacaacgccgtgggccgccgtctggcacagctgaagctgaccgaccacggttgtttcctcaaccgcgtgatccgcagccagattgaaatgcctatcgacgataacgtggtgctcaataaaggcgatgtgttgcaggtcagcggcgatgcccgacgtgttaaaaccgttgccgaccgtatcggctttatctcgatccacagccaggtgacggacctgttagccttctgcgccttcttcattgtcggcctgatgatcgggatgataaccttccagttcagcaactttagcttcggcattggtaacgcagccggtctgctgttcgccgggatcatgctgggcttcctgcgagcgaaccatcccaccttcggctatatccctcagggggcgctgaatatggtgaaagagttcggtctgatggtctttatggcgggtgtcggcttaagcgccgggagcggcattggcaacggcctgggcgcggtcggctggcaaatgttggtttccggacttatcgtcagcctggtaccggtggtgatctgtttcctgttcggcgcctacgtgctgcgcatgaaccgcgccctgctcttcggcgcgatgatgggcgcgcgcacctgcgcaccggcgatggagatcatcagcgacactgcgcgcagcaatatcccggcgctgggctatgcaggcacgtacgccatcgccaacgtgctgctgacgctggcgggtacgctgatcatcattatctggccaggactcggataa

SEQ ID NO: 116214 - DNA, 522 bp, Enterobacter cloacae
atggctataaatggaacaatgacgctaaatggtgctgactacgccccatttaatttatatggggttggcatctttatggcgcattccggacagggaacttaccgtaatcaaggaacttgtggcgcaatacaaggtgcaggcccaattcccccaggtaaatattggattgttgatcgaggctcaggaggtttcttatcctcattaaaagctcatgttcaggaccaatggaacaaaataagatccggtgcggaatttggccgtgatgagtggtttgctttatataaggatgattggggaatcgacgatggaacatgggttgatcacgtctatcgcgggctgttcagactccatcccggtacagtgtcagaagggtgtataacaatcgctcataactccgattatgcattaatccgtaacgctcttatgaacacagagcttattcaggttccatgtatgcgttcacttatggctcgcggctgtattgaggttgttgacggtggatatagctacacttgcccgtaa

SEQ ID NO: 116215 - DNA, 279 bp, Enterobacter cloacae
gtggatatagctacacttgcccgtaaatggggatcaagactgcttaaggccgtctggtttgtgttaattagctttccgctaggacgcacgctgggtccttctacagattatattaatcataatgttgcaactgctatttgcggcttcatctatggtgatgtgaatgcggaaacaatgtacgaaacatatataaacaccgatattttaatcctgtttactctcacaacggttttctatctcttaacaatgaagttattcaataaaataaggaaaaaataa

SEQ ID NO: 116216 - DNA, 492 bp, Enterobacter cloacae
atgccaatccctccctatatgtggctcaaagacgacggcggcgcagatatcaaaggctcagtagatgttcaggaccgcgaaggaagcattgagataatcggtttaagtcacggtatcaatcttcctgttaacagcgcaaatggagcgattaccggtacacgacagcactcttctatgaggatcgaaaaggaggtggatagttctaccccatatctttataaagctgccgccactggccaggcgctaaaaagcgcagaaattaagttctatcatattaacgatgccggtcaggaagtgtgctattacacagtcttcatggagaacgtgaaggtgactggggttaactgtagcgtacctaatgtgaaaatcgcggccaacgataaaattaaccacgtcgaaagcgtcagcttgcagtatgagaagatcacctggcgcattgttgatgggaacatccagcacagtgacgcctggaacgaacgcactacggcgtaa

SEQ ID NO: 116217 - DNA, 321 bp, Enterobacter cloacae
atgcttcaccccgttcagctcttcaaaaccctctccgacgaaacgcgcctctccatcgtcatgcttttgcgtgaagcgggcgagctgtgcgtctgcgatctctgctccgctaccaacgagccgcagccgaaagtctcccgccacatggccttactgcgcgaggccgggctggccatcgaccgtcgcgagggtaagtggatctactaccgtctctctcccaacatgcctgcatgggcggcaaccgttatcgacaccagctggaactgcctgcgggaagagacgcgtatgaagctgaaaaaccgacttccgggctcgtgctga

SEQ ID NO: 116218 - DNA, 1290 bp, Enterobacter cloacae
atgtttctggcaggagcgatttttttattcacactggtgctggtcatctggcaacccagagggctcagcatcggctggagcgcgaccattggcgccgcgctggcgctgatgagcggcgttatccacattaacgatatccctgtggtgtggaatatcgtctggaatgcgacggcaacgtttatcgcggttatcgttatcagcctgctgctggatgagtccggctttttcgagtgggccgcgctgcacgttgcccgctggggaaacggtcgcgggcgattgctgtttacctggatcgtgctgctgggcgcagccgtggcggcgctgtttgccaatgacggcgcggcgctgatcctcacccctatcgtcatcgctatgctgctggcgctggggttcagcaagcaggctacgctggcgttcgtgatggcggcgggatttatcgccgataccgccagcctgccgctgattgtctccaacctggtcaacattgtgtcggcggacttctttaagctgggcttcagcgaatacgcctcggtgatgatcccggttgatatcgctgcgattgccgcaacgctggtgatgctgcatctgttcttccgaaaagaaattccccacgaatatgaccaggcaaaactccgcgagcccgcacgggccattcacgacctgccaacgttcagaacgggctggatcgtgctgctgctactgcttgtcggtttctttgtgcttgaacctctgggtatcccggtcagcgctatcgcaacaactggcgcgctgattttgtttgccgttgctaaacgcgggcacgccattaacactggaaaagtgctgcgcggcgcgccgtggcaaattgttatcttctcgctggggatgtatctggtggtgtatggcctgcgcaacgccgggctgacggagtctctttcaggcgttcttgatcacttagccggatacggactctggatcaccacgctgggaaccggatttatcaccgccttcctgtcatccataatgaacaatatgccaacggtgctgattggcgcgctctccattgagggtagtgctgcaacagggttggttaaagaggcaatgatttacgctaacgtgattggctgcgatttggggccgaaaattacccccataggaagtctggctaccctgctctggctccatgtgctggcacagaaaaacatgactgttacctggggctactacttcaggacgggcatcataatgaccctgccggttctctttgtgacgctcgccgcactcgcgctacgtctctccttcacaccataa

SEQ ID NO: 116219 - DNA, 432 bp, Enterobacter cloacae
atgagctacatcaccatttatcacaaccccgcctgcggcacgtcgcgcaatacgctggagatgatccgcaacagcggtacggaaccagagattgtcctctatctggaaaacccgccgtcacgcgatcaactgaccaggctgattgcagacatggggatttccgtgtgcgatctgctgcgcaaaaacgtcgagccttatgagcaactgggccttgccgggggaaatttcaccgatgaccagcttatcgatttcatgctgcaataccccatcctgattaaccgtccgattgtggtgacaccgctgggcacccgtctgtgccgtccttctgaagtcgttctcgacatccttccggacgcgcaaaaaggggcatttacaaaggaagatggcgaagtcgtcgttgacgccagcgggaaaaaaatctcccgacaataa

SEQ ID NO: 116220 - DNA, 552 bp, Enterobacter cloacae
atgagcagaccaccgaacgaccctaaccgccgcgagaagatactccaggcgacgctggacaccattgctgagcacggtattcatgccgtcacgcaccgcaaaattgccacctgcgcaggcgtgccgctggggtcgatgacctactatttcgacgggatggagtcgcttctggaggaggcattcacgtggtttacgcagcagatgtctcagcagtaccgggatttcttcgcgggggttacggggcgcgagagggcgtgcgaggcgattaccacgctgatccacagttcagccgtgaccacgccacacaatatggcgctgatgtatcagctgtacgcgtttatgcaccgcagcgccgcgctgaaaacggtgatgcaggactggatgaagatgagccaggctacgctggagcagtggtttgatccggccaccgcccgcgcgctggatgcgtttatcgaggggatgacgctgcattttgtgaccgatcggtcgccgttaacccgggaggagatccgggtgatggtggggcggattgcaggcgaggataccgtctga

SEQ ID NO: 116221 - DNA, 1215 bp, Enterobacter cloacae
atgacgctaacttctcctcgcaaagccctgcatctgcgcatgtgggcgctatttatgttcttcttcatccccgggctgctgatggcttcctgggcaacgcgcaccccggcaatccgcgatacgctatccgtttcgacggcggagatggggatcgtgctgtttggcctgtcgattggctcgatgagcggcatcctctgctcggcctggctggtgaaacgctttggcacgcgcgcggtgatccgcaccaccatgtgctgcgccgtggtgggaatgctcggtctgagcgtggcgctgtggttcgcctcgccgctgatgtttgcccttgggctgatggtatttggcggcagctttggtgcggcggaagtggccattaacgtcgagggggccgccgttgaacaggcgatgaacaaaacggtgctgccgatgatgcatggcttttacagcctcggcacgctggcgggcgcgggcatagggatggcgctgacggcgctgggcattgcggccaatgtgcacattttactcgcggcgctggtctgtattatcccgatcctcaccggcatcagggctattcccgctggcacaggacaaaatgcctcggacgaacagaagtctgcggcaaaagggttgcccttctatcgcgatttccagctgatgctgattggcgtggtggtactggcgatggcgtttgctgaaggctccgccaacgactggctaccgttgctgatggtagacgggcacggatttagccccacctccggctcgctgatttacgccgggttcacgctcggcatgaccgtcggacgctttaccgggggctggtttatcgaccgttacagccgcgtggctgtcgtccgtgccagcgccctgctgggtgggctgggcatcgcgatgattatctttgtggatgtggactggattgccggcgtgtcggtgatcctgtggggactgggcgcctcccttggcttcccgctgaccatttccgctgccagcgataccggccccgacgcgccgacgcgcgtgagcgtcgtggcgaccacgggctacctcgctttcctggtgggcccgccgctgcttggattcctcggtgagcactacgggttacgcagcgcgatgctggtggtattagggttagtcattattgccgccctggtggcgcgagcggtggcaaaaccggaagcagaaacaacgtcaatggagaagggatatgagcgttaa

SEQ ID NO: 116222 - DNA, 813 bp, Enterobacter cloacae
atgagcgttaaactgattgcagtcgacatggatggctccttcctgagcgatgcgaaaacctataaccgcgcgcgttttctggcgcagtacgcgcgcatgaaagcgcaaggcatccgttttgtggtcgccagcggaaaccagtactaccagctgatctcatttttcccggagatcgcccatgaaattgccttcgttgccgaaaacggcggctgggtggtggatgcgggcgaagacgtgtttaacggcgaactgtcgaaagagcattttctgaccgtcgccaccctgttaaacgacgtgcccggcattgagataattgcctgcggaaaaaacagcgcctacacgctgaaaacgtataacgacctcttcaaagagattgctgcgaaatactatcaccgccttgaaagcgtcagcagctttgacaacctcaacgatattttcttcaaattcgggctaaacgtctctgacgacgaaattccgcgcattcaggcgctgctgcatgagaagcttggcgacatcatggtgccggtgaccacgggacacggcagcatcgacctgattatccccggcgtacacaaagctaacggcctgcggatcctgcaagcgcgctggggcattgaggacagtgaagtggtggcctttggcgacagcggtaacgacgtggagatgttgcgccaggcagggtatggcttcgcgatggccaatgccagaccgcacattaaggcggtggcccgctatgaagcgccgaacaataatgacgaaggggtgctggacgtaattgatagggtgctggacggggaggcgccgtttaattga

SEQ ID NO: 116223 - DNA, 1233 bp, Enterobacter cloacae
atgataaaccgttcttcttccggtaatcgtctgggtcgtcaggcgttactttttcctctgtgtctggtgctttacgaattctctacctacatcggcaacgacatgatccagccaggcatgctggctgtggttgagcagtacaacgcaggtattgagtgggtacctacatccatgaccgcctatctggcgggcggcatgtttttacagtggcttttagggccgctgtcggatcgtattggccgccgcccggtgatgctgacgggcgtggtgtggtttatcgtcacctgtctcgccacgctgctggcgcagaacattgagcaattcacgctgctgcgtttccttcagggcgtgagcctgtgctttattggcgccgtgggctacgccgctattcaggagtcgtttgaggaggcggtatgtatcaaaataaccgcgctgatggcgaacgtggcgctgattgcgccgcttctggggccgctggtgggagccgcatgggtccacgttgcgccgtgggaagggatgttcgtcctctttgccgcgcttgcggccatctctttctttgggctgcaccgtgcgatgccggagaccgccacccgcctgggcgaaaagctctcgcttaaagagctggggcgtgattataaggcggtgctgaaaaacggccgttttgtcgcgggcgcgctggcgacgggctttgtcagcctgccgctgctggcgtggattgcccagtcgccggttattatcatcagcggcgagcagcttagcagctatgagtatggcctgttacaggtgccgatttttggcgcgttgattatcggtaacctggtgctggcgcgtctgacgtcgcgtcgtaccgtgcgttcgctgattattatgggcggctggcccattgcggcagggctgattatcgcggcggtggcgaccgtagcctcgtctcatgcgtacctgtggatgacggcggggctgagcgtttacgcgtttggtattggcgtggcgaatgccggtctggtacgcctgacgctgttcgccagtgaaatgagtaaaggcacggtgtctgccgcgatggggatgctgcaaatgctgattttcactgtcggtattgaggtgagcaagcatgcctatgctttcggcggtaacggactgttcagcctgttcaatctcgcaaacggtgtgctgtgggtagggctgatggtggtgttcctgaaggacaaacgcgtcggaaacgccctgcaaccgtaa

SEQ ID NO: 116224 - DNA, 729 bp, Enterobacter cloacae
atgacacacgccgtcagcccttcagaattatctaagttaccgacaaataagacaaaaagcctttaccgtttgcctgcccgcttttatggttatcagcttttcgggctgatcgtccttgcgctgctttttacctggctttcgcgcgatgaatcgcttgaccgatggataaccggcttctggtatgacgcggcgacgcaccatttcccgctacagcaaaacccgctgctggatctgctgaaccatcggctggcgaaatatgtgaccattgcgctggctgccgcatcgctgatttacggcgcttacaaacgcaatgcccggctggtgacggccgcgcttctgatggggctgggggcgctggtagttggggtgctgaaaagcataagccaccacagctgtccgtgggatctggtggagtatggcggcaaagccgtctcgtatcccctgttcagcgccgttccggcagacagcggaccgggacgctgctttcccggcggccacgcctcaagcgggtttatggtgatggggttgttttttgccttctggcgtgaacgtccgcgcctggcctggtcctttgtcgcgttaggcgttgttatggggctgctgatgggattcgggcaggtcatgcgcggcgcgcattttttctctcacaacctgtgggccgggtggtgggtctggttttcccaggtgctggtttacgggctggtttccacctggtttgctaaagagtaa

SEQ ID NO: 116225 - DNA, 609 bp, Enterobacter cloacae
atgttagaaaatctgaactacgaactgttttacctgctcaacgccacgccagcatcaccggaatggatgatcgatctcgccaccttcattgcgaaagatgtgatcagcattgtaccggcgctggcggtgatcctctggttatggggacctcgtacacaggtcaccgcccagcgccatctggtgatcaaaatggcgatggcgatcggcgtgagcgtgctggcaagctacgtgctgggccacgccttcccgcacgatcgtccgtttgtcgatcgcgtcggctacaacttcctgcaccatgcgccggatgactcgttcccgagcgatcacggcacggtgatcttcacctttgcgctggccttcctgttctggcatcgcctgtggtctggcatggtgctgatgggggtggcggtcgccatcgcctggtcccgcgtctacctgggcgtgcactggccgctggatatggtcggcggtttcctggtggggctgatgggctgcgtcagcgcagccatcctgtggagcctctttggtccggcgctttatcgtggattatcacaggcctatcgcgttctgtttgcccttccgatccgcaaaggctggatacgtgactaa

SEQ ID NO: 116226 - DNA, 759 bp, Enterobacter cloacae
atggaaacacgtcgcgatgaccgcattgctcagctgcttcaggcgctgaagcgcagcgataagctgcatcttaaggaagccgctaccctgcttggcgtgtctgaaatgaccattcgtcgcgatctgaacagcgacagcgcccccgttgtgctgcttggcgggtatattgttctggagccgcgtagcgccagccattatctgttaagcgatcaaaaaacacgcctggtggaagagaagcgcaaagccgcgcggctcgccgcctcgctggtgcagccgcatcaaacgctgttttttgactgcggtacgacaaccccgtggatcatcgaggccatcgacagcaccgttccctttaccgccgtctgttattcgctaaacaccttcctggccttgcaggagaaaccggcgtgccgggtgattttgtgcggcggcgagtttcatgccagcaacgccatcttcaagccgctgaatattcaggacacgctgagcaatgtatgtccggatatcgccttttactctgcggcgggtgtgaatgtgaaacagggggcaacctgttttaatcttgaagagttaccggtgaaacagtgggcgctcaacgccgcacagcagcatgtgctggtggttgatcacagtaaatttggcaaggttcgtccggcaaggatgggggaactgtcgcgctttgacgccatcgtcagtgattgccgcccggatgacgagctggtgtcgtatgcaaaggcgcagcaggtgaagttgatgtattga

SEQ ID NO: 116227 - DNA, 1206 bp, Enterobacter cloacae
atgacgcaaaaaacttcttctctgcgcagcctggcggcaggctcggcgctgcttttcctttttgccccaacgctccatgcggcggaacagacggcgcccgaagcgccgcctgtcgatgcgcgcgcctggatcctgatggattacgccagcgggaaagtgctggcggaaggtaacgccgacgaaaaactcgacccggcgagcctgacgaaaattatgaccagctatgttgtcggccaggcgttgaaagcgggcaagatcaagctggatgacatggtcaccgtcggcaaagatgcctgggcgacgggtaacccggcgctgcgcggctcgtccgtcatgttcctgaagcccggcgatcaggtctccgtttccgatctgaataaaggggtcattattcagtcgggaaatgatgcctgtattgcgctggccgattacgtcgcaggcagtcaggactcattcattgggttgatgaatggctacgcgcaaaaactgggtctgaccaacaccacctttaaaaccgttcacggcctggatgcgcccggtcagttcagtaccgcgcgcgatatggcgctgctgggcaaagcgctgatccatgacgtgccggatgagtacgccatccataaagagaaagagtttaccttcaacaatatccgccagcctaaccgtaaccgtctgctctggagcagtaacgttaacgtggacggcatgaaaacggggacgaccgccggggccggatacaacctggtggcttctgcgacgcagggcgacatgcgcctgatctcggtggtgctggggacgaaaaccgaccgcattcgttttaatgaatccgaaaaactgctgacctggggtttccgcttctttgaaaccgtcacgccgattaagccggacgccaccttcgtcagccagcgcgtctggtttggggataaaagtgaagtgaacctgggggcaggtgaagcggggtccgtcaccattccacgcggtcagctgaaaaacctgaaagccagctataccctgaccgagccacagctgaccgcgccgttgaaaaaaggccaggtggtcgggacgatagatttccagcttaacggcaaatccattgagcagcgtccgctggtggtgatggaagcggtggaagaggggggcttcttcagccggatgtgggactttgtgttaatgaagttccacggctggtttggcagctggttcagctag

SEQ ID NO: 116228 - DNA, 627 bp, Enterobacter cloacae
atgattacgctgtggggcaggaacaattcgactaacgtgaagaaagtgctctggacgctggaggaactggatttaccgttcaaccaaatcatggctggcatggcgttcggggtgaataaagacgccgactatctggcgatgaacccaaacggactggtgccgttgctgcgcgatgacgagacagacgccacgctgtgggagtccaacaccatcgtgcgttatctcgccgcgcaatacggccagggtcgcctgtgggtggaaaatccggcccggcgcgcgcagggcgaaaaatggatggactgggcaaaccagacgctttcccccacgcaccgggtgatcctgatggggctgatccgcacgccggaagccgaacgtgattatcccgccattcatgccgcccaggacgcctgcgaatccctgttcgcgatgatggacgacgaactgacgaagcacgcctggttctccggcgacaccttcggcgtgggcgatatcgccgtcgcccccttcgtctggaacctcactaacatgggtcttagctggagcccgcgccctcacctggagcgctggatccagcagcttagcgaacgcccggcgtatcgcaacgtggtgatgatcccggtgacctga

SEQ ID NO: 116229 - DNA, 1119 bp, Enterobacter cloacae
atgcctcgatcctcgttgattttccttccagtcttgttattcccgctttcactgcttgcagcgcctgagacggttaaagtcgacgtgctacagacaaaactggatcacccctggtcgctggcgtttttgccagataacaaggggctgctcatcacgctcaaagacgggcagcttaagcactggcaggctggaaaagggctctccgatccgattgtcggcgtgccgaaagtgtgggcgagcggccagggcggactgctggacgtcgcgctggccccggattttgcacagtcacggcgggtctggctcagcttcgccgaggcaggtaatgatggcaaagcgggtaccgccgtgggctacgggcggttgagcgatgacatttcgcgcattgagggcttccaggtggtgttccgacagatgccgaagctctctaccggcaaccactttggcggacggctggtgttcgacggcaaaggctatctctttattggcctgggtgaaaacaaccagcgcccgacggcgcaggagctggacaagcttcagggcaaggtggtgcgcctgacggaggacggaaaagtgccgccggataatccgtttgtgaacaccgccggtgcgcgccctgaaatctggtcctatggcattcgcaacccgcaggggatggcgatgaatccgtggagcgacacgctgtggctcaacgaacacggaccacgcggtggggatgagattaacattcctgagaagggcaaaaactacggctggcccctggcgacgcacgggattaattacagcggcctgaaaatcccggaagcgaaaggcgagcacgttgagggcaccgaaaagccgctgtttgtctggaaagtatcgcccgccgtcagcggcatggcgttctacaacagcgacgtcttcccgcagtggaaaaacaagctgtttatcggcgcgctgaaggagaaagacgtcatcgtgctgagcgtgaagggcaatagcgtgacggaggacggacgcattctgggcgataaagatcagcgtattcgcgatgtgcgcgtcgggccggatggctatctgtacgtgctgactgacgagacggacgggcaactgctgaaagtcagcccgtccaggtcgtaa

SEQ ID NO: 116230 - DNA, 384 bp, Enterobacter cloacae
atgtccgttgacagactgaaacgcgatctgcttaacaagctgatcaacgcccgaatcgacctggccgcatatctgcaactccgcaaggcgaaagggtatatgtcagtcagcgaaagcgaaaatctgcgtgataacttctttgaactttgcaatttcatgcgtgaaaaagcacccatcctgaaagcgcactgcgctgaaagcgaattagtggcgctgcgccgcgccgccgaggtgctctccatcgccggagtctgtttgatgaacggacgtcacgactgcccgaattttattgccgttaacgcggagaagcttgaaaactgcctgaccacgctcgcgctttgcatcatgtgtctgaacaagccggaaacgcttgcccggcactga

SEQ ID NO: 116231 - DNA, 1326 bp, Enterobacter cloacae
atgagcaatgttacgcacccgccgaaaatcggctttgtctccctcggctgcccgaagaacctggtggactccgaacgcatcctgactgaacttcgcactgaaggctatgacgtggtgccaagctacgacaacgccgacatggtgatcgtcaacacctgcgggttcatcgacagcgcggtccaggagtcactggaagccattggtgaagccctgacggaaaacggcaaagtgattgtcaccggctgcctgggcgcgaaggtggatcagatccgcgaagtgcacccgaaagtgcttgagatcacaggcccgcacagctacgagcaggtgctggaacatgttcatcactacgtccccaaaccaaagcacaacccgttcctgagcctggtgccggaacagggcgtgaagctgacgccgcgccactacgcctacctgaaaatttccgaaggctgcaaccaccgctgtaccttctgcatcatcccgtcgatgcgtggcgatctggtgagccgtccgattggcgaggtgctggcagaagccaaacgcctggccgacgcgggcgtgaaggagctgctggtcatctcccaggacacctccgcctacggtgtggacgtcaaacaccgctccggtttccacaacggcgagccggtgaaaaccagcatggtcggcctgtgcgagcagctggctaagctcgggatctggacgcgcctgcactacgtctatccttacccgcacgttgacgatgtgatcccgctgatggcggaaggcaaaatcctgccgtatctggatatcccgctacagcacgccagcccgcgtattctgaagctgatgaaacgtcctggctccgtggatcgccaactggcgcgcatcaagcagtggagtgagatctgcccggatctgaccctgcgctccacctttattgtcggcttcccgggtgaaaccgaagaagatttccagatgctgctcgacttcctgaaagaggcgcgtctggatcgcgtcggctgcttcaagtacagcccggttgaaggcgcaaccgccaacgagctggcggaccaggtgccggaagaggtaaaagaggagcgctggaaccgctttatgcagctgcaacagcagatctcggctgaacgcttgcaggagaaagtgggccgcgaaattctggtgattatcgacgaagtggacgaagaaggcgcgattggccgcagcatggcggatgcgcctgaaatcgacggcgcggtgtacctgaacggcgaaacacaggttaagccgggtgatattattcgcgtgaaggttgaaaacgcggatgagtatgacctgtggggtagccgggtttaa

SEQ ID NO: 116232 - DNA, 912 bp, Enterobacter cloacae
atgcgattactgaactggcgtcgccaggccattttaaacgctatgccggggatcaggccggaccatattcgcaccccgtgggttgagttctggcgtcgattccgtcgtcagcccgtcgctatggtcgccgggttgtttgtgttactgctgatcctggtggcgattatcgccccctggatagccccgtttgatgcggaaaactacttcgactacgaccggctgaacgatggtccgtcgatgatgcactggtttggcgtggactcgctcgggcgcgatatttttagccgcgtgctggtaggggcgcagatctcactggcggccggggtcttcgcggtgctgatgggcgcagcaattggcaccgtgctggggctggtggccgggtactacgaaggctggtgggaccgcatcatcatgcgtatctgcgacgtgctgtttgcctttcccggtattctgctggcgattgccgtggtggcggtgatgggcagcggcatggcgaacgtcattatcgccgtggcggtattctcgattcccgctttcgcgcgtctggtacgtggcaacacgctggtgctgaagcagcagacctttatcgagtcggcgcgcagcatgggagccagcgatgccaccatcctgttcagccatattctgccgggaacggtctcgtctatcgtggtctatttcaccatgcgcataggcgtgtcgattatctcggcggccagcctgtcgtttctggggttaggggcacagccgccgacgccggagtggggggcgatgctgaacgaggcgcgggcggatatggtgattgcgccacacgtggcgatcttcccgagcctggcgattttcctgaccgtgctggcgtttaacctgctgggggatgggctgcgcgacgcgctggatccgaggattaaggggtag

SEQ ID NO: 116233 - DNA, 921 bp, Enterobacter cloacae
atgctgaattatgtgtgtaaacgcctgctggggcttatcccgacgctgctgattgtggccgtgctggtgtttttgtttgtccatatgctgcccggcgatccggcgcgtttgattgccggaccggaagcggatgcgacggttattgaactggtgcgtaaacagctcggtcttgaccagccgctgtacaggcaatttctgcgttacattggcaatgtccttcagggcgatttcggcatctcaatggtgtcgcgtcgtccggtgtcggaggagattgccagccgctttatgcctaccttctggttaacgattgccagtatgagctgggcggttgtctttggcctgggcgcggggattgtcgccgccgtctggcgcaaccgctggccggataagctcggtatggcgctggcggtcaccggcatctctttcccggcgtttgcgctgggcatgctgctgatgcagattttctccgtcgagctgggctggttgccgaccgtcggggccgacacctggaagcactacattctgccctctatgacgctaggcgcggccgttgcggcggttatggcccgatttacccgcgcctcgtttgtcgacgtgctgagcgaagattacattcgcaccgcgcgggcaaaaggggtgagtgagaaatgggtcattctgaagcatggttttcgtaatgcgatgatcccggtggtcacgatgatggggctacagttcggcttcctgctggggggctctatcgtggttgagaaggtctttaactggccggggctggggcgcctgctggtcgactcggtcgatatgcgtgactatccggttattcaggctgaagtcctgcttttctcgctggagtttattcttatcaacttagtggtggatgtgctgtacgccgccattaacccggccatcaggtataagtaa

SEQ ID NO: 116234 - DNA, 1539 bp, Enterobacter cloacae
atggttccttttgttgctcgtaaatggctgctggccgcgagcgtgacggctgcgctggccgccgcccccgcgttcgcggcgaaagatgtggtggtggctgtggggtctaacttcacgaccctggatccgtatgatgccaacgacactctttctcaggcggtggcaaaatccttctaccaggggctgttcggcctggaccgcgaaatgaagctgaaaaacgtgctggcggaaggctataccgtgtcggacgacgggctggtctataccgttaagctccgtaccggcgtgaagttccaggatggcaccgacttcaacgccgaggcggttaaggtcaacctggatcgtgccagcaatccggaaaacggtcttaaacgctacaacctgtataaaaatatcgcccaaaccgaggtggttgatccggcaacggtgaagatcaccctcaaagagccgttctcggcgtttatcaatatcctggcgcatcccgcgacggcgatgatttcgcccgccgccctgaaaaaatacggcaaagagattggattccacccggtggggaccggaccgtacgaactgctcacctggaaccagaccgattttgtgaaggtgaaaaaattcgccggatactggcagcaggggctgccgaagctggataccatcacctggcggccggtagtggacaataatacccgcgccgcaatgctgcaaaccggcgaagcgcagtttgccttcccgatcccgtacgaacaggcggcgctgctggcgaaaaacagcaagctggaactggtggccagcccgtcgatcatgcagcgctacatcagcatgaacgttacgcagaaaccgtttgataacccgaaggtgcgtgaagccatcaactacgccattaaccgccaggcgctggtgaaggtggcctttgccggctacgccaccccggcgacgggcgtgatgccgccaaccattgagtacgcgcaaagctatcagccgtggccttacgatccggcgaaagcgcgggaactgctgaaagaggcgggctatacgaacggctttagcactacgctgtggtcgtcgcataaccacagtaccgcgcagaaggtgctgcaatttacccagcagcagttggcgcaggtgggcattaaagccagggttacggcgatggatgccggacagcgagcggcggaagtggaaggcaaaggacagaaagagagcggcgtgcggatgttctacaccggctggacggcttcaaccggagaagcggactggtccctgtcgccgctgtttgcttcccagaactggccgccaacgctgttcaataccgcgttctatagtaatccgcaggtggataaagatctggccgatgccctgaaaaccaccaaaccggaagagaaagcacgcctgtacaaagaggcgcaggacattatctggaaagagtcgccgtgggtgccgctggtggtggaaaaactggtctcagcccacaacaaagcgctgaccggtttttacatcatgccggatacgggctttagctttgatgacgcggatttgaaataa

SEQ ID NO: 116235 - DNA, 1872 bp, Enterobacter cloacae
gtgccgcaccgtgaagagctggacaactgcgaagtgctggctgtccaccaactgaatattgcgtttcaggaagagcggcagttcatccccgcagtacagaatttatcgttttcgctcaggcgcggcgagacgctggcgattgttggcgaatcaggttccggtaaatccgttaccgcgctggcgctgatgcgtctgcttgagcagacgggcgggcaggtcaccagcgagcggatgctgttgcgccgtcgcaaccgtcaggttatcgatctcaacgagctcagtgcgtcccagatgcagggggtgcgcggggcagatattgcgatgatttttcaggagccgatgacctccctgaacccggtttttccggtgggcgagcagattgccgaatctatccgcctgcatcagggactgagcggtgatgaggcgctcaacgaagcaaaacggatgctggagctggtgcgtatccctgaggcgcacgcgattttgtcccgctatccgcatcagctttccggcggcatgcgccagcgggtgatgattgcgatggcgctgtcgtgccgtccggcggtgctcattgcggacgaacccaccacggcgctggatgtcaccattcaggcccagatcctgcaactgattaaggtgttgcagcaggagatggagatgggggtgattttcatcacccatgatatgggggtggtggcggatattgccgatcgggtgctggttatgcatcagggcaatgccgtggaaaccggcacggtggagcaggtctttcatgcgccggtgcatccttataccaaagcgctgctggcggcggtcccgcgtctgggggccatgaatggcagtgattttccgcgccgttttccgctgatctcacagaccgaacagggccagcaggaagacgaaaccgaacaggatacggtggttcccggcaggccaattctcgaagtgcgtgacctggtgacccgtttcccgctgcgtagcgggatcctcaatcgcgtgaagcgcgaagtgcatgcggttgaaaacgtcagttttgatctctggccgggcgaaacgctggcgctggtgggggagtccggctgcggtaaatccaccaccggacgggcgctgctcaggctggtggcgtcgcaggaggggagcatcaccttcaacggtgagcgcatcgacacgctccctaacagtaaattgcaggcggtgcgccgggatattcagtttatattccaggatccttatgcgtcgctcgatccgcgccatacggtggggtactcgattatggagccgctgcgggtgcataacctgctcgacggtgaagccgcgcagcgccgcgtcgcatggctgctggagcgcgtgggcctgaagtcggagcatgcctggcgttatccgcacgaattttctggcggtcagcgtcagcgtatctgcattgcgagggcattggccctcaatccgaaagtggtgattgcggatgagtccgtgtcagcgctggatgtctctatccgcgcgcaaattatcaatctcctgctcgatttacagcgggatttgggcattgcgtttctgtttatctcccacgatatggcggtggtggagcggatcagccatcgcgtggcggtgatgtacatggggcaaattgttgaaatcggcccccgtcgggcggtgtttgaaaacccgcagcacccttacacccgcaagctgatggctgccgtaccggttgccgatcctgagcatcgtcacgcccagcgcgtgctgttgcaggacgaaatgccgagcaatattcgtaaacggggcgaaaccctggagcgcgtggcgctgcgtgaggtgggacccggtcattttgtcgcaccaccgcgtcagggcaatgcattctcgcggttataa

SEQ ID NO: 116236 - DNA, 939 bp, Enterobacter cloacae
atgagtaaagcggttatcgcaattcatggcggtgccggggcaatcacccgtgcacagctcagtcccgagcaggagaagcgttatattgatgcgctgaacgccattgtggaaacaggccagcggatgctggaagcgggcgacagcgcgctggacgtggtgaccgaagcagtacgtctgctggaggagtgcccgctgtttaatgccggtattggctcggtctttacgcgcgatgaaacgcacgagctggatgcctgcgtgatggacggcgtcaccctgaaggcgggcgcggtagcgggtgtcagccgtctgcgtaatccggtgctggccgcgcgtctggtgatggaacaaagcccgcatgtgctgctggccggggcgggggcggaaaaatttgccgtcgagcacgggatggacacggtctcgcccgatcttttctccaccgaggagcgttaccggcaactgctggacgcccgtacagcggggatgacgcagctggaccatgccgcgccgctcgatgaacgcagcaaaatgggcacggtaggcgcggtggcgctggataaagccggtaacctcgccgccgcgacgtcgacaggcggtatgaccaacaaacttcccggtcgcgtcggcgacagcccgctgccgggggccgggtgttacgccaataacgccaccgcggcggtgtcatgcaccggcaccggcgaagtgtttatccacgcgctggcggcctacgacattaccgcgctaatggattacggcggattaagcctgagtgaggcctgcgagcgggtagtgatggagaaactgccggcgctgggcgggattggcggcttaattgcggtggatcgggagggcaacgtggctctgccgttcaacagtgaagggatgtaccgggcgtgggggtatgccggcgatgcgcccagcacaggcatttatcgtgaataa

SEQ ID NO: 116237 - DNA, 1233 bp, Enterobacter cloacae
atggattttaccgccggactgatgccgcttgagacggcactctcgcagatgcttgatcgtattactccacagcacgacgttgagacactgccgcttgtgcgctgttttggccgtattgccgcgcgcgatatcgtctcgccgctgaacgtgccggggttcgataacgcggcgatggacggctatgccgtacgtctggcggatctgcaaacgggtcagccgctgccggtggcaggtaaagcgtttgccgggcagccgttcaacggtgagtggccagcgggcacctgcgtgcgcattatgaccggggcaccggtgccaaagggctgtgaagccgtggtgatgcaggaagagaccgaacaaacggacgacggcgtgcgctttaccgccagcgtcaaagcgggacaaaatatccgccacatcggggaagacattaccctgggcgcaacggtctttgccgccgggcaaaagctgacggtcgccgaactgccggtgctggcatcgcttggcatcgcggagattgacgtggtccgcaaagtgcgcgtggcggtgttctccacgggagacgagctacagcttccgggtcagccactgaacgaggggcagatttacgacaccaaccgtctggcggtgcacctgatgcttgagcagctgggctgtgaggtgattaacctcggtatcattcctgacgatccgcaaaaactgcgcgcggcgtttatcgacgctgacgcctctgccgacgtggtgatcagctccggcggcgtatcggttggcgaagcggattacaccaaaaccctgcttgaagagctgggcgaaatcgccttctggaagctggcgattaaaccgggcaaaccgttcgcgtttggcaaacttccgcacagctggttctgtggcctgccgggtaacccggtctccgccgcgcttaccttctaccagctggtgatcccgctgctggcgaagctttcaggcaacaatgccagcccgctgccggagcgtgtgcgcgtgcgggcggcaacgcgcctcaaaaaatcaccgggccgtctcgatttccagcgcggcattctggcgcgcaacgccgacggcgagctggaggtgagcactaccgggcatcagggttcgcacatctttagctccttcagtcaggggaactgctttatcgtgctggagcgcgatcgcggccacgttgcggcgggcgaatgggttgaagtggaacgctttaaccacctgttcggaggctga

SEQ ID NO: 116238 - DNA, 753 bp, Enterobacter cloacae
atgacggtggaactgagcgacccggagatgatgcgctataaccgccagatcgtgctacgcgggtttgatttcgagggccaggaagcgctcaaggcggccagcgtgctggttgtgggcctgggcgggctgggctgcgcagcggcgcaatacctggctgcggcgggtgtcggcagcatgacgctgctggatttcgacaccgtgtcggtgtccaacctgcaacgccagacgctgcacagcgacgcgacggtcggtcagcctaaagtggaatcagcacgcacggcgctggcgcgcattaaccccaacgttcagttcaccctgattgacgcgatgctggatgacgacgcgctgtttgcgcagattgcacggcatgacctggtgctggactgcaccgataacgtcgccattcgcaaccagctcaatgcgggctgctttgcccgtaaaacgccgctgatttccggcgcggccattcgcatggaggggcaaatcaccgtcttcacctacgctgaaggagagccctgctaccgctgcctgagccgtctgtttggcgagaatgcgctgacctgcgtcgaggcgggcgtgatggcgccactggttggcgttatcggttccttgcaggcgatggaggcgatcaaagtgctggcgcactacggcacgcccgcagcgggtaaaatcgtgatgtatgacgcgatgacctgccagttccgcgagatgaagctgatgcgtaaccccgggtgtgaggtgtgtagccagtaa

SEQ ID NO: 116239 - DNA, 663 bp, Enterobacter cloacae
atggaactttatctcgacacatctgacgttgcggcagtcaaaaagctggcgcgtatcttcccgctggcgggcgtgaccactaacccaagcattgtggcggcgggtaaaacgcctctggaagagctgctgcccgcgctgcacgacgcgctgggcggcaagggccgcctgttcgctcaggtgatggcgaagaccgccgagggaatggtggaagacgcacgtaagctgcgcgcgataatcaatgacctggtggtgaaagtgcccgtgaccgctgaagggctggcggcgatcaaaatgctgaaagcagaagggatcccgacgctgggtacggcggtgtacggcgcagcacaggggatgctctccgcactggcgggggctgagtatgtggctccttatgtgaaccgcgtggacgcgcagggcggggatgggatccagacggtggtcgaactgcaacagttgctgaccctgcatgccccgcagtcaaaagtgctggcggcgagctttaaaaccccgcgccaggcgctggactgcctgctggcagggtgcgaatccatcacgctgccgctggacgtggcgcagcagtttattacctctccggccgtggatgcggcaattgtgaagtttgagcaggactggcagggggcgtttggacggacgtctatttga

SEQ ID NO: 116240 - DNA, 900 bp, Enterobacter cloacae
atgatcttcaatatacagcgttactccacccacgacggtcccggtattcgaaccgtggtattcctgaaaggctgctcgctgggctgtcgctggtgtcagaacccggaaagccgctcccgcacgcgggacgtcctgtttgatgcccgtctgtgcctggacggctgtgacctgtgtcagcaggccgcgccggggtgtgttgaacgcgcgctgaacgggctggtcattcatcgtgagaagcttaacgacgagacgctcactgccctcaccgactgctgcccgacccaggcgcttaccgtctgcggtgaagagaagcaggtggaggagattatggccgccgtgctgcgcgacaagcccttctacgaccgcagcggcggcgggatcaccctctccggcggcgagccgttcatgaacccggcgctggcacatgccctgtttaaagccagccatgaacaaggcattcataccgccgttgaaacctgccttcacgtaccatggcattatatcgagccgtcactgccgtatgtcgatctattcctggcggacctgaaacatgtggacagtgacgtatttaaacagtggaccgatggctcagccaaacggatcctggacaacctgaagcgcctggccgccgccgggaaaaaaatcaccattcgcgtgccgctgatccagggctttaacgccgatgaagcgtcggttaccgccattaccaatttcgccgccgacgaactcggcgttcacgatattcattttctgccgtatcacacgctgggcatgaacaaatacaccctgctcggccaaccctactctgcccctgacaaaccgctggataaccctgccctgctggacttcgcgcagcagtatgcctgccagaaagggttaaccgcgaccttacgaggataa

SEQ ID NO: 116241 - DNA, 2433 bp, Enterobacter cloacae
atgaccaccctgaatctcaacaccctcagcgagcgcatcaaggcgcacaaaacggcgctggtgcatatcgttaagccgccggtctgtaccgagcgcgcgcagcattacaccgaaatgtatcagcagcacatggacaagccgatcccggtacgtcgcgccctggcgctggcgcatcacctggccgagcgtaccatctggatcaagcatgacgagctgattatcggtaaccaggccagcgaagtgcgcgccgcgccgatcttcccggaatataccgtctcctggattgagaaagagattgacgatctggcggaccgcccgggcgcaggctttgcggtgagcgaagagaacaagcgcgtgctgcatgagatctgcccgtggtggcgcggccagacggtgcaggaccgctgctacggcatgttcaccgacgagcagaaaggcctgctggaaaccggcatcatcaaagcggaaggcaacatgacctccggtgacgcacacctggcggtgaatttcccgctggtgctggagaaagggcttgacggcctgcgcgcgaaagtggccgagcgccggtcgcgcatcaacctgacggtgctggacgatctgcacggcgaccagttcctgaaagccattgatatcgtgctggaagccgtaagcctgcacatcaaacgctttgccgacctggcgcgtgaaatggccgcaacagaaacccgcgacagccgccgcgacgagctgctggccatggcggaaaactgcgacatcatcgcccaccaaccgccaaaaaccttctggcaggcgctacagctgtgctacttcattcagctgatcctgcaaattgagtccaacggtcactccgtctcctttgcccgtatggaccagtacctttacccgtactaccgccgcgacgtggagctggaccagagtctggatcgcgagcacgccattgagctgctgcacagctgctggctgaagctgctggaagtgaacaaaatccgctccggctcgcactccaaagcctctgcgggcagcccgctgtatcagaacgtcaccatcggcggccagaagctggtcaacggtgaaccgatggacgcggtcaacccgctctcttacgccattctcgaatcctgcggccgtctgcgctccacccagccgaacctgagcgtgcgctaccacgcgggcatgagcaacgacttcctcgacgcctgcgtgcaggtgatccgctgcggcttcgggatgccggcgtttaacaacgatgaaatcgtgatcccggaatttatcaagctcggcgtggaacgagaggacgcgtatgactatgcggcgattggctgcatcgaaaccgccgtcggcggcaagtggggctatcgctgcaccggcatgagctttatcaacttcgcccgcgtgatgctggcggcgctggaaggcggtcgcgacgccaccagcggccaggtgttcctgccgcaggaaaaagcgctttctgccggtaatttcgggaatttcgatgaggtcatggcggcgtgggataaccagatccgctactacacccgcaaatccattgagatcgagtacgtggtggacaccatgctggaagagaacgtccacgatattctctgctcggcgctggtggacgactgtatcgaacgcgcgaaaagcattaagcagggcggcgcgaagtatgactgggtttccggcctacaggtggggatcgccaaccttggcaacagcctggcagcggtgaagaagctggtgtttgaccagggcgttatcggtcagcaacagctggcggcggcgctggcggatgacttcgaggggctgacccacgagcagctgcgccagcgcctgatcaacggcgcgccgaagtacggcaacgacgacgacagcgtggacctgctgctgacccgtgcttatcagacctacattgaagagctgaagcagtatcacaacccacgctacggccgcggcccgattgggggtaactactacgcgggcacgtcgtctatctccgcaaacgtgccgtttggcgcagcaaccatggcgacgccggacggccgtaaagcccacaccccgctggcggaaggggcaagcccggcctccggtaccgaccacctcggcccgacggcggtgattggctccgtgggtaaactgccgacggaagcgattctcggcggcgtgctgctaaaccagaagctgaacccgtcgacgctggaaaacgacagcgatcgccagaagctgatggtgctgctgcgcaccttcttcgaggtgcataaaggctggcacattcagtacaacatcgtctcccgcgaaacgctgctggaagcgaagaaacacccggatcagtatcgtgacctggtggtgcgcgtcgcgggttactcggcgttcttcaccgccctgtcgccggatgcgcaggacgatattatcgcccgtactgagcatacgctgtaa

SEQ ID NO: 116242 - DNA, 816 bp, Enterobacter cloacae
atgaccgtaaaagttatcgtcaccgatatggacggaactttccttgatgatgccaagcagtacgatcgtgaccgcttccaggcacagtttgagcagcttaaagcccgcgacattgaatttgttgtcgccagcggcaaccagtattaccagctcatctccttcttcccggagctgaaagatcagatctccttcgtcgcggaaaacggcgcgctggtcttcgatcacggcgaacagattttccacggcgaactgacgcgtcatgagtcgcagatcgtcattggcgagttgctgaaagacaaagggctgaactttgtggcctgcgggctggagagcgcgtacgtcagcgataaagcaccagaagcgttcgtgaagctgatgtcgaaacactaccatcgcttaaaacccatcagcgattaccgcgaaattgacgacgtgctgtttaaattctccctgaacctgccggacagcgatatcccgaatctggttgataaactgcatgtctccctggacggcatcatgaagccggtcaccagcggcttcggttttgtcgatttgattatccccggcctgcacaaggccaacggcatcagccgcctgcttaaacgctggaaagtctcacctcaggcgtgcgtcggcattggcgacagcggcaacgatgcggaaatgctgaagctggtaaaatactcctttgcgatgggcaacgcggcggacagcattaaagaggtcagccgttacactaccgacgataacaaccatcagggcgcgctgaatgtgattcagtccgtgctcgacgcgcactccccgttcgacgcctga

SEQ ID NO: 116243 - DNA, 1257 bp, Enterobacter cloacae
atgacctttaccagcgaaacgttgccagcggaccataaagcggcaatccgtcagatgaaacgtgaattacgcgcgcagatcggcgacgtgcaggcggtgttcgaccggctcagcgataaaatcgccacccgcgtggcggaaatcaacgctctcaaaaacaaaggcgaaaccgtctggccagtgatcccttttgccgacgtgaaaaacggcacgatcaccgccgaacagcgcgaagccgttaaacgtcgcggctgcggggtgatcaaaggccacttcccgcgcgagcaggcgctggcgtgggatcagtcgatgctcgactacctcgatctgaacaaatttgacgaggtgtacaaaggacccggcgataacttcttcggcaccttaacggcctctcgtccggagatttatccgatctactggtctcaggcgcaaatgcaggcgcgccagagtgaagagatggcgcaggtacagtcattcctgaaccgtttatggacatttgagagcaacggtaaacagtggttcgacccggacgtgagcgtgatttaccctgaccgcatccgccgccgcccgccgggaaccacctcgaaaggacttggcgcacacaccgattctggcgcgctggagcgctggctgctgcccgcttatcagcaggtgttcgcccgcgtgtttgacggcaacgtcgagaaatacgatccgtggaatgccgcgcatcgtaccgaagtggaagagtacaccgtcgataacaccaccaaatgctcggtgttccgcaccttccagggctggacggcgctgtcggatatgatccccggccaggggctgctgcacgtggtgccgatcccggaggcaatggcttacattctgctgcgtccgctgctggacgacgtgccggaagacgagctgtgcggcgtggcgccggggcgcgtgctgccgatttctgagaagtggcacccgctgctgatcgaagcgttaaccagcattccggcgctggaagccggtgattccgtgtggtggcactgcgatgtgatccactccgtcgcgccggtggaaaatcagcagggctggggcaacgtgatgtacattcctgccgcgccgatgtgcgagaagaatctcgcctatgcgaaaaaggtcaaggaagcgctggaaaccggcgcgtcaccgggcgatttcccgcgcgaggattatgagaaaagctggcagggccgctttaccgtgaacgatctcaacatccacggcaggcgcgcgctgggcatggcttaa

SEQ ID NO: 116244 - DNA, 1074 bp, Enterobacter cloacae
atggacaaaaggcttaaaatcaccgaaatcgccgcccggacgcagctctccatcagcaccgtttctcgcgtgctggcggggaaggcaaacaccagcgaaaaagcacgggcaaaggtgctggcgtgcgcgcgggagctgggggtaatggacggcatggcggcggggcgtctgctgcttaacagcctggtggtgtttgccccgcagcgggcgtttgacgagcggtccgacatcttttactaccgcgtcatccagagcgtgagcaaagggctggcctcgcacgaagttcgcctgcgttactgtgcgctggaggagaacgacagcgatgcccagctgtttctggcccgcatgaacgaagtggacacccaggcggcgatcctcctcggtatcgacgatccgcatattcacgatctggcggtagacgtgggcaaaccctgtatgctgattaactgccgggaccgccacatgcgcctgcccgccgtcgcgccggatcatcgcgcgattggcaagcgggcggcggagtacctgttcgagatggggcaccgggaggtgatgaacgtgctgtgcctgcgtcgctacaccatggagctgcgcctgtccgggatccgcgacgcgtggcacggtcataacctcaggttcagcgacaggcgcgacctgctgatggtgtccagcttcagcgccagagagacggagcagctggtaagcgagtggcttcaccagcagaaagggaaggacctgccgacggcgttcctggttggtggcgattttatggcggcggggaccatcagcgcgctgcaaaaccacggtctgcgcgtgccgcatgatgtctcggtgatgagcatcgacggctttaatctcgcggcgattcaggatgtgcccttaaccgcggtacatgttccgcgtgatgagctgggaacggaagcggtgcatatgctccagcagcggctgatgcgcccggatgcgccggtgggaacattgctgctaaacggcacgctgaccgtgcgggagtcggtacggcggatacgtcaggggaaacgacgcaccgccgttgagcgggaagggctgtatgacggttaa

SEQ ID NO: 116245 - DNA, 1302 bp, Enterobacter cloacae
atgagtcaggacatcaataacaccgtagcgacaagcaaaacacgtcgcgtcatcaggaacctgcgctggtacgtactggtgctgtttcttctcggcgtgaccgttaactacatcacccgtaactcgttaggtattctcgcccctgaactgaaagagagcctcgggatcaccaccgagcagtactcctggatcgtcggcgcgttccagatcgcctacaccattttccagcccctgtgcggctggctgattgacgttatcggcctgaaaatcggctttatggtctgcgccgggatctgggcgctgatgtgtatcttccacgcgggtgccggaagctggctgcacctggcgattctgcgcttctttatgggtgcgtccgaagccgccgccacgccagcgaacgccaaaaccatcggtgaatggttcccgaaatcagagcgccctgttgccgcaggctgggcgggggtaggcttctccattggggccatgctggccccgcctatcatctactttgctcacgcgtcgttcggctggcagggtgcgtttatgtttaccggcgtgctggcgctgctgtgggtgatcctgtggtgggcgttttatcacaacccggaacagcacccaaacctgagccgcgatgagctggcgtttatcaagcaggataacgaacctgcgccggtcaaactgcccttcctgaccgcgctgaaaaccgtctcgaagaacaaacggttctacggtatcgccatcccggcctttatggcggaaccggcctgggccgtgctgagcttctgggtgccgctgtacctcgccaaagagcacggtatggatttgaaacagatcgcgatgttcgcctggctgccgttcctggccgccgacctcggcagcgtggcgagcggctacctgacccggctctacacccgctggtttggctgcacccgcgttaactcggtggtagccagctccgtcaccggcgcgtttctgatgatttctctggccgtcgtggccgtgacccgcgacccgtatatcaccatcgtgctgatctctatcggcggcttcgggcaccagatcatctcctgcatgctgagcgccctggtcgtggagtcgttcgacaaaggccagatggcgaccgtcaacggcatgcgcggctcggcggcgtggatcgccagcttcctgttctcactgttaatcggtgtgaccgccgacaaaatcggctttaacccgctttttattgccatgggcttctttgacctgattggcgctgtcttcctggtagcatttattgctgaacgtcgcgccaagcgcgcctga

SEQ ID NO: 116246 - DNA, 2364 bp, Enterobacter cloacae
atgaaaaccctgaaaaactggaccgtagataagcagtcagcaaaccatctggaactgctgatcgataatcagcaccgcctgtgtctgtatgtgctggaagagaatctgttccgtgtgctgatcaaacgtaaaggcgagctggcgctgaaccgcacctggagcatcgcgccggaacaagatgtgccgtgggaaggccgccgtcgtgacgatgtcagcggcttcacctgccctgcctggacgctgacgcagcaggacgacacgttaaccgtagcgactgaacagctgcgcgtcaccgtccaccagccgctgtggctggagtggcactaccgcaatgaggcgggcgagtggcagccgctggtcaatgaccgcccgaccagcgcctacctgctgaacgcccacggtgacggcgtggcgcactatcttagccgtcgtaaggatgaacgtttttacggtctgggtgagaaagcgggtgatttacagcgcaacggcaaacgctatgagatgcgtaacctggacgcgatgggctataacgcggccagcaccgatccgctttacaagcacatcccgttcaccctcacccgtcgcgatgacgtgtgctacggtctgttctacgataacctgagcagctgctggctggatctgggtaacgagatcgacaactatcacaccgcctaccgccgctggcaggcggaagcgggcgatattgactactacctcttcaccggcaagcgcgtgctggacgtgacgaaagccttcgtgcgcctgacggggaaaacgctgttcggaccgaagtggagcctgggctacagcggctcgaccatgcactacaccgacgcgccggacgcgcaaaaccagctgatgaacttcatccgcctgtgcgatgagcatgccattccgtgcgactcgttccagctctcctccggctatacctcgattaacggcaagcgctacgtctttaactggaactacgacaaagtgccgcagccgaaggtgatgagccaggcgttccacgacgcggggctgcggcttgcggccaacatcaagccgtgtctgttgcaggatcatccccgctacagcgaagtggcggaacgcggcctgttcattcgtgattcagaaaccgatgcgcctgaacgttccagcttctgggatgacgaaggatcgcatctcgacttcaccaacccgcagacggtgcagtggtggcagaacggcgtgaccacgcagctgctggagatgggcatcgactccacctggaacgacaacaacgagtatgaagtgtgggacggggaagcgcgctgctatggcttcggtcaggagatcgccatcaagcacattcgcccggtgatgccgctgctgatgatgcgcgcctcgctggaagcgcagcagcgctttgcgccggagaaacgtccgtatctgatctcccgctccggctgtgccgggatgcagcgctacgttcagacctggagcggcgacaaccgcaccaactgggacaccctgcgttataacatccgcatggggctgggcatgagcctgtccggattgttcaacgtcggtcacgacgtcggcggtttctccggcgacaagccggatgccgagctgttcgtgcgctgggtacagaacggcgtgatgcacccgcgctttaccattcattcgtggaacgatgatcacacggtgaacgagccgtggatgtacccgggtgtcacgcctgcgattcgcagcgccattgaactgcgctaccgcctgctgccgtacctctacaccctgctctggcaggcgcacgccgacgacgagccgatgctgcgcccgaccttcctcgatcatgagcacgatgcgcagacctttgaagagtgcgacgacttcctgctgggccgtgacctgctggtggccagcgtcgtcgaagccgggcagcgcgagtgccgcgtctggctgccggataacgaaacgggctggtacgatttttacacccacgcgtggtatgcgggcggccaggcgatcgtccttgatgcgccgctggaaaagctgccgctgctggtacgcgccggggccggtttgccgctcagcgaacgcatccgtcacgtgagcgccgataaagacgatacccgtgagctgaaactgttcccggtgaaaggcgtcggcaccaccgccgggctgctgtttgaggatgacggcgaaagctggggctaccagaacggcaacgcgctgtgggtggaatgggagatggagtgcgacggcgcaagtatcaacctgaaggtgaatgcgcgcggcgactatcgtccggcatggaaggcgctgaaggtgtcattaccggcgggggaaaaacgtacgttgcgggtgaacggagttgaagggggcgagtgggtggtgtag

SEQ ID NO: 116247 - DNA, 1596 bp, Enterobacter cloacae
gtgttagttaccagcaacgtcactatgcagtttggcagtaagccgctgttcgaaaacatttccgtcaaatttggcggcggcaaccgttacggcctgattggtgccaacggtagcggaaaatccacctttatgaagatcctcggcggtgacctggagccaacgctcggtaacgtgtcgctcgaccctaacgagcgcatcggtaagctgcgtcaggatcagttcgccttcgaagagttcaccgtgctcgacaccgtgatcatggggcacgcggagctgtgggaagtgaagcaggagcgcgatcgtatctacggtctcgctgagatgagcgaagaagacggttacaaagtggccgacctggaaacgcaatacggcgaaatggacggctactctgcggaagcgcgtgcgggcgaactgctgctgggcgtcggtattccggttgaacagcattacggcccgatgagcgaagtcgcgccaggctggaagctgcgtgtgctgctggcacaggcgctgttctctaacccggacatcctgctgctcgacgaaccgacgaacaacctggacatcgacaccatccgctggctggagcagacgctgaacgatcgcgacagcaccatgatcatcatctcgcacgaccgtcacttcctgaacatggtgtgtacccacatggcggatctggactacggcgagctgcgcgtttatccgggcaactacgatgagtacatgacggcggcaacccaggcgcgcgagcgtctgctggccgacaacgccaagaagaaagcgcagattgctgacctgcaatccttcgtcagccgcttcagcgccaacgcctctaaatcgcgccaggcaacgtcgcgtgcccgtcagatcgacaaaatcaagctggaagaggttaaagcctccagccgtcagaacccgttcatccgcttcgagcaggacaagaagctgttccgtaacgcgctggaagtggaagccctcaccaaaggcttcgatgaaggcccgctgttcaaaaacttcaacctgctgctggaagtgggcgagaagattgccatcctcggcgccaacggcgtgggtaaatccactatgctgaaaaccctggtgggtgaactgcaaccggataacggtaccgtgaaatggtctgaaaacgcgcagattggttactacgcgcaggaccatgaatatgagtttgaaaacgatctgaccgtcttcgactggatgagccagtggaagcaggaaggcgacgacgagcaggcggtacgcagcattctggggcgtctgctgttcagccaggacgacatcaaaaagcccgccaaagtgctctccggtggtgaaaagggccgtatgctgttcggcaagctgatgatggaaaaaccgaatattctggtgatggacgaaccgactaaccacctggatatggaatctattgagtcgctgaacatggcgctggagatgtatcagggcaccctgatcttcgtctctcacgaccgggagttcgtcagctcgctggcgacccgcgtgatcgaaattacgccagagcgcgtggtggacttcaccggtaactacgaagattacctgcgcagtaaaggtatcgagagttaa

SEQ ID NO: 116248 - DNA, 921 bp, Enterobacter cloacae
atgaacatgaaattaacaacgctttttgcggcggcgttagccgtagtaggtttttgtaagaccgcgtctgcggtgacgtatcccctgccgacagacggaagccgtctggtgggtgaaaaccaggtggtgacggtgccggaagggaactctcagccgctggaatacttcgcggcgcagtatcagctcggtctgtcgaacatgctggaggcgaacccgggcgttgacccgtatctgccgaaagcgggtaccgtactcaacattccacagcagctgatcctgccggataccgtgcacgaaggtatcgtgattaacagcgccgaaatgcgtctgtattactacccgaaaggcaccaacaccgtgatcgtgctgcctatcggtatcggtcagctgggtaaagacactccgctgaactggaccaccaaagtggagcgtaagaaagcgggcccaacctggacgccgaccgccaaaatgcacgctgagtacattgctgccggcgaaccgctgccagccgttgtgcctgccggcccggataacccgatgggtctgtacgcgctgtacattggacgtctgtatgccatccacggtactaacgccaacttcggtatcggcctgcgcgtaagccacggctgcgtgcgtctgcgtaatgaagacatcaaattcctgttcgataacgtgccggtcggtacgcgcgtgcagttcattaacgaaccggtgaaagcgacgtcagagccggacggcagccgttacattgaagtgcataacccgctgtccaccagcgaagatcagatcaacaacaacgaaatcgtaccgattaagctgaccagcgcggtgcagtctgtcacctctcaggcggatgttgacacgaccattgttgaccaggcgattcagaaccgttccggtatgccggtgcgtctgaactaa

SEQ ID NO: 116249 - DNA, 717 bp, Enterobacter cloacae
atggcggcgaagtacatcaccatagcgcgggaaattaagaaacgcattatcacccagcagtacgccgccaatgaacctctgccggaccagtttgcgctggcggcggagttcagcaccagccggatgaccattcagcaggcgatgcgtcagctgatcgtagaagggctggtctatacccgacaggggcagggcacgttcatccgcaaaaatttcctccagctttcccagtgggatctctccggcagcgactacttcggggcgaccaaaacctgggaacatttaggcacggtgacgagtcaggtggtgcacttcgaactgcgcttcccgaacgagaaagagcaggcatcgctgatgataaatccggatacgccgatctatgactttatccgtctgcgtttactgaacggtgagccgatgtctctggacgctacggtaatgccgctcaatctggtgcccggtctgaacaaaacccatcttgaaagttcggtattccggtatgtacaggagacgctggggctgaagatcatgggatcgtatcgggtggtgcgggcgctgaagcccagtgcgctggatatgcaacaccttgtctgcgagccaaccgacccggtgctggaggtagagcaggtgatctatcttgaagatggtacgccgctggagtacgcccattgtcactatcgctatgaccatggcggcatcgttatcgtgaataacggataa

SEQ ID NO: 116250 - DNA, 1323 bp, Enterobacter cloacae
atgtctgaaacaaaaataacaccgcacatgcagtcttttgtcgataaatttgttgagttctcggcgcgcctggcaaaccaggtgcatcttcgctccctgcgcgatgccttcgccacggtaatgccgattttcatcctcgccggtctggctgtgctggtgaataacgtggtgttcccctggatcttagagggcgacacgctcacgcagtttaaggtgtggggcgaggcgatcatcaacggcacgctgaacatcgccgcgctgctgctggcgccgatgatcgcctggtcgctggcgcgcaacaaagatttcgacaatccggtctcggcagtggttatcgccgtcagcagtttcatcatcatgatgccgatgcgcttacagattacccccgtcggcagcgacgccacggtaaacgttacccaggtgctgacgttcgccaatatcggctccaccgggattttcgccggggtgctgattgggctgctctcaaccgagctgtttatcgccatttcacggctgaaggcgctgcacatttcgctgggggagaacgtaccgccagcggtgagcaaatcctttaccgcgctgatcccgacgatcctcacgctctccctgtttgcggtgctggcggctatactggcgaacgtgctgcacacggatctgatccatctcattacgacatttattcagcagccgctgcggctgatcaacaccagcctgcccgggacgatcttcatttacagcttcggtaacttcctgttcacgctcggtattcatcagtcggtggtcaacagcgtggtgctggagccattcctgctgatcaataccaatgagaatatgctggcctttgccaacggccagccgatcccgcacatcatcaacaacatctttgtgccgacctttggcatggtgggcgggacgggcagcacaatctcattgctgattgctatcttcatcttctcaagacagaaatcagcgaagcaggtggcgcgtctgtcgctggcgccgggtctgtttaacatcaacgagccggtgattttcggcctgccgatagtctttaacctgccgctaatgatcccgtttgtgctgctgcccgctatcgggatttactttgcgtggctctgtaccacgctggggctcatgtcgcgctgcgtggtgatgatcccgtggacgaccccgccgatcctcagcgcctggctggcaacggcgggggactggcgggcggtggtggtgcagttggcaatcatcgtatttggtgtattcttctacctgcctttcctcaaagttgccgagcgagtggcgttgaaaaacagcgggacagaacactaa

SEQ ID NO: 116251 - DNA, 1377 bp, Enterobacter cloacae
atgaatcaatcactgccagccaacttcttatggggcaactcggtgtcgagcatgcagacggaaggggcctggaatgagggcggaaaggggatgtcggtgtacgacattcgcgaagccggtgaaaatatctctgactggaaagtggccaccgactcctaccaccgctaccgggaagatttcgacctgatgcaggatctgggcatgaactgctaccgcttccagatctcctggagccgcgtctgcccgcagggtgacggcgattttaacgacgagggtatcgccttttacgaccgttttatcgacgatctgatcgcccgcggtatcgagccgatggtctgcctctaccacttcgatatgccgctggcgctggcgcaggagtacaacggatttaacgatcgtcgcgtcgtggaggcgtttatccgctacggcaaaaagatgatcgactgctttggtgaccgggtgaagtactggctgacctttaacgagcagaatattttccacatgccgatagcctttcgcatctccggctataggaagggggaggaaaccctgcgcgagctgtacgaagtgcagcatcacaccatggtggcgcacatggcgctgaccgagtacctgcaccagactaagccgggcaagctgatgggcggcatgctggcgcaccagctgatttatccggccacctgcaaaccgcgtgacatcttctgcgcccagcagtacgacgaattcctcaaccagaacctgctgcgcgtcttcgcgggccagggctacagcccggcggtgatggcggtggtggagcaggaaggcttcggcgatatctaccgcgcagacgatctcgcgctgtttgcgcgaacgaagaacgactttatggccttcagctactacgccagcaaaacgctggacagcgatgccatcccggaaggcacgccggtgagctattacctgatgcacggcgagaaaaacaatccgtacctgaaggccaccgagtggaactggcagatcgatccgctgggctttcgcaccatcatcacccgctatgccaacgactggcggatgccagtattcccgattgagaacggcattggggtgattgagtcctgggatggcgtaaaccccatagaggatacctaccgcatcgactaccaccgggcgcatatcgaggccatgaaagaggcgatgttcgaggacggggcagaggtattgggctatctcggctgggggttgattgacattctcagctcccagggtgacatgcgcaagcgctacggcgtggtctacgtcaaccgtgaaaatcacgacctgaaagacctgaagcgcgtgccgaagaagagctatgcgtggttaaaacaggttatccataccaacggacgcgagatgtaa

SEQ ID NO: 116252 - DNA, 1371 bp, Enterobacter cloacae
atgaaaatattatcccctttaacggtatgccttgctgtcctgcttagtgctggctgcgccgactctctgaaaagcgactatcagcctcctgaggtgaaataccctgccaactggtatcaggcggatgctgcggaggagaggatgccgttcgactggcaggcctttaacgatccagacctcgacggctggctgcggcaggtgatggtgcgcaataacgatgtcgctggagcggtattgcgtgtttatcgcgcccgcctggaagaagagcggattggcatcacaaacgatccgggactaaaaggttcgctcgcgcttgacggtaaaaaacagctgaacagctcagcccactggagcaggggcagcgttgccagtattaataccagctatgagctggatctgtggggcaaaatagcgcggcagcgcgatgcgaaggcgtgggcacgttttgcctcggaagaggatctgcgttctgcacgcctgacgctgctttcaaatgccagtaataattactggcgcttaggctttattaaccagcagttgtctgtcctgcaacaaagcatcgactatgcaaaagagacgctgcgcctggctaacgcgcgctatgccgcgggcggtgcctcctctctggatgttgtggatgctcagcagggcgtgctttcgcaggaaaacaggctggcggcgttgaagaatgaacgtttacaggcgctcaatcagcaagccgttttgcttggaaccgcgccgggcagcgcgatagtcgaaccgaaagcgttaccaatgggaccactgccgcaggtcagtggaaagatcccggtcaacgtgctgcggcatcgacccgatatcagcgctaaagagtggcgggtacgggaagcattggccaccgttgatgtccagcgtactgcattttatccagcgtttagtctgaccggctcgcttggcaccagcagcagcagccttatggccttcctggaaaatcctgtaggctctgttggagcaaacctgaccctgccgttcctggaatggagagaaaggggcatggacgtgaagattgcccgaaacgactacgagcaacgggttctggagtttaaacaggaactttacaaggcgatgagtagcatagaagatgcgcttgctttgcgtcatcaactcctggaacaggagacgcttctacgtgaaggcctggaactggcgaaaaaatcagagaggctaaacgaagttcgctatcgccagggcgcggtgcgaatttctttctggcttgatgctcaggagaaacgccgtcaggccgaactggcactgtatgaaaatcgctttaaccagttaaataatctggcaaaaatctatatggagttcggcggttcggtatctttcccctga

SEQ ID NO: 116253 - DNA, 1941 bp, Enterobacter cloacae
ttgagtaatatcatagaactcaagggcatcagccgcacctacaggaacggtggacaggagctcaccgtgcttaaagggattgatttgactatcgctgctggggagatggtcgcgatcatcggcgcctccggttccggtaagtcaaccctgatgaatattatgggctgtctcgatgtccctgattgtggcgattactttatcagcggtcaaaatgccgcccagctttcacctgacgatctggcaaggatccgccgtgagcacatcggttttatcttccagcgttatcatttaatgcccgacctgagcgcgttaagtaacgttgaaattccggcgatttatgccaatagtgagcgcgaaaagcgccgtctgcgcgcggcgacattgcttggaagactcgggctggaaggtcgtgaacatcataaaccgggagagctttcaggcggccagcagcagcgtgtgagtattgcccgctcgctgattaacggcggtgaaatcattctggcggatgaacccaccggcgcgctggatacgcagtccggtcaggaggtactgtcaatactcagtgaactgaatcagcgtggccataccgtggttatggtgacacatgatatgaaggtagcgcagcatgctaaccgtattattgagctgcgtgacggtgaaattatttctgataccggcagtcgtgttacctccggggttgcccttaaacgacctgacagcgttcagcaaagctggtggcaaagtattgttgaccgtacccgtgaatccctgcacatggcgttaaaagcgatgaatgcgcatcgcctgcgcacgacgttaaccatgacgggcattatttttggtatcgccgcggttgttacggtggtggcactgggagaaggcgcgaaacagcgaacccttgataatatcaaggagcttggaaccaacgtggtgagcatctacccgggaagggatttctttgacgacagcactgaagccattcgtacactggtcccggcagacgccgaagcattagcaaagcaggggtttgttgacagcgtcagccccgaagttaacgcttccgacaacattcgctttctgggtaaatccgctaccgccacgatcaatggcgttgggcgcgatcattttcgcgtaaacggtattgaactgttgcagggatcaactttccaggacgatcgaaatgcctcgcaggaagtcatcattgatgaaaacgcccgcaaggcgttatttgacgatgcgggactcaaggcacttgggcaaatcgtttttctgggttccgtgcctgcacgggttgtcggcatcgccaaagggaacagccgaagctatgcgcctaatcgcattaacgtctggatgccttacagcacggtgatgtatcgaatgacaggaaaaccggtgttgaccagcatcagcgtaaggcttaaggatgatgttgccaacgaggcagcggtcagcgctatttctcagcttctcactcaacgccacggcgtgaaagacttccagctttataatttcgagcagattcgacaatcaatcgaacggacctcaatgacctttagcatcctgattctgatggtggcctgcatctcgctgatgatcggcagcattggggtgatgaatatcatgctggtgtcggtcacggaacggacccatgagattggcgtacgaatggcggtcggtgcgcgtcagggcgatatcatgcagcagtttatgattgaggctgtgctggtatgtctaataggaggagtgttaggtattgcactgtcgtatgccgccggagcgctgttcaccgcgctggcagggggcattttcaccgccatttattcgtggcaggccgctgctgccgcattcttctgctcaactttaatcggcatgatctttggttatctccctgcccgcaagacagcaaggatggatccggtcgtttcactggccagcgagtaa

SEQ ID NO: 116254 - DNA, 1188 bp, Enterobacter cloacae
atgttaacaaaattccctccccgacgcgtaatgacctgtgctgcggctctgctaattatttttagcatcgccttgttcttcttcctgagaagccccgaggttcctgagtatgttaccgctccagtacgcatcggcgatattgaaaacgccgtacttgctaccggtcgaattgatgcgattgagcgggtcaacgttggggcacaggtttctggccaggttaagtcgctgaaggtgaagttaggcgatcgtgtcactaaaggacagctcatcgctgaaattgatgacgtgccgcagcggaatgatttacgcaacgcagaagctgctctcaacgtggtaaaagcggaccttcaggctaagcaggcgcagttgaagcaagcctcattgcgttttaagcgccagcgccagatgttaaatgaggatgccagctcgagagaagatttcgaaacggctgaaaccacgctggccagtacccgcgctgagctatcggcactgaacgccaaactcgtccaggcgcaaattgatgtcgacaagaaaaaggtcgatttgggttatacaaaagttgttgctcccatggacggcattgttattgccgttgtcacccaacagggccaaacggttaactccagccaaagtgcgccgaccattatcaaactcgcacgtctggacgtgatgacaattaaagcccagatctctgaggcggatatcacgcgaatttcaccgggacagaaagccagattcaccattttctctgagccggataagcattatgacgccacgttacgtaccgttgaactggcacctgagtcggttatgaaagatgatagccttgccagcagtagctcagcctcagggtcaggcacgtcaaatgcttcggtgtactacaacgcgctgctggatgtcccaaatccagaaaatcgactgcgaattgccatgacagcacaggtgaccttgctggctggagaagctaaaaatacgttactggtgccgattcaggctgtgcacaaggtgagtggcaacaaacagcaggtgcagatattgaccagtgataaccggctggaaacccgtgaggtcaaaaccggcattactaacagtgtggatatccagatcctggacggtgtaaaagtcggggaacatgttgtgttatcgcagccgggtgaaaaagcgcccggggaagggtttgtatcttga

SEQ ID NO: 116255 - DNA, 1116 bp, Enterobacter cloacae
atgcgtattttgtttgtaggcccgcctctctatgggctgctgtatcctgtgctgtctctggcacaggcgtttcgcgttaacggccatgaagtgctgatcgccagcggaggaaaattcgcccaaaaagcggcagaagcagggctggtggtatttgacgccgcacccggttttgattctgaagctgactatcgccgccgcgaggcacagcgaaaagaaagcaacatcggcacaaaaatgggcaacttctcattcttcagcgaagagatggccgaccacctggtggagtttgccggacactggcggcccgatctcatcatctacccgccgctcggcgtcatcgggcctctgattgccgccaaatacgatataccggtcgtaatgcaaaccgtcggcttcggccatacgccctggcatatcaaaggcgtaacgcgttcgctcgcggacgcctatcatcgccacggcgttggggccgcaccgcgcgatatggcctggatcgacgtaacaccaccgagcatgagcattcttgaaaacgacggagaacccattattcccatgcagtacgtcccgtacaacggcggcgcggtgtgggaaccgtggtgggagaggacgcccgaccgtaaacgtctgctggtgagtctcggtaccgtcaaaccgatggtcgacggccttgacctgatcgcctgggtgatggattccgccagtgaagtcgatgccgagatcatcctgcatctttcggccaatgcgcggtcggatctgcgctcactgccctcaaatgttcgcctggtcgactggatacccatgggagccttcctgaacggcgcagatggcttcattcatcatggtggcgcgggcaataccctgacggcgctgcacgccggtattccacagatcgtcttcggccagggtgccgatcgcccggtaaatgcccgcgctgttgtcgaacgcggctgcgggatcatccccggcgacgacggcctgtcgagcagcatgatcaatgctttcctcgacaatcgcgcgcttcgcgacgcctctgaagaggtagcggcggaaatggcagcgcaaccctgtccgagcgaggtggcgaaaagcctgatcgcgagggtacagaaagggtag

SEQ ID NO: 116256 - DNA, 3660 bp, Enterobacter cloacae
atgcctgcgactcactctcccactcctgcgcggtcctggatagttcgcctggcacgcgtgtgctgggaacgtaagaaacttagcatcatcgtagtggtagcgtcggtctcgaccattctgctggccgcgctgacgccgttgctgacaaggcaagcggtgaacgacgcgctggcgggcaatccgactcgtctgccgtggctggcctgcgggctattgctgattgccttttttgatttcatcggtaactacgtgcgccgcggttatgccggggagctctcgctctgggtgcagcacaccctgcgaggacgggcattcgacagtattcaaaaacttgacggcgcaggccaggacgcactgcgcaccgggcaggtgatttcacggaccaacagcgatctgcagcaggtgcataccctgctacagatgtgtccggtgccgctggcggtgttcacttattacattgccggcattgccgtgatgctgtggatgtcacccgccatgacgctcatcgtcgtgtgcgtactggcatgcctggctatcactgcgctgcgcgcgcgtcgccgggtcttcgcgcaaaccgggctggcctcggaccgactggcaaatctcaccgaacatatgcgcgaggtgctggcgcagatctcagtggtaaaatcctgcgtggcggagctgcgtgaaacgcgctggctggatcgccagtcgcggcagatggtgcgggtacgcatcggcgcggccatctcgcaggcgatgccaggtgccaccatgctggcgctaccggtgctcgggcaaatcgtcctgctgtgctacggcggctggtcggttatgcacgggcgcatcgatctcggcaccttcgtggcgtttgccagcttcctcgcgatgctgaccgggccaacccgtgtactggcatcgtttctggttatcgcccagcgcacccaggcgtccgtggagcgcgtgtttgctctgatcgacacccgttcgcagatggaagacgggacggaggcggttaacggtcaggttatcgggctgcaactggagaatatgagcttcgagtaccgtggcggcagacgcatcctcagcgatgtctccttttccctgcacgccggtgaaacggtggcggtagtgggcgcatcgggttccgggaaatccacgctgctgatgctgctggcgcgtttttacgatcccagcgccggagagatatggctcaacaccagcgcaggccgacagaacctccgcgatctcaggctggaggcgcttcgtcgtcgggtaggcgttgtgtttgaggatgcttttctgtttgccggtacggtggcggaaaatatcgcctacgggcaccctcaggcaacggcggacgacattcgcctcgcggcgagggcagcaggagccagcgattttatcaacgccctgccgaaaggcttcgatacccaattaaccgaacgcggtaagaatctttccggcggacagaggcagcgaatcgcgctggcgcgggcgctcattaccgcgccggaagtgttgatcctcgatgacaccacctctgcggtcgatgccggtactgaagcggagatcaacaccgcgctgagtcgctatgctgacgaaaagcatatgctgctggtgattgcccgacgccgttctacgcttcagttagccagccggattgtggtgctggataagggccgggtggtggacaccggaacccaggcagaacttgaagcgcgctgtccggcgttccgcgcgctgatgaccggcgacggcgatttcctcgcgccttcccacagtgggcctaacggattgtggccgaccgtaccagcggcacaagacgatgcggcgcagacgggggataaaggctttgtcgcccgtatgacgcgcgtgccggaaaatgcagtacagcaggcgctggccggtaaaggccgcaaagtcacgtcgctgctgaagcccgtggcgtggatgttcgtcatcgccgccctgctgatcgccctcgattcggcggcaggcgtcggggtactgatactgctgcagcgcggcattgactccggcgttgccacaggcgatatgtcgactatcggcctctgtgccctattcgccctgtgcctggtggccgtgagctggtgctgttattcactacagactgtcttcgccgccagagcggcagagtcagtccagcatacggtgcgcttgcgcagcttcggccatatgctgcgtcttggtctcccctggcatgaaaagcatgtcgattcacgtctgacccgcatgaccgtagatgtggactctctcgcccgctttctgcaaaacggccttgccggtgcagccaccagcctggtgacaatgttcgccatcgccgccgccatgttctggctcgacccgctcctggcgctgacggcattaagcgcggtgccagtggtcgcactggcaacctggatttatcgccgcctcagctcccctgcttatgcgcaggcgcggctggaaataggcaacgtcaacagcaccctgcaggagaaagtctccggcttgcgcgttgtgcaatcgcatggccagcaggaacaggaagccgcccggctgcgcgcgttatcggatcggttccgtgcgacccgcgtacgtgcgcaaaaataccttgccgtctatttcccgttcctgaccttctgcaccgaggcctcctatgccgccgttcttctggtgggtgcatcgcgagtcgccgaaggcgaaatgaccgccggggtgctggcggctttcttcctgctgctggggcaattctatgggccagtgcagcagttatcaggaattgtcgacgcctggcagcaggcgacggccagcggcaaacatatcaatgaactgctggcgaccgaaggcacagagaacatcgagccctcttccgcaccgcccgccaccggcgcgctgcatcttgatgaggtcacgttcagttatcccgacagtcctcaacccgcgctgaacaaacttaccctgacaatccctgagggaagggtcgtcgcggtcgttggtcgcagcggtgcgggtaagtcaacgctgattaagctgatcgccggattgtattcccccacccacggcaggatcagcattggcgatcggataattgatgatgcctcgcttgccgattaccgtcgccagattgggctggtcgatcaggatgtggcgttgtttagtggtgatatcgcggaaaacattcgttattcacggccatccagtaccaatgacgacgttgagattgcctctcaacaggcagggctgtatgagacggtgcgcaatctgccgcagggattccgcacaccggtgaataacggcggtgccgatctgtccgcaggtcagcgccagctgattgcgctggcccgcgcacaactggcgaatgctcacatcctgctgctcgatgaagccacgtcacgcctggatcgcacatccgaagagcgattgatgtcatcgttaacagacgtcgcgcacaccgggaagcacctggcgctgattgtggcgcaccgtctgaccaccgcgcagcgctgcgatctgattgccgttatcgataaggggcagcttgcggaatacggcacccacgaacagctgttagcggccggcggcctctacaccctcttgtggcatgacagcgtcggcagctctgttccccatcgccagcacgacatcacgggggaaatcgtggaagagtaa

SEQ ID NO: 116257 - DNA, 1230 bp, Enterobacter cloacae
atgctgaacatgcaacaacatccctctgctatcgccaggctgcgcagccagctggcagcaggccacattgctaacctttctgacttctggcgagacgctgagtcgctaaatgtaccgctggtgacgccagtcgacggagcgaaagacgagcgtgatgtgacatttctgtggcgcgccaggcaccctctacagggcgtttatctgcgtctgaatcgggtgacggataaagagcacgtggcgaaagggatgatgaccgcccttcccgcgacggatatctggactctgacactgcgtttacccgcaagctactgcggctcctattcgctggtggaaatcccccccggcaccccggccgagacgattgcacagtccggaggccgctttgctaccctcgtcgggcacgccgatccgctaaacaaaacgccggggatcaacgttcggggaagcacacaggagtcggtgctggcgcttgataaagcccccgcccagtccgaatggcgcggcgggtcacccagcgggcaattgcttacctcggcgcgcactctcgccggggaatcgcgccgggttcggctctatctgccggacgttgatgtttcgcagcccctcggcctggtggtactgcccgatggtgaaacctggttcgatcaccttggcgtatgcgcggcaattgacgccgccataaacaacggacgcatcgtgcctgtggctgtacttggcatcgacaatatcgatgaacacgagcgaactgcgatactcggcgggcgcagcgagctgataaaggatatcgccgaccagttgttgccgacgatccgcgccgaacacccgcagcggcggtgggcagaccgttcgcgcaccgtgctggccggacagagcctcggcggggtcagcgcgctcatggccgctcgttacgcaccggaaacgttcgggctggcgctcagccactccccttcgatgtggtggacgccagagggtgccagccggccaaacgtgttcagcgaaaccgatacgtcatgggtgagcgaacatctgctttctgccccgccgcagggtgtgcgcatccgcctgtgcgtgggatcgctggaaggttcgacggtaccccacgttcagcggctgcatcagcagttgcttaccgctggcgtcgacagccattgcgcaatgtataccgggggtcacgattacgcatggtggcgcggcgcactgattgacgggcttggtttactccagggttga

SEQ ID NO: 116258 - DNA, 945 bp, Enterobacter cloacae
atgtatgcccgcgagtatcgcccaacacgctcacgcaaggcgcttgtcactcttctttctggtctcacccttatctggaatgcgcacgctttcgcaaagccggatatgcagccactggggccgaatatcgccgataaaggctctgcgttttaccatttcagcgtcaactcgttcgactccgccgatggcagccgccattatcgggtatggacggccgtgccaaataaagccgcaccggcgtcgggctacccgattttatatatgctcgacggcaacgcagttatggaccgcctgaacgacgacctgctcaaacagctggcagaaaaatcaccgccggtgattgtggctgtcgggtatcagaccaacctccccttcgatctcaacggcagggcctacgactatacgccagcagcagaaagcggcaaaacggatacccgcagccgtaagagtgggggtagcaacgacttccgccagttactggaaacgcgtatagcgccaaaggtggaacagggattgaatatcgatcggcagcgtcgcggcctgtgggggcactcctacggcggcctgttcgtgctggatgcatggctgtcttccccttatttccggacgtattacagcgccagcccgtcgttgggcagaggccatgatgcgctactgagccgcatcacggcggttgagccgtcgcaatactgcgccaggcgcctgatgataatggaaggttcggcgacaccgggcgataaccgggaaacgcatgctgccggagtgctgacgaaaattcatgccaccctcgccacgctggaagataaaggcgtcaatgccgccttttgggatttcccaaacctgggacacgggccgatgttcaacgcctccttccgcggagcgctgttagatatcagtggtgaaaacgcaggtaacacagcaggctgtcattcattaagccgctaa

SEQ ID NO: 116259 - DNA, 2175 bp, Enterobacter cloacae
atgagaattatcaagatcttctggccgctcactgcgctcctggcagggttgaacagtcaggtatcactggcaaaatcctccgatgataacgacgagaccctggtggtggaagccaccgctgagcaggtactcaaacagcagccgggcgtgtcgattattaccagcgaagatattaaaaagaaccctccggtcaacgatctctccgatattattcgcaaaatgcccggtgtcaatctgaccggcaacagcgcctcgggtacacgtggtaataaccgccagatcgacattcgcggcatggggccggagaacaccttaattttaattgatggtgtgccggtgacgtcgcgcaacgccgtgcgttatagctggcgtggagagcgtgatacccgcggcgacaccaactgggtgccaccggaacaggttgagcgtattgaagtgatccgcggccctgcggcggcacgctacggttcgggcgcagcgggcggggtggtgaacatcattaccaaacgccctaccaacgactggcacggttcgctgtcgttatacaccaaccagccggaaagcagcgacgaaggcgctacgcgtcgcgccaacttcagccttagcgggccgctggctggcgatgcgctgaccatgcgcctgtacggaaacctgaataaaaccgatgccgacagctgggatattaactcctcggccggtacgaaaaacgcggccgggcatgaaggggtgcgcaacaaagatattaacggcgttgtctcgtggaaattaaatccgcagcaaattatcgatttcgaagccggatatagccgccaggggaatatctatgcaggcgatacgcaaaacagttcttccagtgccgtcactgaaagcctggcgaaatccggcgaagagacgaaccgcctgtaccggcagaattatggcattacacataatggtatctgggactggggtcaaagccgttttggtgtctattatgagaaaaccaataacacccgcatgaatgaaggattatccggtggcggtgaagggcgtatttcggcggatgaaaagttcacgaccaatcgcctgagctcctggcgaaccagcggcgagcttaatattccgctgaatgcgctggtcgatcaaacgctgaccgtgggtgcggagtggagccgcgatgagctcgacgatccttcctctaccagcctgaccgtggatgacagtgatatcggcggcatttctggctcggctgcggatcgcagcagtaaaaaccattcccaaatcagtgcgctgtatattgaagataatattgagccggttcccggcacgaatatcattcccggcctgcgctttgattatctcaacgagtccggcggtaacttcagccccagcctgaacctctcgcaggaattgggcgattacttcaaagtcaaagcggggattgcccgaacctttaaagcaccaaacctgtatcaatccagcgaaggttatctgctctactcgaaaggcaacggttgtccaaaagatattacatcgggcggctgctacctgatcggtaataaagatctcgatccggaaattagcatcaataaagaaattgggctggagttcgcctgggaagattaccatgccagcgtgacctacttccgcaatgactaccagaataagatcgtggccggcgataatgttatcgggcaaaccgcttccggcgcatatattctccagtggcagaacggcgggaaagcgctggtggacggtatcgaagccagcatggcgttcccgctggtgaaagatcgtctgaactggaataccaatgccacctggatgatcacctcggagcaaaaagacaccggtaatccgctgtcgatcatcccgaaatacaccattaataactcgcttgactggaccatcacccaggcgttctctgccagcgtcaactggacgttatacggcagacaaaaaccgcgtactcattcggaaactcgtagtgaagatactggcggtctgtcaggtaaagagctgggcgcttattcgctggtggggacgaacttcaattacgatattaataaaaatctgcgtcttaacgttggtgtcagcaatatcttagataaacagatttaccgatcttccgaaggggcgaatacctataacgagcctggccgggcttattatgccggtgttaccgcgtcattttga

SEQ ID NO: 116260 - DNA, 1041 bp, Enterobacter cloacae
atgcgttatcaaaaactgggcaataccggactgtttgtttctgaactctgcctcggcaccatgaccttcggcggtgaaggcggcatgtggggcaaaattggtcagcttcagcaaagcgacgccgagcagctggtgggccgcgcgctggacgccgggatcaattttatcgacacggcagatgtctactcggaagggcgttcagaggagatcaccgggcaggcgctgaagaacctgaaaattccgcgcgaaaacatggtcgttgccaccaaggtgttcggtgaaaccggcacagcgggggtgaactcgcgcggtagctcgcgctatcacatcatcagcggcgtgaaggagagcctgcgtcgcttgcagctggatcatatcgatctctatcagctgcacggtttcgaccccgcgacccccatcgaggagacgctttacgcgctggataatcttgtgcagcacggtcacgtacgctatatcggcgtctcgaactgggcggcatggcagattgccaaagcgctcggcatctctgagcgtctggggctggcgcgttttgcctcattgcaggcgtactacaccatcgccgggcgcgaccttgagcgcgaactggtgccgatgatgcagagcgaaggcgtcgggttgatggtatggagcccgctggcgggtggtctgctgagcggaaaatacgatcgcgacgggcagagcgcggccggtagtcgtcgcctggcgttcgacttcccgccggtgaataaagatcgcgccttcgactgcgtggacgtgatgcgtaccatcgccgaaagtaaaggcgtttccgtggcgcaaatcgcgctggcgtggctgctgcaccagaaagcggtgaccagcgtcatcatcggggcgaaacgggtcgatcagttggatgacaacattgccgcaaccggcattcagctgagcgatgatgagctgaaacagctggatgcggtcagcgcgctgccgcgcgagtatcctggctggatgctggagcgccagggcgagtaccgtcgcaatcagttagcgcaacaataa

SEQ ID NO: 116261 - DNA, 1524 bp, Enterobacter cloacae
atgatacacagacgtttacaccctctgatgataatgatgctgctggtgggctgcgccgtcgggccggactaccaacagcctgcaccgcccgccaccacgcactggaacgataagggcgacagcgcggtgaaatcgcaaacttcctccgcggccactaacccgcgctggtggaaaaccttcggctcgccgcagctcgacagcctgattgaacgcgccatcgccgggaatctgacgctacagcaaacggtattacgcattgccggcgcgcgcgaacagattaaccaggccggcggggcgtttttcccgtcggtgaatggcaatgtgcaggcgacgcgccagcagcttgggctggaaggggagctgaaatcccacggcgtgtatgaccagttgaataatgtcgatcctgaactgcggggcgcgttaggcccgctgacgcagccgataaacctctatcagggcagcttcgacgcccagtgggaaatcgacctgtggggcaaggtgcgccgtcaggtagaagcggctgaggcgcagcagcgggcggcgatcgagcagcgtaacgatgcgctggtctcgctggaagccgaagtggcgcgggcgtggctacagctgcgtggggcgcagagcatcattgccacgcttaatacgcaaattgaaagcgcacagcagacgctggatctgaccgaaagccgccagcggggcgggctgtcgccgcagatggacgtggagaacgcccgggcgcagctgggcaatcttgaagcgcagctgccgcagtatcaggcgcaggaacgccaggcgatgaacgggctggcgatcctgctcggcaaacctccgggcgcgctggatgccgaactgcaatccgtgcagccgatgcctgccctgccagatattgtgcagaccggtattccgtcgacgctggcccgccgtcgcccggacgtgcgcgaagccgaggcgaatctccatgccgccacggcgcagattggcgtctcggtggcagaactgttcccgagctttaccctctccggacagtttggcctgcgcaacagtgaatctaactggctgaccgactggagcagccacttctacagctttggcccgcaggttttcataccgattttccagggcggtcggctggtctccagcgtcaaggtggcgcgcgcgcagcagggggcggcagtgctggactatcgccagacggtactgacggcgctcggcgacgttgaaaacgcgctggtgagctatcgcaccgaccagcagcgtgaagcgggcctggcgaaaaccatcgacgcgctgcaaaacgcctttgatctcgccagcgacagctaccggcaggggatcgccagctttattgacgtgctggacgcccagcgtcagctcgctcaggccgaacagcagcgggcgcaggcgcaggtgcagagcgcgcttgacctggtggcgctctacaaagccctcggcggcggctgggagccgtatcagcaggtgcggctgccagactacagcgtctttggcgacgccccacgcggatag

SEQ ID NO: 116262 - DNA, 1572 bp, Enterobacter cloacae
atgacggatcacagccacgataactggaagcccgccagtaacccgtgggcggtggcgattgtggtcaccctggcggtgtttatggaaattctggacaccaccatcgtcaacgtggcgctgccccacgtcgcagggtcgctctcggccagctatgacgaatccacctgggtgctcaccagctacctggtggcgaacggcatcgtgctgccaatttcggcttttctgagccgtctgtttggtcgcaagcagttcttcctgatctgcattgtgatgttcaccatctgctcgttcctgtgcggcatcgccaccgagctatggcaaatcatcctgttccgcgtgatgcaggggttctttggcggcggattgcagcctacccagcagtcggtgctactcgactacttcaagccggaggacaggggcaaagcctttggcctttcatccattgccattatcgtcgcgccggtactcggtcccacgctggggggctggatcaccgataactactcctggcgctgggtgttctttatcaatatcccggtagggattgtgacggtgctggccatctatcagctgctggaagatccgccgtgggagaaaaagtcggaagagaagctcaccgtcgactggacggggatcggcctgatcgccctcggtcttggctgtttgcaggtgatgctcgaccggggcgaagatgatgactggttctattcgaactttatccgcaccttcgcagtactgacgctggtcggcattatcggcgcgatctactggctgatgtatgccagaaagccggtggtggatctgcactgtatgaaggaccgcaactttgcgatctccagcctgctgatggcggggatggcgatgatcctgtacggcagctcggtggttattccgcagctggcgcagcaggatttgggctataccgccacctggtccgggctggtgctctcgcccggcgcggtgctgattgtgctgaccatcccgctggtgctgaagctgatgccggtggtgcagacgcgctggatcatcgccttcggctttacctgcctggcggtgtcgttcttctggtcccgcacgctgacgccggatatcgacttcgaaacgctggtgctgttccgcagcgcccagtcgattggactggggttcctgtttgtgcccctcaccaccatcgcctttatctcgatcccgaggcggcttaacgccgacgcggcggcgctgtttaccatgttccgcaacgtggccggctcgattgggatttcgctctcgacggcggcgatcaccgagcgctcgcaggcgcacagcgcgcatctggcttaccacgcttcgccgtttaacgagcagttccagctggcgattcgcgaaagcgcccaggcgatccagaacttcaccactcaggtgggcgatccgaccggcattgccaccgggcggatgtaccagacgatgatcgagcagtcgcgctttctggcctacatcgacgtcttcaccattctgagcgcggtggccctattactgattccgttttgtttgttgctctcgccggttaagagcgaggggagtgcaggagcacactga

SEQ ID NO: 116263 - DNA, 1095 bp, Enterobacter cloacae
atggcagaagatcaaaacccacctgctgacgagcaggatcaaaacaataacgagcgcaagcgcccggggaaaaaaccgttaattatccttggtatcgtggtcatcgtgatggtgattgtggcgctggtctggtggtttttaacccgtaacgaagagaccaccgacgacgccttcaccgacggcgacgtagtgaccattgccccaaaaacggcaggctacgtcaccgaacttcgcgtgcgggataaccagcgcgtgaagaaaggggatgtgctggtggtgatcgatccgcgtgataccaccgcccagcgcgatcaggcccaggcccagcttgggctggcggttgcgcagttgcaccaggcgcaggcgcagctggcgctctcgaaggtgcaatatcccgcccagcgcgatgaagccaaagcccaggtactgaaagctcaggcggatatggccaacgcgcaggcggagtaccgccgtcagcgcggcgttgacccgcgcgcgaccacgcaacaaagtatcgatgccgcgaacgctcaactgcggagtgcccaggcgggtctggccagcgcgcaggcgcagctggaagtggcggagcaggttcagctgcaaatccgccagcaggagaccaacgtcgaagcccgcgaacggcaggtcgatcaggccagagcgcagctggaaaccgccaacctgaacctctcttataccgaagtccgcgccccgttcgacggttttgtcaccaaacgcaacgtccagcccggtacgctggtgcaggcaggtacggcgctgttctcgctggtttccccgaacgtgtgggtggtggcgaacttcaaggagtcgcagcttgagcgcatgaagccgggcgacaaagtgaccgtgtccgtcgatgcctggccggatatggagctggaaggccatatcgacagcatccagcagggcagcggctcgcgcttctccgccttcccgtcggaaaacgccaccggtaactttgtgaagatcgttcagcgcgtgccggtgaaaatcgtcattgataaagggctggatccgaacaagccgctgccgctggggctgtcggttgaaccgaaggtcaccgtggaatga

SEQ ID NO: 116264 - DNA, 1110 bp, Enterobacter cloacae
atgaacatccccggcttgcaggccctgaaacgcgatcgctttttccatcttttactgatcactggcgttgggctcagcgtctttgtgcccttcacgccgcacacctggccggcggccatagactggcgcaccattattactctgagcggtttgatgatgctcaccaaaggcgtggagctgagcggctattttgacgtgctggggcgcaaaatggtgcgccgcttcgccaccgagcgcaagctggccctgtttatggtcttttcggcggcgctgttgtcgacgtttctcactaatgacgtggcgctttttatcgtggtgccgcttacgctcacgctgcgtaagctgtgcgaaataccggttacccgtctgattatctttgaagcgctggccgtcaatgcgggctcgctgctcacgcctatcggtaacccgcagaacattctgctgtggggacgctccggcctgtcgtttaccgcgtttaccgggcagatggcgccgctggcgctggcgatcgtggcgtcgctgctggcggtgggctggtttgctttcccgaataaatcgttgcagtaccacagcggtacaaccggcccccagtggcagccgcgtctcgtctggagctgcctggggctgtatatcgttttccttatcgcgctggagttaaaccaggcgctggcgggcgcgctgctggtggcgtgcggcttcctgttcctcgcccggcgggtgctggtgagcgttgactggacgctgctgctggtgtttatggcgatgtttattgacgtccatctcctgatccagctccctgtattgcagaacgttctccatagcgtcagcggtctgtcacagccgggattatggctgacggcgattggtctctcgcaggtgatcagtaacgtgccgtccaccattttgctgcttaactatgttcccccaacggtactgctggcgtgggcggtcaacgtcggcggctttgggttgctgcctggctcgctggctaacctcatcgccctgcggatggccaacgatcgccgcatctggtggcgcttccatttatggtcaatcccgatgctgctctggtcagcggcggtgggtttcggactattccttctcatatag

SEQ ID NO: 116265 - DNA, 474 bp, Enterobacter cloacae
atgaaccgtcgcgcaggtaagccaacaacaaaaaaaacgacgcaactggtgaacgttgaagagcatgtggaaggcttccgccaggtgcgtgaggcgcaccgccgggagctgattgatgattatgtcgaactgatctctgatctgatccgtgaggttggagaagcgcgccaggtggatatggccgcacgccttggggtgtcgcagccaaccgttgcaaaaatgttaaaacgtctggcgtcggtcgggctgatcgagatgatcccctggcgcggggtgtttctcaccgctgagggcgaaaagctggcgcaggagagccgcgagcgccaccagatcgtcgagaattttttactggtgctgggcgtcagcccggaaattgcccgtcgggatgccgaaggtatggaacaccacgtcagtgaagagacgctgttgaagttccgcgagtttacgctcaaatacggtccctccgctgaatga

SEQ ID NO: 116266 - DNA, 129 bp, Enterobacter cloacae
atgaatgaattcaagaggtgtatgaacgtgtttacccactctccttttaaagtgcgcctgatgctgttgaacatgctgtgcgatatgtttaacgccaaaccgcagcaggacgacaattcttcccactaa

SEQ ID NO: 116267 - DNA, 1584 bp, Enterobacter cloacae
atgaacgtaaccctgattgatacacttgttacccgcagccgggccttaagcccgtggacgggattctattttttgcaatcgctgttgattaactttgctcttggctacccctttagcctgctttatgccgtcggattcacctgtattcttcacctgctctggcgaagcgcaccgcgcgtgcagaaagtgcttatcgggatctgttctctgattgctgccgcctatttcccgtttggccaggcctatggcgcgccgaactttaatactctgctggcgctccactccaccaatatggaagagtccacagagatcctgacgatctttccgtggtacaactacgtggttggccttttcatttttgccctcggcgtgattgcggttcgtcgtaagcccgtcgggaaaaaggcatggggtaaaattgaaagcctgtgcctggcctttagcgtggtgacgttttttgttgcaccggtacaaaatctggcctggggcggcgtgtttaagcttaaagataccgggtatccggtgtttcgcttcgtcaaagacgtggtggtgaataacgaggaagtgctcgacgagcaggcgcgtatggccgagctttccaccatgaaagacacctggaatgtgctggcggtgaaaccgaagtatcacacctacgtggtggtgatcggtgaaagcgcgcgtcgcgatgcgctcggcgcgtttggcggtcactgggataacacgccgtttgccagcgccgttaacggtacgctgtttaccgactacgtggcggccagcggctcgacgcagaaatcactcggtctgacgctcaaccgcgtggtggatggaaaaccgcagtttcaggataattttgtcaccctggccaaccgggcaggttttcagacatggtggttctctaaccagggacagatcggcgagtatgataccgccatcgccagcatcgcgaagcgtgccgacgaggtacagttcctgaaaagcggtgatttcgaagccgataaaaacacaaaagatgaagcgttgctaaaaatgacggcgcaggtctttgctactcagcgcacccagccgcagctgattgtcctgcacctgatggggtcacacccgcaggcatgcgatcgtaccgggggaaaatatgcggagtttgtgcaatccaaagagacctcgtgttatctctacaccatgacgcaaaccgacgatctgctcagcaagctgtacgcacagctgcgcaacagcggcgacagcttctcgatggtctatttctctgaccacggtctggcatttaaggagcgcggtaaacaggtgcagtatctggcacacgatgacaagttccagcaaaacttccaggtaccgtttatggtgctgtcgagtgatgacaaaacgcatcgcatcatcaaagcgcgccgttccgcgaacgatttcctgaaattcttctcacaatggacggggattaaggcgaaagagataaaaaatgattacccgtttatctccgggaagaagggcccgccagtttacattaccaactttaagttacagaaagtcgactataaccatcttgggacggatattttcgatattaagagtaagtaa

SEQ ID NO: 116268 - DNA, 519 bp, Enterobacter cloacae
atgaaaaaaattgcatgtctttcagcactggcagctgttctggctgtttccgcaggtaccgctgtagcggcaacttctactgtaaccggtggttacgctcagagcgatatgcagggcgtgatgaacaaaaccaacggtttcaacctgaagtaccgttacgagcaagacaacaacccgctgggtgtgatcggttctttcacttacaccgagaaagatcgtactgaaaatggctcttacaataaaggtcagtactacggcatcaccgcgggtcctgcttaccgcctgaatgactgggcaagcatctacggtgttgtaggtgttggctacggtaaattccagcagaccgaaaaccagggtctgaaccgtactgcaagcaacagcgactatggtttctcctatggcgcaggtatgcagttcaacccaatcgaaaacgttgctctggacttctcctatgagcagagccgtatccgcaacgttgacgttggcacctggatcgcgggcgtaggttaccgcttctaa

SEQ ID NO: 116269 - DNA, 888 bp, Enterobacter cloacae
atgccaggtttacctcgtaaatcgtcggtctggatgccggtggcagtcatacttatcgcgatgatgtccatacaaagcggcgcgtcgctggcaaaatcgctgtttccgctggttggtgcgcccggcgtcacggcgctgcgtatcgcattaggcaccctgatcctcgtggttgtttttaaaccctggcggctacggtttaaaaaggagcagcgactgccactgcttttttatgggctggcgctgggagggatgaactacatgttctatctctctattcagacgatcccgctggggatcgcggtcgcgcttgaatttaccggcccgctggcggttgccctcttctcttctcgtcgtccggtagactttatctgggtcgtactggccgtgctggggctatggttcctgctgccgctcgggcaaagcgtttcacaaatcgatctgacaggggcagctctggcgctgggcgcgggggcatgctgggcggtgtatattctcactggccagcgtgcgggggaagagcacggccccgcgacggtcgccttaggctcgctaattgccgccgttatctttgtcccgattggaatggcacaagcgacagactcaatatggcaatggtcaatcctgccggttgggctggcggttgccattctctccacggcgctgccctactctctggagatgatcgccctgacgcgcctgcccacacgcatttttggtacgctcatgagcatggagcccgcgctggccgccatctcaggaatgattttcctcggtgaaaccctgaccctggtacaaacgctggcgctctgttccattatcgcggcgtcaatgggctccaccctgaccatgcgtccggaacctaaagtggaaaaaatagacctcaactaa

SEQ ID NO: 116270 - DNA, 504 bp, Enterobacter cloacae
atgagtaccgctaaactggtgaaaacgaaagcgtctaatctgctttatacccgtaacgatgtatcggatagcgataaaaaagcgaccatcgagttgctgaatcgccaggtggtccagttcatcgatctttcgctgatcaccaaacaggcccactggaatatgcgcggtgcaaactttattgccgttcatgaaatgctggatggcttccgcacagcactggtgactcacctggataccatggccgaacgcgccgtacagctcggtggcgtggcactgggtaccacacaggtgatcaacagcaaaacgccactgaaaagctatccgctggatatccataccgttcaggatcacctgaaagagctggcggatcgttatgcgattgtggcgaacgatgttcgtaaagcgattggcgaagccaaagatgaagataccgctgatatcttcactgccgcatcacgcgacctggatcagttcctgtggttcatcgagtccaacatcgaataa

SEQ ID NO: 116271 - DNA, 744 bp, Enterobacter cloacae
atgaagtctgtattaaaagtttcactggctgcacttaccctggcgtttgcggtgtcctcgcaggctgccgacaaactggttgtggcgactgacacggcgttcgtaccgtttgaattcaaacagggtgataaatacgttggttttgacgtggatctgtgggccgctgtcgcaaaagaactcaaactggattacaccctgaagccaatggatttcagcggcattatcccggcactgcaaaccaaaaacgttgacctggcgctggcaggcatcaccattaccgaagagcgtaaaaaagccatcgacttctctgacggctactacaaaagcggcctgctggtgatggtgaaagcggataacaacgacgtgaaaagcgtgaaagatctcgacggtaaagtggtcgccgtgaagagcggcaccggctccgttgattacgcgaaagccaacatcaaaaccaaagacctgcgtcagttcccgaacatcgacaacgcttacatggaactgggcaccaaccgcgctgacgcggtgctgcacgacacgcctaacatcctttacttcatcaaaaccgccggtaatggcaagttcaaagcggtaggtgattccctggaagctcagcagtacggtattgcgttcccgaaaggcagcgacgacctgcgtaacaaagttaacggcgcgctgaaaaccctgaaagagaacggcacctataacgaaatctacaaaaaatggttcggtaccgagcctaaataa

SEQ ID NO: 116272 - DNA, 660 bp, Enterobacter cloacae
atgcagtttgactggagcgccatctggcctgccattcctctcttgcttgaaggcgctaaaatgaccctgtggatttcggtcctcggtctggttggcgggttgattatcggtctggtggccggtttcgcccgcacctacggcggctggattgcaaaccacatcgcactggttttcatcgaagtgatccgcggcacccccattgtggtgcaggtcatgttcatctacttcgccctgccgatggccttcaccgacctgcgcatcgacccgttcagcgccgccgttgtcaccatcatgatcaactccggcgcctacattgcggaaattacccgcggtgcggtgctgtcgattcataaaggcttcagcgaagccggcctggcgttaggtctttcccgtcgcgaaaccattcgtcacgtgatcctgccgttggcgctgcgccgcatgctgccgccgctgggtaaccagtggatcatcagcattaaagacacctcgctgtttattgttatcggcgtggccgaactgacccgtcagggccaggagatcatcgcgggtaacttccgcgctctggaaatctggagtgcggtcgccgttgtctatctgattatcacgcttgtcctgagctttgttctgcgtcgtcttgaaagaaggatgaaaatcctgtga

SEQ ID NO: 116273 - DNA, 723 bp, Enterobacter cloacae
gtgattgaatttaaaaacgtttccaagcactttggcccaacccaggtgctgcacaatatcgatttgaacatcaggcagggcgaagtggtggtgatcatcgggccgtccggttccggcaaatccaccctgctgcgctgcattaacaagcttgaggagattaccagcggcgatttgatcgtcgatggtctgaaggttaacgatccgaaagtggacgagcgcctgatccgccaggaagcgggcatggtgttccagcagttctacctgttcccgcacctcacggcgctggaaaacgtgatgtttggtcctctgcgcgtgcgcggggccagcaaagcggcagcggaagcgctggcaaaagatctgctggcgaaggttggtctggcggagcgtgcccaccactatccttccgagctttccggcggccagcagcagcgcgtggccattgcccgtgcgctggcggtgaagccaaagatgatgctgttcgatgagccaacgtcggcactcgacccggagctgcgtcacgaagtgctgaaagttatgcaggatctggcggaagaaggcatgacgatggtgatcgttacccacgaaatcggctttgccgaaaaggtggcgtcccgtctgatcttcattgataagggccgtatcgcggaggacgggaatccgcaggcgctgattgcgaacccaccaagccagcgcctccaggagttcctgcaacacgtctcctga

SEQ ID NO: 116274 - DNA, 2211 bp, Enterobacter cloacae
gtgccgtggatcctgttgctactgtttagcctgtttagcgcgccatcacttgctgtaacccttcccggcgttaccaccggagccaccgccacccagcaaaatgcgccgccagagccagacgctgaaaagaaaaaagccgcctacggcgcgctggccgacgtgcttgagaacgacacgtcccgacaggagctgatcgatcagctgaggaaggtggccgccacgccgcctcaggatccggttcctgctattgcgccgccggaagccgaagaagaaaaaacggtgctggaaaacgtcaccgacatcagtcgccgctacggggaagccctgtcgtcgcgttttgcccagctctatcgcaacctggttggcacctcacataagccttttaatcctcacaccttttccgcagccgccacccagtttgctattctggctggcgccgtcttcattttttactggctgttgcgcctgtctgtctggccgctttaccggaaaatgggccagtggggacgcaaaaagaatcagcataaaagcagctggctgcatcttccggcaatgattaccggggcgtttgtcatcgatttgctgctgctggccctgacgctgtttgtcggccagatgctggccgaccgacttaataccggaaacaaaaccatcgcgtttcagcagggactgttcctcaatgcctttgccctgattgagttctttaaagccctcctgcggttgatcttctgcccgcgcgtgccggaccttcgccccttcgccatttcggatcagagcgccaaatactgggcggtgcggctcagcgtgctgagcgggttgatcggttatggcctgctggttgccgtgccgattatttccaaccaggttaacgtgcagttcggggcgctggcgaacgtgctgatcatgctgtgcattaccgtctgggcgctgtacctcatcttccacaataaaaaagcgatcaccgacagcctgctgcacctggccgatcgctccctctcctttttcagcctctttattcgcgcctttgcgctggtgtggcactggctggccagcgcctattttattgtgctctgtttcttctccctgttcgatccgggcaatagcctgaaatttatgatgggggcgacgttcaaaagcctggcgattatcggcatcgcggcctttgtctctggcctgctttcccgctggctgtcgaaaacgatcaccctgtcgccgcaggttcagcgtaactacccggaactgcaaaagcgggtaaatggctggatgacggtatccctgaaggtggcgcgtattctgacggtctgcgtggcaattatgctgctgctgaacgcgtgggggctgtttgatttctggaactggctgcataacggcgcgggggaaaagaccgttgatattcttattcgtatcgcgctgatcctgttcttctccgccgtcggctggacgctgctggcaagccttatcgaaaaccgtctggtgtcggatgtccacggcaggccgctgccgagcgcccgcgcccgcacgctgctgaccctgtgccgcaacgcgctggcggtgatcatcagcaccatcaccatcatgattgtactgtcggaaatcggcgtgaatatcgccccgctgctggcgggtgccggtgccctggggctggcgatctcctttggttcgcagacgctggtgaaggatattatcaccggcatttttatccagtttgagaacgggatgaacaccggggatctggtgaccatcggaccgctcaccggcacggtggagaggatgtccattcgctccgtcggcgtacgtcaggataccggcgcgtaccacattattccgtggtcatcgatcaccacctttgccaactttgtgcgcggcattggttcggtggtggcgaattatgatgtcgatcgtcatgaggatgcagataaggcgaagcaggcgctgcgggatgcggtgagcgaactgatggagatggaggatattcgcgggctggtgattggtgaaccgtcgttcgcgggcatcgtcgggctaacgaacactgcctttaccctgcgcgtgtcgttcaccacccagccgctgaagcagtggacggtgcgcttcgccctcgacagcatggtgaaaaaacacttcgatctggcgaacgtgagagcgccggtgcagacgtatcaggtattatcgccgcccgcttcgccgctccctccgcaagagccgacgctgtaa

SEQ ID NO: 116275 - DNA, 912 bp, Enterobacter cloacae
atgacttcccaaaagccgggattgcacccgcgtaaccgccaccgtagccgctacgacatgaaagccctgtgcctgagctgcccggaattgcaggattttatcgttcagacaccagccggtgaaccgtcggtaaactttgccgatccgctggcggttaagacgctgaacaaagcgctgctggcccatttttatggcgttacgcactgggacatcccggatggctttctctgcccaccggtgccaggacgtgcggattatgtccatcatcttgccgatctgctggcggatgacaatggcggcgtggtgccgaaacaggccaccgtgcttgatatcggtacgggcgcgaacctgatctaccccctgataggcgcacatgagtaccagtggcggtttaccggcagcgagatcggcgccgaagccttcgccagcgcgcaggccattatcaacgctaacccggggttaagccgggccgttcgtttgcgtcgtcaaaaggatgccgctgctattttcaacggcattattcacaagaacgaacaatatgatgccaccctgtgcaacccgcccttccacgactccgccgcctccgcacgtgcgggaagtgaacgcaagcggcgtaacctgggccaggctgaagacggcgcgctgaactttggcggccagcagcaggagctgtggtgcgagggaggggaagtggcatttattttgcgcatgattgccgagagtaagggcttcggtcgtcaggtgaaatggtttaccacgctggtctcccgcggcgataacctgccgccgctttaccgcgcgctgaccgacgtcggcgcggtgaaggtaatcaaaaaagagatggcgcagggccagaagcagagccgctttatcgcctggacctttatggacgataacaaacgccgcaaatag

SEQ ID NO: 116276 - DNA, 264 bp, Enterobacter cloacae
atgaaaaagtatctgacctttattattgcgggtgcgctggcaggcgcatcgttctcagcctggtccgttcaacctctgaccgacagcaacgacaccagccagctacgtgcggccgggacggtctctgtcagccgggcaagcaaccttgatgaccttcaggacaagctggccgaaaaagcgcgtcaggaaggggctaaaggcttcgtggtgaacgccgccggtggcgataaccatatgtacggcaccgcgaccatctataaataa

SEQ ID NO: 116277 - DNA, 267 bp, Enterobacter cloacae
atggcttccggctgggcgaatgacgacgccgttaacgaacagatcaacagtaccattgaagatgcggtcgcgcgtgctcgcggtgaaattccgcgcggcgaaagtttgacggaatgcgaagaatgcggggatccgattcctgaagcacggcgtaaagccattcctggcgtacggctatgcattgcctgtcagcaggagaaagattcaaaaaatgcggcacattcaggatataatcgtagaggatcgaaagacagccagttacgttga

SEQ ID NO: 116278 - DNA, 261 bp, Enterobacter cloacae
atgaaaaccatcaaatatgctgttgccgctgttgccctgtccgctctgtctttcggcgctttcgccgtagagccagtctcctctactcaggcacaggatctgaacaaaatcggggtggtgagtgctgaaggcgcgaccacgctggacggtctggaagccaaactggcggaaaaagctgccgctgccggcgcaagtggatacaccatcacctccactaacggtaataacaaactgagcggtactgcggttatctacaagtaa

SEQ ID NO: 116279 - DNA, 963 bp, Enterobacter cloacae
gtggattaccgcaaaattatcaaagaggtagggcgtgggaaaaaccatgctcgcgatctggatcaggaaacggcccgtgcgttgtacacgcatatgctgaatggcgacgtgccggatctggaaatgggcggcattctgattgcgctgcgcatcaaaggggaaggtgaggcggagatgcgcggtttttatgaggccatgcagtcgcagacgatgcgtttaaccccgcccgtcacgaagccgatgccgattgtgatcccgacctacaatggcgcgcgtaagcaggcaaacctcacgccgctgctggctattctgttgcagaaactcggtttcccggtggtggtgcatggcgtgagcgaagatccgacgcgcgtgctgacagaaaccattctggaattattaggcatcgaacccactctccatgctggccaggcgcaggcaaagctggaggggaaccagccggtctatattcccgtgcgcgcgctctgcccgccgctggaaaagcagctgggcatgcgctggcgcatgggggtacgtaacagcgcccataccctggcgaagctggcgacgccgtttgccgaagacgccgcgctgcgtctttccagcgtctcccatccggagtacgtgacgcgggtcggtcaattctttgccgaaatcggcgggcgagcgctgctgatgcacgggactgaaggggaggtttacgccaacccgcagcgttgtccacagctgatgctaattgagcctgccgggacgcgggtcgtgctggaacgtggggaagagaacagcgatgtgatcctgcctgagtcgaaagatccgcaagtcaccgcgcactggatcgtacagtgtctggccggaaaggtgccggttccgcagtctatcaagctgcaaatggcctgctgtctgctggcggcaggggaagtggcgtctgtggacgccgggttgcagcgcgtggcgcagtctttttaa

SEQ ID NO: 116280 - DNA, 537 bp, Enterobacter cloacae
atgaacaaggttgcattagggttgtttatcgccacaacggtgggatgttctgcatccgcatttgcggcaaccaacggtgaagggcagattaatttcaccggagaaattatcgattctgcttgccaggtcgtgaatggattaagtaatccattagatgttcagttaggaaaagtatctaaaacggtatttaccggcgcaggctctaccagcacactcacgaagtttgatattaagttaaccaattgtccggaaaccgtaacctcggctgcgattaacttcggtggtaccccggatgcggataataatgccacgctggcattaacgcccgataccgatgcggctactggtgtagctattcagctaatggatgcttccgggcagcctgtcactctgtataccccttcgaagcaatatcctttagcctccggaacggaggttaacgacctggagttcggtgcgcgttatattcaaactcaggcggcagttactgcgggccctgctaactctgtatcgaccttcaccgttatttataactga

SEQ ID NO: 116281 - DNA, 675 bp, Enterobacter cloacae
atgcgccacggttatttactgagcactcttttactggtagcagcctcggcacaggcgggtgtcgtgatcaatggcacccgtctggtctatcagggagataaaaaggaatcatctcttggtctttcaaacccagataccacggattatctggtgcagtcctgggtcgattccggcggtaaaaacctggccaaagccccgttcctgatcaccccgccgcttttccgactggatgcgaaagaagataacgtactacgcgtggtgcgtacgggaggaaatttaccggaagacagggaatctctgtactggctgaatattaaagcgatcccttcctcaaagcaggttgaaggcgtaaatacgctgcaaattgccattaacacccgaattaaattgctctatcgcccgtcagcggtaaaaggcaaaccagaagatatggccgataaacttgaatggcatcgcgaagggaatgatttagtggtgaacaatcccacgcctttctatatgaattttcaggccgtcaccctgaatggtcagaaaatcacgaaagccacctgggctgtgccgaaaactgaaacgcattttgctttacctggcaatgtcggaggctcgaccgtcgtgtattccattattacggattacggcagcatcagccagacatggtctaaacccgttcattaa

SEQ ID NO: 116282 - DNA, 2544 bp, Enterobacter cloacae
atgtaccgccataaaaagccgttcacctgccgattttcgtcattgctgatgactttttgttgcctggcaatggcgatctttgcgcagcaggttttggctgatgattattttaaccctgccctgctggacattgataacccgcagcaggaaaagaccgatctgtctgtctatgaaaaaggtcccggtcaggcgccaggtaaatatcaggtcgcggtatttatcaataacaataaaattgatacccgtgacgtgacctttaacgtagttaaagatccgcagggcaccagcacgcttcagccttgttttacactggacgaattaaagagcctcgggatcaaaacgcaaaaatatccgcagctgagggcagaaggtcaatgcgccgatctacacgccatcccttcggcatccgcgacctttcgcgtgcgcaatcagcagctgctgctgagcattccgcaaaaggcgctcggacaggtgccacgcggttacatcgacccgaaagagtttgacgaagggatcaacgcgggcctgcttaattacagcgtcaacgccagccagagccatgcgcgccagcagggtgaagaggatagcagcagccagtacgttaacctgcgtcccggcttcaacctcggggcatggcgcgttcgtaactactccacctggaatcgcagcaccacgggccacgaggaggaacagaaattcacctccgtttatacctatgcgcaacgcgatattgtggcaatgaaaagtgacgtgacggtgggccaaagcacctcaccttccgacgtttttgacagcgtcccctacaccggcgtggagctgaaatccgacaacgacatgctgccggacagcgaaaaaggctatgcccctattattcgcggcaccgcccacagtaacgcgctggtgatggtccgccagaacgggtacgtgatttatcagaacacggtcgcgccgggcgcattcgaaattaacgacctctaccccaccggcagcagcggcgacctccaggtcacggtgaaagaaactgacggcagcgaaagtcatttcgtggtgccgtttgcctccgtgccggtattgcagcgtgaaaaaaacctgcgctacagcgtaaccgccgggcgttatcgctcttatgacaaagacgttgaaaagaccccgtttgcccagggaagcgccatctacggtttacctcacggcttcacggcctacggcggcgtgcagcagagcagccactatcagtcccaggcgctcggcgccgggaaaaacatgggcgatctcggggcgttctccattgacgtgacccgcgccagagccctgctgaaaaaacagcagaccagcaagggccagtcgtggcgcgtacgctacagcaaagatttcgccggttcaggcaccaacttttcgcttgcgggctatcgctataacagcaaggggttttataccctggacgacactatggagtcgtatacccgcgccgacgactggtctgctccccagcagcgccgcgcccgtacagaagccaccattgaccagacgctgccagaaggttgggggtcggtgacgctgagcatggtgaaggaaacttactggagccagagccagaacatgacctccctgagcgtcagctacaacaacagctggcacggcgtgagctacagcctcagctacagcatgaacaaaaacacccacgacagcgatgaagacggtaatgaggtaacaaacgacaaccagttctcgctgagcgtttcggttccgctggatcgctggatgcataacacctgggccacgtacaacctgaacaacaccaaagatggcaccacgcagaacatcggtcttaacggtacggccctgaaagaagacaacctgaactggaatatccaggaagggctcagcagcaccggcagcggtaactccaccagcatcaacgccgattacaaagcgacctacggcgaagtgagcgcaggcgtcagtcaggataagtatcagcagaccctgaacgtcggtttgcagggcggcgtggtggcccacgctaacggggtaaccctgagccagccgctcggtgaaaccatcgcgctggtgaaagcgccaggtacgcacggcacccatatcaccaaccagacaggcgtggagactgacttccgcggctataccgtcgtgccgttcgtgaccgcgtatcgccataacaccatcgcactggataccgaaacgctgccggaggatgccgacgtcacccacgcggcgcagatcgtgacgccgacccgaggggccgtggtgcgcgccagctttactacccgcgtgggtaatcgcgtcctgatgacgcttacacaaaatggtaaaccgctgcccttcggcgcaacggtcaccaccggggataaggacagcgaatttattgtcggaaatgacggccagacttacctctcgggtcttccacagcaagggcatctcaacgtttcctggggaaaggaggcgagcgagcactgcgtcgctgactatgcgctaacggatgagaaagagaaaaccagcatcattaacgctgccgcgcagtgtcattga

SEQ ID NO: 116283 - DNA, 990 bp, Enterobacter cloacae
atgcaaatgattaaacagtgctttttcttactggttctgggaaccgccgcgttatttatgccgcatgcgaaggcgacctgcaccacgccggatctgcccaaaatgattaacgtggcctccatctctgtccccacgacgctggccgttggcgcaactatcccgggtacagagcaaagcgttcatgttgccgggcactgcgatcagagtatcgacagcggtctggaaattgtttcctgctactacggcaccggcgcggaaattcctgggctcaggggcgtttatgattccggcgtaccgggaattggggtcgcactaatgaacgatcagggtcagcgaatcagcggagccggcggagtacagtgcgattcacgcggaacgcctgttgcctatgtttctaccgatggcacacagtcgtttaactttgacgtcacgcttgaactggtgaaaacaagcgacgccgtgacatccggcacgctggtgcagtctcagaccgaattcggcattggcgtttttggccatgaagggatcggcagccctaatcatattgcgtatgcaggtaacgtcattttgcatcaggtcacctgctctgtttcgccaaaaaatctcaccgttaatttgggcgattttcccgtcagtgattttatgagcgtggggtttttatccagccccgctcagacgtttaatatcaccgttaactgtgacacaaccgttcagcctgagctaaaaatcaccagtgctaacgggtacgaaacggcatttgagggagtgatcaaactgacgaagcagacgggcatggcaaggggcgtcggggtaagaatgctgtttgatgaccatatcgcgacctttgactcctacgtcaacacccaaagccaggccgttgccaatgaaacgctggatatcccctttcaggttcgctacgagcagaccagcgatgtggtgacgcccggccccgccaacaccgtagcaaccatcactctcgcctataagtga

SEQ ID NO: 116284 - DNA, 504 bp, Enterobacter cloacae
atgaaaaagacaatcgcgtttctggcggtgggcttactggcccgggctcacgcagacgacattcagatccagatgacgggaaatatttacgccaatacctgcgttattgacagcgccagccgcaacctgacggtggacttaggccaggcggtgtcgggcagttttagagacgtgggggataccggcgagtggaaagacttttccctgtcagtatcgcactgcccagccacgctggcgcttgccacggcctttttctatggccaggcagacagcgttcatccgaccaaatttgccaatatcggtagcgcaaagggactggcgctggagctggcagaccgacaggacaaaatactgattgccccgcaggccgcctttaacgccgccatcaatccgggcgaccacacggcaacctttcctctgtccgcacgctactacgccacctcaatgcccgtcactgccgggacgttcagcagcgtgattcaggtgacattcacttaccagtag

SEQ ID NO: 116285 - DNA, 2178 bp, Enterobacter cloacae
atggctttaaccgctgcgctcaaggcgcaaattggcgcatggtataaggcgctacaacagcagatccccgactttatcccccgagccccgcagcggcagatgattgccgacgtggccaaaacgctcgccggggacgacggacgacatctggcgattgaagccccgaccggcgtcgggaaaaccctgtcgtatctcattcccggcattgccatcgcgcgggaagaagacaaaacgctggtggtcagtaccgctaacgtggccttgcaggatcagatcttcagcaaagatttgccgctgctgcgcaaaattatccccgatttacggttcaccgccgcctttggtcgcgggcgctacgtctgcccgcgcaatctggcggcgctggccagcagtgaaccctcccagcaggatctgctcgcgtttcttgatgacgagctgacgccaaacaacaaggcggagcaggagcagtgcgcaaagctaaaggccgatctcgacggctacaggtgggacggcctgcgggatcacaccagccaggcgatcggcgacgacctgtggcgcaggctcagcaccgataaagcgagctgcctgaaccgcaactgtcattactatcgcgagtgcccgttctttgtcgcccggcgtgagattcaggaagcggaggtggttgtcgccaaccatgcgctggtgatggctgccctggagagtgaagcggtcctgccggagcccaaaaacctgctgctggtgctggatgaaggtcatcatctgcccgacgtggcgcgggatgcgctggagatgagtgcggaaattaccgccccgtggtttcgcctgcaactcgatctgttctgcaagctggtggcaacctgcatggagcagttccgcccgaaaaccacgccgccgctggcggtcccggagcggttgagcgagcactgtgaagaggtgtacggcctcatcgcctcgctgaataacattctcaacctgtatctccccgccacccaggaagcggaacaccgctttgcgatgggtgagttgccacaggaagtgatggagatttgccagcagctggcgaagcaccttgaaaagctgcgcgggctggcggagatgttcctcaacgatctcagcgagaaaaccggtacccatgacgtggtgcgcttgcaccgcattctgctgcaaatgaaccgcgcgctgggcatgtttgaggcgcagagcaaactctggcggctggcctcgatggcgcaggcgtccggggcgccagtgacaaagtgggccacccgcgaagtgcgagacgggcaggtacatctgttcttccactgcgtgggcatccgcgtggccgatcagctggaaaagctgatctggcgcagcgtgccgcacgtggtagtgacgtcggcgaccctgcgttcactgaacagcttctcaaggttgcaggaaatgagcggcctgaaagagaaagcgggggaccgttttgtggccctggactcgccgttcaaccactgtgagcagggcaagctggtgatcccgcgcatgaactatgagccgcttatcgataacgaagagcagcatattgcggaaatggcggcctacttccgcgagcaggttgagagtaaaaaataccccggtatgctggtgctgtttgccagcggccgcgcgatgcaacgctttctggagcacgtcaccgatctgcgcttactcctgctggtgcagggcgatcagccgcgctatcggctggtggaaacccaccgtaaacgcattgataacggcgagcgtagcgtgctggtggggctacagtcctttgcggaagggctggatttaaaaggcgactacctgacgcaggtgcatatccataaaattgccttcccgcccatcgacagcccggtggtgatcaccgaaggcgaatggctgaaaagccttaaccgttatccgtttgaagtgcaaagcctgcctgcggcgtcgtttaacctgatccagcaggtcgggcgcttgatccgtagccacggctgctggggcgaggtggtgatttatgacaaacgcctgcttaccaaaaactatggccagcggctgctgaatgcgctgccgatcttcccgattgagcagccagaagtgccggaggtaaaaaaacgcccggcaaaaccctctgccgggcgtacaaaaagcatccgtgcaaagaggcgcggtcctactggtaagtga

SEQ ID NO: 116286 - DNA, 1383 bp, Enterobacter cloacae
atgtcttttgattcccttggtctgaacccggaaattctgcgcgccatcgcagagcagggctacgttgagccaacccctatccagcagcaggccattccggccgttttgcagggccgtgacctgatggcaagcgcgcagaccggtaccggtaagaccgcaggctttaccctgccgctgctggagctgttggtaaaaaaccagccgcacgccaaaggccgtcgtccggtgcgtgcgctgatcctcaccccaacccgcgaactggcggcccagattggcgagaatgtgcgtgaatacagccgctacctcaacattcgttcgctggtggttttcggcggggtaagcattaacccacagatgatgaagctgcgcggcggcgtggacgtgctggtggcaacgccggggcgtctgctggatctggaacaccagaacgcggtgaagctcgataacatcgaaattctggtgctggacgaagccgaccgtatgctggatatgggcttcatccacgacattcgccgcgtgctggcgaagctgccgacgcgtcgtcagaacctgctcttctccgcgactttctccgacgagatcaaggcactggcggaaaagctgctgcataacccgctggaagtggaagtcgcgcgccgcaataccgcctccgagcaggtgacgcagcacgtgcactttgtggataagaagcgcaagcgggaactgctctcccagatgatcggccagggcaactggcagcaggtactggtctttacccgcaccaagcacggcgctaaccacctggcggaacagctcaataaagacggtattcgcagcgcggcgatccacggcaacaagagtcaaggtgcgcgtacccgcgcgctggctgattttaaatccggcgacatacgtgtgctggtggcaaccgacatcgccgcccgtggcctggacattgaagagctgccgcacgtggtgaactacgagctgccaaacgtgccggaagactacgtgcaccgtatcggccgtaccggccgtgcggcggcaaccggggaagcgctctctctggtctgcgtggatgaacacaagctgctgcgcgacatcgaacgcctgctgaagaaagagatcccgcgcattgagaccccgggttatgaagtggatccgtcgatcaaagccgagccaattcagaacggtcgtcagggcggcggtcgcggtcagggcggcggcggtcgcggtcagcagccgcgtcgtgccgaaggtggcgcgccgaaatcttcgggcaaaccgccgcgtcgtaataacgacagcaaaccagccggtgaaaacccgtggcgtagcggcgaagggaaaccggcaggcgaggggcagcgccgacgccgcccgcgtaaacctgctaacccgcagtaa

SEQ ID NO: 116287 - DNA, 678 bp, Enterobacter cloacae
atgaatacaaccccaacgacaaccaaaggcgaacaggcgaaaagtcagcttatcgccgctgcgctggcgcagtttggcgagtatggtctgcatgccaccacgcgggatatcgccgctcaggccgggcagaatattgcggccatcacctactattttggctcaaaagaggatttatacctcgcctgtgcccagtggatcgcggattttatcggcaccagcttccgcccgcacgtggaagaagccaccgcgctgttcagccagccagagccggaccgggctgccatccgccagttgatccttaacgcctgtcacaacatgatccgcctgctgacgcacgacgatacgctgaacctgagcaaatttatctcccgcgagcagctctcccccactgccgcgtaccagctggtgcacgatcaggtgatcgccccgatgcacagccatctgacccggctgatcgccgcctataccggacgggacgccagcgataccgacaccattttgcatacccacgccctgctgggcgaagtgctcgccttccgtctggggcgtgagaccatcctgttacgtacgggctggacacaattcgatgaggataaagccgcgcaaattagccaggtcattacctgtcacgttgatctgatcctgcaaggcttaacgcaaaggagccagaagtcatga

SEQ ID NO: 116288 - DNA, 996 bp, Enterobacter cloacae
atgaaaaaacctgtcgccatcattctggtggttgttgtgttacttgctgcgggaatcggtggctggctgtggtatcagagccagcaggatcgtggcctgacgctgtacggcaacgtggatatccgcaccgtgaacatgagcttccgcgtcggcggacggctggcctcgctgaacgttgacgaaggcgatgccatcaaagccgggcagacgctgggaatgctggacaaagccccgtttgagaacgcgctgatgcaggcaaaagcaggcgtctccgtcgcacaggcgcaatacgacctgatgctggcgggctaccgtgacgaagagatctcccaggcggccgctgccgttaagcaggcaaaagccgcctatgactatgcgcagaatttctataaccgtcagcaaggcttatggaaaagccgtactatttccgccaacgacctggaaaacgcgcgctcatcccgcgaccaggcacaggcgacgctgaaatctgcccaggataagctaagccagtaccgcaccggtaaccgtgcgcaggacattgcccaggcgaaggccagccttgagcaggcacaggcgcagttagcccaggcggagctggatctgcacgacaccacgttagtcgccccgtctgacggcacgctgatgacccgcgccgtggagccgggcagcatgctcagcgcgggcagcaccgtgtcaacgctctccttaacccgtccggtgtgggtgcgcgcttacattgatgagccaaatctgggccagatgcagccgggccgcgaactgctgctctataccgacggtcgcccggacaagccgtatcacggcaaagtgggcttcgtctcccctaccgccgagttcacgccaaaaaccgttgaaaccccggacctacgtaccgacctggtgtatcgcctgcgcatcatcgtcaccgatgcggacgacgcgctgcgtcagggcatgcctgttaccgtgaccttaaacgacggggaacgacatgaatga

SEQ ID NO: 116289 - DNA, 1740 bp, Enterobacter cloacae
atgaatgatgcggttatccagctcaacaatctggtcaaacgcttcccgggaatggctaaaccggcggtcgcgccgctgaattgtacgattcagaaaggctatgtgaccgggctggtggggccggacggcgcgggtaaaaccacgctgatgcggatgctggcgggattgctgaagccggatgaaggcagtgccagcgtgcttggcctcgatccgatcaaagacgacgcggcgctccacggcatgctcggctatatgccgcagaagtttggtctgtacgaagatctgacggtaatggaaaacctcaacctgtatgccgatctgcgcagcgttaccggcgaaacccggcagaaaaccttccagcgtctgctggcgtttacctccctcggcccgttcaccgaccggctggcgggcaaactttccggcgggatgaagcagaagctggggctggcctgcacgctggtgggcgaaccgaaggtgctcttgctggatgaacccggcgtgggtgtggacccgatttcccgccgcgagctgtggcagatggtgcacgagctggcgggtgacggcatgctgatcctctggagtacctcttaccttgatgaagcagagcagtgccgcgacgtgctgctgatgaatgaaggcgaactgctctatcagggcgaacccaccgagctgacgcaaaccatggccgggcgcagttttctgctgcacagcgcgcaggagtccaaccgcaagctgctgcaacgggtactgaagctgccgcaggtgagcgatgggatgattcagggccgttcggtgcgcgtgatcctcaaaaaagagactaccgccgacgatatccgccgtgcgcagggtatgcctgagatcgacatgacagagaccgcgccgcgctttgaagatgcgtttatcgatctgctgggcggggcgggaacctcagaatcaccgcttggcgccatcctgcacacggtggaaggcacgccgggcgaaacggtcattgaagcaaaatcgctcaccaaaaaattcggcgatttcgccgccaccgataacgtcaattttgccgtgaagcgcggcgagatatttggcctgctcgggccgaacggcgcggggaaatccaccacctttataatgatgtgcggcctgctggtaccgacctccggcaaagcgctggtgctgaacatggatctcaaagtcagctccggcaaggcgcgccagcacctgggctatatggcgcagaagttttcgctctacggcaacctgacggtggagcaaaatctgcgatttttctccggcgtctacggcctgcggggacgggcacagaatgagaagatcggccgcatgtgcgacgccttcggcctgaccgatatcgcctcacacgctaccgaagcgctgccgcttggcttcaaacagcggctggcgctggcctgctcactgatgcacgagccggatatcctgtttcttgatgaaccgacttcaggcgtggaccccctcacccgccgagaattctggttgcatatcaatagcatggtggaaaaaggcgtgaccgtgatggtcaccacccactttatggacgaggcagagtattgcgaccgcatcgggctggtctatcgcggcaagctgattgcccacggcacgccggatgacctgaaagcgcaggccgccgacgacgcgcagccagacccgaccatggagcaggcgtttatcaccctcatccaagactgggataaggagaatactcatgcgcagtaa

SEQ ID NO: 116290 - DNA, 1134 bp, Enterobacter cloacae
atgcgcagtaacaccctttcctggcgccgggtgcgcgccctgtgcgtcaaagagacgcggcagattgtgcgtgaccccagcagctggctgattgcggtggtgatccccctgctgctgctgtttattttcggctacgggattaacctcgactccagcaagctgcgggtcgggattttgctggagcagcagagcgaagaggcgctggacttcacccacgccatgaccggctcgccctacatcgatgccaccatcagcgacaaccggcaggaactgatccagaaaatgcaggccggaaaaattcgcggtctgatcgtcattccggtcgattttgccgccaatatggcacgcccgggcgccgatgcgccaattcaggtgatcaccgacggcagcgagccgaacaccgccaacttcgtgcagggctacgcggagggtatctggcagctctggcagatgcagcgcgccgaagaccggggggaggagtttgaaccgctgattgacgtgcagacgcgctactggtttaaccccgccgccatcagccagcattttattattccgggggcggtcaccatcatcatgacggtgattggcgcgatcctcacctcgctggtgatcgcccgcgaatgggagcgcggcaccatggaggcgctgctctcgaccgaagtaacgcgcgtcgagctgctgctctgcaagctgatcccctactacttcctcggcatgctggcgatgctgctctgtatgctggtctcggtatttattcttggcgtgccgtaccgcggctcgctggtgctgctgttctttattaccagcctgtttttgctcagcacgctggggatggggctactcatctccaccatcacccgcaaccagtttaacgccgcgcaggtggcgcttaatgccgccttcctgccgtcgattatgctctccggctttatcttccagatagacagtatgccggcggtgatccgcgccgtgacgtacatcattccggcgcgctactttgtgagcaccctgcaaagcctgttcctggcgggaaatattccggtggtgctgattatcaacaccctgtttttgctggcgtcggcggtgatgtttatcgggctgacgtggatgaaaacgaaaagaagattagattag

SEQ ID NO: 116291 - DNA, 1107 bp, Enterobacter cloacae
atgtttcaccgtttatggacattgatccgcaaagagctgcaatccttgctgcgcgagccgcagacccgcgccattctggtgctgccggtgctgcttcaggttgtactgtttccgtttgccgccacgctggaggtcaccaacgccaccatcgccatttacaacgaagacaacggcaagcattccgtcgagttgacgcagcgtttcgcccgcgccaaagcctttacccatgtcctgcttctggaaagcccgcaggcgatccagcccaccatcgacacgcagaaagcattattgctggtgcgcttcccggcggacttctcccgcaacctggacacattccagaccgcgccgatgcagctgatcctcgacggacgtaactccaacagcgcccagattgcggcgaactatttgcaacaggtggtgaaggattaccagcaggagctgatggcaggcaaacccaaacccaacaacagcgagctggtggtgcgcaactggtacaacccgaacctggactataaatggtttgtggtgccgtcattaatcgccatgatcaccaccattggcgtgatgattgtcacctcgctgtccgtggcgcgcgaacgtgagcaaggtacgctggatcagctgctggtctcaccgctcgccacctggcagatatttgtcggcaaggcggtgccggcactgattgtcgcgacgttccaggccaccatcgtgctgggagtgggaatatgggcgtaccagatcccgtttgccggatcgctggcgctgttttacttcacgatggtaatttacggcctgtcgctggtggggtttgggctgctgatttccgcgctctgctcaacgcagcagcaggcgtttatcggggtgtttgtctttatgatgccggcgatcttgctttcagggtacgtttcgccagtggagaacatgccggtgtggttacaggatttgacgtggataaacccgattcgtcacttcacggatatcaccaagcaaatctatctgaaggatgcgagtctggatattgtatggggaagtttgtggccgctactggtcatcgcggccacaacgggctcagtggcctatgcgatgtttagacgaaacatcgcgtag

SEQ ID NO: 116292 - DNA, 411 bp, Enterobacter cloacae
atgaagtggcaacaacgcgttcgtgtcgcaaccggtttgagttgctggcagataatgttgcatttactggtcgtggccgtactggtgatgggctggatgagcggcacgctggtgcgtgtcggcttagggttatgcgtggtttacggcgtgaccgtgctgtcgatgctgtttttacagcgtcaccacgacgcgcgctggcgtgaagtgggtgatgtgctcgaagagctcaccaccacctggtattttggtgcggcaatgatcgtcctgtggctgttgtcacgcgtgctgcaaaacaacctgctgctggccctggcgggtctggctatcctcgcagggcctgcggtggtgtcattgctcaccaaagagaaaaaactacgcgatgtttcgtctaaacatcgcataggccactga

SEQ ID NO: 116293 - DNA, 762 bp, Enterobacter cloacae
atgagcaaaaaaacgcagcatttctcgcttaaggtgctgacgataaacattcataagggcttcacagcatttaaccgccgcttcattttaccggagctgcgcgacgcggtgcgcaccgtcagcgccgatattgtctgcctccaggaggtcatgggcgcgcacgaagtgcaccctatgcatttcgaaaactggcccgacacgccccactacgagtttctggcggataccatgtggagcgattacgcctacgggcgcaatgcggtctacccggaggggcatcacggtaacgcggtgctgtcgcgttttcctatcgagcattatgagaaccgcgacgtctccgttggcgagagcgaaaaacgcgggctgttatactgtcgtatcacccccccggcgctcgattttcccattcatgtgggctgtgttcatcttggcctgcgtgaagcccaccgtcaggcccagctacagatgctggcagactggaccaatgcgctgccggagggcgagcccgtcgtggtggccggtgatttcaacgactggcgacagcgggccaaccatccgctgaaggtgaaggcggggctggaggagatctttacccgctcacgcggtcgtcccgcgcggacgtttccggtgcgcttccccctactgcgccttgaccgcatttacgtaaaaaatgcccacgccagcagcccgactgcgctggctttactcaactggcgacatctctccgaccatgccccactcagcgcggagattcacttatga

SEQ ID NO: 116294 - DNA, 1239 bp, Enterobacter cloacae
atgaaatgcacatggcaggaaggtaaccgtattacgctgctggaaaatggcgataacttttatccggcggtttttgaggcgattagccacgcacagcagaaagtctttctcgaaacgtttatctggtttgaagacgatgtgggcaggcagttgcacagcgcactgctgcatgccgcccgtcgcggtgtaaaaatcgaggttctgctcgacggatatggttcgccggatctcagcgacgaatttgttaacgagctcaccgccgcaggtgtggtgttccgctattacgatcccggcccgcgtctgttcggcatgcgcaccaacctgttccgccgaatgcaccgcaaaattgtggtggtggatgaaacggtggccttcgttggcggcattaactactccgccgagcatatgtcggattacggtcccgaagctaaacaggactacgcgatccgtatcgaaggaccggtggttcaggacatccagctgttcgtgctggaaaacttacccggcaaagaggccgctcgccgctggtggcgacgccgtcatcgcccggaagagaaccgcaagcccggcgaggcgcaggcgctgttcgtctggcgggataacgaggagcaccgggacgatatcgagcgtcattacctgaagatgctggcgaatgcgaagcgtgaggtgattatcgccaacgcctatttcttccccggttaccggattttgcacgccatgcgcaacgcggcccgacgcggcgtgagcgtgaagcttatcgtgcagggtgagcccgatatgccgattgtgaaggtcggcgcgcgtctgctctatcgctatctggtcaaaagcggcgtgcagatctatgaatatcgccgccgcccgctgcacggcaaagtcgccgtgatggatgaccactgggcgaccgttggctccagcaacctcgatccgctgagcttatcgctcaatctggaagcgaacctgatcatccacgatcgccagtttaatcagaccctgcgcgataaccttcagggacttatcaataaagactgcgtgcgtgtggatgagtctatggtgccaaaacggagctggtggaacgtgggcatcggcgtggtggtgttccacttcctgcgccacttcccggccatggtgggctggctgcccgcgcatacgccgaaactggcgctggtggatccgcctgtgcaacccgaaatggaaacccaggaccgcgtagaggcggaagatggagggaaaacctga

SEQ ID NO: 116295 - DNA, 963 bp, Enterobacter cloacae
atgtcgaaatctcatcctcgctggcggctggcgaaaaaaatcctgacctggctgttcttcattgccgtcgcggtcctgctggtggtgtatgcccaaaaggtggactgggaagaggtgtggaaagttattcgcaactacaaccggacagtcctgctgggggccgttgggctggtgattgtgagctacctgatgtacggctgctatgacctgctgggacgtgcctactgcggacataagcttgccaaacggcaggttatgctggtgtcattcatctgctatgcctttaacctgacgctgagcacctgggtgggcgggattggtatgcgctatcgcctgtactcccgccttggcttaccgggcggcaccatcacgcgtattttctccttaagcatcaccaccaactggctggggtatatcctgctgggcggggtgattttcaccatcggcgtggtgcagctgcctgcgcactggtacatcgatgaggctaccctgcgcatcctgggcatcgtactgctgctgatcatcgccgcctacctgtgggcctgcgcctttgccaaacgtcgtcacatgaccattaaaggccagaagctggtgctgccgtcatggaagtttgccgtcctgcaaatggtggtttccagcgctaactggatggcgatgggggccattatctggctgttgattggcgaagatgtgaactacttcttcgtgctgggcgtgctgctggtaagcagtattgccggggtgattgtgcatattccggcgggtattggcgtactggaggcggtgtttatcgcgctgcttgcgggggagcatgtgtctcacgggacgattatcgccgccctgctcgcgtaccgcatgatctactacttcctgccgctggcgctggcaacggtctgttatctggtgctggagagtcgggcgaagaagctgcgcgcgaagaacgagaggatgttggcgaagtga

SEQ ID NO: 116296 - DNA, 708 bp, Enterobacter cloacae
atggaccgatttccgcgttccgattcgatagttcagcagacccgtagcgggctgcaaacctacatggctcaggtgtatggctggatgacggttggcctgctgcttaccgcgtttatcgcgtggtatgcggcaaatacgcctgaactgatgatgtttatcttctcaagcaaaatcaccttctttgggctgattattgcgcaactggcgctggtgttcgtgctctccgggctggtgcacaagctcagcgcgggtatggcgaccacgctgtttatgctctattcggcgctgaccgggctgacgctttccagtattttcatcgtttacacctactcttccatcgccagcacgtttgtggtgaccggcgggatgttcggtgtgatgagcctgtacggttacaccaccaaacgtgacctgagcggcttcggcaacatgctgtttatggggctgattgggattgtgctggcgtcgctggtgaacctgtggctgaagagtgacgcgctgatgtgggcggtgacctatatcggggtggtgatcttcgtgggcttaaccgcttacgatacccagaagctgaaaaacatcggtgaacaaattgatgttcgcgacagttcaaatctgcgcaaatactcgattctgggcgcgctgacgctttatctggacttcatcaacctgttcctgatgctgctgcgtatcttcggcaaccgtcgctag

SEQ ID NO: 116297 - DNA, 453 bp, Enterobacter cloacae
atgacggaaacccgaattctggtcggccatgagcgttttaacgtgggcacggaatatgactggctggccgggcgcgacgaagacggcgcggtcgtgacgtttaccgggaaagtgcgtaatcataatctcggcgacagcgtaaaagcgctgacgctggagcactatccgggaatgaccgaaaaatcgctggcggccattgtggaagaggcgcgaggccgctggccactagggcgcgttacggttatccatcgcatcggcgaaatgtggcccggcgaagagattgtgtttgtcggcgtcaccagcgcccatcgcgggagtgcttttgcggcgggggagttcatcatggattaccttaaaaccaaagcgccgttctggaagcgtgaagcgacgccggaaggtgagcgctgggtggaatcacgcgacagcgataaacatgccgccagccgttggtag

SEQ ID NO: 116298 - DNA, 246 bp, Enterobacter cloacae
atgattaaggtgctcttttttgcccaggtccgtgagctggtcaataccgacagcctgacgctggacggctctttcgaaaatgtcgccgccctgcgtgcgcatctggcggcgcaaggcgaccgctgggcgctggcgctggacgaaggcaaactgctggccgccgtgaaccagacgctggtggagttgacccacccgctggccgatggggacgaagtggccttcttcccgccggtcacagggggttaa

SEQ ID NO: 116299 - DNA, 486 bp, Enterobacter cloacae
atgtcacaactgacccacataaacgccgctggcgaagcgcatatggtggatgtctccgccaaagccgaaacggtgcgcgaggcgcgtgctgaagcgttcgtcaccatgctgccggagacgctggcgatgattatcgacggcagccatcacaagggtgacgtgtttgccaccgcccgcatcgccggtattcaggccgctaaacgtacctgggacctcatcccgctctgccatccgctgatgctcagcaaagtggaggtaaatttgcaggcgcagccggcgcataaccgtgtgcgtatcgagtccctgtgccgcttaaccgggaaaaccggcgtggagatggaggcgttgacggcggcctccgtggcggcgctgaccatctacgacatgtgtaaagcggtacagaaagatatggtgattggcccggtgcgtctgctggcaaaaagcggcggcaaatccggtgattttaaggtggaaagccatgattaa

SEQ ID NO: 116300 - DNA, 513 bp, Enterobacter cloacae
atgagtcaggtaagcgcggaatttatcccgacacgcattgctattcttaccgtttccgaacgtcgtggtgaagaggatgatacctctggccactggctgcgcgaggcggcacacgaagccggacaccagattgttgataaagcgatcgtcaaagaaaaccgttacgccattcgcgctcaggtctcacagtggattgcgggtgatgacgtccaggtggtgctgatcactggcggcaccggctttaccgcaggcgaccaggcaccggaagcgctgctcccgctgttcgatcgcgaagtggaaggcttcggcgaagtgttccgcatgctctcctttgaagagattggcacctctacgcttcagtcccgtgccgtcgcgggggtggcgaataagacgctgatcttcgccatgccggggtcgaccaaagcctgccgcaccgcgtgggaaaacattattgccccgcagctggatgcccgtacccgtccgtgtaattttcatccccatttaaagaaataa

SEQ ID NO: 116301 - DNA, 990 bp, Enterobacter cloacae
atggcttcacaacttactgatgctttcgcgcgtaagtttttctacttacgtttgtcgattaccgacgtgtgtaacttccgttgcacctactgcctgcccgatggctacaagccgggcagcgtcaccaataatggctttctctccgtggatgaagtacgccgcgtcacgcgcgcgttctctgaacttggcacggaaaaagtgcgtcttaccgggggagagccctccctgcgccgtgatttccctgacatcattgccgccgtgcgtgaaaacgaacgtatccgccagatcgcggtgaccaccaacggttaccgcatggcgcgtgacgtggcgaactggcgcgatgcggggctgacggcgatcaacgtcagcgtcgatagcctggacgcccgtcagttccacgccattaccggccaggataagttccagcaggtgatggacggcatcgatgccgcgttcaccgccggtttcgacaaggtcaaagtcaataccgtgttgatgcgtgatgtgaaccaccatcagctggacactttcctggcgtggatcaaaccgcgccgcattcaactgcgttttattgagctgatggagaccggggagggtagcgagctgttccgtcgccatcatatctccggcatggttctgcgcgacgaactgctgaaacgcggctggatccaccagatccgccagcgcagcgatggcccggcgcaggtcttttgtcatccggattatgaaggcgaaatcggcctgatcatgccctatgaaaaagacttctgtgccagctgcaaccgcctgcgcgtctcctccgtcggcaagctccatctttgcctgttcggggatggcggcgtcgatctacgcgatttgctggaagatgacgcccagcaggacgcgcttgaagcacgtatttccgaggcgctgacgcacaaaaagcagacccatttcctgcatcagggcaacaccggcattactcagaacctgtcctatatcggcgggtaa

SEQ ID NO: 116302 - DNA, 909 bp, Enterobacter cloacae
atgcgcaatcgcacttttgcggatctggaccgtgtggtcgctcttggcggaggtcacggtctgggacgagtgatgtcgtcgttatcgtcactgggctcgcgcctgacgggcatcgtgacaacaacggacaacggcggctcaaccgggcggatccgacgtgctgaaggcgggatagcctggggtgacatgcgcaattgcctcaaccagctcatcacggagccaagcgtggcctcggcaatgtttgagtaccgttttggcggaaatggtgaactttcaggccataaccttggaaatctgatgttaaaggcgttggatcacctgagcgtgcgccctctggaagcgatcaatttaattcgtaacctgttaaaggtggatgcattcctgatcccgatgtccgaacagccggtggatttaatggcgatcgatgccgacgatcacgaagtgtatggtgaagtgaatatcgaccagcttcttcttccgccaaaagagctaatgacctaccccagcgtacccgcaacgcgtgaagcggtagaagcgattgccgaggccgatctgatcctgattgggccgggaagtttttataccagcctgatgccgatcctgctggtgaaagagctggcgcaggcgctgcgcagaacgcctgcgcccatggtctatatcggtaatttaggccgcgaactcagcccggcggcggcaagcctgtcgctggcggataagctggacctgatggaacagtacgttggtaagaaaattatcgatggtgtcgtggtcgggccgaaagtggatgtatcggggattggcgatcgcgtggtggtgcaggagccgctggaagccagcgatattaaatatcgccacgaccgccatctgctgcgcgaggcgctggagaaggcgattcaggcattaggttag

SEQ ID NO: 116303 - DNA, 2016 bp, Enterobacter cloacae
atgagtaaaccgtttaaactgaattctgctttccgtccttccggggatcagcccgaggctattcgtcgcctggaagaggggctggaggacgggctggcgcaccagaccctgctgggggttaccggttcgggcaaaaccttcaccattgccaacgtcattgccgatctccagcgtccgacgatggttctcgcgccgaacaaaacgctggcggcgcagctgtatggtgagatgaaagagttcttcccggaaaacgcggtggagtatttcgtctcctactacgactactaccagccggaagcctacgttcccagctccgacacgtttatcgagaaagatgcctcggtgaacgaacatatcgagcagatgcgtttgtcggcgaccaaggcgttgctggagcgtcgtgatgtggtggtggtggcctcggtgtcggcgatctacggcctgggcgatccggatctctatctcaagatgatgctgcacctgacgcaggggatgatcatcgatcagcgtgcgattttgcgccgtctggcggagttgcagtacacccgtaacgatcaggcgttccagcgcgggaccttccgcgtgcgcggcgaggtgattgatatcttcccggcggagtcggacgatatggcgctgcgcgtggagctgttcgacgaagaggttgaacgcctgtcgctgttcgatccgttgaccggtcacgtcgagtcggtgatccagcgcttcaccatctacccgaaaacgcactatgtaacgccgcgcgagcgtattgtgcaggcgatggaagagatcaaaaccgagctggcggaccgccgtaaggtgctgctggcgaacaataagctgctggaagagcagcgcctgagccagcgtacccagttcgatctggagatgatgaacgagctgggctactgctccggcatcgaaaactactcgcgctacctctccgggcgcgggccgggcgaagcgccgccgacgctgtttgactaccttccggcggacggcctgctggtgatcgacgaatcccacgttacgatcccccagatcggcgggatgtaccgcggtgaccgcgcgcgtaaagagacgctggtggagtacgggttccgactgccgtcagcgctggacaaccgtccgatgaagtttgaagaatttgaggcgcttgctccgcagaccatctacgtatcggcgacgccgggcaactacgagctggaaaaatccggtgatgacgtggtggaccaggtggtgcgtccgaccgggctgctggatccaattatcgaggttcgtccggtggcgacgcaggtggacgatctgctctcggaaatacgtgcccgttccgccatcaacgagcgcgtgctggttaccacgctcactaaacgtatggcggaagatttgacggagtatctggaagaacacggtgagaaggtgcggtatctgcactcggatatcgataccgtggagcgtatggagatcatccgcgatctgcgtctgggcgagttcgacgtgctggtcggtattaaccttctgcgagaagggctggatatgcctgaggtgtcgctggtggcgattctggacgcggacaaagagggcttcctgcgttccgagcgctcgctgatccagaccataggccgcgccgcgcgtaacgtcaacgggaaggcgatcctgtacggggataaaatcaccccgtcgatggccaaagcgattggcgaaacggaacgtcgtcgcgagaagcagcagcgctacaacgaagagcacggcatcacgccgcaggggctgaacaagaaggtggtggatatcctggcgctgggtcagaacattgcgaagaccaaagcgaaaggccgcagcaaggcccgttcagtggtggaagaggataccgtcgcgctgacgccgaaagcgttgcagcagaagatccacgagctggaagggcagatgatgcagcacgcgcagaacctggagttcgaagaggccgcgcaaatccgcgatcagctgcatcagctgcgggatctgtttattgcggcatcgtag

SEQ ID NO: 116304 - DNA, 723 bp, Enterobacter cloacae
atgttgagtctgcgtgctgtaaatcagttttacggaagccaacatacgctatggaacgtgaatatcgatttcccgcaaggcatctgtacgggcattgttggcctgcctggcatgggcaaatccacgcttatgaactgcattaccggaaaggtgcccgtcgagagcggcaccatcatctggcatgaggctggcgcgccgccgcataacttgctcaaccctgcgtcagcattcccggcgccgccgacgataggctacgtcccgcaggatcggcgaatattttcccagctcaccgtcgatgaaaatctgcatatcgctatgcgggcgacggggaaacccgacccggcatcaaaaagtgacgtgtatgccctgtttccggagctctatccgctgcgacagagccgtgcctctgcgctgtcccctgacgaccagtatcagctggccctcgccagtgcgctggttaatcgtccgcgcgtgttgattctggatgagcccatgcatggcgcagggcacggtttcgcgcgcaggctggggcagttgctggtgcggttgaatcgggagctgggaatgacggtgctgttagcggagcaacagctgtcgtttatccgccgggtagcggatcgtttctgcatgctctatcgcggacgtaacgtggcacagggccacgttaacgagctggatgacgaccttattgcgcactggatggcgcgggacataaggcgctga

SEQ ID NO: 116305 - DNA, 702 bp, Enterobacter cloacae
gtgactgaacgttattttgttaccggcacggacactgaagtcggtaaaacggttgccagcgccgcgctgttgcaggcggcgcgtctgctggggaaaactacggccgggtataagcccgtagcctccggcagcgagatgacgccggaaggcttacgtaataccgatgcgctggcgctacagcgtaacagcagccttacgctggcctattctgcggtgaacccctatacctttgctgaacccacctcgccgcacatcgtcagcgtcgatgaagatcgtccgattgatttttcggtgctctcttccgggttacgcgtcctggaaacgcaggccgactgggtgctggtggagggggctggcggctggtttaccccgctgtccgacgagcagacatttgctgactgggtgcaggccgagcagcttccggtcattctggtggttggcgtgaagcttggctgtatcaatcacgccatgctgaccgcccaggccgtgcagcaggccgggttgcgtctggcagggtggattgccaatgacgtggtagcgccgggtaaacgtcatgctgagtatctggcgacgctgaagcgggtgctgcctgcgccgtttctcggcgagatcccgtggcttgccgacggtgcagagcaggcggaaaccggacgctatctcgacctcagcgccttatgtcccgcgccatccagtgcgcaataa

SEQ ID NO: 116306 - DNA, 756 bp, Enterobacter cloacae
atgtctcccgtcaataaacaggccgttgccgccgcgtttggccgggctgcgcaaagctattcacagcacgatgagctgcaacgcctgagcgcccgcgggctgctggccgcgctcggtgaggggcgttttgcgcaggtgctcgacgctggctgcgggcctggcggcaatagccgctactggcgcgcaacgggtagccacgtcacggcgctggatttatccgcgcagatgctggatgaggcccgccagcagcagtcagcagaccgttatctggtggccgatatcgaggccatcccgctggaggatgcgctgtttgaccttgtctggagccatctggcggtgcagtggtgcgccagcctgccgcaggccctacgcgagctgtaccgcgtggcgcggcccggcggagcggtggcctttaccaccctgctggaaagttcgttgccagagttgaatcaggcgtggagggcagtggatgcgcagccgcacgccaaccggtttctctcgcacgtacaggtcactcaggcgctggcaggctggcgctatcgcagcgtggtccagaccgtcaccctcgaatttagcgatgcgttaagcgccatgcgatcgcttaagggcataggcgcgacgcacctgcacgccggacgggagaagaaaccccttacccgtggccaactccagcgtctcgagctggcctggccgcaggagcggggccggttcccgctctcttatcatctttttcatgggattattgaacgtgactga

SEQ ID NO: 116307 - DNA, 1158 bp, Enterobacter cloacae
atgacctggcaggcacgtatcaggaccgcgctcgacgagcggcgggcggcggatgcgtttcgggtgcgcagggtagtggaaaacggtgcaggccgttttctctcccgggaaggagagcggttctgtaatttctccagcaacgattatctgggcctgagccagcacccgcagatcgttcgcgcctggcagcagggcgcggatcgttacggcgtgggcagcggtggctccgggcacgtcagcggctacaccacggcgcatcaggcgctggaggaagagctggccgactggctgggctacccgcgggcgctgctgtttatctccggttttgccgcgaatcaggcggtgattaccgccctgatgggcaaagacgaccgcatcatcgcggaccgcctgagccacgcgtccctgcttgaagcggccagtctcagcccggcgcagctgcggcgttttgcccataacgatgcctctcagctgaacgtcctgctgggtaaaccctgttcagggcttcagctggcggtgacggaaggggtattcagcatggacggcgacagcgcgccgcttgccactttgcatgacgtcgcaaaacagcagaacgcctggctgctggtcgacgatgcccacggcattggcgtcaccggcgaggaggggcgcggaagcgcgcaccagcaacgcgtcaggccggaactgctggtggtcaccttcggcaaaggcttcggcgtcagcggcgccgcggtgttgtgcagcgagccggtggccgattacctggtgcagttcgcccggcacctgatctacagcaccagcatgcccccggcgcaggccgtggcgctctctgcgtcgcttgcggtgatccgcggcgaagacggcgctgaacgccgggcgcgcctggccgaccatattcagcgttttcgccggggggtaagcgcactgccttaccggcttaccgactcgcacagcgccattcagcccgtgattgtgggtgaaaaccatcgggcgctgatgctggcacaggcgctacgagaacgcgggcagtgggtcacggcgatccgcccacccaccgtgccgccaggcaccgcgcgcttgcgtctgacgctcacggcagcgcacgagccgcaggatatcgatacgcttctggaggcactgtatgtctcccgtcaataa

SEQ ID NO: 116308 - DNA, 1041 bp, Enterobacter cloacae
atggctcaccacgcacgctggacgatgtcgcaagtcactgaattattcaacaaacctttcctggagctaatgtttgaggcgcaacaggtgcaccgccagcacttcgatccgcgtcatgttcaggtcagcacgctgctgtcgatcaaaaccggggcttgcccggaagactgcaaatattgcccgcaaagcgcgcgctataaaaccggtctcgaatccgagcgcctgatggaagtcgagcaagtgctcgactccgcgcgcaaggccaaaaacgctggctcgacccgcttctgcatgggcgcggcgtggaaaaatccgcatgaccgcgacatgccctatctggagcagatggtgaagggggtgaaggagatggggcttgaagcctgcatgacccttggtactctgaacgaagagcaggcgcagcgtctctcggcggcggggctggattactataaccacaacctcgatacttcgccggagttctacggcaacatcatcaccacgcgcacctatcaggagcgtctggacacgctggataaagtgcgtgatgcggggatcaaggtctgttccggcgggatcgtgggactgggcgagacggtaaaagatcgtgccggcctgctgttacagctggcaaacctgccgaccccgccggaaagcgtgcccatcaacatgctggtgaaggtaaaagggacgccgctggcggataacgaggacgtggatgccttcgatttcatccgcaccatcgcggtggcgcgcatcatgatgccgacctcttacgttcgcctctctgccggtcgcgagcagatgagcgagcagacccaggcgatgtgcttcatggccggggccaactccatcttctacggctgcaaactgctgaccacgccaaacccggaagaggacaaagatgtccagctgttccgtaagctggggctgaacccacaccagaccgaggtacaggcgggggataacgagcaacagcagcagctggagcagcagatttttaacgccgacaccgaccagttctacaacgcggcagccgtatga

SEQ ID NO: 116309 - DNA, 1308 bp, Enterobacter cloacae
atggtttacaagtcgattatgacccaggacgatctcgccttcgacaagcagcatatctggcacccttacacctccacgacccgcccccttcccgtctatccggtagcctcggcccacggctgcgagctgcatcttgccagcggcgagcggcttgttgacgggatgtcctcctggtgggcggcgatccatggctacaaccacccgcgactgaacgcggcgatgaaagcgcagattgaccagatgtcacacgtgatgtttggcgggatcacgcatcagcccgcggtggatttatgccgtcgcctggtagcgatgacgcctgaatcgctggagtgcgttttcctggccgactccggctcggtggccgtggaagtggcgatgaaaatggcgttgcagtactggcatgcgaagggcgaaacgcgccagcggttccttaccttccgcaacggctatcacggcgacactttcggcgcgatgtcggtatgtgatccggacaactccatgcacagcctgtggaaaggctatctgccggaaaacctgtttgcgccagccccgcagagccgcttcgacggcgaatgggacgagatggacatggtgggcttcgcgcggctgatggcggcccatcgccacgagattgccgccgttattctcgaaccgattgtgcagggcgcgggcggaatgcggatgtaccatcccgagtggctgaagcgcattcggaagatgtgcgaccgcgaagggatcctgctgattgccgatgagatcgccaccggctttggccgcaccgggaaattgttcgcctgcgagcatgcggggatcgcgccggatattctgtgcctggggaaagcgctcaccggcggcaccatgacgctctccgccacgcttaccacccgccaggttgccgataccatcagcgacggcgacgcgggctgctttatgcacggcccgacgtttatgggcaacccgctggcctgcgccgtggcaagcgaaagcctcgccattctggaaagcggcgcatggcagacgcaggtggcggcgattgaggcgcagctgaagcagcagttaagcgcggcggcggaggcggaatacgtcgcggacgtccgcgtactgggcgccatcggggtaatcgagacaacgcatccggtgaacatggtcgcgttgcagcgcttcttcgttgaccagggcgtgtgggtgcgacctttcggtaagctgatttacctcatgccgccgtacagcatttctgcggatcagctccgcaagctgaccggggcagtggttgaagccgttaacacttcagcgcatttcgcgatttaa

SEQ ID NO: 116310 - DNA, 477 bp, Enterobacter cloacae
atgaaaatcatcagtaaagatttgcgcgacggcgaaaaactgccggaacgtcacgtgtttaacgggatgggttatcagggggataatatctctccccatctggcgtgggacgatgtgccagcgggaaccaaaagttttgtcgtgacctgctacgatccggatgcgccaaccgggtcgggctggtggcactggatcgtggcaaacctgcccgccgacacgcgcgtgctgccgcagggctccggttccgatctggttgctctgcctgacggtgcgattcagacgcgcactgactttggcaaagcgggctacggcggcgcggcgccgccaaaaggggaaacgcaccgctatatcttcaccgtgcacgcgctggatgtggacaagattgaggtcgacgaaggggcgagcggcgcgatggtaggctttaacgtgcatttccattcgctgggcagcgcgtcgattacggcgatgtattcgtaa

SEQ ID NO: 116311 - DNA, 1521 bp, Enterobacter cloacae
atgaacgcgttaacacttactcccggctcgctgacgctcaaacagctgcgtcacgtctggcgtcatccggtgacactctcccttgatgaaagcgcccaccgtgccattaacgacagcgtggcctgcgtggaggcgattgtggcggaggggcgcaccgcctacggcatcaacaccgggtttggcctgctggcgcagacccgcatcgccacgcacgatctggagaatttacagcgttcgctggtgctgtcgcacgcggcgggggttggccagccgctggacgatgagatcgtccgcctgatgatggtgttgaaaatcaacagcctggcgcgtgggttttccggcattcgtctgagcgtgatccaggcgctgatggcgctggtcaatgcggaagtttatccgtggatcccggcgaagggctccgtcggcgcctccggcgatctggcgccgctggcgcatatgtcgctgctcctgctgggtgaaggccaggcgcgctggcaaggggagtggctgcctgcgaaagaggcgctgaaaaaagctggcttaacgccgatcaccctcgcggcaaaagaggggctggcgctgctcaacggcacgcaggcgtcgaccgctttcgcgctgcgcggtctgtttgaagcggaagatctgttcgcctcggcggtggtgtgcggtgcactgaccactgaggcggtgctcggctcgcgtcgtccgttcgatgcccgcatccacgaggtgcgcggccagcgcgggcagattgatgccgctgccatgtaccgccacgtacttaccgataccagcgacattgccgattcgcatcacaactgtgagaaggtgcaggatccgtattccctgcgctgccagccgcaggtgatgggcgcatgcctgacgcagctgcgccaggtggcagaagtgctgctggtggaggccaatgcggtgtccgataacccactggtatttgctcaggaaaacgaggtggtttctggcggtaacttccacgccgagccggtggcgatggccgcagataatatcgccctggcgattgccgaaatcggggcgttgtctgagcgtcgaatcgcgctgatgatggataagcacatgtcccagctgccgccattcctggtgcgcaacggcggcgtgaactcgggcttcatgatagcccaggtcaccgccgcggcactggcaagcgagaacaaagccctgtcgcatccgcacagcgtggacagcctgccaacctcagccaaccaggaagatcacgtttcgatggccccggctgccgggcgtcgcctctgggagatggcctctaacacccgcggcgtgctggcggtggagtggctggcggcgtgtcagggtattgatttgcgcgaagggctaaaatccagcccgctgctggagcaggcgcgccaggaactgcgcgagcacgttacgcactacgatgacgaccgcttctttgcgccggatattgataaggcgatgcagcttctggaggaaggtcggctggtggggctgttaccttcggtgctgtga

SEQ ID NO: 116312 - DNA, 1689 bp, Enterobacter cloacae
atgtcgtcagataaataccgcaagcaggatgtccgcgccgcgcgcggcaccacgctcaccgcaaaaagctggctcaccgaagcaccgctgcgcatgttgatgaacaaccttgatcctgaggtagcagaaaatccccacgagctggtggtctacggcggcattggccgcgccgcgcgcaactgggcgtgctatgacgcgattgttgagtctttgacgaatctcgaaaacgacgaaacgctgctggtgcaatccggcaaaccggttggcgtattcaaaacccataaaaatgcgccccgcgtgctgattgccaactccaacctggtgccgcactgggcgacgtgggaacacttcaacgagctggacgcaaaagggctggccatgtacggccagatgaccgcgggtagctggatctacatcggcagccaggggattgtgcagggcacgtatgaaaccttcgtggaagcgggccgtcagcactataacggatcactgaaaggccgctgggtgctcaccgccggactgggcggcatgggcggcgcgcagccgctggccgcgacgctggcgggcgcgtgctccctgaacattgagtgccagcagagccgcatcgatttccgtctgcgtacccgctatgttgatgaacaggccgacaacctcgatgacgcgctggcgcgcatcaaaaagtacaccgctgaaggcaaagccgtgtcggttgccctgtgcggcaacgcggcggatattctgccggaactggtggcgcgcggcgtgcgtccggatctggtcaccgaccagaccagcgctcacgatccgctccacggctatctgccaaaaggctggacgtgggaagactaccagcaaaaagcggaaaccgatcctgagggcacggtactggcggctaaacgcgccatggcggaacacatctccgcgatgctggccttcagtaagatgggtattccgacctttgattacgggaataacatccgccagatggcgaaagagatgggggtgaataacgcctttgacttccccggcttcgtgcccgcctatattcgtcctctgttctgccgcggcatcgggccgttccgctgggttgccctgtccggcgacccggaggatatctacaaaaccgacgccagagtgaaagagattgtcgccgatgacgaacacctgcatcgctggctggatatggcgcgcgaacgcattaacttccagggcctgccggcgcgtatctgctgggtcgggctggagtggcggcaaaaactcggcctcgcctttaacgaaatggtgcgcagcggcgaagtctccgcgccgatcgtcattggccgcgaccacctggactccggctctgtcgccagtccgaaccgtgaaaccgaagccatgcgcgacggctcggatgcggtctccgactggccgctgctgaatgccctgctgaacaccgccagcggcgcgacctgggtgtcgctgcaccacggcggcggcgtcgggatgggcttctcccagcactccgggatggtcatcgtctgtgacggaactgatgaagcggccgcgcgtatcgctcgcgtgctgcacaacgacccggcaaccggcgtgatgcgtcacgcggatgcgggttacgagattgccattgattgtgccaaagagcagggcctgaacctgccgatgatccccgccacacaaggaaagcctgcatga

SEQ ID NO: 116313 - DNA, 735 bp, Enterobacter cloacae
atgttttcacgctcgcccctgccgcagccgagccctcccgcgcctttttacgaaaaggtgaagcaggcgatcagcgaaaaaatcgccgccggcgtctggcgcccgcacgaccgcattccgtccgaggccgagctggtggcgcagtttggctttagccgaatgaccatcaaccgcgcactgcgtgaactgaccgatgaagggttgctggtgcgtttgcagggtgtcggaacctttgtcgccgagccaaaaggacagtcggcgctgtttgaaatccgcagcattgccgatgaaattgccgcccgcaagcatcagcaccactgcgaggtgctggtgcttgaagagacgcaggccagcgccgaacaggccatcgagctgaacgttaccgagggcacccggattttccattcggtgatggtgcattatgagaacgacattccggtccagattgaagaccgctgcgtcaacgcggagcggataccggattacctgagccaggattacacccaaaccacaccgcatgcgtatctctcgctcgtcgccccgctgacggaaggggagcatatcgtggaagccgtgcgcgccacgccgcaggagtgcgagctgttgcgtattaaagagcacgatccctgtctgctgatccgccgtcgtacctggtcgtcctcgcaaattgtgtcgcatgcgaagctgctattcccggggaatcgctaccggttgcagggccactttatgtcataa

SEQ ID NO: 116314 - DNA, 939 bp, Enterobacter cloacae
atgaaactgtggcatcccgtctctccgcaggtctggcagggtcgtgacgacagcgccgagtccagcaccgcgaaacgtctcttccagaccatacagcagcgcgaacacttttctcccgcgccgtcaggcatcgccctgctgggctttgaatgtgatgaaggggttaagcgtaaccagggcaggcccggtgctgcacacgcgcccgatgtgttgcgtggcgcgctggcgaatatggcgagccatcaggggcatgcgcgcctcgtggatatgggcgctatttatgttgaaggccacgcgctggaggcggcacagcaggcgctgagcgaggccataaccgcgtgccagcaatccgggatgcgtactctggttttcggtggtggacatgaaaccgcctgggcgcacgggcgcggcgtgctggacgcctttccgaacgatcgccttgcggtgatcaacctggatgcgcacctcgatttacgcaaggccgaacgggcaacgtccggcacgccgttccgccagctggcgcactactgcgcgtctcagtcgcgggtgtttcactacgcctgcctgggggtaagccgtgcggcgaatactcaggcgctgtgggaggaagctgagcggttgaacgtgacgctggttgaagatctcgattttcgccgggatgcgctatccgcgctggatagcgtgcttgcgcaggcagaccgggtttatctcaccgttgaccttgatgtgctgcctgccgcagaaatgcccgccgtgtccgcccctgcggcgttggggatcccggcgctggatctgttcccggtgattgagcgtatctgccgaagcggtaaactacaggcggcggatctggtggaattcaatccgcactacgatcgggacggtcagggcgctaagctcgccgcccgactggcctggcaaattgctcactggtgggcataa

SEQ ID NO: 116315 - DNA, 1224 bp, Enterobacter cloacae
atgcagcagcttcatcccgatgatgtgatatggcgaaatgcgcgactggcaaccctggcgacaggggaggcggagccctacggcctgagagaacaacatgccctcgttgtgcgcggccagacgattctggccattattcctgaatccgagatcccctccgggcatcgtcagtgtgtcgatctcgacgggcgtctggttacccccggcctgatcgattgccacacccatctggtgttcggcggcgatcgcgcagcggaatgggagcaacggcttaacggcgtgtcatatcagaccattagcgcgcagggcggcggaattaacgccacggtcacggccacccgcaacagttcgccggaaacgctcctgacggtggcgcagcagcgactccagcggctgatgaatgaaggcgtaacgaccgttgaaatcaaatcgggatacggactgaatgccgaagccgaagagaaaatgctgctggttgcccgccagctcagcctgaataatctggtcgatatcagcccgacgctgctggccgcgcacgccgttcctgccgagtaccgacaggatccggatgcctatctggcgctggtctgtgagcagatcatgcccacgctgtggcaaaaagagttatttgaagcggtggacgtgttttgtgaaaacgtcggctttaccccggcgcaaaccgagcgcctgttccgggccgccgccgcgctcgggatcccggtaaaagggcatgtagaacaactgtcgaatctcggcggcgcggcgctggtcagccagtataaagggctgtcggccgatcatattgagtatcttgatgatgaaggtattcaggcgatggcgcaaagcggcacggtggcggtattgctcccaggcgcgttctattttcttcaggagcgccagcgtccaccggtggcgcagctgagagagcagggcgtgccgatggcggtggctaccgactacaatccgggcaccagcccgtttgccagcctgcatctggcaatgaacatggcctgcgtccagtttggcctcacgccggaagaggcctgggctggcgtgacgcggcatgcggcgcaggcgctaggacgtggtgcgacgcacgggcagttaaagcccggttatgtggctgatttcgtcgtctgggacgcgaatcatccggttgagatggtttacgagccggggcggaatcctatgtatcaacgcgtgtttcgggggcaggtagcatga

SEQ ID NO: 116316 - DNA, 1284 bp, Enterobacter cloacae
ttgaatatttccaggatttcccgtctggcgttggcactcgcctttggcgtgactttatccgcttgcagttcaacaccaccggatcagcaaccttctgagcaggttgctccgggcaccgcttcccgtccgatcctgtcagcggctgaagcgaagaacttcacccgtgcgcactatttctcggcgatggatcccaatgcagccccgtggacgccttcttctattaacctgccgaaacagccagacttcgttgtcggcccggccggggcagagggcgttacacacacctctattcaggcagccgttgatgccgcaattaccaaacacagcgcatctcgtcagtacattgccatcctgccgggtgaatacgaaggaaccgtttatgttccggcggcaccgggaagcattacgctttacggcctgggcgaaaaagcggtcgacgtaaaaattggcctggcgattgattcagagatcgacagcaccacctggcgccatctggtgaacccggccggtaaatacatgccaggtaaaccggcgtggtatatgtttgataactgccagcgcaagcgtgccgccaccattggcgtgatgtgttcagcggtattctggtcacagaacaatggcctgcaattgcagaacctgaccattcagaacaccctgggcgacagcgttgacgcaggtaatcatcaggccgtggcgctgcgtagcgatggcgacaaggtacagattaacaacgtcaatatcctgggccgccagaacaccttcttcgtgaccaacagcggcgtgcagaatacccttcagaacaaccgtctgacgcgtactctggtcaccaacagctacattgaaggcgacgtggatatggtctctggccgcggcgcggtggtatttgataacaccgacttccgcgtggtgaattcacgtacgcagcaggaaggttacgtctttgccccggccacgcagtctaacctgttctatggcttcctggccgtgaatagccgctttactgctgctggcgatggcgtggcgcagcttggtcgctctctggacgtggactccgccactaacggccaggtcgtgatccgcgacagcgtgattaacgaaggctttaacatggcaaaaccgtgggcggatgcggcgatctcgaaacgtcctttctccggcaacaccggcacggtggatgagaaagacaacgtgcagcgtaacctgaatgacgctaactttaaccgcatgtgggaatataacaaccgcggtctgggtagcaaagtggttgctgagccgaagcagtaa

SEQ ID NO: 116317 - DNA, 996 bp, Enterobacter cloacae
atgaaacaaaccgtttataccgccagtcctgaaagtcagcagatccatgtctggcgtttgaatacagaaggttcgcttacgctggttcaggttgttgatgtgccaggccaggtgcagccgatggtcgtcagcccggataaacgttttctttatgtcggcgtacgcccggaattccgcgtactggcataccgtatctccccggatgacggcgcgctggcctataccgcagaagccccgctgccgggcagcccgacccatatttccactgaccataaaggcaactttatcttcagcggctcctacaatgcaggctgcgtgagcgtcacccgcctggaagacggtattcccgttgaaaccgtcgacgtggtagaagggctagaaggttgccactccgccaacatttcgcaggataaccgcacgctgtgggtgccagcgcttaagcaggaccgcatctgcctgttcaccctgagcgatgacggccatctggtcgcgcagagcccggcggaagtcaccaccgtggaaggcgcaggcccgcgccacatggtcttccacccgaatcagcagtatgcctatgtcgttaacgagctgaacagctcggtagacgtgtgggagctgaacgatcctaacggacagatcgagtgcgtacagacgctggacatgatgccatctgatttctccgacacacgctgggcggcagacattcacattacgccggatggccgtcacctgtatgcctgtgaccgtacctccagtctgatcaccatcttcagcgtctctgaagacggcagcgttctggcagttgaaggcttccagccgacagaaacccagccgcgcggctttaatgtcgatcacagcggcaaatacctgattgcggcggggcagaaatcccaccacattgcgctctatgaaatccagggcgtgcagggtctactggaagagaaaggacgctatgcggtcggacaagggccgatgtgggttgtgattaacgctcattga

SEQ ID NO: 116318 - DNA, 819 bp, Enterobacter cloacae
atgacctcgcgagtgattgccctggatttagacggaacactgcttacccctcagaaaaccctgctcccctcttctcttgaggccctcaaacgagcccaggaagcggggtatcaacttctcatcgtaacgggtcgacatcacgtagccattcatcctttttatcaggcactgggcttagatacacctgcaatttgttgtaatggcacctatttgtatgattatcaggcaaaaaaggttttagcctccgatccgcttcccgttacgcaggcgctgcaattaattgatttactggatgagcacgccattcacggcctgatgtatgtggataacgccatggtgtatgaacgccctaccggccatgtgatccgcaccagcaactgggctctgtctctgccggaagcgcagcgtccggtgttcactcaggtttcctccctgcgccaggcggcggaagacgtcgacgcaatctggaaatttgccctgaccgatgaagacaccgccaaactgaataccttcgcaaaacatgtcgagcatacgctgggtctggaatgtgaatggtcctggcacgatcaggtggatatcgcccgcaaaggcaacagcaaaggaaagcgtctgacccagttcgttgaatcgcagggcggatcaatgcaggacgtgattgctttcggcgataactataacgacatcagtatgctggaagcggccggaacgggcgtggcgatgggtaatgccgatgacgcggtgaaagcgcgcgctgacgtggtgattggcgataacaccaccgacagcatcgcgcagtatatttatacccacctgctgtaa

SEQ ID NO: 116319 - DNA, 1059 bp, Enterobacter cloacae
atgctggaactcaactttacgcaaaccctgggcagccacacgctgacgctgaacgaaacgctgcctgccagcggtatcaccgccatttttggcgtgtccggggcggggaaaacgtcgctgattaatgcgattagcggcctgacgcgtccccagtctggccgtattgtgttaaataaccgcgtcttgaatgacgcggagaagaaggtctgcctgtcaccggacaaacgtcgcatcggctatgtgtttcaggatgcgcgcctgttcccgcactacagcgtacgcgggaacctgcgttacggcatggcaaaaagcatggccggacagttcgataagctggtggcgctgctgggcatcgaaccgctgttggatcgtctgccgtcgtcgctgtcgggtggtgaaaaacagcgcgtggcgattggccgcgccctgttaaccgcgccggaactgttgctgctggatgagccgctggcctcgctggatattccgcgcaagcgcgagctgctgccgtatctgcaacgtctggcgcgggaaatcaacgtgcccatgctctacgtcagccattcgctggatgagatcttacatctggccgacaaagtgctggtgctggaagcgggcagggtgaaggcattcggcaatctggaggaggtgtggggcagcagcgttatgcatccatggctgccaaaggagcagcagagcagcattctgaaggtgagcgtgctggagcaccatccgcactacgcgatgactgcgctggcgctgggcgatcagcatttgtgggtgaataaaatcgatacgccgattcagtccacgttacggatccgcattcaggcgtcggatgtctctctggtcctgcaaccgccgctgcaaaccagtatccgcaatattttgcgcgcaaaagtagcgcagtgttttgatgataacggccaggtggaagtgcagctggaagtgggcagcagaacgctgtgggcgcgcatcagcccgtgggccagggatgagctgggcatcaagcctggcctgtggctttacgcgcaaatcaagagcgtctccatcaccgcctga

SEQ ID NO: 116320 - DNA, 693 bp, Enterobacter cloacae
atgatattgaccgaacctgaatggcaggccgtgctgctgagcctgaaagtctcttccctggcggttgcgctgagtttgccctttggggtgttctttgcctggttactggttcgcgtgaagtttccaggcaaagccctgctcgacagtgttctccatcttccgcttgtcttaccgcctgtggtggtcggatatctgctgctgatctccatgggtcgacgcggctttatcggcgaatggctgtacgactggttcggcctgacctttgctttcagctggcgcggcgcggttctggccgcggcggtgatgtccttcccgctgatggtgcgcgctatccgtctggcgctggaaggggtggatactcggttagaacaggccgcccgcacgctgggcgcaggccgctggcgggtattcctgaccattacgcttccgctgacgttaccgggcattatcgtcggtacggtgttagccttcgcccgctcgctgggtgagtttggcgcgaccatcacctttgtgtcgaacattcccggcgagacgcggaccatcccgtcggccatgtataccctgattcagaccccaggcggcgaaggtgcggcggcccggctgtgtattatttcaattgtgctcgctctggtctcgctgctggtgtctgagtggctggcgcgcctcagccgtgaacggatggggaaaccgtga

SEQ ID NO: 116321 - DNA, 777 bp, Enterobacter cloacae
atggcacgttcatgggtacgccttttcgcaggggccacgctgactctctcactcaccggccacgcgctggcggatgaaggaaaaatcacggtctttgcggcggcgtcgctgactaacgcgatgcaggatattgctgcggtatacaaaaaagagaaaaacgtcgaggtggtctcgtcgtttgcctcctcatccacgctggcccgccagattgaagcgggggcgcccgcggatctgttcatctctgccgatcagaaatggatggattacgcggtggagaaaaaagctgttgatacggctacccgcgaaacgctgctgggaaatagcctggtggtggtcgcgcccgcaaacagcaagcaggacgacatcgccatcaacaaacagacggactggacccggctgctcaacggtggccgtctggcggtaggcgatccggagcatgttcctgccgggatttatgcgaaagaagcgctacaaaaactgggcgcgtgggagaccttatcgccgaagctggctcccgcagaagatgtgcgtggcgcgctggcgctggtggagcgtaacgaagcgccactcgggatcgtttacggctccgatgccgtcgccagtaaaggtgtgaaggtggtaggcaccttcccggaagactcgcataagaaagtggaatatcctgttgcgatagttgatggacataaaaatgcgagcgtgacggccttcgttgactacctgaaggggccggaagcgtccgcgatctttaaacgttacggatttacgactcacgaatga

SEQ ID NO: 116322 - DNA, 153 bp, Enterobacter cloacae
atgttagagttgttgaaaagtctggtattcgcggtaatcatggtgccagtagtgatggctatcatcctcggtgccatctacggcctgggtgaagtgttcaacgtcttttcgaacattggtcatcgtcgtgaccagcctaaaaagcagcaatga

SEQ ID NO: 116323 - DNA, 789 bp, Enterobacter cloacae
atgcaggccgaaattctcctcaccctacgacttcagcagaagcttttcgccgatccgcgacgtatcgccctgttaaaacaaatagaacaaactggctcgattagccagggagctaaaaacgccggcatcagctataaaagcgcctgggatgcaattaacgacatgaacaccctgagcgaacacacgctggttgagcgcgccaccggcgggaaaggcggcggcggcgccgtgttgacgcgttacgggcaacgtctgatccagctctacgatttactggcgcagatccagcaaaaagcatttgatgtgctgagcgatgacgacaatctgccgctggacagcctgctgggcgccatctcccgtttctctttgcagaccagcgcccgcaaccagtggtttggtacggtgacggggcgcgatcattcgcaggtgcaggagcatatcgagatcctgctcgcggacggtacgacgcgtctgaaagccgccatcaccgcgcaaagtggtcaacgccttgggctgaacgaaggtcaggaggtgctggtattactcaaagcgccctggatcagcatcgcactcaaccctgagcaggccgcagaggccgacaaccagctacgcgggcgtatcagccacatcgagcgcggcgcagaacagtgtgaagtgctgatgaccctgccggatggacagttgctctgcgccaccgttccggtgaacgacgcgaccgaattagacgaaggtgctgtggtgaccgcatatttcaatgcagaccgggtaattatcgccacattgtgctaa

SEQ ID NO: 116324 - DNA, 1473 bp, Enterobacter cloacae
atgtcatcattgcatatttcgcaaggcacgtttcgtcttagcgatacccgtaccttatcgctgccagagttaacccttcgcgccggagaaagctgggcgtttgtgggcacgaatggcagcggaaaatccgcgctggcccgcgccctggcaggcgaattaacccaactgaagggtgaacgtcggtgcacctttacccggctgacgcgcctttccttcgaacagctgcaaaagctggtcagcgatgagtggcagcgtaacaataccgatttgctcagccccggcgaagaagataccggccgcacgacggcggaaattatccaggatgagataaaagatcctgcccgctgccagcagctggcggaacaatttggcattaccgccctgcttaatcgccgctttaaatacctttcaaccggtgaaacgcgcaaaacgctgctgtgtcaggcgctgatgagcgagccggaactcctgatcctggatgaaccgtttgacggactggatgtgcaatcccgcgcgcaactggcagcgttgctggcgtcgcttaaccagcagggatacacgcttgtgctggttcttaaccgctttgatgagatcccggatttcgtacattatgcgggcgtgctggcggactgtagcctgaccgaaaccggcgagaaagccgtactgcttcggcaggcgctgattgcgcagctggcgcacagcgagaaactggacggtattgccctgccggagccggatgcgccttcagcacgccacgggctggagcctgaccagccgcgcattgtgctgcgcgatggggtggttgcttacgacgatcgccctattcttaatcacctcagctggacggttaatcctggtgagcactggcagatcgtcggccccaacggggcgggtaaatccacgctgctgagcctgatcaccggggatcacccgcagggatacagcaacgatctcaccctgttcggccgtcgccgcggcagcggggaaaccatctgggatatcaaaaagcacatcggctatgtcagcagcagcctgcacctggactaccgggtgagcaccacggtgcgaaacgtgatcctctctggcttcttcgactccattggtatttatcaggcggtatccgacaagcagcacaagctggcgcagcagtggctggatattctgggtatggataaccgggtcgccgatgcgccattccacagcctgtcgtgggggcagcagcggctggcattgatcgtccgcgcgctggtcaagcaccctacgctgctgattcttgacgaaccgttgcaggggctggatccgctcaaccgtcagctgatccgccgctttgtggatgtcctgattagcgaaggtgaaacccagctgctgtttgtgtcccaccatgctgaagatgccccgtcctgcatcacccatcggctggaatttgtccctgacggcgagcaataccgctacctgctgagcaaaatcgattaa

SEQ ID NO: 116325 - DNA, 1017 bp, Enterobacter cloacae
atgcgagttctggtaacaggtggtagcggttacataggaagtcatacctgtgtgcaactgctgcaaagcggccacgatgtcgtcattcttgataacctgtgcaacagtaagcgcagcgtgctgccggtcattgaacgcctttcgggtaaacagccgactttcgtggaaggcgacatccgcaatgaagcgttgatgactgaaatccttcacgatcacgcgattgaaaccgttatccacttcgcgggcctgaaagcggttggcgaatcggtggcaaaaccgcttgagtactatgacaacaacgttaacggtaccctgcgtctgatctccgccatgcgagcggccaacgttaaaaattttatcttcagctcctccgcgaccgtctacggcgatcagccaaaaattccttacgttgaaagcttcccgaccggtacgccgcaaagcccgtatggcaaaagcaagctgatggtagagcagatcctgaccgacctgcaaaaagcccagcctgagtggagcatcgcattgctgcgctacttcaacccggttggcgcgcatccgtcaggggatatgggcgaagatccgcagggcattcctaataacctgatgccgtatatcgcgcaggttgccgtagggcgccgcgattccctggcgatttttggtaacgattatcccaccgaagatggcaccggcgtgcgcgattacattcacgtcatggatctggccgacggccacgtggcggcgatgcagcagctggcggataaaccgggcgtgcatatttacaacctcggcgccgggatcggcagcagcgtgctggacgtggtgaatgccttcagtaaagcctgcggcaagccggtgaagtatcacttcgctccccgccgtgatggcgacctcccggcttactgggccgatgccaccaaagcggataaagagcttaactggcgtgtcacccgcacgcttgatgaaatggcacaggatacctggcactggcagtcacgccatccgcagggttatccggattaa

SEQ ID NO: 116326 - DNA, 1047 bp, Enterobacter cloacae
atgacgcaattcaatcccgtcgatcacccgcatcgtcgttttaacccgctcagcgggcaatggattttagtttcaccgcatcgcgccaagcgcccctggcagggggcgcaagagacgcctgccaaacagacgctgccgcagcatgatccggactgtttcctctgcccgggcaatacgcgcgtgacgggcgataaaaacccggactaccaaggcaccttcgtgtttactaacgactttgccgcgctgatgaccgatacgccagacgcgccggaaagccatgacccgctgatgcgctgcgaaagcgcccgcggcaccagccgcgtgatctgcttctcgcccgatcacagcaaaacgctgccggagctgagcgtggaggccctgaaagaggtggtcagcacctggcaggcgcaaaccgcggagctggggcagagctatccctgggtgcaggtgttcgaaaacaaaggcgcggcgatgggctgctccaacccgcatccgcacggtcagatctgggcgaacagcttcctgccgaatgaagccgagcgtgaggaccgactgcaaaaagcgtatttcgcccagaacggttcgccgatgctggtggattacacccagcgtgagctggcggatggcagccgtaccgtggtggaaaccgagcactggcttgcggtggtcccttactgggcggcgtggccgtttgagacgctactgctgccgaaagcccatgtacagcgcattaccgaactcagcgacgcccagcgtgacgacctagcgctggcgctgaaaaaactgaccagccgctacgacaacctcttccagtgctccttcccctactccatgggctggcacggcgcgccgtttaacggcgaagagaatcaacactggcagttacatgcacacttctacccgccgctgctgcgttctgcgacggtacgtaaattcatggtgggctatgaaatgctggcggaaacccagcgcgacctgacggcggaacaggcggcagaacgtctgcgtgccgttagcgacgtccattaccgcgaatcaggagtctaa

SEQ ID NO: 116327 - DNA, 1149 bp, Enterobacter cloacae
atgagtctgaaagataaaacacaatccctgtttgctgaaaaatttggctaccctgccacccatgttatccaggcgccaggccgcgttaatctgatcggcgagcacaccgactataacgacggttttgtcctgccgtgtgccatcgactaccagacggtgatcagctgcgcgaaacgcgacgatcgtcaggtgcgagtgatggccgcggattacggcaacgaaattgacgaattttccctcgatgcgccgatcgtgacccacgacagccagcagtggtcgaactatgttcgcggcgtggtgaagcacctgcaaaagcgtaacaagaatttcggcggggccgatctggtgatcagcggcaacgtgccgcagggggcgggattaagctcttccgcatcgctggaagtggcggtcggcaccgtgttccagcagctttatcatctgccgctggacggggcgcaaatcgccctcaacggtcaggaagcggaaaaccagttcgtaggctgcaactgcggcattatggatcagctgatttccgcgctgggcaagaaagaacatgctttgctgattgactgccgctccctcgggaccaaagcggttccgctgcctaaaggggcggctgtggtgatcatcaacagcaacttcaaacgcaccctggtgggcagcgagtacaacacccgtcgcgaacagtgcgaaaccggcgcgcgcttcttccagcagccagccctgcgtgatgtctcacttgatgaatttaacaaggttgcccacgagctggacccggttgtcacgaagcgcgtgcgtcatatactgacggaaaatgcccgtaccgtagaagccgcctccgcgctggcaaaaggtgacctgaagcggatgggcgagctgatggccgaatcgcatgcctccatgcgtgacgatttcgaaatcaccgtgccgcaaatcgacaccctggttgaaatcgtgaaagccacgattggcgacaaaggcggcgtgcgtatgaccggcggcggattcggcgggtgcgtcgtcgccctggtgccggaagagctggtccctgccattcaggacgcggtggctaaacagtacgaagccaaaacgggcatcaaagaaactttctatgtctgtaaagcatcacaaggagccggacagtgctaa

SEQ ID NO: 116328 - DNA, 1044 bp, Enterobacter cloacae
gtgctaaacgaaacaccgacactcgcaccggatggtctgccgtatcgcctgttaaccctgcgcaacagcgccgggatggtggttacgctgatggactggggcgcaacgttactttctgcccgcgtaccgatgcctgacggcagcgtgcgcgaaaccctgcttggctgcgcatcgccggagcagtatatcgagcagactgcttttctgggcgcatccataggccgctacgctaaccgcatcgccagaagccggtttacgctggacggcgtaacgtattccctgcttgccagccagggcgaaaatcagctgcacggcggcccggaagggtttgataaacgtcgctggaagattgtgcagcaaaatgacggtgaggtctggttctctctggactccctcgatggagaccagggcttcccgggcaatctcaccgcaaccgcgcgcttcaccctgaccgaagataatcgcatcgccattgagtaccgcgcgaccgtcgataagccgtgcccggtcaacctgactaaccacgcctatttcaaccttgacggtaatcagaccgatgtccgcagccacaaactccagatcctggcggatgagtatctgccggtcgatgagatgggtatcccttatcaggggctgaaaccagtaagcggaaatagctttgatttccgtcagccgaaaaccattgctcaggatttcctgagtgatgacgatcagcgcaaggtgaaaggctacgaccacgcgttcctgttgcaggcgaaaggcgatctttctcaacctgccgcacaggtctggtctgctgatgagaagttacagatgacggtctacaccaccgcccctgccctacagttctactccggtaactatctggagggtactacggcgcgtgaacatgacgcctacggcgcctggcaaggactggcgctggagagcgagttcctgccggacacgcctaaccatcctgaatggccgcagccggactgcgtgctacgtccgggtgaagagtacgtaagcgtcaccgagtatcatttcattccgcgcgcttaa

SEQ ID NO: 116329 - DNA, 753 bp, Enterobacter cloacae
atggctaatactaagcttgtcctggtgcgccacggcgaaagccagtggaacaacgaaaaccgcttcaccggttggtatgacgttgatctgtccgagaaaggcgtgagcgaagcaaaagcggcaggtaaactgctgaaagaagaaggcttcacctttgactttgcttacacctctgtgctgaaacgtgccatccataccctgtggaacgttctggacgagctggatcaggcctggctgccggttgagaaatcctggaaactgaacgagcgtcactacggtgcgctgcaaggtctgaacaaagcggaaaccgcagaaaaatacggtgacgagcaggttaagcagtggcgtcgtggttttgcggtcacgcctccagagctgagcaaagatgacgagcgctacccgggccacgatccgcgttacgcgaagctgactgaggctgaactgccgcagaccgaaagcctggcgctgaccatcgaccgcgttgtgccttactggaacgaaaccattctgccacgcctgaaaagcggcgagcgcgtcattatcgctgctcacggtaactccctgcgtgcgctggtgaaatacctggacaacatgggtgaagatgaaatcctcgagctgaatatccctaccggcgtgccgctggtgtacgagttcgacgaaaacttcaagccagttaaacattactacctgggtaacgccgacgaaatcgctgcaaaagcggcggccgtggcgaaccagggtaaagcgaagtaa

SEQ ID NO: 116330 - DNA, 1053 bp, Enterobacter cloacae
atgaattatcagaacgacgatttacgcattaaagagatcaatgagttattacctcccgtagcgctccttgaaaaattccccgccaccgaaaatgccgccaacacggtgtctcatgcccgcaaggcgatccacaagatcctgaaaggtagcgacgatcgtcttctggtggtcattgggccgtgctccattcacgatcctgctgcggccaaagagtatgcgtcccgtctgctcgccctgcgtgaagagctgaaaggcgaactggaaatcgtgatgcgcgtttatttcgaaaaaccgcgtaccaccgtgggctggaaagggttgatcaacgatccgcatatggacaacagtttccagatcaacgacggcctgcgcattgcgcgtaagctgctgctggagatcaacgacagcgggctgcctgctgccggagaattcctcgatatgatcaccccgcagtatctggctgacctgatgagctggggcgctattggcgcgcgtacgacggaatctcaggttcaccgtgagctggcgtctggcctgtcatgcccggtggggttcaaaaatggcactgatggcaccattaaagtcgctattgacgccattaatgcggctggcgcgccgcactgcttcctgtcggtgaccaagtggggccactccgctatcgtgaataccagcggtaatggcgattgccatattatactgcgcggcggtaaagagcctaactacagtgctaaacacgtagcggaggtaaaagcagggctggagaaagcgggtctggcaccgcaggtgatgatcgatttcagccatgccaactccagcaaacagttcaaaaagcagatggaagtcggcgcagatgtgtgtcagcaaatcgccagcggtgaacgcgcagtgattggggtgatgattgagagccatctggtggaaggcaaccagaacctggagggcagtgagccgctggtctacggtaagagcgtgacggatgcctgcattggctgggacgataccgatgcgatcctgcgtcagttggcggatgcggttaaagcgcgtcgcggctaa

SEQ ID NO: 116331 - DNA, 360 bp, Enterobacter cloacae
atgaaaatgacgaaactgactacgcttttcctgacggcaacccttactctggcaagcggtagcgtactggctgctgacgcaggctcatccggcagcaacggcgacgcgaatgccgctgccgaagcaggccaggttgcgccggatgcaaaacagaatattgcgccaaacaatgttgataacagtaatatcaacacgggcaataccaacaccggcgggacgagcacaggcacgatgaaccatgagggtatgaccaccgacgaggttcataaaaactctgtgtgtaaagacgggaaatgcccggacccgaatgacaaagtaggcagcgatgccaataccaaaacggacggtactacccagtaa

SEQ ID NO: 116332 - DNA, 939 bp, Enterobacter cloacae
atggcgcactcccactcccattcccactccactggcgatgaaaatgccaaacggcttctgctggcttttggcgtcactgccacctttatgataattgaggtaacaggcgggctgatatccggatcgctggcgctgctggccgatgccgggcatatgctgaccgacgctgccgcgctcctgtttgctctgctggccgtgcagtttgcccgtcgccctcccaatactcgccacacctttggctggctcagactgaccacgcttgccgcctttgtgaatgcgattgcactggtggtcattactcttcttatcgtctgggaggcttttcagcgctttcggcatccacaaccgatagccgggacgacaatgatggttatcgccattgccgggttggtcgccaatattctggcgttctggatattgcaccgcggcagcagtgaaaaaaatctgaacgtacgggccgcggcgcttcatgtgctgggcgatctgctgggttccgtaggggccatcgtagccgcgctgatcattatgggcacgggctggactcccatcgacccgattctttccgtgctggtatcgtgccttgtattacgcagtgcctggcggctgttgaaagagagcgtcaatgagctgctggaaggcgctcccacgtcgctggatattggcgagctaaaacgcaatctgtgtcgttccattcctgaagtccgtaacgttcaccacgttcacgtctggctggtgggtgagaaaccgcttatgacgctgcacgttcaggttattccgccccacgatcacgatgcgttgcttgaacgtattcggcacttccttgagcatcactacgaaattgcgcacgccaccatccagatggagtatcagccatgtaacgggccagactgtcacctgaacgaggcgcagtccggccactcacacgcccatcaccattaa

SEQ ID NO: 116333 - DNA, 720 bp, Enterobacter cloacae
atggatttttttagcacacagaacatcctggttcatatcccgattggtgcgggcggctatgacctgtcgtggattgaagcggtgggtacgctggccggtttactctgtatctggctggccagccttgagaagatcagcaactatgcgttcgggctgataaacgtcacgctgtttgcgatcatctttttccagatccagctctacgccagcctgcttctacagctgttcttcttcgcagccaatatctatggctggtacgcctggtctcggcaaaacagtcagcaggaggcggaactgcaaatccgctggctgccgttgccaaaagccatcacctggttcgcggcctgcgtggtagctatcggctttatgaccgtctttattgatccggtatttgccttcctgacgcgcgtggcggtctcggtcatgtcgggtctgggattaaacgtgacgatggctgagcttcagccggatgccttcccgttctgggattcctgcatgatggtactgtcgattgccgcaatgatcctgatgacccgtaaatacgttgagaactggctgctgtgggtggtcatcaacgtcattagcgtggtgatttttgcccgccagggtgtttatgccatgtcgctggagtacatgctgctgacggtcattgccctgaacggtagccgcatgtggattaacagcgcgcgtgagcgtggctcgcgcgcgctttcccgttaa

SEQ ID NO: 116334 - DNA, 1044 bp, Enterobacter cloacae
atgagtgtgatgtttgatcccgaaaccgcaatctatcccttcccgccgaagcccgctccgctaagccgggatgaaaaacagttctatcgtgaaaaaattaagcgcctgcttaaagagcgtgatgcggtgatggtggcgcattactacaccgacccggaaattcagcagctggcagaagagacgggcggctgtatctcagactccctggaaatggcgcgtttcggtgcaaaacatcctgcctccacgctgctggttgcaggtgtgcgcttcatgggcgaaacggcaaaaattctcagcccggaaaaaaccatactgttgccgacgctgaatgccgaatgctcccttgacctcggttgcccgattgatgagttcaccgccttctgtgatgcccaccctgatcgtaccgtggtggtctatgccaacacgtctgcggcggtgaaagcccgggcagactgggtagtgacctccagtatcgccgttgagctgattgagcatctggacagcctgggggagaaaatcatctgggcgcccgatcgtcacctgggaaactatgtacaaaaacaaaccggtgcggatgtgctgtgctggcagggcgcctgtatcgttcacgacgagtttaagacccaggccctgacgcgcatgagagggttatacccagacgccgcgattctggtgcacccggaatccccgcagtccatcgtcgacatggcggatgccgtcgggtcaaccagccagctcattcatgctgcgaaaaccctgtcacacaagcagctcattgtggcgaccgatcgcggtatcttctacaagatgcagcaggccgtgccggaaaaaacgttgctcgaagcgccgaccgccggagaaggggcgacctgccgaagctgcgcgcattgcccgtggatggcgatgaatgggctcaaagcgattgcggaggggctggaaaacggtggcgcagcgcatgagatccacgtggatgccgctctgcgtgaaggcgcgttaattccacttaaccgtatgctggattttgcggctacactacgtacttaa

SEQ ID NO: 116335 - DNA, 1098 bp, Enterobacter cloacae
atgaaaggacgttgggcgaagtatctgatgacaggcgcaatggtggcgattcttgcggcctgctcttccaaaccgaccgatcgcggtcaacagtataaagacgggaagttatcccagcctttctctttagttaaccagccagacgccgtgggcgctccgatcaatgccggagacttctccgagcaggtctaccagatccgcactgcttctccgcgtttatacggttcgcagaacaacgtctatagcgccgtgcaggactggctgcgtgcaggcggtgatacccgcaatatgcgccagtttggtatcgatgcctggcagatggagggggcggataactacggtaacgtccagtttaccggttactacactccggttgtccaggcgcgacacacacgccagggcgagttccagtatcccatttaccgtatgccgccgaaacgcggtcgtctgccgtcccgcgccgagatctacgctggcgcgctgagcgaaaattacgtgctggcctacagcaactcgctgatggacaacttcattatggacgtgcagggcagcggctatattgattttggcgacggctcgccgctgaacttctttagctacgccgggaaaaatggccatgcctatcgcagcatcggtaaggtgctcatcgaccgtggcgaagtgaaacgagaagatatgtcgatgcaggcgatccgcgagtggggcgaaaaacacagcgaagcggaagtgcgtgagctgcttgagcagaacccatcgtttgtcttcttcaaaccgcagaactttgcgccggtgaaaggggcgagcgccgtcccgctgattggccgcgcttctgtggcatcggatcgttcgattatcccggcaggtactacgctgctggcggaagttccactcctcgacaacaacggcaaattcaatggcaagtatgaattacgcctgatggtggcgctggacgtgggtggggcgatcaaaggccagcacttcgacatttatcagggcatcggcccggatgccggccatcgtgcaggctggtataaccactacggacgcgtgtgggtgctgaaggcagcgccgggtaccggaaacgtattcagcggctga

SEQ ID NO: 116336 - DNA, 807 bp, Enterobacter cloacae
atgtctgtggtaatcagcgatgcctggcgccagcgtttcggcggcacggcacggttatatggtgaaaaagccctgcaactgttcgcggatgcgcatgtctgcgtggtgggcattggtggcgtggggtcgtgggcggcagaagcgctggcgagaaccggcattggcgcaattacgttgattgatatggatgacgtctgcgtcactaacactaaccgtcagatccacgccctgcgtgataacgtcggtctggcgaagtccgaggtgatggcggagcgtattcgtctcatcaacccggagtgtagggtgacggtgatcgacgactttgtgacggcagataacgtcgcggagtacatgagcaaaggctacagctatgtgattgatgccatcgacagcgtgcggccaaaagcggcgctgatcgcttactgtcgtcgttacaaggtgccgctggtgacaacgggcggcgcgggtggacaaattgatccgacgcagatccaggtggcggatctggcgaaaaccattcaggatccgctggccgctaagctgcgcgagcgcttaaaaagcgacttcaacgtggtgaaaaatagcaaaggcaagctgggcgtggactgtgtgttctcgacagaagcgctggtttatccgcaggcggatggttcggtctgtgcaatgaaaagcacggcggaagggccaaagcggatggattgtgcctcagggtttggagcggccaccatggtgaccgcctccttcggctttgtggcggtctctcacgccctgaagaagatgatggcgaaggcggaacgtcaggcctga

SEQ ID NO: 116337 - DNA, 447 bp, Enterobacter cloacae
atgacaagttcagctttagccggacacccgttcggcaccgttattactgaagagacgttaaaacagaccttcgtcccgctcacgcagtgggaagataaatatcgtcagctgatcctgctgggtaaacagttgcccacgctgtcagacgagctgaaatcacaggcgaaggagatcgcaggctgcgagaaccgcgtctggcttgggtttagcgtatccggagagaaactgcatttcttcggcgacagcgagggacgcattgttcgcggtctgctggcggtgctgttgaccgcaatcgaagggaaaagcgccgcagagctgctggcgcattctccgctggcgctgtttgatgagctgggacttcgcgcgcagcttagcgcctcgcgcggtcagggactgattgcgctaaacgacgcggtactggatgccgcccgtcaggctcaggcctga

SEQ ID NO: 116338 - DNA, 1206 bp, Enterobacter cloacae
atgaacgctttcagtcctgcgcagtttcgcgcacagtttcctgcgctggccgatgccggcatttatcttgatagcgccgccacggcccttaaaccgcaggcggtgattgaggcaacccgccagttttacagcctgagcgccgggaacgtgcaccgcagccagtatgccgacgcgcagcgcttaacggcgcaatacgaagccgcacgggatcaggtcgcgcgcctgatcaatgctgacagcggtaagaacatcgtctggacgcggggcaccaccgaggccattaacatggtggcgcaatgttacgcgcgtccgctgttgcagcccggggatgagatcatcgtcagcgaggcggaacaccacgccaacctggtaccctggctgatggtggccgaacaaaccggggcacaggttgtaaagctcccgttgggtgcggacttcctgcctgacgtggcgcgtctgcctgagctgattacgccgcgcagccgtattctggcgctggggcagatgtccaacgtcaccggcggctgcccggatctggcgcgtgccattgagattgcccatgccagcggcgtggtggtgatggtcgacggtgcgcagggtgtggtgcattttccggctgacgttcaggcgctggatatcgacttctatgccttctcaggacacaaattgtacgggccaaccggtatcggcgcgctgtacggcaaagctgaactgctggcccggatgacgccgtggctcggcggcggcaagatgattaccgaagtcaccttcgacggttttaaaacgcaggatgtaccctaccgcctggaagccggtaccccaaacgtggccggggttatcggtctgagcgcagcgctcgaatggttggcagaaacggacgtggttcaggctgaaagctggagccggggtctggcgacgctggcggaagaagaactgaaaaaacgtccgggttttcgctcgttccgcgtccaggactccagcctgctcgcctttgatttcgcgggcgtgcaccatagcgacatggtgacgttgcttgccggatatggcattgccctgcgtgccggacagcactgcgcccagccgctgctggcggccattggcgtaagcggtaccctgcgcgcctcgtttgcaccgtataatacaaaaagcgacgtcgaggcgctggtttccgccgtcgaccgcgccctggaattactggtggattaa

SEQ ID NO: 116339 - DNA, 228 bp, Enterobacter cloacae
atgaaaaagacagctgcaatcatttctgcctgtgcgttgacctttgccctgagcgcctgttctggtaataactacgtaatgcataccaacgatggtcgatctatcgtctctgaagggaaaccgacaaccgataatgataccgggatgatttcttacaaagatgctaacgggaacaaacagcagatcaaccgcagtgatgtgaaagagatgaaggaaatcgagcattaa

SEQ ID NO: 116340 - DNA, 918 bp, Enterobacter cloacae
atgtccaagcgattgccacccctaaatgcattacgtgtttttgatgcagcagcacgccacctcagcttcacccgcgcagccgatgagctttttgtgacacaggccgcagtaagtcatcaaatcaagtctctggaggattttctggggcttaagctgttccgtcgacgcaaccgttcgttgctgttgaccgaagaggggcagagctattttcaggatattaaagagattttttcccagctgacggaagccactcgcaagcttcaggcccggagcgcaaaaggcgctctgactgtgagtttattgcccagttttgccattcagtggctggtgccgcgactctcaagctttaactcaacttatccgggaatcgatgtccgaatccaggcggtggaccgtcaggaagacaagctggcagatgatgtggacgtggcgattttttacggtcgcggtaactggccgggcttgcgtgtggaaaaattatacgcagaatatctgttgccggtctgttcaccgctgctgctgacgggggataaagcgctcaaaacgcccgccgatctggcgcaacatacgcttttgcacgatgcttcgcgtcgcgactggcaaacttatacccgccagttaggtcttaatcatataaacgtgcagcaggggcccatttttagccacagcgcgatggtgctacaggctgccattcacgggcagggcgtggcgttggcaaacaacgttatggcgcagtccgaaattgaggcaggccgtctggtttgcccatttaacgatgtactggtcagcaagaatgcattttatctggtttgtcatgacagtcaggcagaactgggtaaaatagccgctttccggcagtggatactggcgaaagcggcaagcgagcaagaaaaattccgcttcaggtatgaacaataa

SEQ ID NO: 116341 - DNA, 396 bp, Enterobacter cloacae
atgaccagccgattcatgctgattttcgccgcggtgagtggctttatttttgtagctctgggcgcgtttggcgcgcatgtcttaagcaaatctctgggcgttgtggagatgggttggatccagaccggccttgaatatcaggcgttccacacgctggcaatttttgggctggcggtggcgatgcagcgccgcatcagcatctggttttactggagcagcgtctttctggcgctgggtaccgtactgttcagcggcagtctttactgtctggcgctgtcgcatttacgcctgtgggcgtttgttacacctgtcggcggcgtcagcttcctggcgggttgggtgttaatgtttatcggagctatccgtctgaaacgcaagggcgttgttcatgaataa

SEQ ID NO: 116342 - DNA, 1101 bp, Enterobacter cloacae
atgaataaggttgttttatattgtcgcccggggtttgagaaagagtgcgccgcggaaatcaccgataaagcggcgaagcgtgaagtctttggattcgctcgcgtcaaagagaacgcgggctatgtggtatttgaatgctatcagcctgatgatgccgacaagctggcgcgcgaactgccgttcagctcattgattttcgcccgtcagatgtttgtcgcgggcgaactgctgaaagatcttccgccggaagatcgcatcacgccgattgttggcctgttgcagggtgtggtagagaagggcggcgatttgcgcgtggaagtggccgacaccaacgaaagcaaagagctgatgaagttctgccgtaagttcaccgtgccgctgcgcgcggcgctgcgtgatgcgggtgtgctgacaaactacgagacgccaaagcgcccggtcgtgcatatcttctttattgcgccaggatgttgctacgccggctactcgtataccaccaataattcgccgttctttatggggatcccgcgtctgcgcttcccggcagatgcgccgagccgttcaaccctgaagctggaagaggcgtttcacgtctttatcccggcggacgagtgggacgaacgtctggcaaacggcatgtatgccgtcgaccttggcgcgtgcccgggcggctggacctatcagctggtgaaacgcaatatgtgggtttcgtctgtggataacggcccgatggcgcaaagcctgatggataccgggcaggtcacctggctgcgtgaggacggcttccgctatcgcccgaaccgcaacaacatctcctggatggtgtgcgacatggtagaaaaaccggcgaaagtcgcggcgctgatggcctcctggctggtgaacggctggtgtcgtgagacgattttcaacctcaagctgccgatgaaaaagcgctacgaagaggtgtcgcagaacctggcctatattcagcagcagctggacgaacacgggattaacgcggaaatccaggcgcgtcagctttatcacgaccgcgaagaagtgacggtccatatccgtcgctggtgggcggcagtgggtgggcgtcgcgacgagcgataa

SEQ ID NO: 116343 - DNA, 756 bp, Enterobacter cloacae
gtggccgttcatttgcttatcgtcgatgcacttaacctgattcgccgtattcatgcggtacagggcaccccctgcaaggacacctgtttacacgcgctggagcagctcattcgccatagcgaacccacccacgctgttgccgtattcgacgatgaagcacgcaataccggctggcggcaccagcgcctgccggactacaaagccggacgtgcgccgatgccggacgatctgcacgcagaaatgcccgctatccgcgcggcctttgagcagcgcggcgttccgtgctggggcgcccacggtaatgaggctgacgatttagccgcaacgctggcggttaaagtcgcgagcgccgggcatcaggcgactatcgtttcaaccgacaaaggctactgccagctgctctctccaacgatccgcatccgggactactttcaaaaacgctggctggacgcgccattcattgccagcgagtttggcgtatcgcctgagcaactgccggattactgggggctggcggggatcagcagctctaaagtgccgggtgtcgccggtattggacccaaaagcgccgcacagctgctgacggagtttcagagtctggaaggaatttacgccaggcttgatgaagtgccggaaaaatggcgcaaaaagctggaggcgcataaagagatggcgtttatctgccgggaggtggcgacgctacagacggatttacagctggacgggaatttacagcagttaaggttagaacgttaa

SEQ ID NO: 116344 - DNA, 1368 bp, Enterobacter cloacae
atgattagcgtattcgatatcttcaaaatcggtattggtccttccagctctcacaccgtcggaccaatgaaagccggtaaacaattcacggatgacttgattgcacgcggcattttgcacgacatcacccgcgtggttgtcgatgtatatggttccctttccctgaccggtaaaggccaccataccgatattgccattatcatggggctggcgggtaatctgccggataccgttgatattgatgcaatacctggctttatccaggacgtgaacacccacggtcgtttgctgctggcgaacggcgagcatgaggttgaattcccggttgatcactgcatgaatttccatgcggataacctgtcgctgcacgagaatggcatgcgcattaccgcgctggccggcgacaaagcggtttacagccagacgtattactccatcggcggcgggtttatcgtcgacgaggaccattttggtcaaagtaccaattctgccgttgatgtgccgtacccttacaaaaacgcggccgacttacagcgtcactgccaggagacagggctttctctctccggcctgatgatgaaaaacgagctggccctgcacagcaaagaggagctggaacagcacttcgctaacgtctgggaagtgatgcgcagcggcattgagcgcgggatcaccaccgaaggcgtgctgccgggtaaactgcgtgttccgcgccgtgcggctgcgctgcgccgcatgctggtcagcaccgacaaaaccaccaccgacccgatggccgtcgtcgactggatcaacatgttcgcgctggcggtgaacgaagagaacgccgcgggtggccgcgtcgtcaccgcgccaaccaacggggcgtgcggaattgttccggcggttctggcgtattacgacaagtttatccgtgaagtgaatgcaaactcactcgcgcggtatatgctggtcgccagtgcgattggctcactgtacaagatgaacgcctcgatttccggcgcggaagtgggctgtcagggtgaagtgggcgtcgcctgctctatggcggcggcgggtctggccgaattactgggcgcaagtcctgcgcaggtttgtattgcggcggaaatcggcatggaacataacctggggctgacctgcgatccggtcggcggacaggtccaggtgccatgcatcgagcgtaacgccatcgcctctgtgaaagcggtgaacgcggcccgtatggcgctgcgtcgtaccagcgaaccgcgcgtctgcctcgacaaggttatcgaaaccatgtacgaaaccggtaaagatatgaacgccaaataccgcgaaacctcccgcggtggcctggcgatgaagatcgtcacctgcgattaa

SEQ ID NO: 116345 - DNA, 1290 bp, Enterobacter cloacae
atggaaaccactcaaaccagcaccgttgcttcgattgaatcccgaagcggttggcgcaaaacggataccatgtggatgcttggcctgtacggcacagcaatcggcgctggtgtactgttccttcctatcaacgcaggtgtcggcggtatgatcccgctgatcatcatggccctcatcgccttcccgatgaccttctttgcgcaccgaggcctgacccgcttcgtgctgtccggtaaaaacccgggcgaagatatcactgaagtcgttgaagaacacttcggcgtcggcgcaggtaagctgattaccctgctctacttcttcgcgatttacccgattctgctggtgtacagcgttgctatcaccaacaccgtagaaagctttatgatgcaccagcttcagatgaccccgccgccgcgtgcgattctgtccctgatcctgatcgtcggtatgatgaccatcgtgcgcttcggcgagcagatgattgtgaaagcgatgagcgtgctggtgttcccgtttgttgcggctctgatggtgctggctctgtacctgatcccacagtggaacggcgctgcgctggaaaccctgtctctgagcagcgcatccacgaccggcaacggtctgctgctgaccctgtggctggcgatcccggtgatggtgttctccttcaaccactcgccaatcatctcttccttcgcagtagcgaagcgtgaagagtacggcaatggcgcagagaagaagtgctccagcatcctggctcgcgcgcacatcatgatggtactgaccgtaatgttcttcgtgttcagctgcgtgctgagcctctccccggcggatctggcggcggcgaaagagcagaacatctctattctgtcttacctggcaaaccactttaacgcaccgctgattgcgtggatggcgccgatcatcgcaattatagccatcaccaaatccttcctgggccactacctgggcgcacgtgaaggcttcaacggcatggtgattaaatctctgcgtggtaaaggcaagaccattgaaatcaaccgtctgaacaaaatcactgcgctgttcatgctggtgaccacctgggcggtagccaccctgaacccaagcattctgggcatgattgaaaccctgggcggcccgattatcgcgatgatcctgttcctgatgccgatgtacgcgattcagaaagtgcctgcgatgcgtaaatacagcggccatatcagcaacgtgttcgttgttgtgatgggcctgattgccatctccgctattttctactcgctgttcagctaa

SEQ ID NO: 116346 - DNA, 1365 bp, Enterobacter cloacae
ttgattacacatattagcccgcttggctctatggatatgttgtcgcagctggaagtggacatgcttaaacgcaccgccagtagcgacctttatcaactgtttcgtaactgttcacttgccgtactgaactccggaagcctgaccgacaacagtaaagagctgctgtcccgcttcgaaagttttgatatcaacgtgctgcgccgcgagcgcggggtgaagctggaagtgatcaacccgccagaagacgcttttgtcgacgggcgtattattcgctcacttcaggccaacctgtttgccgtgctgcgcgacatcctgtttgttaacggacagatcagcaacgccggtcgtttccagcatcttgacctggaaagttccgttcatatcaccaacctggtcttctctattctgcgtaacgcccgtgccctgcacgtgggtgaagcgccgaacatggtcgtctgctggggtggtcactccattaacgaaaccgaatacctgtatgcccgccgcgtggggacgcagctcggcctgcgcgaactgaatatctgtaccggttgcggtcctggcgcgatggaagcgccgatgaaaggcgcggcagtaggacacgcgcagcaacgctataaagaaggccgttttatcggcatgaccgagccgtcgatcatcgccgctgagccgcctaacccgctggttaacgaactgattattatgccggatatcgaaaagcgtcttgaggcgtttgtccgtatcgcgcacggcattattatcttcccgggcggcgtaggtacggcggaagagctgctttatctgctcgggatcctgatgaatccggccaacaaagatcaggttctgccgctgatcctgaccggcccgaaagagagcgccgactacttccgcgtgctggacgagtttatcgtgcatacgctgggcgaagacgcgcgccgtcactaccgcattattattgacgatgccgcagaagtggcccgtcagatgaaaaaagcgatgccgctggtgaaagagaatcgtcgtgataccggggatgcctacagctttaactggtccatccgtatcgcaccggatcttcagatccccttcgagccgtcgcatgagaacatggcgaacctcaaactctatccggatcagccggtggaagtgctggctgccgacctgcgtcgcgccttctctggcatcgtggcggggaacgtgaaagaggtggggatacgcgcaattgaagagtttggcccgtataagatccacggtgatccggagatgatgcgccgcatggatgatatgttgcagggctttgtcgctcagcaccgcatgaagcttccaggctctgcctatattccgtgttacgaaatcatcaagtaa

SEQ ID NO: 116347 - DNA, 843 bp, Enterobacter cloacae
atgtcttacgaaaatcatcaggcgttaacgggcttaacgctgggtaaatcgaccgattaccgcgacacctacgatgcaagcctgttgcagggcgtgccgcgcagtctgaaccgcgatccgctcgggctgcacgctgacgcgctgccgtttgtcggcggcgacatctggacgctgtacgaactctcctggctgaatgcgcgcggtctgccgcaggtggccgtgggccacgtcgagctggattacgccagcgtaaacctggtcgaatccaagagctttaagctctatctcaacagctttaaccagaccaaattcaacagctgggacgaggtgcaacagacgcttgagcgtgatttaagcgcgtgcgcgcaggggaacgtaaccgtctcgttataccatctgcatgagctggaaggacagcctgtcgcccatttccacggcacctgcatcgacgatcaggacattgaggtggaaagctatgaatttagcaccgactacctggaaaatgcggcgggcggaaaagtggtcaacgagacgctggtcagccatctgctgaaatccaactgccttatcacccatcagccggactggggctcggtacagatccagtaccgcggcccgcagattgaccgtgaaaagctgctgcgttacctggtgtcattccgtcatcacaacgaattccacgagcagtgcgtggagcgcatcttcaacgacatccagcgtttctgccagcccgaaaagctgagcgtttacgcccgctacacccgtcgcggcggtctggatatcaatccgtggcgcaccaataccgattttgtgcctgccaccggacggctggtgcgccagtaa

SEQ ID NO: 116348 - DNA, 546 bp, Enterobacter cloacae
gtggatatcgaaactgcaaatgccctgacgtccttcacgacccgctattgcgatgcctggcatgaaaagcgggggacgtggccgcaaagtactgacttatatggcgtgccgtcaccgtgcattatcgcttcgcaggatgattacgttatctggcaaccgaaaccgttcacgggcgagcacaatgtaaatgcggttgaacgcgcgatggacattgtgatacaacctgcgcttcatgcattttataccacgcagtttgccggggatatgactgcatgttttgcaggacagccgttgacgctgctgcaaacctggagcgaagacgatctgcaacgcgttcaggaaaacctcattggtcacctggtcacgcaaaaacgccttaagctctctccgactctttttattgcgacgctcgacagtgaactggacgtcatttctgtctgcaacctgtctggcgaggtcatcaaagagacgctcggcacccgcaatcgcgacgttctcgcgccttcacttgcggattttcttactcaaattgagccgcttctgtaa

SEQ ID NO: 116349 - DNA, 330 bp, Enterobacter cloacae
atgtcgcatcatgacaacgttcgtgcgcagttgcacgccatcgaagcccttatgcgccagcatcagctgtggcaggataacgcgccgcagccagacgcgttcgccagcacccaaccgttttgtctggatacgctggccccgttcgagtggctccagtgggtcttaattccgcgtatgcacgcgctgctggaaggtggtcacgcgttgcccgcgtcttttgccgtctctccctattacgaaatggcgctggaagcgacccacccggcgcgtgccatgatgctggtggagctggaaaagctcgatgcgcttttcgccggtgacgatgcatga

SEQ ID NO: 116350 - DNA, 786 bp, Enterobacter cloacae
atgacgcttgagatcctttatcaggatgagtggttagtggcggtgaataaaccgtccggctggctggtgcaccgtagctggctcgatcgcgatgagaaagtggtggtcatgcaaaccgtgcgcgatcagatcggtcagcacgtctttactgctcatcgtctggatcggccaacctctggcgttctgctgatggggctttccagtgaggcgggtcgactgctttcgcagcagtttgagcagcaccagatgcaaaagcgctaccacgccatcgtgcgtggctggctgacggattccgccacgcttgattatccgctggtggaggaactggataaaatcgccgataaatttgcccgcgaagataaaggcccgcagcctgcggtgaccgactatcgcggtatggcgaccacagaactgccggtggcgaccagcaaatttccgaccacgcgatacagtctggttgagcttttgcccaaaaccgggcgcaagcaccagcttcgccgtcaccttgcgcacctgcgccacccgattatcggcgacagcaagcacggcgatctgcgccagaaccgcagcgcggcagagcactttggctgtaaccggctgatgctgcacgccagcgagctacgcctgacgcacccgtttaccggcgaaccgctgactattcgcgctgggctggacgaggtctggatgcaggcgctgtcacagtttggctggctgggacaactccccgaaaatgaaagggttgagtttgccgcaggcaacgttcaggatgaacagcaagcgcaataa

SEQ ID NO: 116351 - DNA, 450 bp, Enterobacter cloacae
atggctgaagtaggcatttttgtcggcacgatgtacggcaactcgctgctggtggcggaggaagcggaagcaatcctcgtaaaccagggccataaagcaacggtctatgaagatccggagctggcggactgggaaaagtataaagataaatacatcctggtggtgacctccaccaccgggcagggcgatctgccggacagcatcgtcccgcttttccagggcattaaagaccagcttggctatcagccagatgttcactatggcatcatcgccctcggcgatagctcttacgctaatttctgcggcggcggtaagcagttcgacgcgctgttgcaggaacagcgtgctcagcgcgtcggagagatgttgctgattgatgcgggtgaacaccctgagccagaaagcgaatcaaacccgtgggtcgagcactgggcaacgctgcttaaataa

SEQ ID NO: 116352 - DNA, 216 bp, Enterobacter cloacae
atgcccttcaatactgtgtttttgcacggtgaggtgaagaggcactccttcatatacttttcccgtcactataaaacggcttcgggccgtaccaaaaccaaacacaaatctctcattctgattaccctacaggtgctgtacagaatgaaccaggcgaaagctatgtttcaggagtgcaacaatgagtacattaagccacgcggcgagcagcgctga

SEQ ID NO: 116353 - DNA, 1356 bp, Enterobacter cloacae
atgagtacattaagccacgcggcgagcagcgctgagaagcgcaccaacgcccgctactggatagtggtgatgctgtttatcgtcacctctttcaactacggcgaccgtgccacgttatccattgccggctctgagatggcaaaagatatcggacttgatccggtgggtatgggttatgttttctccgcattttcatgggcctacgtaatcggccaaatccctggcggctggctgctggaccgctttggctcaaaacgggtctatttctggtccattttcatctggtcgatgtttaccctgttacagggcttcgtggatatcttcagcggcttcggcattatcattgcgctctttaccctccgcttcctggtgggcttagcggaagcgccatcgttccctggcaacagccgtattgtggccgcctggttcccggcgcaggagaggggaacggcggtagccatctttaactcggcgcaatactttgcgacggttattttcgcgccaatcatgggctggctgacgcacgaagtgggctggtcgcacgtcttcttcttcatgggcgggctggggatcgtcatcagcttcatctggctgaaagtgatccacgaaccaaaccagcatccgggcgtgaacaagaaagagctggactacattgctgaaggtggggcgctgatcaacatggatcagaaaacccagaaagctaaagttccgttcagccagaaatgggggcagatcaaacagctcgtcggctcacgaatgatgatcggtatctatctcggccagtactgcattaacgccttaacctacttctttatcacctggttcccggtttacctggtgcaggcgcgcgggatgtcgattctgaaggcggggtttgtcgcttccgtgccggccatctgcggcttcgtgggtggggtgcttggcggggtcatctccgactggctgatgcgtcgtaccggttcgctgaatattgcgcgtaaaacgccaatcgtgctcggcatgctgctctccatgaccatggtgttctgtaactacgtcagcgcggagtggatgattatcggctttatggcgatggccttcttcggtaaaggcattggcgcactgggctgggcggtgatggcagataccgcgccgaaagagatcagcggcctgagcggcggtctgttcaacatgtttggcaacatttccggcattgtcaccccaatcgctatcggttacatcgtcggcaccactggctccttcaacggcgcgctgatttatgtaggcgtccatgcgctggtggcggtactcagttatctggtgctggtgggtgacatcaaacgaatcgaactgaaacctgttggggagcgcggatga

SEQ ID NO: 116354 - DNA, 1344 bp, Enterobacter cloacae
atgatgacaacgcaatcaagcccgatcgtgacggagatgaaggtcattccggtggcggggcaggacagcatgctgctcaacattggtggcgcgcataacgcctggttcacccgcaacattgtggtgctgaccgacagcgcagggaataccggcgtcggggaagcgcctggcggagaggtgatttaccagacgctggtcgacgccatcccgcaggtggttgggcaggaggtcgcccgcctgaacaaggtggttcagcgggtgcataagggtaaccagtcggcggattttgataccttcggcaaaggcgcctggacgtttgaactgcgcgttaacgcggtggcggcgctggaggcggctctcctcgatttactgggcaaggcgctgaacgtgccggtctgcgaactgctggggccaggcaaacagcgtaatgcggtaacggtgctgggctatctgttctacgttggcgaccggacgaaaaccgatctgccgtatctggaacgctcgccgggcagccacgcgtggtatcacctgcgtcatcaggaggcgctctctggcgaggcggtggtacgccttgcagaggcggcgcaggatcgctacggcttcaaagacttcaagctgaaaggcggcgttctgcccggcgagcaggagattgacagcgtgcgcgcgttgaaaaaacgcttcccggaggcacgcatcaccgtcgatccgaacggcgcctggctgctggatgaagctatcgcgctgtgcaaagggctgggcgacgtgctgacctacgcggaagatccgtgcggcgccgagcagggattttctggccgcgaggtgatggccgaattccgccgcgctaccgggctgccggttgcgaccaacatgatcgccaccaactggcgtgaaatgggccatgcggtgatgctgaatgcggtggacataccgctggcggacccgcacttctggaccctttccggcgcggtgcgcgtggcgcagctgtgcgatgactgggggctcacctggggctgccactccaataaccattttgacatttcgctggcgatgtttacccacgttggcgcggcggcgccgggcaacccgaccgccatcgatacgcactggatctggcaggaaggcgaagcgcgcctgaccaaaaatccacttgaaatcaaaaacggcaccattgccgtaccggatgcgccggggctgggcgtggagcttgactgggatcagatccacaaggcgcatgaagcgtataaaaaactgctgggcggcgcgcgcaacgacgcaggcccgatgcagtaccttattcccggctggacatttgaccgtaagcgccctgtatttggacgtcactga

SEQ ID NO: 116355 - DNA, 1338 bp, Enterobacter cloacae
atgagcacattttctacccctgtagtcacctccatgcagatcattcctgtcgcgggacatgacagcatgctgatgaacctgagcggcgcccatgcgccgttcttcacccgtaatattgtggtgatcaaggacaactcagggcataccggtgtcggtgaaatcccgggcggggagaagatccgtaaaacgctggaggacgccattccgctggtggtgggtaaaacgctgggcgagtacaaaaatgtgctgactcgcgtgcgtacgacctttgccgatcgtgatgcgggtggccgtggtctgcaaacgtttgatctgcgcaccactatccatgtggtcacgggcattgaagccgcgatgctggatctgctgggccagcatcttggcgtcaatgtcgcctccctgctgggcgacggccaacagcgcagcgaagtggaaatgctcggctacctgttctttatcggcaaccgcaaactcaccccgctgccgtaccagagccagccggacgaaaaatgcgactggtatcgtgtgcgtcacgatgaagcgatgaccccggacgcggtagtgcgcctggcggaagccgcgtatgaaaaatatggctttaatgacttcaagctgaaaggcggtgtactggcgggtgaagaagaagcagaggcgatcgccgcgctggcgaagcgcttcccgcaggcgcgcgtcacgctggatccgaacggtgcctggtcgcttgatgaggcgataaaaatcggtaagcagcttaaaggcgtgctggcctatgcggaagatccgtgcggtgcagagcaggggttctccggacgtgaagtgatggcggagttccgtcgcgccaccgggctgccaaccgccaccaacatgatcgcgaccgactggcgtcagatggggcacacgctctcgctgcaatcggtggacattccgctggcagacccgcacttctggacgatgcagggctcggttcgcgtggcgcagatgtgccatgagttcggcctgacctggggctcgcactccaacaaccacttcgacatctcgctggcgatgttcacccacgtggcggctgccgcgccgggcaacattaccgccatcgacacccactggatctggcaggagggcaaccagcgcctgaccaaacagccgtttgaaatcaaaggcggtatggtacaggttcctgctacgccgggtctgggcgtagaactggatatggatcaggtcatgaaagcgcatgagctgtaccagaaacacggcctgggcgcgcgtgatgacgcgctggcgatgcaatatctgatccctgagtggacattcgacaataaacgtccgtgcatggtacgataa

SEQ ID NO: 116356 - DNA, 1146 bp, Enterobacter cloacae
atgaaaattgttatcgctccggactcgtataaggaaagcttgagcgcgctggaggtggcgacagcgatagaggtcggttttcgcgacattttcccgtcagcggactatgtcaaattaccggttgccgatggtggcgaagggacggtggaagcgatggtggcagccacgcatgggcgtcttgtccatgttcccgttaccgggcctttgggtgaacgcgtggaagggtttttcgggttatccggagacgggaaaagcgcctttatcgagatggcggcagcgagcggtctggagcttgttgctcccgcaaagcgtaacccgttaatcaccacctcctggggaaccggggaactgatccgtcatgcgctggatgcgggcgttaagcatatcattattggcattggaggcagcgcgaccaatgacggtggcgcaggcatggtgcaggcgctgggcgtaaaactgctggatgcgaaagcgcagcccgtagggccgggcggcggcgaactggcaagtcttgcacatatcgatcttagcgggctggataagcggctggcagactgtcgaattgaagtggcctgcgatgtaaccaaccctctgatcggcgagacaggcgcttctgcggtatttggtccgcagaaaggggcgacgccggagatggtcaggacgctggacaacgcgctggcgcattacgcaaaaattatcgcccgggatctggatattgacgtcttaaacctggcgggcggcggtgcggctggcggaatgggggcggcgctgtatgcattttgcggcgcacagctccgtcaggggattgagattgtcaccgatgccctgcatcttgatgaacaggtcgcggacgccgatctggtgatcacgggcgaagggcgtatcgacagccagacgatccacggcaaagtgcccgttggcgtggcgagagtcgcgaaacgctataacaagccagttatcggcattgccggcagcctgacggcggatgttggcgtggtgcatgagcatggactggatgccgtattcagcgtgatttacaccatctgctcgctggaggatgcgctggaaaatgcgcaacagaatgtacagatggccgcaaggaatattgcggcggtgataaagatggggcaggggatgtcgcgttaa

SEQ ID NO: 116357 - DNA, 2760 bp, Enterobacter cloacae
atgaccaactacagcctgcgcgcgcgcatgatgattttgatcctcgctcctaccgttctcatcggtttgctgctgagcattttctttgtggtgcatcgctataacgatttgcagagacagcttgaagatgccggggccagcattatcgaaccgctggccgtctccagcgagtacggtatgaacctgcaaaaccgtgaatccattggtcagttaatcagcgtgctgcaccgccgtcattcagagattgtgcgcgccatttccgtttacgatgagcataaccgtctgttcgtcacctcgaatttccatctggatcccacgtcgctgaaaatcccggatggtacccccttcccgcgtcaccttacggtgttgcggcgcggcgatatcatgatcctgcgcacgccgattatctccgaaagctattcacccgatgaatccgcccagtccgatgcgaagtccagcaataatatgctgggatatgtggcgctggagctggatcttaagtcggtacggctccagcagtacaaagaaatattcatctccggcgtgatgatgctgttctgcatcggcatcgcgctgatcttcggctggcgactgatgcgcgacgtcacggggcctatccgcaacatggtgaataccgttgaccggatccgccggggtcagctcgacagccgcgtggaaggctttatgctcggcgagctggatatgctgaaaaatggcatcaactcaatggcgatgtcgctggcggcttatcacgaagagatgcagcacaacgttgaccaggccacctctgacctgcgcgaaacgctggagcagatggagatccagaacgtggagctggatctggcgaaaaaacgtgcgcaggaggcggcacgaattaagtctgagttcctggcgaacatgtcgcacgagctgcgcacgccgctgaacggggtgattggcttcacccgtctgacgctcaaaagcgagctgaacccgacccagcgtgaccatctgcataccattgaacgctcagccaacaacctgctgaccattattaacgacgtactggacttctcgaagctggaagcgggcaagctgattctggagagtattcccttcccgctgcgcagcacgctggatgacgtggtcacgcttcttgcccactcatcgcatgataagggtctggaactgacgctcaatattaaaaatgatgtgccggataacgtcattggcgacccgctgcgcctgcaacaggtcattaccaatctggtgggcaacgcgattaagttcaccgagagcggcaacatcgacattctggtcgaaaaaagggcgctcagtaataacaaagtccagattgaagtgcagatccgggataccggcatcggtattcccgagcgcgatcagacgcgtctgttccaggctttccgccaggccgatgcgagcatttcccgtcgtcacggcggaacgggcctggggctggtgatcacccaaaagctggtgaaagagatgggaggcgatatctccttccacagccagcctaaccggggctcaaccttctggttccatatcaaccttgatcttaacccgaacgtgcagaccgacggcccggtcaccgggtgcctgaaggggatgcgtctggcctatgtggaaccgaacgccgcggcagcgcagtgtacgctggatgtattaagcagcacgccgctggaggtcatctacagcccgaccttctccgcgctggcgaacgatcattacgatatcctgttgttggggattccggtgacgtttaccggagaactgaccatgcagcaggaacgcctggcgaaggcggcctcaatgacggactacctgctgctggcgctgccgtgccacgcccaaatcaacgccgaagagctgaaaaacgacggagcggcggcgtgtctgctgaaacccctcaccgccacacgactgttacctgcgttgaccgaatattgccgtctgacgcatcagtccctgccgctggaaaacgacgaacataagctgccgatgacggtgatggccgtggacgataacccggcgaacctgaagctgattggcgtgctgcttgaggatcaggttcagcatgttgagctgtgtaccagcggcgccgaagccgtggaacaagccaaacagatgcagttcgacctgatcctgatggatattcagatgccgggcatggatggcatccgcgcctgcgagttgattcgccagcttccgcaccagcagcagacgccggtgattgccgtgacggcgcacgcgatggcggggcaaaaggagaaactgctgggtgcgggcatgaacgattatctggcgaaaccgatcgacgaagagaagctgcacagcctgctgctgcgctacaagccggggcacattggcgggacatacaccattacagctgaatcgccggagatcagcgttaaccagaatgccacgtttgactggcaactggcgctgcgccaggcggcaggcaaacccgatctggcccgcgatatgctgcaaatgctggtggacttcctgcctgagatccgtaacaaggttgaagaacagctggtgggtgaaaaccccgaaggactgctggaagccattcataaactgcatggcagctgcggctacagcggcgtaccgcggttgaaaaatctctgccagttgcttgaacagcagctccgcgcgggtacgccagaatccgatctcgaaccggagttcctggagctgctggacgagatggacaacgtgacgcgggaagcaatgaaggtgttggggagctaa

SEQ ID NO: 116358 - DNA, 1299 bp, Enterobacter cloacae
atggcgcaattctactctgcaaaacgacgcgtgacgacgcgtcagatcataactgttgaagccacggacctcgatccttttggacagggggtggcgcgtcacaagggtaagacactgtttatcacaggtttgctgccaggagaacgcgcagatattacgctgacggaagacaaacgtcagtatgcgcgcggtcaggtcaagcgccgtcttaatgatagcccggagcgcgtgacgcctcgctgcccccattttggcgtctgcggcggctgccagcaacagcatgccagcacagaattacagcaaaaaagtaaaagcagcgcgctggcccgcttggtcggacacgacgtgaatgacatcattgccgatcggccctggggctaccgtcgccgcgctcgcctgagcctcagctaccagcccaaaaccgagcggctggagatgggttttcgcaaagctggctccagcgatatcgtctctgtcacgcagtgccctgttttggcgccccatcttggggcgttgctcccggacgtgcaccactgtcttgcatcgctggatggcgtgcgttcgctgggccatgtcgaactggtgctggccaacagtggcccgctgatggtgctgcgccacaccgcgccgctgtcaaaggcggatcgcgaaaaactggaacgcttttcgcattctcatgagcttgcgcttttcctcgcgccgcaaagcgagatacttgagcaggtcagcggagaagcgccctggtatgcgtcagacgggctacgcttaacgttcagcccgcgggattttatccaggttaacgacggcgtgaaccagcagatggtagcgaacgcgctggcgtggctggacgtacaacccaccgatcgggtgctcgatctgttctgcggcatggggaactttaccctgccgctggcgcgcagagcagccagcgtggtcggggtggaaggcgttgaggcgctggtggcgaaaggccaggagaacgcccaacagaacggtttgcaaaatgtgacattctttcatcaaaatcttgaggatgatgtcactcggcaaccgtgggctaagcagggctttgataagatcctgctcgatccggcgcgcgcaggtgcgccgggcgtgatgcagcatataattaaactcgcgcctgaacgcgtggtctatgtttcctgtaacccggcgacgcttgcccgtgacagcgaagcattattgagcgggggttaccagattcggcgtctggcaatgctggacatgttcccgcacactggtcatctggaatcgatggtgttgttcgagcacatctaa

SEQ ID NO: 116359 - DNA, 2232 bp, Enterobacter cloacae
atggttgcggtaagaagtgcacatttaaataaagctggtgagtttgaccctcaaaaatggatcgcaagtctggggatttccagccagcagtcgtgtgaacgcttaaccgaaacctgggcctattgtttacgcacaacgcaggggcatccggacgctgaactgctgttgtggcgcggcgtggagatggttgaaattctctccatgctgaacatggacatcgaaacgctacaggccgcactgctgttccccctggcggacgccgacgtggtgacggaagacgtcctgcgtgaaagcgtcggccagtccgtcgtggcgcttatccacggcgtgcgtgacatggcagccattcgtcagcttaaagccgcgcaaacggactctgtctcttccgagcaggtggataacgtccgtcgcatgctgctggcgatggtagatgatttccgctgtgtggttatcaagctggccgaacgggttgcccatctgcgtgaagtgaaggatgcgccggaagacgagcgcgtcctggccgctaaagagtgtacgaatatctatgcgccgctggcgaaccgtctcggtatcgggcaactgaagtgggagctggaagattactgcttccgctatctgcatccggcggaatacaaacgcattgcaaaattgctgcacgaacgccgcattgaccgcgagcactatatcgaggaatttgtcagcgggctgcgccagtcgatgaaagaggagaatgtgcgcgccgaggtctacgggcgtccaaagcacatctacagcatctggcgcaaaatgcagaagaaacatctcgcctttgacgagctgtttgacgtgcgcgccgtacgtatcgtggcggagcgtctccaggactgctatgccgcgctggggatagtgcatactcacttccgccatctgccggatgagtttgatgactacgtcgccaaccccaaaccaaacggctatcagtctattcataccgtggtgctcggccctggcggcaaaacggtggaaattcagatccgtaccaaacagatgcacgaagacgccgagctgggcgtggcggcgcactggaaatacaaagagggtacctccggcggcggtcgctccggtcacgaggaccgtatcgcctggctgcgtaagctgattgcgtggcaggaagagatggccgactccggcgaaatgctcgacgaagtgcgcagtcaggtcttcgacgatcgcgtctacgtctttaccccgaaaggggatgttgttgatttgccggcaggctccacgccgctcgatttcgcctaccacatccacagcgatgtggggcaccgttgcatcggggcgaagatcggcggacgtatcgtaccgtttacctaccagctccagatgggcgatcagattgaaatcatcacccagaagcagccaaacccaagccgcgactggctgaatccgaacctcggttacgttaccaccagccgtgggcgctctaaaatccacgcctggttccgcaagcaggatcgtgacaagaacatccttgccggtcgtcagatcctggacgacgagctggaacatatcgggataagcctgaaagaggcggagaagttcctgctgccacgctacaacttcaacgagctcgacgaactgttagcggcgattggtggcggcgatatccgcctgaaccagatggtgaacttcctgcaagcgcagttcaacaagccaagcgcagcggagcaggatgcggcggcgctgaaacagctccagcagaaaacctacgctccgcagcagcgcagcaaggacaatggccgcgtggtggttgaaggggtgggtaacctcatgcaccatattgcccgctgctgccagccgatcccgggagacgatattgtcggctttatcacccaggggcgcgggatctcgattcaccgctccgactgcgatcagcttgcagagctgcaatcgcatgcgccggaacgtatcgtggaagccgtctggggggagagctactcggcgggttactcgctggtggtgcgcgtcactgccaacgaccgcagcggcctgctgcgcgacatcaccaccattctcgccaacgaaaaggtcaacgtgctgggcgttgccagccgcagcgatacccgcgagcagcttgccaccatcgatatgactatcgaaatctataaccttcaggtgctgggccgcgtactcggcaaactgaaccaggtgccggatgtgattgacgcgcgtcgtctgcacggcggctaa

SEQ ID NO: 116360 - DNA, 804 bp, Enterobacter cloacae
atggaatctgttatgactcaaatcgaccgcctgcttggcatcatgaaacgtctgcgcgatccggaaaacggctgcccgtgggataaagagcagactttcgccaccattgcgccttacacgctggaagagacctacgaagtgctggacgcgatttcgcgcgaagatttcgacgacctgcgcggtgagctgggcgacctgctgttccaggttgtgttctacgcgcagatggcgcaggaagaggggcgctttaactttgacgatatctgcgccgctatcagcgacaagctggagcgtcgtcatccgcatatttttggcgatgcctccgcaggcaacagtgcggaagtgctggcgcgctgggagcagataaaaagcgccgaacgcgctgaaaaatcccagcactcggcgctggacgacattcccctgaaccttcccgcgctgatgcgcgcgcacaaaattcaaaagcgctgctcggcggtagggtttgactggaactctctcggcccggtgctggaaaaagtgcacgaagagatcgacgaagtgatgcatgaagcgcagcaggccgttgtggatgaagcaaagctggaagaggagatgggcgatctgctgtttgcgaccgtcaacctttcgcgccacctcggtgtaaaagcggaaaccgccctgcaaaaagcgaacattaaattcgaacgacgctttcgcgaagttgagcggattgtggcctcgcgcggcctggaaatgagcgggattgacctcgacgcgatggaagaagtctggcaggaagtaaaacgccaggaacatgatctctaa

SEQ ID NO: 116361 - DNA, 1638 bp, Enterobacter cloacae
atgacaacgaactatatttttgtgaccggcggggtcgtatcctctctgggtaaaggcattgccgcagcctccctcgcagccattcttgaagcccgtggcctcaatgtgaccatgatgaaactggatccgtacatcaacgtcgatcctggcaccatgagcccaacccaacacggggaagtgttcgttactgaagacggcgctgaaaccgatctggatcttggccactacgagcgtttcatccgtaccaaaatgacccgtcgtaacaactttacgactggccgtatctactctgacgttctgcgtaaagagcgccgtggtgactacctgggcgcgaccgtgcaggtcatcccacacatcactaacgccatcaaagaacgtgtccttgccggtggcgaagggcatgacgttgtgctggttgaaatcggcggtaccgtaggggatatcgaatccctgccgttcctcgaagcgattcgtcagctggcggtagatattggtcgtgagcacgcgctgttcatgcacctgacgctggtgccttacatggcagcagcaggtgaagtgaaaaccaaaccgactcagcactctgttaaagagttgctctccatcggtattcagcctgacatcctggtttgccgttccgatcgcgcgattccggcgaacgaacgcgcgaaaattgcattgttctgtaacgtgcctgaaaaagccgttatttcaatgaaagatgtcgattccatttataaaatcccgggcctgttgaaatcacagggtctggacgattatatttgtaaacgattcagcttgaactgtccggaagctaacctgtctgaatgggagcaggtgatttacgaagaagccaatccgggcggcgaagtgactatcggtatggtcggcaagtacatcgaactgccggatgcctacaagtcagttatcgaagcgctgaaacacggtggtctgaagaatcgcgtctctgtgaacatcaagctgattgattcacaggatgtagagacgcgcggcgttgaaattcttaaagatctggatgctatcctcatccctggcggcttcggctaccgtggtgttgaaggcaagatcgccactgcacgctatgcgcgtgaaaacaatattccatacctcggtatctgcctgggtatgcaggttgcgctgattgaatttgcgcgcaacgtagcgggaatggaaaacgcgaactctacggaatttgtgccagactgtaagtaccctgttgtggcgctgattacggaatggcgcgacgaagacggtaacgtcgaagtccgtaccgagaagagcgatctgggtggcaccatgcgtcttggcgcacaggcctgccagctgtccgacgatagcgtggtacgcaagctgtacggcgagccggtcatcaccgaacgccatcgtcaccgctatgaagtcaacaacatgttgttgaaacaaattgaagctgcgggtctgcgtgttgcgggccgttccggggatgatcagttagtcgagatcatcgaagtgcctaaccatccgtggttcgtggcctgccaattccacccggaatttacttcaacgccgcgtgacgggcatccgctgtttgcaggcttcgtgaaagccgccagcgagtaccagaagcgtcaggcgaagtaa

SEQ ID NO: 116362 - DNA, 1299 bp, Enterobacter cloacae
atgtccaaaatcgttaaagtcatcggtcgtgaaatcatcgactcccgtggtaacccgaccgttgaagctgaagttcatctggaaggtggtttcgtcggtatggcagcggctccatcaggtgcttctacaggttcccgcgaagcgctggaactgcgtgatggcgacaaatcccgtttcatgggcaaaggcgtactgaaagcggttggcgctgttaacggtcctattgctcaggctatcgttggcaaagatgctaaagatcaggctggcatcgacaagatcatgatcgatctggacggtactgaaaacaaatctaacttcggtgcgaacgcaatcctggccgtttccctggcgaacgccaaagcggcagcggcagctaaaggcatgccactgttcgagcacatcgctgaactgaacggcaccccaggcaaatactccatgcctgtaccaatgatgaacatcatcaacggtggtgagcacgcagacaacaacgttgatattcaggaattcatgattcagccagttggcgcgaaaaccctgaaagaagcggtacgtatgggttctgaagtgttccacaacctggctaaagttctgaaagctaaaggcatgaacacggctgttggtgacgaaggcggctacgcgccaaacctgggttctaacgcagaagcactggctgttatcgctgaagcggttaaagcagcaggctacgagctgggcaaagacatcaccctggcgatggactgcgcagcatctgaattctacaaagacggtaaatacgttctggctggcgaaggcaacaaagcgttcacctccgaagagttcacccacttcctggaagacctgaccaaacagtacccaatcgtgtctatcgaagacggtctggacgagtctgactgggatggtttcgcataccagaccaaagtactgggcgacaaaatccagctggttggtgacgatctgttcgtaaccaacaccaagatcctgaaagaaggcatcgagaaaggcatcgttaactccatcctgatcaaattcaaccagatcggttctctgaccgaaacgctggctgcgatcaaaatggcgaaagacgctggctacaccgcggttatctctcaccgttctggcgaaactgaagacgctaccatcgctgacctggctgtgggtaccgctgctggccagatcaaaaccggttctatgagccgttctgaccgtgttgctaaatacaaccagctgattcgtatcgaagaagcgctgggcgaaaaagcaccttacaacggtcgtaaagagatcaaaggccaggcataa

SEQ ID NO: 116363 - DNA, 825 bp, Enterobacter cloacae
atgtcggaccatgaaaacctgctgctgaagctacgccaggaggcttccgggtacagcccaacgcaacaaaaactgggggagtttgtcctcaacgatcctgccagggtgctctacctgacgatcaccgagctggcgcgtgaaagcggcaccagcgaggccagcgtcacacgcctttgccgcacgctgggctgtaagggatataacgaatttaaaatggcgcttgcgctggatattcagcagggtttgccggagcgtcaggcaggagatgcgatagataacgtggtggatgagtctgtccaggcgctgcaagataccgcaaaactcctcgaccgggcccagcttgaacaggcgacactggccctgcatcaggcgcagtcagtgcaaatttacggggtggcggccagcgcaattctgggggagtatttgcattacaagctgctgcgactcggcaaacctgcacagctgtttagcgatatgcatcgcgccgccatgaatgcgacgacgctctcgaaagagacgctggtggtagccatatcaagttccggctctacacgggatctgcttcacgtggtgaaactcgcccgcaagcgcggcgttaaggtactggcgctcagcaatacgccccgcagcccgctggcctccctgagcgatttacagctggttgcagccaagcccgagggaccgctgagcgcgggtgcgctcaatgccaaggttggcgtgatgctgctggttgaactgctaaccacttcccttattgcagtagacagccattacggtgacgttagccagcaaacggcaagcgccacgttgccgcttctgctatag

SEQ ID NO: 116364 - DNA, 1560 bp, Enterobacter cloacae
atgatgcaaatgttcagcggagcgtcttccggcggatggtttgaaaaagcgcagcgctttggcaaatcctttatgttacccatcgccatactgcccgcagcaggtctgttgctggggattggcggggcgctatcgaatccgaatacgcttaccgcgtatccatttttagacgttggctggctacaggccatctttaccatcatgagcagcgcaggctcgattgtgtttgcaaacctgtcggtactgtttgctgttggggtcgccgttgggctggcgaaaaatgataaaggcacggcagggctggcggcgttgctcgcttatctggtgatgaatgccactatcaatgcgctgctgatcctgaccggaaaactggcgcatgacaacccgggcgccgtagggcagggcatgacgctgggtattcagacgcttgaaacgggcgtatttggtggggtagttattgggctggtgacctgcgcactgcatcatcgatttaataaaatcgcgcttccgcaattcctgggcttttttggcggctcacgcttcgttcccattatcagctcactggcagcgatactcgtcggcgcgctgatgaccgtggtctggccgcatttccagaagctgatctttggcctcggcgggctggtggatgccaccggctatctggggacgttgctgtacggcttcatcctgcgcatgcttggcccgtttggtctgcaccacattttctatcttccgttctggaccaccgcgcttggcggcagtgaaattgttaacggtcacctggttgagggcacgcagcggatcttcttcgcccagctcgccgacccgaacacgcagcatttctatgagggcacgtcgcgcttcatgtccgggcgctttattaccatgatgtttggtctgctcggcgcctgccttgcgatgtaccacacggccaggccggagaacaaaaagcgggttgccgggctgctgctctctgcggcattaacctcattcctgacgggaattaccgagcccatagagttctcattcctatttattgccccggtgctgtacgtcattcatgcgctgttcgacgggctggcgttcatgctcgcgcacatgctgcacatcaccatcggacaaacattctccggcgggtttattgatttcgtgctgttcggcattttgcagggtgaagcgaaaactaactggatgttcgtcccgctggtgggcgtaccgtggttcttcctttactactgtaccttccgttatctgatcaaacgttttgattttgccacgccgggccgtgaaaaggaggcgttggctgacgaggctaccctgccgcaaagcgagcgcgccgcggcggtgatcgccgggctgggaggaaaagacaatctggatgacgttgactgctgcgccacgcgccttcgcgtcacggtgaaagacggtagcaaagtcaatgaatctgcactgaaagcgaccggcgcccgcggcgtaatcgtccgcggcaacggtgtccaggtcatctatggaccgcacgtcaccattatcaaaaacgaagtagaagagatcttatcgtaa

SEQ ID NO: 116365 - DNA, 708 bp, Enterobacter cloacae
atgaaaactgtactggataacctgaaaggaaaactggtcgtctcctgccaggcgctggaaaacgaaccgctgcacagcccgtttattatgtcgcgaatggcgctggcggcggcccagggcggtgccgctgcgatccgcgccaatagcgtggtggatattgaggctatcaaagggctggtctcactgccggtaatcggcatcatcaaacgagactatccggacagcgaggtgttcatcaccgcaacgctcaaagaagtggatgagttgatggcggtcggcccggagatcgttgcgctggatgcgaccgcccggaaacggcccggtggcggatcgctggacatgctgatcgcgcagatccgcacccgttacccttcgctgctgctgatggcggatattgccaccgtgcaggaggccgtggccgcgcaggcgctggggtttgattgcgtcggaaccaccctttacggttatacggcggagactgcgggccattcgctaccggaaaatgactgcgcgtttttgaaagaggtgctgtctgccgtcacgatccccgtgattgctgaaggtaacgtggatacgcctgaacgcgcggccaggtgtctggcgctgggggggcacacggttgtcgtcggcggggcgatcacccgaccacagcaaattacggaacggtttatggcggcaattggcgcgcaaagcaccgatggagcatga

SEQ ID NO: 116366 - DNA, 672 bp, Enterobacter cloacae
atgcagtacccgattaacgagatgttccagaccctgcaaggcgagggttactttaccggcgttcccgctatctttattcgtttacagggatgcccggttggctgcgcctggtgtgataccaaacatacgtgggataagctcgcagatcgggaagtgtcgctgttcagcattctggcgaaaaccaaagagagcgataaatggggcgcgggcagcgcggaagatctgcttgccattattggtcgtcagggctggacggcgcggcatgtggtgatcaccggcggggaaccctgcattcacgatctgatgccgctcaccgaactgctcgagaagaacggctatagctgtcagatcgaaaccagcggcacccatgaagtgcgctgctcccattcaacgtgggtcacggtttcaccaaaagtgaatatgcgcggcgggtatgacgtactgtcgcaggcgcttgagcgtgctgatgagatcaaacatccggtggggcgcgtgcgtgacatcgaagcgctggatgaactgctggcgacgctgacggacgaaaagcagcgcgtgatcgcgctacagcctatcagccagaaagacgatgcgacccgtctgtgcattgaaacctgtatcgcccgcaactggcggctgtcgatgcagacgcacaaatatctgaacattgcctga

SEQ ID NO: 116367 - DNA, 1398 bp, Enterobacter cloacae
atgagtaccgtttccctgacaggcgcatccgcctacgccggtaacgatcggctgctggcgggtatcgtcatgagcgttctgacattctggctgtttgcccagtcggttatcaacgtggttccggccatgcagaatagcctcgatattgccctcgaaacccttacgctggccgtcagcctgagcgcgttgttcagcggctgttttgtcgtcgcctgcggtgggtttgccgataagtatgggcgcatgcgcctgaccatgattggcctgatcctgagcatgatcgggagtggtctgctgttcatttcatgggagcccgtcctgtttctgttgggacgagcgatacaggggctatcagcggcctgcattatgcccgccacgctggcgctgattaaaacctggtatgaaggtaaagcacgccagcgcgcaattagtttctgggttatcggttcatggggcgggagtggcctgagctcgtttgtgggaggcgccatcgccaccacgctgggctggcgctggatttttattctgtcgatggtggtggctctggtcgcgctattgcttatccgcgccacgccggaaagccgcagccctgatgcgtgtcgacacaaactggatatcagcggcctggtgagttttgtccttatgctggtgctgttcaatctgtttatcagcaaaggacacagctggggctggagcagcagtttatcgcttcttgtactgtgtggagccgtgattgcactgatgtgctttatcgttaccgggcggcggaaaggcgatgcggcgctgatcgatttcgccctgtttaaaaaccgggcctatagcgcctcggtattctcaaatttcctgctcaacggctgcattggcaccatgatgatcgccagcatctggttgcagcagggccatcatctgtcaccgctacagaccggcatgatgacgctggggtatctggttaccgtactggcgatgatccgggtgggtgaaaaactgcttcagcgctatggcgccaggctgccgatgatgaccggcccgctgctgaccgcaacaggtatttcgctgatttcatgcaccttcttaagcaaagaggtctacattgttaccgtttttctgagcaatattttatttgggctggggctcggatgttacgccacgccctcaacggacacggcggtaatgaatgcccctgaaaacaaagtgggggtggcttctgggatctataagatgggcagttccctgggcggcgcaatgggtatcgcggtcaccgcatcgctgtacgcgctatggctgccgatgggaacggccagtgccgcgcagtatgccttgcttttcaacagtgcgatttgccttgggtcggcagtcgtgacctgggctttactgccaacaacaaaagccccgcgttaa

SEQ ID NO: 116368 - DNA, 1170 bp, Enterobacter cloacae
atgacacatccaattatcgaagctctgcgtggcaacgaagcccggttcactgaattacgtcactattttcatcagcatcctgaaattggttttgaggagcacaacacgagcgatcgcgttgcagcgctgcttcaggaatggggatatgaggttcatcgcggcctggcgaaaaccggtgtggtcggcacactgaaggtgggtaacgggcataaacgcctgggtctgcgcgccgatatggatgcgctgccaatgcaggaaaacaacggcaaggcgtggagcagtaccgttgagggtaaattccacggctgcggtcatgacggccacaccacaacgctcctgtatgcagcggagtacctggcacgcacccgtaattttaacggcacgctgcaccttatttttcagcccgcggaagaacttctgtatggcggacgcgttatggtagaggacggtttgtttgacctgttcccctgcgaccacatctttggtctacacaatatgccgtcacagcccctcggaaaaattggtctgcgcgatggcgccatgatggcctcttccgacacccttcatattgaggttaacggcgtgggtggtcacggcgcggtgccagaacataccgttgacgccaccctggttgcctgtcatatcactatcgcgttgcagtccattgtttcgcgcaacattacccccttccagccagccgtcgttaccgtaggcagcattcaggccgggcacgcccctaacattatcaacgacaaagtattgatgaaacttaccgtgcgcacgctggatgaaagcgtgcggcaaaccgtgctacagcgtatccatgatatcgccgttgcacaggcggaaagtttcaatgcgacggccaccattcgacacattaacggcagcccggtgctgaaaaacaatccgcaagccaacgagatggtgcgcagcgtcgccaccgatctgttcggtcaggatgccgtcgcggaggtcaatgcgtttatgggcagcgaggactttgctttcatgctcgagaaaaatcccaatggatgctatttcacgcttggcgccggggatgagcctgaccgctgcatggtacataacccgggctacgactttaacgacaacattctcctcaccggcgcggcgctgtgggccgcactgaccgaacactatctgcgctga

SEQ ID NO: 116369 - DNA, 2355 bp, Enterobacter cloacae
atggcgcaacggggagataagttttggatagagattcaggacattcgccactgcgtggaggatgaaggcgatacgctaacgttgctctgggtgctggaagggcgggcagagctgaacaccgatgtgggacatgacatcctggaggccaatacccttgctatcatcaaccgtcatcggcgctggcagttcacgagcgaaacggcaaatgtcaccctgcgcgtaaccctttccgggcgctgggtcgtccagctctgcaatgatttttttgcccatgattatgctgtaccggcagaagccggaggcgtctggccccaatgcgatgcgcttcgcgatctgctgcgccagcttcttgtggtcaccctcatcaacgacccgcaccgctaccggctggaggcgtaccgctggctgagcgagatattgctgttgctgaccagccgctttcaacagcccgcccgtatgctgtcccgggaactttcctcagcgcacagcaaacgcatcgcccgggtgatagagcggatcaatgccagttattcccgccgtattacgcttgcggaaatcgccgcgagtgaatatgtctctgaagcctggctctctcgtctctttcgcaaggaggtggggatcagtttcatgcagtacatcacccacctgcggctggaaaaggcggccgacgctctccggctgacgaaccgaccgctgcatcagattgcgcttgagcagggtttcgccagcacgcgtatgatgagcgatcggttcaggcgtgttcacaatatgtctccgggtgagtttcgtaaggcccggcgccagcacccggaggcggcacgtattcggacggacaggcgtgagcagcgctatccggtcgccgtggacaagctgtttagcctgctcaatgaaccggtggcgcgcggttggggagcctcgccgctcatcgttcatccgcagcaggagcagagcctggatcttgagcagcttaatcctctttctgcctcgctgcgccgtatgcgggtggtcattaccctgcgtgagctcgacgatttgctgcgtgaggacgttcgacaaaatctggaggcgataaatgaggccattcccattgaggggattgatatcgccgaaccttttctcagcagtcgtctgtttgccaccgggtgggatgacccccagatggcgggctacgcctgctggtacaatctgcatcagctcttcacctggctggcaaaaaagcagtggacggtgctactgcacaccggcgtaacgacccgtcgcgatcttcttacccgttttttacaacagtcggttaatcatttttcgccagagatcaccgcgggctggcacttcgtcatgcactggtcaacacaggcaagtgaggagacccgggagcaggtctggctggcccagcaaaaggcaatacgaacttatcttccgcaggcaaagtttggtttatggcaccgatttgcccccgtcagcgcgggcgtaagcgacgataccctgttcagttcagccatcctgatgcaggccgattttcttgcctgttctgccgatgctaatgaacttctcgatcccgcgcagctggaggcaacccctctctcttcaacggaaaattatccgatactgaaggtccgccagatcctcgctgcccttcgcctgcgtaaatgttcgcttcccgtctggcttctctcctggaataccctcaccggcaacacacgggcgacaaacggctggttttttcgtggggcgctgctgatgcagaacctgctcgggctttcggagcaggtctggctggcgggattctggcttaattcgggccttcagggagaagctcgtgcgaacaacaccatcgatacctcaagcctggcgctacagtataaccatggtctgccgcgtccggtttattgggtactctggctctggcaacgtctgcggggcgaggtgctggtcaatgataagcgtgtcctgcttacgcgccatcgcaatggttatcagctgttgctgcgtaatgtggtggtttttaatccgctcctttccagtgaagaagcattcatccagcgttttcgccagcagtatcatttacacctgaagggaatgcgcggtaaatggcgaattaaatgtcatctgtttgatcagcacaacggcgcgctctatccgttacttgaaggggttggcagcgaaagcggccctgatgaagagatgtggcgctggatagcgcataaagcgcgtccaacgctttccgtacgcgatgaacgcctttatgacggctggcaactgagtgaatcactggagagtaatgcgctggtgctctacgagtttacgccgctcgtgcctcgtgagaccgcaacggaggagattcactccccgcggtag

SEQ ID NO: 116370 - DNA, 363 bp, Enterobacter cloacae
atgtccaccacactgtttaaagatttcaccttcgaagccgcacaccaccttccacacgttcctgccggacacaaatgtggccgcctgcatggacactcgtttatggtgcgtcttgaaatcaccggtgaagtcgatccccatacgggctggatcatggactttgccgaactgaaggctgcgtttaagccgacctacgatcgtctcgatcactactatctgaatgatattccgggccttgaaaacccgaccagcgaagtgctggcgaaatggatttgggatcagatgaaaccgctggttccgctgctgagcgcggtgatgatcaaagagacctgcacggcaggctgcgtctaccgcggggagtga

SEQ ID NO: 116371 - DNA, 1806 bp, Enterobacter cloacae
atgacaacacaggccccaccttcaaatttgcttccccttaacccggagcaactggcgcgcctccaggccgcgacttccgatttttcacccacccagctcgcctgggtctccggctatttctggggaatgctcaatcagcagccgggtgctgtggctggcgtcccgccaacagccgttgaaattcctgccatcacgcttatctccgcttcgcaaacgggtaatgcccgtcgtgtggccgaagcgctgcgtgatgacctgctcgccgcgaagctgaacgttaacctggtcaacgccggggattataaattcaaacagatcgcgtcagaaaaactgctggtggtggtggcgtcaacgcagggggaaggtgagcctgcggaagaagccgtcgcgctgcataagttcctgttctcgaaaaaagcgcccaggctggagggcaccgcctttgccgtcttcggcctcggtgatacgtcctatgaatttttctgccagtccggtaaagacttcgacagcaagctggcggagctgggtgcagagcgcctgctggatcgcgtagacgctgatgtcgaataccaggccgccgccgccgaatggcggacgcgcatcgttgaggtgctgaaggcccgcgtcccgaaagagacgccagcgcaagccgccgttaccgcagcgggcaccgtcaacgaaatccacaccagcccttacacgaaagaggcgccgctgacggcgagcctgtcggtaaaccagaaaatcacgggccgtgattcggaaaaagacgtgcgccatatcgaaatcgatctcggtgactccggcctgcgttatcagcctggcgatgcgctgggcgtctggtatcagaacgatccggcgctggtgaaagagctggtcgagctgctgtggctgaaaggcacggagccggtccaggtggaaggtaaaaccttaccgctctctgaggcgcttcagtggcatttcgagctgacggtgaacaccgccaatatcgttgaaaactacgccaccttaacgcgcagcgagtcccttctgccgctggtgggggacaaagtgaagttacagcattacgccgcgacgacgccgattgtcgacatggtgcgtttctccccggcacagctggatgccgacgcgctgatcggcctgctgcgtccgctgacgccgcgtctttactccatcgcctcttcacaggcggaagtggaaaacgaagtccacatcaccgttggcgtggtgcgttacgacatcgaaggccgcgcgcgggcgggtggggcgtcgggcttcctggccgaccgcgtggaagaagagggcgaggtgcgcgtctttatcgaacacaacgacaacttccgcctgccggcgaacccggaaacgccggtgatcatgattggcccgggcaccggcatcgcaccgttccgcgcctttatgcagcagcgtgcagcggacgaggcgccgggtaaaaactggctgttcttcggcaacccgcattttactgaagatttcctctaccaggttgaatggcagcgctacgtcaaagagggcgtgctgacccgcatcgatctggcctggtcccgcgatcagaaagaaaaagtatacgtacaagacaaactgcgcgaacagggcgcagagctgtggcgctggatcaatgacggcgcccacatttatgtctgcggcgacgccaatcgcatggcgaaagacgttgagcaggcactgctggaagtgattgccgaattcggcggtatggatgccgaaacggcggatgaatttttaagtgagctgcgcgtagagcgccgttatcagcgagatgtctactaa

SEQ ID NO: 116372 - DNA, 1713 bp, Enterobacter cloacae
atgagcgaaaaacatcctggcccactggtggtcgaaggcaaactgtctgatgccgagcgcatgaaggtagagagcaactacctgcgcggtaccattgccgaagatttaaatgacggcctgaccggcggtttcaaaggcgacaacttcctgctgatccgtttccacggtatgtaccagcaggacgaccgcgatatccgcgccgaacgtgccgaacagaagctggagccgcgtcatgcgatgctgctgcgctgccgcctgccgggtggcatcatcaccaccaaacagtggcaggcgattgacaagtttgccggtgaaaacacgatttacggcagcatccgtctgactaaccgtcagaccttccagttccacggcattctgaagaaaaacgtcaagccggtgcaccagatgctgcactccgtggggctggacgcgctggcgaccgccaacgacatgaaccgtaacgtgctttgcacctcgaacccgtatgagtccgagctgcacgccgaagcgtacgagtgggcgaagaagatctccgagcacctgctgccacgcacgcgtgcctatgcggagatctggctcgatcaggagaaagtcgcgaccacggacgaagagccgatcctcggtcagacctacctgccgcgcaaattcaagaccacggtggttatcccgccgcagaacgatatcgacctgcacgccaacgacatgaacttcgtggcgattgccgaaaatggcaagctggtcggctttaacctgctggtgggcggcggtttgtccatcgagcatgggaacaagaaaacctacgcccgcaccgcgagcgagttcggcttcctgccgctggagcacacgctggccgtggctgaggcggtggttactacccagcgcgactggggcaaccgtaccgaccgtaaaaacgcgaaaaccaaatacaccctggagcgtgtaggcgtcgagacgttcaaagaagaagtggagcgtcgcgcggggatcaagtttgagccgatccgcccttacgaattcaccggtcgcggcgatcgcattggctgggtgaaaggtatcgataataaatggcacctgacgctgtttattgaaaacggtcgtattctggattatccgggccgcccgctgaaaaccggtctgctggaaattgctaagatccataaaggcgagttccgcattaccgccaaccagaacctgattattgccggcgtgccggaaagccagaaggcgaagatcgagaagctggcgcgcgatcatgggttgatgaatgcggttaaaccgcagcgtgaaaactcgatggcctgcgtgtcgttcccgacctgcccgctggcgatggccgaagcggaacgtttcctgccgtccttcactgataaagtggaagcgattctggaaaaacacggtattccggacgagcatattgttatgcgcgtcaccggctgcccgaacggctgcggtcgcgcgatgctggccgagctgggtctggtgggcaaagcgccgggtcgttacaacgtgcaccttggcggcaaccgtatggggacgcgcattccgcgtatgtaccgtgaaaatattacggaaccggaaattcttgattccatcgacgagcttgtcgggcgctgggcgaaagagcgtgaagcgggtgaaggcttcggcgactttacggtgcgtgcgggcatcattcgcccggtgctcgatcccgccagggatttctgggagtaa

SEQ ID NO: 116373 - DNA, 735 bp, Enterobacter cloacae
atgtccgtactcgatctaaacgccctaaatgacctgccaaaagtcgaacgcattctggccctggcagaaaccaacgcccagctggaaaaactcgacgccgaagggcgcgtggcgtgggcgctggaaaacctgccgggtgactatgtgctgtcgtcaagctttggcatccaggcggcggtcagcctgcacctggtgaatcggatccgcccggacattccggtgatcctcaccgataccggctatctgttcccggagacctaccagtttattgacgagctgacggacaagctcaagctgaacctcaaagtttaccgcgcgacggaaagcgcggcctggcaggaggcgcgctacggcaagctgtgggaacagggcgttgagggcattgagaaatacaatgagatcaacaaggtcgagccgatgaaccgggcgctgaaagagttgaacgctcagacctggttcgcgggcctgcgccgcgagcagtccgggagccgggcaacgctgccggtgctggcggtgcagcgcggcgtgttcaaagtgctgccgatcatcgactgggataaccgcacggtgtaccagtatctgcaaaagcacgggctgaagtaccatccgctgtgggatcaaggctacctgtcggtaggcgacacccacaccacgcgtaaatgggaaccgggaatggcggaagaagagacgcgattctttgggctgaagcgcgagtgcggattgcacgaagggtaa

SEQ ID NO: 116374 - DNA, 1044 bp, Enterobacter cloacae
atgttttccgcaatgcgccaccgattcgttgccctggcgctcggcgtttgctttatccttccggctcaggcaaaaaatcaatcttacggtgaaatagccagtatgcaggcgcggcatattgcgacggtctttccgggccgtatgaccggaaccccagccgagatgctctcggcagactatatccgtcagcagtttgcggatatgggctatgagagcgacattcgcgctttccacagccgctacatctataccacacgcaataaaacgcaaaactggcataacgtaaccggcagcacggtcattgccgcgcacgaaggaaaggcggctgagcagattattattatggcgcaccttgatacctacacgccgttgagcgacgccgatgtcgataataacctcggcgggctgacgcttcagggactggatgacaatgcggcgggtctgggcgtgatgcttgagctggccgaacgcctgaagaatattccgacgaaatacagcattcgctttgttgcgaccagcggcgaagaagaaggaaaactcggcgctgagaatctccttaagcgcatgagcgctgaggagaagaaaaatacgttgctggtgattaacctcgataatctgatcgtgggggataagctctattttaatagcggacagagcacaccgagcagcgtacgtaaactcacccgcgaccgcgcgctggcgcttgcccgcacacatggcgtctatgccgcgacaaatccgggcggtaacccgcagtatcctaaaggcacaggctgctgtaatgacggtgaagtgtttgataaggcgggcattccggtgctgtacgtcgaggcgacgaactgggcgctgggcaaaaaagatggctatcagcagcgcagcaaatcgaaagcctttccggacgggaccagctggcatgatgtgcggctggataatcagcagcacattgataaagcgctgccgcagcggattgagcaccgcagccgggatgtcgtgaaagtgatgctgccgctggtgaaggagctggcgaaagcggggaaagcctga

SEQ ID NO: 116375 - DNA, 1359 bp, Enterobacter cloacae
gtggactatctccccctttttgctgccttaaaagaccgaccggtactggttgtcgggacgggtgaaattgccgatcgcaaaatcgccttcctgcaacgcgccggggcgcaggtgcagatcgttgcagaggcggattttgaagagtctcagatcgacagcgtggtgctggtgattgcggcaaccgaagatcgggcgctcaaccgccgcatctccgacgcagcccaggcccgtcaccgtctggtgaacgtggtagacgaccagccgttatgctcatttatcttcccgtcgattgtcgaccgctcgccgctgctggtggcgatctcctccggcggcaccgccccggtgctggcgcgcgtgctgagagaaaaaatcgaagcgctgctgccgaccagcctcggacgcatggcggagaaggccagctactggcgcaaccatttgaaaacgcgtctgaccagcgtgacggaacgccgtcgcttctgggagcgtgtgtttcgcggccgctttgccagcctgatgcaggccggtaacgagacggcggcgcaacaaattctcgaagacgaactggataaccccggcagtacgggcggagagatcattctggtgggagccgggccgggggatgccgggctgctcacgctgcgtggcctccaggttctacaggatgcggatgtcgtgttctatgaccacctggtcaccgacggtattcgcgagctgatccgccgtgacgcggagcaaatttgcgtcggcaaacgtgccggcgagcactccgtgccccagcacgacaccaaccagatgctgattgccgctgcgaaagcgggcaagaccgtggtgcgcctgaaagggggcgacccgtttatcttcggtcgtggtggcgaggagttgcaggcggcagccgaagcgggcgtcccgttccaggtggttcccggtattacggcggcgtctgccgtcacggcctacgccggtattccgctgacccatcgcgattacgcccagagcgtgacctttgtgaccgggcactataaagccgacagcacgccgtttgactggtcgcatctcgcccagagccgacaaacgctggcgatttatatgggcacgatgaaagcggctgacatcagcgaacagcttattcagcacggtcgcgatgcgacgacgccggtagcggtgatctcccgcgggacacgcgtcgatcagcatgtcgccatcggcaccttacaagaccttgcaaccttggcgaaagacgccccaatgcccgccctgatcgtggtgggcgaagtggtgcagctgcacagcacgctcgcctggttccaacacacaaccgacacagaaggctttggcgcttctgttataaatttggcttaa

SEQ ID NO: 116376 - DNA, 909 bp, Enterobacter cloacae
atggaccaaaaacgacttactcacctgcggcagctcgaagcggaaagtatccacattatccgcgaagtggccgccgagttttctaacccggtgatgatgtactccatcggtaaagattccagcgtcatgctgcacctggcgcgcaaagcgttttatccgggtacgctgccgttcccgctgttacacgtggataccggctggaaattccgcgagatgtacgagtttcgtgaccgtaccgccaaagcctacggctgcgagctgctggtgcacaaaaacccggaaggggtggcgatgggcatcaacccgttcgtgcacggcagcgccaagcataccgacatcatgaaaaccgaagggctgaagcaggcgctgaataaatacggttttgatgcggccttcggcggcgcgcgacgtgacgaagagaaatcccgcgccaaagagcgtatctactctttccgcgaccgcttccaccgctgggacccgaaaaaccagcgtccggagctgtggcacaactacaacggccagatcaacaagggcgaaagcattcgcgtcttcccgctctccaactggaccgagctggatatctggcagtacatctatctggaaaatattgagatcgttccgctgtatctggcggccgagcgcccggtgctggagcgcgacggcatgctgatgatgatcgacgacgatcgcattgatttacagccgggcgaagtgatcaaaaaacagatggtccgtttccgtactctcggctgctggccgctgaccggcgcggtggaatccagtgcgcagacgctgcccgagatcatcgaggagatgctggtgtcgaccaccagtgagcgacagggccgcgtgattgaccgcgaccaggcaggctccatggagctgaagaaacgtcagggttatttctaa

SEQ ID NO: 116377 - DNA, 1425 bp, Enterobacter cloacae
atgaatacgactattgcccaacaaattgccgatgaaggcggcgtagaagcttatctgcacgcccaacagtacaaaagcctgctgcgtttcctgacctgcggcagcgtggatgacgggaaaagtaccctgattggtcgtctgctgcacgacacgcgccagatctacgaagatcagctctcttccctgcacaatgacagcaaacgccacggcacccagggcgaaaaactcgacctggcgctgctggtggacggcttgcaggcggagcgcgagcagggcattaccattgatgtcgcctatcgctacttctctaccgaaaagcgcaaatttattatcgccgacaccccggggcacgagcagtacacccgtaacatggcgaccggcgcgtccacctgtgacctggcgatcctgctgatcgacgcccgtaaaggtgtgctggatcagactcgtcgtcacagctttatctctacgctgctggggatcaagcatctggtggtggcggtgaacaaaatggatctggtggactacagcgaagcgcgtttcgacgagatccgccagagctacctgacctttgctgaacagctgccgggcaacctcgatattcgctttgtgccgctgtcggcgctggaaggggataacgtcgcctctcagagcgcgaacatgccgtggtacagcggcccgacgctgctggaagtgctggaaaccgttgaaattcagcgcgtggtcgatacccagccgatgcgcttcccggtgcagtacgtgaaccgtccgaacctcgatttccgcggcttctcgggcacgattgcctccggcgcagtgaaggtgggccagcgcgtcaaggtgctgccgtccggcgtggaatcggccattgcccgaatcgtcacctttgatggcgatctggacgaagccggggcaggtgaagcggtaaccctggtactgaaagacgaaattgatatcagccgcggcgacctgctggtcgacgcgcaggaaacgctggcggcggtgcagggcgcatccgtggatgtagtgtggatggccgaacagccgctgaccgcaggccagagctatgacattaaaatcgccggcaagaaaacccgcgcccgcgtggacggcattcagttccaggtggacatcaacaacctgacccaccgtgacgtgagcgagctgccgctgaacggcatcggtctggtggacctgaccttcgacgagccgctggtgctggatccgtatcagcagaacccggtgacgggcgggctgatcttcattgaccgcctgaccaacgtcaccgtcggtgcggggatggtgcgcgagcctgacgcgcaggcgagcgtgacgtctgagttcagcgccttcgagctggaactgaacgcgctggtgcgtaagcacttcccgcactggggcgcacgcgatctgctgggaggcaagtga

SEQ ID NO: 116378 - DNA, 606 bp, Enterobacter cloacae
atggccgcccatgatgagaacgtcgtctggcatcctcatccggtcaccgtcgcccagcgcgaacagctccacggtcaccgtggggttgtgctgtggtttaccgggctgtctggctccggtaaatccacggtggcaggcgcactggaagaggcgctgcatcagcagggggtgagcacctacctgctggacggcgacaacgtgcgtcacggcctgtgcagcgatttagggttcagcgatgaagaccgtaaagagaacattcgtcgggtaggggaagtcgccagcctgatggcggatgccgggctggtggtgctaacggcgtttatctcaccgcaccgcgccgaacgtcagatggtgcgtgagcgcgttgggcagaatcgctttattgaagtgtttgtggataccccgctggcaatctgcgaagcgcgcgattcaaaagggctgtacaaaaaagcccgcgcgggagagctgcgaaacttcaccggcattgactcggtttacgaagcgcctgaatcccctgagattcatctgcaaggtcaacaattggtaacaaatttagtaagccaattattagacctgctcagacgggacgatattatcagatcctga

SEQ ID NO: 116379 - DNA, 327 bp, Enterobacter cloacae
atgcgcaacagtgaaaactacatgattaccaccgggtcggaaccgttaacgaccgacgacgagacgacctggtccttccctggggcgatagtcggcttcgtgtcgtggttactggcgctgggtatcccgtttttgatctacggtggtaacaccctctttttcttcctctatacctggcctttctttctggcgctgatgcccgttgcggtggttgtgggcgtggcgctgcactcccttttcaacggcaagctcctgtatagtactttcatcactatcgccaccgttgtggtcatctttggcctgctgtttttatggctgatgggctaa

SEQ ID NO: 116380 - DNA, 312 bp, Enterobacter cloacae
atgggtaaactaacgctgctgttgctggctttgctggtctggctgcaatattcgctgtggttcggcaaaaacggactgcacgactacagccgggtgagcgatgacgtcgcggcacagcaggcgacaaacgccaaacttaaagcgcgtaacgatcaactttttgctgaaattgatgacctcaatggcggccaggaggcgattgaggagcgcgcacgcaatgaactcagtatgactaagccgggcgaaacgttttatcgcctggttccggatgcgtctaaacgcaatcagggctccgcacaaaacaatcgataa

SEQ ID NO: 116381 - DNA, 711 bp, Enterobacter cloacae
atggcagcaactttttcggacgtctgtgccgtggtgccggccgcaggttttggccggcgcatgcagacagagtgtcccaagcagtacctctcaattggtgataaaacgatcctcgagcacgccgtggcagcgctgctggcgcatgcccgggtgaaacgcgtggttattgccatcagccccggcgatgcgcgttttgcgcaactcccgctggcacatcatcctcagattagcgttgttgacggcggcgccgagcgggccgactctgttctggcgggcattcaggctgccgggaacgcgcagtgggtgctggtgcacgatgccgcgcgtccctgtctgcatcacgacgatctgtcacgtctgctggccctgagtgaaaccagtaacgtgggcggcattctggccgccccggtgcgtgacaccatgaagcgtgccgaaccgggtaaaccggcgattgcccacaccgtcgagcgcgtggatttatggcacgcgctgacgccacaattttttccccgcgaattacttcacgactgcttaacgcgtgcgctcaaagaaggtgcgaccattacggacgaagcctcggcgctggagtattgcggtttccacccaacgcttgttgaagggcgcgctgataatataaaagtgacgcgcccggaagacttacagctcgcggaattttatcttacccgtacgacccctcaggagaaggcataa

SEQ ID NO: 116382 - DNA, 480 bp, Enterobacter cloacae
atgcgtattggacacggttttgatgtacacgcctttggcggcgttggcccaattatcattggcggcgtgcgcattccatacgaaaaaggtttgctggcgcattctgatggcgacgtggcgctgcatgcgctgaccgacgcgctgctgggtgccgccgcgttgggcgacattggtaaactgttcccggacaccgatcctgcttttaaaggcgcagacagccgcgaactgctgcgcgaagcctggcgtcgtattcaggccaaaggctacaccctcggcaacgttgatgtgacgatcattgctcaggcaccgaagatgctgccgcacatccctcagatgcgcgtgtttatcgctgaagatctgggctgccatatggacgacgtcaacgtcaaagcgaccaccacggagaagctgggctttaccggtcgtggcgaaggcattgcctgtgaagccgtggcgctgctggtgaaggcggtcaaatga

SEQ ID NO: 116383 - DNA, 1050 bp, Enterobacter cloacae
atgacggatttcgacaacctgacgtatctgcacggcaaaccgcagggcaagggtctgctgaaagccaaccctgaagatttcgtggtagtggaagatctgggttttgagccggacggcgaaggcgagcacatcctggtgcgcattctgaaaaacggctgcaacacccgcttcgtggcggacgcgctggcaaaattcctcaacattcacgcccgcgaggtgagctttgccggtcaaaaggataagcatgccgtgaccgaacagtggctttgcgcccgcgtgcccggcaatgccatgcccgatttaagcaaatttgagcttgagggctgtaaggtactggagtatgcccgccacaaacgcaaattgcgtccgggagcgttgaaaggcaacgatttcacgctggtgctgcgtgaagtgaccgaccgcgatgacgttgaaaaacgccttaaggccattaccgaacgcggcgtgccaaactattttggcgcacagcgctttggcattggtggcagcaacctgctgggcgcgctgcgctgggcgcaaagcagcgcgccggtgcgcgacaggaataaacgcagtttttggttgtcggcagcccgcagtgcgttgtttaatcagattgtgagcgaacggctgaaaaaaccggacgcgaatcaagttgttgtcggcgatgcgctacaattagcgggacgcggaagctggtttgtggcaacggccgatgagatggccgatgcccagtcgcgcgtggacgctaaatcgctgatgattaccgccgccttgccgggctcaggcgactggggaacccagggcgaggcgctggccgctgagcagtcagcggtggcggatgcgccagaattacaatcattgctggtgcgggaaaaagtcgaggcggcgcgccgtgcgatgctcctctacccgcaacagctgagctggaactggtgggatgacgtaaccgtcgagttacgcttctggctgccggcaggtagctttgccaccagtgttgtcagggaacttatcaacacgtcgggtgattatgcgaatattgctgagtaa

SEQ ID NO: 116384 - DNA, 762 bp, Enterobacter cloacae
atgcgaatattgctgagtaacgatgacgggatccatgcgccaggtattcagacgctggcgaaacacctccgcgaatttgcggatgtgcaggtcgtggctcccgatcgtaaccgcagtggcgcgtctaactcattgacgctggagtcttcacttcgcacctttacctttgagaatggcgatattgccgtccagatggggacgccgaccgactgcgtgtttctgggcgtaaatgcgctgatgcgcccgcggccggatgttgtggtctccggcatcaatgccgggccgaatcttggcgatgatgtgatttactccggcaccgtggccgcggcgatggaggggcgtcacctgggtttcccggcgctggcggtctcgttaaacggccacacccactatgacactgccgccgcggtgacctgctccattctccgtgcgcttggccgcgagccgctgcgtaccggacgtatcctcaatattaacgtgccggatctcccgctggacgagattagagggatccgcgtgacgcgctgcggcagtcgccatccggccgatcaggttattccccagcaggatccgcgcggcaataccctgtactggatcggcccgccgggagataaatgcgatgccgggccagacaccgacttcgctgcggtggatgagggttacgtttccgttacgccgttgcacgtagatttaaccgcttatagcgcgcatgatgtggtgtcggactggttagatcgggtcggagtgaacgcgcaatggtaa

SEQ ID NO: 116385 - DNA, 627 bp, Enterobacter cloacae
atggtaagtaaacgtgtacaaactcttctggaacaattacgcgcacaggggatcgccaacgagcaggtgctggatgcgcttgcccaggttccccgtgagaagtttgtagatgaggcgtttgaacacaaagcgtgggaaaacgtggcgctgcccatcgggcaaggccagacgatttcgcagccttacatggtggcgcgtatgacggagcttctggagttaacgccagactcccgggtgctggaaattggcaccggttcagggtatcagaccgcgatcctggcccaccttgtgcaccatgtctgttccgtggaacggattaaaggcttgcagtggcaggcgcgccgtcgcctgaaacagcttgatttacataatgtatcgacacgccacggcgatggatggcagggttggcaggctcgcgccccgtttgacgccataatagtcacggccgcgccacctgaaattcccgctgcacttctctcgcagctggacgagggcggcattctagttttgcccgtcggcgatgagcagcagcttttaaagcgcgttcgtcgacgcggcggcgagtttattatcgataccgtggaagccgtgcgctttgtgcccctggttaagggcgagctggcctga

SEQ ID NO: 116386 - DNA, 1125 bp, Enterobacter cloacae
atgagcgcgggaagcccaaaattcaccatcagccgtgttgcggcattatcactggtttcgctctggctggcaggctgtacaagttctgacaatgcacctgcgcccgtcagttccgtcaatggaaccagcggctcgggtaacacgtccagcggaatgttgattacccctccgcctaaaatgggcacgtccacggcgcagcaaactccgcagatccagccggttcagcgtccagttacgcagccttcgcagattcagccagtggatcagcctgttcagaccgaaaatggccgcatagtgtataaccgtaagtatgggaacattccgaaaggtagctataccggcggcagcacctataccgtgaagcgcggcgatacgctgttctatattgcctggatcaccgggaacgatttccgcgatctggcacagcgaaacaacgtccaggccccgtatggtctggaagtcgggcaaacgctccaggtaggcaatgcaacgggtaccccactgacgcctggcaacacggtttcagcggcagatgtgacggctcaaaataacagcgttaagcctgcacaaaaatccaccacggtggttgcttcacaacctgtaattacgtattctgaggattcaggtgatcagagtgctaacaaaatgttgccgaataataaaggtactgcgactgttgtcacagcaccgactacggcacctgtggttagctctactgtaccgactgcaagcagtcagaatgccagctcgtcaatcaccacctggcgctggccaactgacggcaagattatcgagaactttgctacctctgaggggggcaacaaagggatcgatatcgcaggcagtaaaggacaggcaatcatcgcgaccgcagacgggcgcgttgtctatgccggtaacgcactgcgcggttacggtaatcttattatcatcaaacataatgatgattacctgagtgcctacgcccataacgacactatgctggtccgggaacaacaagaagttaaggcggggcaaaaaatcgctaccatgggtagcaccggaaccagttctacacgcttgcattttgaaattcgttacaaggggaaatccgtaaacccgctgcaatatttaccgcagcgataa

SEQ ID NO: 116387 - DNA, 993 bp, Enterobacter cloacae
atgagtcagaatacgctgaaagttcatgatttaaatgaagacgcggaatttgatgagaacggagcagaggcttttgacgaaaaagccttagtagaagaggaacccagtgataacgatttggctgaagaagagctgttatcgcagggtgccacacagcgtgtgctggacgcgactcagctttaccttggggagattggttactccccactgctaacggccgaagaagaagtctatttcgcacgtcgtgctttgcgtggtgatgttgcctcgcgtcgtcgcatgatcgaaagtaacctgcgactggtcgtgaaaattgcccgccgttacggcaatcgtggtctggctctgctggatctgattgaagagggcaacttaggtctcatccgcgcagttgagaagtttgacccggaacgcgggttccgtttctcaacctacgcgacctggtggattcgtcagaccatcgaacgggctattatgaaccagacccgtacgattcgactgccgatccacatcgtcaaagagttgaatgtttatctgcgtaccgcgcgcgagttgtcccataaactggaccacgagccaagtgcggaagagattgcagaacaactcgacaaaccggttgatgacgtaagccgtatgctgcgtctcaacgagcgcattacctcggttgacaccccgctgggtggcgactccgaaaaagcgctgctggacatcctggccgatgaaaaagacaacggcccggaagacaccacgcaggacgatgacatgaaacagagcatcgtcaaatggctgttcgaactgaacgctaaacagcgtgaagtgctggcacgtcgtttcggtttactggggtatgaagctgcgacactggaagacgtcggccgtgagattggcctgacccgtgaacgtgttcgtcagattcaggttgaaggcctacgccgcctgcgtgaaatcctgcaagggcaaggtctgaatatcgaagcgctgttccgcgagtaa

SEQ ID NO: 116388 - DNA, 378 bp, Enterobacter cloacae
atgacccatttcgaacaagagatcctcgacattcacgtcgcccttgaaaactggttaggggcaggcgaaagcgatcgggacgccctgctcgcccgtttccgtccggattttctgatggttccaccgagtggcaaccctttagatcatcacgcgcttgcccaatttttatatgcgcagcggggaacccgccccgggctcaggatcgacattgatgcgttaacaacgcttcagacatgggacaacggcgcggtgctccattaccgggagacgcaaacccggccaggccaggccgtcaacgtgcgctggtcaaccgcggtgcttaatcaggaaggggataacatcacctggcgtttgctgcacgaaacggcgcagccgtaa

SEQ ID NO: 116389 - DNA, 1203 bp, Enterobacter cloacae
atgacgtatcgcagcaaaatcgccgtcgtctttctgctcggctttttccttgatttgataaacatgtttattgccagcgtcgcctttccggcgatggctcgcgctttcaataccacaccttccgcgcttacctgggtaagtaacggatacattgccggactgacgttagtcatccctttcagcagtatcctgacgcgccgcgtcgggccgaaacgcgttatcctgctctcactgcttctctttagcgcggcctccgttgcggcgggtctctcctcttcgctggaaagtctgattgcctggcgagtcgtacagggcgccggaggcggtttactgatcccggttggtcaggcgctgacctggcaacagtttaagcctcatgagcgggccagactctcctcggcggtgatgctggtcgcgctgcttgcccccgcctgctcaccggctgtgggcggcatgctggttcagacattcagctggcgctggatattttttgccaccctgcccgtcgccattgtcacctttgctttggcctgcgcgtggcttaaaacagaaccgtcgccgataaacaccaccagggcagtaaacctgtctttgctgacggatccgctgttgcgcttatccatgcttatctatgtgtgcgtacccggcatctttatcggcgtgaacgtaacgggcatgttttacctccagagcgaggccaatatgacgcccgctgcaacgggcatgcttatgctgccgtggtctgtggcttcgtttttggctatcaccgcgacaggacgctatttcaaccgtatcggcccccggccgctggtgatcatcggttgccttttgcaggcgacgggcattctgcttttagttaacgtcggcccggctatgctgttacctgccgttgcatttacgttgatgggcgcggggggaagtctttgcagcagtacggctcagagcagcgcgtttttgacgatgcgaccggaagatatgcccgatgccagcgcgctatggaatctgaatcgtcagttgagcttttttgcgggcgccctgctgctggcgcaggcgctgagcttcatgcaggattatctcgcgccgctggccgcctggcacgggatgtttgtttttgccgcagccatcaccctactgcccgtactgtacgtctaccttcttaacaacacgcagttacttgcgcaactgcaacaggagcaaccatga

SEQ ID NO: 116390 - DNA, 888 bp, Enterobacter cloacae
atgcttaatttacagcgtacggcgatgtttatcgccgtagcggacaccggcagtttcaccgccgcggcggaggcgatggggctgacaaaagcggtggtcagctttcatattcgtcagcttgaagaggagctgggcgtcaccctgttgctgcgaaccacccgacgcctgacgctgaccgaggcggggaagctctttcatcaacgaagcgtgatgctgttacgggatgcagagcgattgcaggatgatgttcgcgccaaccacgccgggctgacgggagaactgcggatcaccaccacgcccgaatatggctcgcaggtggtggtgcctttgctggctgaatttagccagctgcacccggacctccgcgtgcggcatgtctcgtcctctttgcatgccgatcttatcgccgagcgcttcgatgtcgctatccggctcggcacgcttgcagattcgcgctaccacgccgcgttgatgacctccttcaccatcctgcccgtggcaacgccaggctggctggcaaaccatccggttaactcgctggagcagctggcggaagcggactggatcattcacgagcgtttaacctcgccgctgcgctggcagatgagaggcgttgatgggcagccggtttcctttgagatcaagaaagcgccgcgcctgtatgcagacagcgcccaggcgctgatggcttttgccctcgcgggatgtggagtggcgctgctgccggagtggctggtgcgaaacgcactggatgcaggggaactggtctcgctgttaccggcgtacacgttcgctcagcagggcatctatgccgtttatcctgatgcccggcatgtgcccgcgaaagtgcgaacatttattgattttatgcgcgtcagggttacttaa

SEQ ID NO: 116391 - DNA, 408 bp, Enterobacter cloacae
atggagttaagacaagaagcttttcacctgctacgtcagctttttcaacagcataccgcccagtggcagcacgcattgcccgaactgacaaagccacagtatgcggtgatgcggtcaattgctgaaaatcctggcattgagcaggttgccctgactgaagtcgcggtgagcaccaaagcgacgctggcagaaatgctgagccgcatggaagcacgcggcctggtcaggcgcgagcacgatccggcggacaagcgccgtcggtttgtctttctgacggccgaaggtgaggccctgcttgagagcagtaaaccgattggaaatgaggtggatgagacgtttttagggcgccttaacggcgcggaacgagagcaattttcagcgctcattaaaaagatgatgcaggattaa

SEQ ID NO: 116392 - DNA, 603 bp, Enterobacter cloacae
atgagattgattgtgggaatgacgggcgcaacgggtgcgccattaggcgtggcgttgttgcaggcgctgcgggaaatgccggaggtggaaacgcatctggtgatgtcgaagtgggcaaaaaccacgattgagctggaaacgcccttcactgcgcatgacgttgctgccctggcggatgtcgtccatagcccggccgatcaggctgccaccatctcctccggctcgtttcgcaccgacggcatgatcgtcatcccgtgcagcatgaaaacgctggcgggtatccgcgcgggctacgccgaagggctggtagggcgtgcggcagacgtggtgctgaaagagggacgcaagctggtgctggttccccgtgagacgccgctcagcaccatccatctcgagaacatgcttgccctttcccgcatgggcgtggcgatggtgccgcctatgcctgcgtactacaaccacccgcaaaccgccgatgacattacccagcatatcgtgacccgcgttctcgaccagttcggtctggagcataaaaaagcccggcgctgggaaggtttgcaggcagcgaaacatttttcacaggagaataaagatggcatttga

SEQ ID NO: 116393 - DNA, 1428 bp, Enterobacter cloacae
atggcatttgatgatttgagaagcttcttgcaggcgctcgatgagcaagggcagctgctgaaaattgaggaagaggtaaacgctgagccggatttagcggcggccgccaacgctaccgggcgcattggcgatggcgcgcctgcgctgtggttcgataatattcgcggtttcaccgatgcccgtgtggtgatgaacactatcggctcgtggcaaaaccacgctatttcgatggggctgccggcgaataccccggtgaaaaaacagatcgacgagtttattcgtcgctgggacaaatttcccgtcgcgccagagcgtcgtgcaaacccggcctgggcgcagaacacggtggacggggaagacattaatctgttcgacattctgccgctgttccgcctgaacgacggtgacgggggcttttatctcgataaagcatgcgttgtctcccgcgatccgctcgaccccgatcacttcggcaagcagaacgtcgggatctatcgtatggaagtgaagggcaagcgtaagctcggcctgcaaccggtgccgatgcacgatattgcgttgcatctgcataaggcagaagagcgcggcgaagacctgccaattgccattacgctgggtaacgatccgatcatcaccctgatgggcgccacgccgctgaaatacgatcagtccgagtatgagatggccggtgcgctacgtgaaagcccgtatccgattgcgacggctccgctgaccggtttcgatgtgccgtgggggtcggaagtgatcctggaaggggtgattgaaggccggaaacgtgaaattgaagggcccttcggtgagtttaccggtcactactccggcgggcgcaacatgacggttgtgcgtatcgacaaagtttcttaccgcactaaaccgattttcgaatctctctacctgggcatgccgtggaccgagattgattatctgatggggcccgccacctgcgtaccgctctatcagcagctgaaggctgaattcccggaagtgcaggcggtaaacgccatgtacacccacggtctgctggcgattatctccactaaaaagcgttacggcggttttgcccgtgcggtcgggctccgcgccatgaccacgccacacggtctgggttacgtgaagatggtgattatggtggatgaagatgtcgatccgtttaacctgccgcaggtgatgtgggcgctgtcatcgaaggtcaatccggcaggcgatctggtacagctaccgaatatgtctgtgctcgagcttgaccccggctccagcccggcggggatcactgacaagctgatcattgatgccaccacccctgttgccccggacaaccgtggtcactacagccagccggtacaggatctccctgaaaccaaagcctgggccgaaaaactgaccgcgatgctggcggcacgtcaataa

SEQ ID NO: 116394 - DNA, 222 bp, Enterobacter cloacae
atgatttgtccacgttgtgccgatgaacatattgaagtgatggcaacatcaccggtgaaaggtgtctggacggtataccagtgtcagcactgtctgtatacctggcgcgataccgaaccgctgcgccgtaccagccgcgagcattacccggaagcgttccgcatgacgcagaaggatattgatgaggcgccgcaggtgccgacgatcccgccgctgctgtaa

SEQ ID NO: 116395 - DNA, 2562 bp, Enterobacter cloacae
atgagcacaatcgacaatttcgacgcgcatacgccaatgatgcagcagtacctgaagctgaaggcacagcatccggaaattttgctgttttaccgtatgggcgatttttacgagcttttttatgacgatgcgaaacgtgcgtctcagctgctcgacatttccctgacgaaacgtggcgcgtcagcaggcgagcccatcccgatggcaggtatcccgcatcacgcggttgaaaactatctggcgaagctggtgaaccagggtgagtctgtcgctatctgcgaacaaattggcgacccggccacgtcgaaaggccccgttgagcgcaaagtcgtacgcatcgtgacgccgggaaccatcagtgatgaggccctgcttcaggagcgccaagataacctgctggcggcgatctggcaggacggtaaagggtttggctacgccacgctggatatcagctccggtcgttttcgcctgagtgaaccggctgaccgtgaaaccatggcggctgaactacagcgcaccaatccggcagaactgctttatgcagaggatttcgccgagacggcgctgattgaaggtcgccgcggcctgcgtcgtcgtccactgtgggagttcgaaattgataccgcgcgccagcagctgaacctgcaatttggcacgcgagatttgattggctttggcgtagaaaacgccccgcgcgggctgtgtgccgcaggctgcctgttgcagtacgttaaggatacgcagcgtaccgccctgccccatatccgttccattaccatggagcgtcagcaggacagcatcatcatggatgccgccacgcgccgcaacctggagatcactcagaacctcgctggcggcatggaaaatacgctggcgtcggttctcgacagcacggttacccccatgggcagccgtatgctcaaacgctggctgcatatgccgatccgcaataccgacacgctgatcggccgccagcaaaccattgccgcattgcaggatcgttacaccgacttgcagccggtgctgcgtcaggtgggtgatcttgagcgtatcctggcgcgcctggcactgcgcaccgcgcgtccacgcgatcttgcccgtatgcgtcacgcgttccagcagttgccggaactgcgtgctcagctgggagagatcgacagcgcgccagtgcagaagctgcgcgaaaccatgggcgaatttaccgagcttcgcgaactgctggaacgcgccatcattgatgcgccgcctgttctggtgcgggatggcggggttattgctccaggttataacgaagagctggacgaatggcgtgcgctggccgatggcgcgacggattatctggataagctggaaatccgcgagcgtgaacgtctggggctcgacaccctgaaagtcggctacaacgcggtacacggttactatatccagatcagccgtgggcagagtcacctggcgccgattcactacgttcgccgccagacgctgaaaaatgccgagcgctacattattcccgagctgaaagagtacgaagacaaagtgctcacgtcgaaaggtaaagcgctggcgctggagaaacagctgtatgacgagctgtttgacatcctgatgccgcacctggctgacctgcaactgagcgccgctgcgctggccgagctggatgtcctggtaaacctggccgagcgcgccgatacgctgaactacacctgtccgacctttactgacaaacccggcattcgcattaccgaaggccgccacccggtggttgagcaggtgctgaacgagccgtttattgccaacccgttgaacctgtcaccgcagcgaagaatgctgatcattaccggtcccaacatgggcggtaaaagtacctatatgcgccagacagcccttatcgcgctgctcgcctacatcggcagctacgttccggcgcagaaggttgagattggccctatcgaccgtatcttcacccgtgtgggtgctgcggacgatctggcgagcggtcgctctacctttatggtcgagatgaccgaaaccgccaacattctgcataacgcgacagagaacagtctggtgttgatggacgaagtaggacgcggtacctccacctatgacggcctgtccctggcctgggcgtgcgcggaaagtctggcaaataaaatcaaggcgctgacgctgttcgcaacgcactatttcgaactgacacagctgccagagaaaatggaaggcgtggctaacgtccaccttgatgcgcttgagcacggcgacaccatcgcctttatgcacacggtgcaggacggcgcggcaagcaagagttatggcctggccgtcgcggcgctggcgggcgtgccaaaagaggtgatcaagcgcgcgcgtcagaaactgcgtgaactggaaagtttgtcaccgaatgcggcggcgacgcagatagatggtacgcagatgtcactgctggcggtcccggaagagacctctccggccgtggaagcgctggaaaatctcgacccggataccctgacgccgcgacaggcgctggagtggatttatcggttgaagagtctggtttag

SEQ ID NO: 116396 - DNA, 231 bp, Enterobacter cloacae
atgcaagagatcgcgatcgccaaaccctatcgtcacttgaaagtgggttacttcagaaaacgtcatgaagaccgtaaaacgaaaattccaaaacgctacagcgtacacgcagcgctgagcctgaaaggcgactggcttgagcaagcgggatttaccaccaactcgcaggttcgggtgggcgtcgagcacgggaaaatcatcattgaattaatggtggaagatgcctcgtaa

SEQ ID NO: 116397 - DNA, 345 bp, Enterobacter cloacae
atgtccggtaaacgtatttcacgagaaaaaaagacgatcgccagaatgatcgccctgtacgaaaacaggtgtccgcacgccataaaagaagaggggcactattcggcgctcaaggcttatgccgataagcggctggataaatgcgtgtttggtgaggaaaaacctgcctgcaaacagtgccctgtgcactgttatcagcccgcccgacgggaagagatgaagcaggtgatgcgctgggcagggccacgtatgttatggcgccatccgattctgaccatccgtcatctgatcgacgatcgccgtccggttccggaattacccgaaaagtatcggcccaaaaaataa

SEQ ID NO: 116398 - DNA, 2073 bp, Enterobacter cloacae
atgccgtatacaccgatgagcgatcttggacagcagggcctgtttgacatcacgcgcacacttttacaacagcccgatctcggcgcgctgagcgatgccctgacgcggctggtcaggcaatcagcgctggcggacagcgccgccattgtgctctggcatagcgcaacccaccgcgcgagctatttctcaacgcgtgataacggcaaaatcttcgaatatgaagatgaaacgtttctggcccacggcccggtgcggcgtatcctctcccgcccggaagcgctgcactgcaattttgaccagtttcgccaggcctggccgaagctggcagagagcaatctttaccacccattcggccactacagcatgctgccgctggcggtggaagggcaaatttttggcggctgcgagtttatccgcgataccgaccagccctggagcgaggcggagtacgaacgcctgcacacctttacccagattgtggccgttgtcgcggagcagatccaaagccgcgtcaccaataatgtggactacgacctgctgagccgcgagcgcgataacttccgcattctggttgccatcaccaacgccgtgctctcccgcctggacatggatgagttggtcagcgaagtgtcaaaagagatccatcactattttaaaatcgatgccatcagcattgcgctacgcggcaaccggaaaggcaagctcaacatctactccacccactaccttgatgaagccaacccggcgcacgagcagagcgaagtggacgaagcgggaacgctgtccgagcgggtatttaaaagcaaagagatcctgctgctcaatctcaatgaacaggatccggtagccccctacgagcggatgttgttcaacacctggggcaacaagatccagaccctgtgcctgctgccgctgatgtccggcaacaccatgctcggcgtgcttaaactggcgcagtgcgatgaagccgtatttaccaccgctaacctgaagctgctgcgccagatcgccgagcgtatctccattgcgctggataacgccctcgcctatcaggagatccaccgcctgaaggagaggctggtggacgaaaacctggcgctgaccgagcagctcaacaacgtggacagcgagtttggcgaaatcatcgggcgcagcgatgccatgtacagcgtccttaagcaggtggaaatggtggcgcagagcgacagcacggtgctgatcctcggtgaaaccggtaccgggaaagagctgattgcccgggcgatccacaatctgagcaaccgcaatagccgccggatggtgaagatgaactgcgcggcgatgcctgcgggcttactggaaagcgacctgttcggccacgagcgcggcgcctttaccggcgccagcagccagcggctgggccgttttgaactggcggataaaagctcgttgttcctcgacgaagtgggcgatatgccgctggagcttcagcccaagctgctgcgcgttttgcaggagcaggagttcgagcgcctcggcagcaacaagctgatccagaccgacgtgcgtctgattgccgccaccaatcgcgatctgaaaaaaatggtcgccgaccgcgagtttcgcagcgatctttactatcgcctgaacgtcttcccgatctgcctgccgccgctgcgcgagcgcccggaagatattccgctgctggtgaaagcctttaccgcgaagattgcccgccggatggggcgaaatatcgacattattcctgccgaaacgctacgcacactctcggcgatggagtggccggggaacgtgcgcgagctggaaaacgtcattgaacgcgcggtcctgctgacccgcgggaacgtgctccagctctccctgccagaggttactccttctgaaacgaccgtgaccgcaaccgagcttgcgaaagagggagaagatgaatatcagctcattatgcgagtgctgaaggagaccaacggcgtggtagccggaccgaaaggtgcggcgcaacggctgggtctgaagcgtaccaccctgctctcgcgcatgaagcgtctgggaatcgataaagagagcctgaattaa

SEQ ID NO: 116399 - DNA, 1011 bp, Enterobacter cloacae
atgaacacggtggaaatggcgcacggaagcggtggacaggcgatgcagcagctgattaaccggctgtttatggaagcctttaataacccctggctcgccgagcaggaagatcaggcgcgtattgacctcgcggccctgaccgcccacggtgacaggctggcgttctctaccgacagctacgtgattgacccgctgttcttcccgggaggcgatatcggcaagctcgccgtctgcggcacggcaaacgacgtcgccgtcagcggcgcgatcccccgctacctctcctgcgggtttatcctcgaagaagggttaccaatggagacgctcacggcggtggtcaacagcatggcgcacaccgcccgcgaggcggggatcgccatcgtcaccggggataccaaggtggtgcagcgcggcgcggcggataagctcttcatcaacacagccgggatgggcgcgatccctgccgacattcactggggcgcgcagcagctttgcgcaggcgacgtgctgattgtcagcggcacgctgggctgccacggggcaaccatcctgaacctgcgcgaaggcctggggctggatggcgagctgcgcagtgactgcgcggtactcacgccgctgatccagacgctgcgcgacatgccgggcgtaaaagccctgcgcgacgccacgcggggcggcgtgaatgccgtcgtgcacgagttcgcggcaagctgcggctgcgggattgagctgaccgagcgcggcctgcccgttaagcccgccgtgcgcgggctgtgcgagctactaggtctaaacccgcttaactttgccaatgagggcaagctggtgatcggcgtggaacgcgcggcggcggaagccgtacttgcacagctgcgcacgcatcctttagggaaagacgcggccatcatcggcgacgtggttgagcgcaaaggggtgcgcctgaccgggctttacggcgtgaagcgcacgctggatctgccgcacgctgaaccgttaccccgaatttgctag

SEQ ID NO: 116400 - DNA, 1122 bp, Enterobacter cloacae
atgcgttacgttgatgaatatcgcgcgcctgagcaggtgttgcagcttatcgatcgcctgaagacccgcgcctcgctgctggactacacgaaagaaaaaccgctgcggatcatggaggtgtgcggcggacacacccacgccatctttaaatttggcctcgaccagctgctgccggagaacatcgagtttatccacggccccggctgcccggtgtgcgtgctgccgatggggcgcatcgacagctgtatcgacatcgccagccgccccggtgtgattttttgcacctttggcgacgccatgcgtgtaccgggaaaaaatggctcgctgctccaggcgaaggcgcgcggcgcagacgtgcggatcgtctactcaccgatggatgccctgacgctggcgatggctaatcctgagcgtaaggtcgtctttttcgggctgggttttgaaaccaccatgcccgccaccgccattaccctccagcaggctaaagcccgcaacgtcacaaacttttactttttctgccagcacatcacgcttattcccacgctgcgcagcctgcttgaagcgccggataacggtatcgacgcgtttctggcgccgggccacgtcagcatggtgatcggcacagaagcctacggttttatcgctgaacagtacaatcgtccgttagtggtggctggtttcgagccacttgatctactgcaaggcgtgaccatgctggttgagcagaaaatagcggccctgagtgcggtggaaaatcagtatcgtcgcgtggtgcccgatgcaggtaacagacgggcacagcaggccatagccgacgtgtttagcgtcgaaggcgacagcgagtggcgcggactggggctgattgccgaatccggcgtacacctgacgcccgcgtatcgcgccttcgacgccgaagcgcatttccgcccgcagccgcagcaggtgtgcgacgatccccgcgcccgctgtggcgacgtactcaccggcaaatgcaaacctcatcactgcccgttatttggcaacgcctgtaacccgcaaaccgcgtttggcgcgctgatggtctcttccgaaggggcatgcgccgcgtggtatcactatcgcaacaaggagtgtgaagcatga

SEQ ID NO: 116401 - DNA, 273 bp, Enterobacter cloacae
atgtgcataggcgtccccggacaaattcattccctcgacggcaatcaggccaaagtggaggtctgcggcatcctgcgcgatgtcgacctgacgctggtaggcagccacgatgagaccggcgcatcgcgtctcggccagtgggtgctggtccacgtgggttttgccatgagcgtgattaatgaggaagaagcccgcgacacgctggacgcgctacagaatatgttcgatgtcgagccggacgtgggcgccctgttgtatggggaggaacgttaa

SEQ ID NO: 116402 - DNA, 864 bp, Enterobacter cloacae
atgtgtagtacctgcggttgcgctgaaggcaacctgtatatagaaggggatgaacaccgtccccactccgcgtttcgctccgcgcccttttcccctgccccgcgtcccgcggcggcactgaccggcatcacctttgccccgcagcgttccgacgcgggcgacctccattacggccatggcgaagcgggtacgcacgcgccgggcatcagccagcgccagatgctggaggtggagatcaacgtgctggacaagaataaccagctcgccgcccgcaatcgcgcccgctttgccgcgcgcgaacagctggtgctgaacctggtctccagccccggctccggtaaaaccacgctgctgaccgaaacccttaaacgtctgaacgaacacgtctcctgcgccgtaatcgaaggcgaccagcaaacggtaaacgacgccgcgcgcatccgcgaaaccggtacgcctgcgattcaggtcaacaccgggaaagggtgccacctggacgcgcagatgattgccgacgccgccccgcgcctgccgctggcggataacggtatcctgtttattgaaaacgtcggcaacctggtttgcccggcaagcttcgacctcggcgagcggcataaagtggcggtgctctccgtgaccgaaggggaagacaagccgcttaaatatccgcatatgtttgccgccgcctccgtcatgctgctgaacaaggtcgacctgctgccgtacctgaatttcgacgtggataagtgcctggcttacgcccgggaagtgaacccggacattgagatcctgctggtttccgccacgcgtggcgacgggatggacgcctggctgaactggctggagaacgaacgatgtgcatag

SEQ ID NO: 116403 - DNA, 351 bp, Enterobacter cloacae
atgcacgaaattaccctctgccagcgggcactggaacttatcgaacagcaggcagtgcaaaaccacgcgaaacgcgtcaccggcgtctggctgaaggtcggggcgttttcctgcgtcgagaccagcgccctcaccttctgttttgagctggtatgccgcggcacgctggcggaaggctgcgagctgcatattgaagagcagcaggcagagtgctggtgcgagcagtgtcaggagtacgtcacgctgctgtcatcgaaggtgcagcgctgtccgcagtgccagagcagcgggctgcgcatcgtggcggatgacggtatgcagatccaacgcctcgaaatcgagaaggagtaa

SEQ ID NO: 116404 - DNA, 465 bp, Enterobacter cloacae
atgactatttgggaaattagcgaaaaagcggattacatcgcgcaacgtcatcagcagctccaggagcaatggcacctgtactgcaattcactgatccaggggattacgctgtcgaaggcccatctgcatcacgccatgagctgtgcggcgcagggggatatgcgttttgtcctgttcggtcactttacgatttacgtcaccctggcggagaccttcaacagccacacgattgagtactacgtcgagacgaaagagggcgacaggcactgcatcgcccgggcgcagctgatggcggacggcatggtggacggtcatgtcagcaaccgcgatcgccagcaggtgctggagcactatctggagaaaatcgcgccggtttataacggcctctacgccgccgttgagcacgatcggccagtcaacctgaaacagctgatcgacggaaaatcctccgcgaacgtggcctga

SEQ ID NO: 116405 - DNA, 609 bp, Enterobacter cloacae
gtgaaccgttttgtaattgctgactcgacggtctgtattggctgtcggacctgtgaggcggcgtgctcggaaacgcaccgcctgcacgggctacagtccatgccgcgcctgcgcgtcatgcgtaatgagaaagagtctgccccgcagctctgtcaccactgtgaagacgctccgtgcgcgggcgtctgtcctgtcaatgccatcacccgcgttgacggcgcggtacagctgaacgaaagcctgtgcgtgagctgcaagctgtgcggcatcgcctgtccgttcggcgccattgagttttcaggcagccgcccgctgcatattccggcgaatgctaatactgcgaaagcgccgcctgcgccaccggctccggcacgcgtgagtacgctgctggactgggtgccgggcattcgcgccgttgcggtgaagtgcgatctgtgcagcttcgatgagcagggtccggcctgcgtgcggacctgcccgacccgggcgctggtcctggtcaacatccgcgacatcgctcgcaccagcaaacgcaagcgcgagctgaccatcaataccgacgttggcgatctttcgctgctgcgggcgcttaacgagggggcgaaatga

SEQ ID NO: 116406 - DNA, 1815 bp, Enterobacter cloacae
atgaacgcgatagttatgatgaccagcggtgtggcctggtttgccgccgccgctgtcctggcgctgcttctctccttccataaaacgctgagcggggtgatcgccggtatcggcggggcggtcggcagcctgatgacgctggcggcgggcggggttgtcctgatcgacggccagtctgttgacaccctcatcccgctgattcaccacgccgttgagcttacgccgctgaacgccatctggctgataacctttggcctgtgcgggctgtttatcagcctgtttaatatcgactggcaccgacatcagcacaccaaagccaacggcctgctggttaacctgttgatggccgccgcggtctgtaccgttatcgccagcaacctcggcgcgctggtggtgatggcagaaatcatggccctgtgcggcgtgttcctgaccggatgcagcgcctccggcaagctgtggtttgcgctcggacgtctcggcacgctgctgctggcgctggcctgctggctggtgtggcagcgtttcggcacgctggattttgccatgcttaacggccagccgctgggcaacgacgtctggacgttgggcgtagttggttttggcctgctggccgggataatcccgctgcacggctgggtgccgcaggcgcatgccaatgcctcagccccggccgctgcgctgttctccaccgtggtgatgaaggtcggtctgttcggcatcctgatgataaccctgacgggcggtcagccgccgctgtggtggggcgtggcgctgctgattgcagggatgatcaccgcgttcgtcggcgggctgtacgcgctgatggagcacaacatccagcgtctgctggcgtaccacaccctggagaacatcgggattatcctgctcggcatgggcgcgggcgtcaccgggctggcgctcaaccagccggcgctgattgccgccgggtttattggcggtctgtatcaccttatcaaccacagtctgtttaaaagcaccctgttcctcggtgcgggcagcgtctggttccgcaccgggcaccgcgatattgaaaagctcggcgggattggcaaaaaaatgcccgtcattgcgctggcgatgctggtcgggctgatggcgatggctgcgctgccgccgctgaacggctttgccggcgagtgggtgatttatcagtccttcttcgccctcggccagagcgaggcgtttatcgggcgtttactcggcccgctgctggcggtgggcctggcgatcaccggcgcgctggcggtgatgtgtatggcgaaggtttacggcgtcaccttcctgggcgcgccgcgcacccgcgaagcggaaaacgcctgctgcgcaccgctactgatgggcgtaagcgtggtcgcactggcgctgtgctgcatcgcgggcggcgtcgccgcgccgtggttgctgccgctgctgggccacgccattccgctgccgctggtcacggcgcataccgtcgtttcccagccgatgatggcgctgctgctgattgccgcgccgctcctgccgttcgtgctgatgctgttcttcagacgcgaccgtctcgcctcccgctcgcgcggcgcggcgtgggcctgcggctacgaacatgagcagtcgatggtcatcaccgcccacggtttcgctatgccggtgaaggagaacttcgccgccgtgctgaagctgcgccattggctgaacccggtgggctgggtgccgggctggcagggtgccgccgtgcccgtgctgttccgccgcctggcgctgatcgagctggcggtgctggtggtgattgtcatttcacgaggagcctga

SEQ ID NO: 116407 - DNA, 924 bp, Enterobacter cloacae
atgagtctgttactggcaattcttcaggcgctggtgctgttcgccgccgcgccgctgctgtcgggcatcacgcgcgtggcgcgcgcccggctgcacaaccgtcgcgggcctggcgtgctccaggagtaccgcgatctcttcaaactgctttcccgtcagagcgtcgcgccggacgccgcaggctgggtgttccgcctgacgccgtttgtgatggtgggcgtgatgctgaccatcgccaccgcgctgccggtagtgacggtgggctcgccgctgccggtgctgggcgatctgattacgctgatctacctcttcgccatcgcgcgtttcttctttgcgattgcgggtctggataccggcagcccgtttacgggtatcggcgccagccgcgaggcgatgctcggcgtgctggttgagccaattctgctgctggggctgtgggttgccgcacaggttgcaggctcgacccatatcagttttatcaccgacaccgtttaccactggccggtttcacgttctctcccgctggtgctggcgctctgcgcctgcgcgttcgccacctttatcgagatgggcaagttgccgttcgatctcgcggaagcggagcaggaattacaggaggggccgctcaccgaatacagcggctacggctttgcggtgctgaagtggggcatcagcctcaagcagctggtggtgttgcagatgttcgtcggcgttttcttcccgtgggggcagatgacgcacttctctgcgggcggcctgctgctggccgtggtggtggctgtgctcaagctgcttatcggcgtgctggtgattgccctgtttgaaaacagcatggcgcgcctgcgttttgttgaaacgtcacgcatcacctgggccggttttggttttgcatttttagcgttcgtctccttgctggtggcgtga

SEQ ID NO: 116408 - DNA, 1710 bp, Enterobacter cloacae
atgtctgaagaaaagaaaggtcagcagtatctcgccgcgttgcatcaggctttcccgggcgtggtgctggaggagtcctggcaaaccaaagaccagatcaccgtcaccattaagttgaactatctgccggaagtggtggagtttctctattaccagcagggcggctggctgtcagtgctgttcggcaacgacgagcgtcagctgtgtggcaactatgcggtgtactacgtgatgtcgatggagcagggggagaagtgctggctcaccgtgcgcgtagaggtcgatccggctaaaccggaatacccctccgtcacgccgcgcgtgcctgccgccgtctggggcgagcgcgaagtgcgcgacatgtatggtctggtgccggttggcctgcctgacgagcgtcgcctggtgctgccggacgactggccggatgaactctatccgctgcgcaaggacagcatggactatcgccagcgcccggccccgaccaccgacagcgaaacctacgagttcatcaacgagctgggcagcaagaagaataacgtggtgccgattggcccgctgcacgttacctccgacgaaccgggccacttccgcctgttcgtcgacggcgagaacattatcgacgccgactaccgcctgttctacgtccaccgcggcatggagaagctggcggagacccgcatgggctacaacgaagtcacgttcctctctgaccgcgtgtgcggcatctgcggctttgcccacagcaccgcctacaccacctcggtggaaaacggcatggggatcgtggtgccggaacgcgcgcagatgatccgcgccattctgctggaggtggagcgcctgcactcgcacctgctcaacctcggcctggcctgccacttcgtcggctttgactccgggtttatgcagttcttccgcgtgcgcgaggcgtcgatgaagatggcggagatccttaccggggcgcgtaaaacctacggcctgaacctgatcggcgggatccgccgcgacctgctgaaagacgacatgatccagacccgccagctggcgcagcagatgcggcgggacgtgcaggagctggtggacatgctgctcagcacgccaaacattgagcagcgcaccgtcgggattggtcgtcttgacccggaaatcgcccgcgacttcagcaacgtcggcccgatggtgcgcgccagcggccacgcccgcgatacccgcgccgatcacccgttcgtcggctacggcctgctgccgatgaccgtgcacagcgagcagggctgcgacgtcatctcccgtctgaaggtgcgcatcaacgaggtattcaccgcgctgaacatgatcgactacggcctcgataatctgccgggcggcccgctgatggtggaaggcttcacctacattccaaaccgctttgccctcggctttgccgaagcgccgcgcggggacgacatccactggagcatgaccggcgacaaccagaagctctaccgctggcgctgccgcgcggcgacctacgccaactggccaaccctgcgctacatgctgcgcggcaatacggtctctgacgcgccgctgatcatcggcagcctcgacccgtgctactcctgcaccgaccgcatgaccgtcgtggacgtgcgcaagaagaaaagccaggtggtgccgtacaaagagcttgagcgctacagcattgagcgtaaaaactcgccgctgaaataa

SEQ ID NO: 116409 - DNA, 543 bp, Enterobacter cloacae
atgtttacctttatcaaaaaagtgatcaaaaccggcacgcagaccagcagctatccgctggagccgatgccggtggataaaaactttcgcggcaagccggagcacaatccgcagcagtgcatcggctgcgcggcctgcgtcaacgcctgcccgtcgaatgccttaacggtggaaacggacctgaaaaccggcgagctggcctggcagtttaacctcgggcgctgcatcttctgcggccgctgcgaggaggtctgcccgacggtggccattcgcctgtctcaggagtacgagctggcggtgtggaaaaaagaggacttcctccagcagtcgcgctttgcgctgtgcaactgccgcgtctgcaagcttccgttcgccgtgcaaaaagagatcgactacgccatcgcgctgctgaagcacaacggcgacgtccgcgcggagcatcaccgcgaaaacttcgaaacctgcccggagtgcaagcgtcagaagtgcctgctgccgtccgaccgtattgatatcacccgccatatgagagaggccagctga

SEQ ID NO: 116410 - DNA, 768 bp, Enterobacter cloacae
atggaaaacctactgggcccgcgcgatgctaacggcattcctgtgccgatgacggtggacgaatccatcgccagcatgaaggcgtcgctgctgaaaaaaatcaaacgctcggcctacgtctaccgcgtggactgcggcggctgcaacggctgcgagattgagatcttcgccacgctgtcaccgctgtttgacgccgagcgcttcggcatcaaagtggtgccgtccccgcgccatgcggatatcctgctgttcaccggcgcggtcacccgcgcgatgcgttcgcctgcgctgcgcgcctggcagtctgcgccggatccgaaaatctgtatctcctacggcgcctgcggcaacagcggcggcatcttccacgatctttactgcgtctggggcggcaccgacaaaatcgtgccggtggacgtctacattccgggctgcccgccgacgcccgccgccacgctgtacggttttgccatggcgctcggcctgctggagcagaagatccacgctcgtgagccgggcgagctggacaaccagccagccactctcctgcacccggatatggtgcagccgctgcgggtgaagatcgaccgcacggcgcgcaggctggcgggctaccgctacggacgccagattgccgacgattacctgcgtctgctgggccagggcgaccatcaggtagcgcgctggctggaggccgagaacgatccgcgtctcaatgagatcgtggcgaacctgaacagcattgtggatgaggcgcgtatccgatga

SEQ ID NO: 116411 - DNA, 411 bp, Enterobacter cloacae
atgagtgaaacggtggtgttcagccagctgagccgtaagtttattgatgagaacgatgccacgccggatgcggcgcagcaggtggtctattacagcctggcgattgggcaccacctcggggtgatcgactgccttgaaacggcgctgagctgcccgtggccggaatacctggcgtggatcgccacgctggaggagggcagcgcggcgcggcgcaagatggagggcgtgccgaagtacggcgagattgtgatcgacgccaaccacatcacgatgctcgctaacgcctttgacgcggcgctgagcgtacaaaccccggcgcagcaggcgtggagcaaaacgctgctcggcatgctgcacgatattcatcaggagagcgccatctacctgatggtgaggagattacgtgactga

SEQ ID NO: 116412 - DNA, 456 bp, Enterobacter cloacae
gtgactgacgttttactgtgtgtcggcaacagcatgatgggcgacgacggcgcgggcccgctgctggcggaaaagtgcgctgcgaacccgccgggcagttgggtggtgattgacggcggcagcgcgccggaaaacgacgtggtggccattcgtgaactgcgcccggacaggctgttaatcgtcgatgccaccgatatggggctcaaccccggcgagatccgcctgattgacccggacgacatcgccgagatgtttatgatgaccacccacaacatgcctctcaactatctggtggatcagattaaagacgacgtgggcgaggtgctgtttctgggcattcagccggacatcgtcgggttttattatccgatgacgccgccggtgaaagaggcggtggacgtggtgtattcacggcttaccgggtgggttggggatggaggatttcctcagctctga

SEQ ID NO: 116413 - DNA, 1425 bp, Enterobacter cloacae
atgtctgtttttccacaaggatttttatggggcggcgcgcttgccgccaaccagagtgaaggggcttaccgtgaaggcggcaaaggactgacgacggtcgatatgatcccccacggcgcaaaccgtctggcggtaaaagtcggcaaggaaaaacggttttcgttgcgggacgacgaattctacccgagccacgaggcgattgatttttaccatcgctacaaagaagacatcgccctgatggcggagatgggctttacggtgttccgcacctcgattgcctggagccgcctctacccgaacggcgacgaaccgctgccgaatcaggaaggcattgccttctaccgcgcggtgttcgaggagtgcaaaaagtacaacatcgagccgctggtcacgctctgccacttcgacgtgccgatgcacctggtgacggagtacggctcctggcgcaaccgcaaaatggtggatttcttcgcccgctacgcccgcacctgctttgaagcgtttaacgggctggtgaaatactggctgaccttcaacgaaatcaacatcatgctgcacagcccgttctccggcgcggggctggtgtttgaggaaggggaaaacgaagatcaggtgaaataccaggccgcgcaccacgagctggtggcgagcgcgctggcgaccaaaattgcccacgaggtgaacccggaaaaccaggtcggctgcatgctggcgggcggcaatttctacccgtactcctgcaagccggaagacgtgtggatggcgctggagaaagaccgcgagaacctgttctttatcgacgtgcaggcgcgcggcagctatccggcctactccgcccgcgtgttccgcgagaaaggcgtggtgattgtgaaagacccgggcgacgatgaactgctgaaaaacaccgtcgattttgtctcgttcagctattacgcctcgcgctgcgcgtcggcggacatgaacgcgagcaacaccagcgcggcgaacatcgtgaagtccctgcgtaacccacacattcaggtgagcgagtggggctggggtatcgacccgctcggcctgcgcatcaccatgaacatgatgtacgaccgctaccagaagccgctgttcctggtggaaaacggcctcggggcgaaggacgttattgatgaaaacggcgagatcaacgacgactaccgcatcagctacctgcgcgagcatatccgcgcgatgggcgacgcgattgaggacggcgtaccgctgctgggctacaccacctggggctgcattgatctggtatcggcctcaacgggggaaatgagcaagcgctacgggtttgtgtacgtcgaccgggacgacgccggaaacggcacgctggaccgcaagcgcaagaaatcgttctggtggtataagaaggtgattgcgagtaacgggggggatctggcgtag

SEQ ID NO: 116414 - DNA, 1452 bp, Enterobacter cloacae
atggcaaaaaattacgctgcgctggcaaacgacgttgtcagcgcgctgggcggtaaagagaacatcgtcgccgtcacccactgcatgacgcgcctgcgcttcgttcttaaagacgaaagccttaccgacgccgcacgcctgaaaagcatcagcggcgtgctcggcgtggtgcgcaacgacaaccagtgccaggtgattattggcaacaccgtgtcccaggcataccgtgaagtagtgagcctgctgcccgccaacctgcaacctgccgtagcggaaggtccacagaagctcacgctgcgccgggttggcgccgggatcctcgacgcgctgatcggcaccatgtctccgctgatcccggcgatcatcggcgggtcgatggtcaagctgctggcgatgatccttgagatgaccggcgtgctgggcaaaggcgacccgacgctgacgatcctgaccgttatcggcgacggcgcgttcttcttcctgccgctgatggtggcggcatccgcggcggtgaagttcaaaaccaacatgtcgctggcgattgctatcgcgggcgtactggttcacccgagctttatcgagctgatggccaaggccgcgcagggcgagcacgttgagttcgccttcattccggtgacggcggtgaaatacacctacacggtgatccccgccctggtgatgacctggtgcctgtcgtacatcgaacgctgggtggatcgcattaccccggcggtgaccaaaaacttcctcaagccgatgctgatcgtgctgattgccgccccgctcgccatcgtactgattggcccgctcgggatctggatcggcagcgccatctccgcgctggtctacaccattcacggctatctgggctggctctccgttgccattatgggcgcgctgtggccgctgctggtgatgaccgggatgcaccgcgtgtttacgccgaccatcatccagaccattgccgaaacgggcaaagaagggatggtgatgccgtcggaaatcggcgccaacctgtcgctcggcggttcgtcgctggcggtggcgtggaaaaccaaaaacccggaactgcgccagacggcgctggccgcggcggcctccgccatcatggcggggatctctgaaccggccctgtacggcgtggcggtacgcctgaagcgtccgctgattgcgagcctgatcagcggttttatctgcggcgcggtggcgggcatggccggtcttgccagccactcgatggcggcgccggggctgttcaccagcgtgcagttcttcgacccggccaacccgatgaccatcgtctgggtgtttggcgtgatgggtctggcggtggtgctgtcgtttgtgctgaccctgctgttagggtttgaggatatcccggtagaagacgaagccgaaaaagcacgcgccctgcaaaccgcaccggtacagaacaaagcagcagaagcataa

SEQ ID NO: 116415 - DNA, 1014 bp, Enterobacter cloacae
atgaccacgatgctggaagtggcgaagcgggcaggcgtatcaaaagcgacggtctcccgggtactgtcggggaacggttacgtcagccaggagacgaaagaccgcgtgtttcaggccatcgaagagagcgggtatcgccccaatctgctggcgcgaaacctggcgaccaaacgcacccagaccctggggctggtggtgacgaacaccctgtaccatggggtctactttagcgagctgctgtttaacgccgcgcggatgacggaagagaaggggcgtcagctgatcctggcggacggcaagcacagcgccgaagaggagcgcgaggcgatccagtacctgctcgacatgcgctgcgacgcggtaatcatctatccgcgttttctgagcgtggaagcgctggacgagatcattgagaaatgcgagcagccgatcatggtgctcaaccgccgtttgcggaaaaacagcagtcacagcgtctggtccgatcataaagcgtcgtgtcaggacgcagtatcgcagctgatcgcgaaaggccaccgggagattgcgtttatcaccggttcgctggattcccccaccggggtggagcgtctttccggctacaaggacgcgctggcgcagcacgggattgcagttcgcgacgcgctgatcgccgaagggaagtggaacccggccagcggcgcggcggcggtctctcagttgctcacccgcggcgaaacgtttaccgcgctggtggcgagtaacgacgacatggcgattggcgccatcaggcagctgcacgagagcggcgtcgccacgccgggcgcagtgtccgtcatcggctttgacgacgtggcaatcgcgccctatatcgtgccgtccctctccagcgtgcgtattccggtaacggagatgattcaggagaccatcagccgtatgattttcatgctcgacggcggtgagtttaagcctcagcaaaccttctccggcgagcttatcctgcgcgactccgtcattgacggcccgcatcgctga

SEQ ID NO: 116416 - DNA, 546 bp, Enterobacter cloacae
atgaaccgttttattatggccgatgccagcaaatgcattggttgccgtacctgtgaagtggcgtgcgtggtgtcccatcaggcagagcaggattgcgcctctctcacccctgataccttcctgccgcgcatccacgtcattaaaggcgtgaatatttctaccgccgctatctgtcgccagtgcgaagacgcgccgtgcgccaacgtctgtccgaacggggcgattaagcgcgagaaaggcttcgtgcatgtgatgcaggagcgctgcatcgggtgcaaaacctgtgtggtggcgtgtccgtatggcgcgatggaggtggtggttcgcccggtggtgcgcaacagcggtatcgggctgagcgtacgcgcggagaaagccgaagccaataaatgtgacctctgctaccaccgcgatgccggtccggcgtgtatggaagcctgtccgacgcatgcgctggtctgcgtcgatcgcgacaagctcgaacagatgagtgccgaaaaacgccgccgcgcggcgttcgacacctcatcatcgctgctgttttaa

SEQ ID NO: 116417 - DNA, 2217 bp, Enterobacter cloacae
atgcgcgttaacggcgtacagcttcgggtgcgcggcaaggtgcagggggtaggatttcgtcccttcgtctggcagcttgcgcaccagctggggctggcaggcgacgtctgcaacgacggagagggtgtcctggtgcgtctcgcgggcagtgggggtgactttaccgcgagactgcgccaggactgcccaccgctggcgcgcatcgatcgcattgaaacgcagccgttcagctggacgacgctgccggatgagtttgtcatccgccacagcgagagcggggcgatggacacgcaaatcgtcccggatgccgccacctgtcccgcatgcctggtggagatgcgcgacccccgcgaacgtcgctaccgctacccgtttatcaactgcacccactgcgggccgcggtttaccattatccgcgccatgccctatgaccgcccggccacgtcaatggcgccattcccgctctgtgtgccctgtgaaacggagtaccgcaacccggctgaccggcgttttcacgcccagccggtggcctgcccggattgcggaccgcagctggagtggcgagccggggaggctgctgccacccgcgaatcggcgttaagcgcggcggtggcgatgctggaaggcggcgggattgtggcggtcaaagggctgggcggttttcacctggtctgcgacgcgcttaacccgcaggcggttcggaaattacgggcacgcaagcagcgcccgaccaggccgctggcggtgatgatcccgcatgcggacgatctgccggaggccatccagacgctgttacgttcacccgctgcgccgattgtgctgacgccaaaagcctgccttcctgcgtttcctgaggagattgcgccggggctggatacggtcggcgtgatgctgcctgcgaacccgctccagcatttgctgatgctggactgccagcgcccgctggtgatgacctccggcaacctcagcggccatccacccgccataagcaaccagcaggcgctggaagaactcagtgacatcgctgacggcttcctgctgcacaaccgcgacatcctgcaacggatggatgattcagtgatggaccaggagggcacgatgctgcgtcgcgcacgcggttttgtgccggatgccatcacattgcccgccggattccgcgacatcccgcccatgttatgcaccggcgcggagatgaaaaacaccttcagcctggtgcgtggcaaccaggcggtgctgagccagcattttggcgatctgagcgacgagggggtagaggcgcagtggcgcagtgcgctctcgacgatgcaggacatctacgcctttcagcctgagcgcgtggtgtgcgatgcccatccgggttatcacgcccgactgtgggcccgggcgcaggcgctgcccgttgagaccgtgctgcatcatcatgcgcatgcggcagcgtgtctggcggagaatggctggccgctcaacggcggggatgttattgccctgacgctggacgggatcggcatgggcgagaacggcgcgctgtggggcggcgagtgcctgcgggtgaactatcgcgactgcgaacggctgggcggtctgccagccgttgcgctgccggggggcgatctggcggcaaaacagccgtggcgcaatttgctcgcccactgtctggcgttcgtacctgactggcagcagtacccggaaacagaggtggtacagcgtcaaaactggccgctgctggcaacggctgtgtcgcgcggtatcaatgcgccgcgggcctcctcctgtggtcgtctgttcgacgccgtggcctgtgcgctgggcattgaaacgcaacgctatgagggcgaagccgcgtgccggctggaggcgctggccgaacgctgcgcaggggttgatcatccggtgacgctccagacggataaccttgcgctgttctggcaacagtggcttacctggcgggcggaacccggcgagcgtgcctgggcttttcacgatgcgctggcaaaagggctgagcgaactggcggcaacgcatgcccgccgacggtcgctcacgacggtgtgtttcagcggcggcgtccttcacaaccgcctgctgcgcgcgcgccttcgtcattacctttctgatttcacgcttctttttccttcgcgcctgcccgcaggcgacggagcgatctccttcgggcaggcggtggttgctgccgcccgatcatgttcacaagggatttaa

SEQ ID NO: 116418 - DNA, 1023 bp, Enterobacter cloacae
atgttacgacttttacgcaatgaacctcgtgcagcgtgcctgctgctggctctcgggatggctaacctgctggcctgggggctggcgtggcacacctttagcggcagtacggcgctgatggcggccagcctgctggcctggtgttacggactgcgtcatgcggtggatgccgaccatatcgccgcgattgataccgtgacgcgtaaaatgatgcagcagggcaagcgcccgtccggcgtgggcgcatggttttccctcggacactccaccatcgtggtgctggcctccattgccatcgccgcgaccgccacggcatttcagaagaatatggcgtggtttcacgagaccggcagcctgatcggcacggcggtgtcggcaaccttcctgctggcgatggcgctggtgaatatggtgatcctgcgcggcgtctggcgcagttttcaggcgctgaaacacggcaatcccgtgcagggcgacatcacgctgcctgcacagggcggcgtcatgaactggctgttcggcaaaaccttccgcctcgtcaataaaagctggcagatgtacctggtcggtttcctgttcggcctggggttcgacaccgccaccgaaatcggcgtgctggggatctccgccgccagcgcctccagcgggatgtcggtgtggtcgatcatgatcttcccggcgctcttcgccagcggcatggcgctggtcgatacgctcgataacctgctgatggtgggtgcctacggctgggcgtttaacaagccgcagcgcaagctctactacaacatgaccatcaccggcacttcggtggtggtggcgctgtttatcggcggcctggaagcgctgggtctgctgatggacaagttcgccctcagcggcggcgtgtgggatctgattggcgcggtgaacgataacctgggcgacgccggatttgtggtggtcgggctgtttgtcgcctgctggctgatctcgatggcgaactatcgctggcgcggttatgacgcgctggtggtgcgcccctga

SEQ ID NO: 116419 - DNA, 1134 bp, Enterobacter cloacae
atgagccacggcatcgtcattatcggctcgggctttgccgcccgccagctggtgaaaaatatccgcaaacaggatgctaacgtgccgttgacggtgatcgccgccgacagcatggatgagtacaacaagcctgatttaagccacgtcattagccagaatcagcgcgccgacgatctcacccgccagacggcgggggagttcgcagaacagtttaacctgcgtctgtttccgtacacctgggtcaccgatatcgacgccgacgcccacgtggtgaacgcgaaagataaaacctggcagtacgacaaactggtgctggcgacgggggcatcggcgtttgtgccgccggttgagggccgcgagctgatggtcacgctcaacagccagcaggagtatcaggccagcgagaccctgttacgcgacgccacgcgggtgatgattgtcggcggcggactgattggcaccgagctggcgatggacttctgccgggcgggaaaatccgtcaccctggttgaccacgcggccagcattctgtcagcgctgatgccagcagaagtaagcagtcgcttacagcatcgtctgaccgacatgggcgtgcatctgctgctgaaatcgcagttacagagcctgagcaaaaccgaaaccggcatttgtgcgacgctcgaccgcaaccgcagcgttgaagtggatgtggttattgcggcgacggggttgcgcccggaaaccgcgctggcgcaccgcgcgggcgcagagatcaatcgcggcgtgaaggtggacagctacctgcaaaccacccagccggacatttatgccctgggcgactgcgcggaaattaacggccaggtgctgccgttcctgcaaccgattcagttaagcgccatgttcctggcgaaaaacctgctcggcggcaacgccccggtgaaattacccgccatgctggtgaaggtaaaaacgccggaactaccgctgcatctcgcaggtgaaacgcagcgtcaggatctggactgggagattgtcctttcgcctcagggcatggtggcgcgcggcaccgataccgacggtcagatgcgcgcctttgtcgtcagcgaagacagaatgaaggaggccttcgcgctgctgaaatcgctaccagcttaa

SEQ ID NO: 116420 - DNA, 1449 bp, Enterobacter cloacae
atgtctattctggttaaaaataacattcattgggtgggtcaacgtgactgggaagtacgtgattttcacgggacggaatacaaaacgctgcgtggcagcagctacaacagctatctcattcgtgaaggtaaaaacgtcctgatcgataccgtcgatcacaaattcagccgcgagttcgtgcagaacctgtgcagcgaaatcgatctgaatgacatcgactacatcatcatcaaccacgcggaagaggatcacgccggggcgctgaccgagctgatgtcccacattccggataccccgatctactgcaccaccaacgccattgactccatcaacggccaccaccaccatccggagtggaacttccacaccgtgaaaaccggcgacacgctggatatcggcaatggcaaacagctgatcttcgtggaaaccccaatgctgcactggccggacagcatgatgacctacatgaccggtgacgcggtgctgttcagtaacgacgccttcggccagcactactgcgacgaacgtctgttcaacgacgaagtggatcagaccgagctgttcgaacagtgccagcgctactacgccaacatcctgaccccgttcagccgtctggtcacgccaaaaatcaccgagatcctcggcttcaacctgccggtggatatgattgccacctcccacggcgtggtatggcgtgaaaatccaacccagattgtcgaactgtacctgaagtgggcggcggactatcaggaagatcgcatcaccatcttctacgacaccatgtccaacaacacccgcatgatggcggacgccattgcccagggcatcaacgaagtggacccgaacgtggcggtgaaaatcttcaacgtggcgcgcagcgataagaatgaggtgttgaccaacgtcttccgctccaaaggcgtgctggtgggtacctccaccatgaataacgtgatgatgccgaaaattgccggactggtggaagagatgaccggcctgcgctttcgtaacaaacgcgccagcgcctttggttcacacggctggagcggcggcgcggtagaccgtctctccacccgtttacaggatgccggttttgagatgtccctgagcctgaaggcgaaatggcgtccggatctcgacgcgctggaaatctgtcgccagcacggtcgcgacattgcccgccagtgggcgcttgcgccgctgccggaaaccgcacccgccgcggcggttacgccggaagctgtagcagaagccgctcctgccgctgccgacctcggcccttgcatgcagtgcagcgtctgccagtggatttacgatcctgagctgggcgagccgttgcaggatgtcgcgccgggtacgccgtggagcgaggtgccggacaacttcctctgcccggaatgttccctcgggaaagacgtctttgatgaactggcaacggaggcaaaatga

SEQ ID NO: 116421 - DNA, 1515 bp, Enterobacter cloacae
atgagcttttccgtagatgtgctggcgaagatcgccatagaactgcaaaccggtattggtcatcaggaccgctttcagcggctgatctccacgttgcgccacgtgctggattgcgatgcgtcggcgctgctgcgttacgaagggcggcagtttattccgctggctatcgacggtctggcgaaggacgtactcgggcggcgctttaccctggagggccacccgcgtctggaaaccatcgcccgcgcgggtgacgtggtgcgtttcccggcagacagcgatctgcccgatccttacgacggcctgatccccggacaggagagcctgaaggtgcacgcctgtatcggcctgcctctgtttgccgggcagaacctgattggcgcgttaaccctcgacggcatgtcgcctgatcagttcgataccttcagcgacgaagagctacggctgattgccgcgctggcggccggggcgctgaacaacgccctgctgatagaacagctggagagccagaatattcttccgggtagcccgacggcgtttgagcaggtggcgcacaccgaaatgatcggcctttcgccgggcatggcgcagctcaaaaaagagattgagattgtcgccgcgtctgatttgaacgtgctgatcttcggggagaccggcaccggtaaagagctggtggcaaaagcgatccacgaagcctcgccccgtgcggtgaatccgctggtctatctcaactgcgcggcgttgccggaaagcgtggcggaaagcgagctgttcggacacgtcaaaggggcctttaccggggcgatcagcaaccgcagcggcaagttcgaaatggctgataacggcacgctgttcctcgatgaaattggcgaactctccctttcgctccaggccaaactgctgcgggtgttgcagtatggcgatattcaacgcgtgggagacgatcgcagcttacgcgtggatgtgcgcgtgctggcggcgacgaaccgcgatctgcgcgaagaggtgctggcggggaatttccgcgccgatctgttccaccgtctgagcgtgttcccgctcacggtgccgccgctgcgcgagcggggcgaggatgtggttctgctggcgggctttttctgcgaacagtgtcggctcaaaatggggctttcccgcgtggtgctaagtcctggcgcgaggacgcacctgctgagctacggctggccgggtaacgtgcgtgagctggaacatgcgatccaccgcgcggtggtgctggcgcgggcaacgcgttcgggggatgaagtggttattcatgcgcgccatttcgcgctgcatgaggaaacgatgccgcccgtgaagccggtgatacctgagagcgtgaacgaaaacctgcgcgaggcgacggatgcgttccagcgtcagatgatcgcccgcgcgctggagcagaataaccgcagctgggcggcgtgcgcgcgggcgctggagatggacgtcgccaaccttcacaggctggcgaaacgtctggggctgaagggttaa

SEQ ID NO: 116422 - DNA, 966 bp, Enterobacter cloacae
atgagtgattttctgttaaacgcaggccgtcagaccctgctgctggagctacaggaagccagccgcctgccggaacgtctgggtgaggattttgttcgtgcagccaacaccattatccactgcgagggcaaagtgatcgtggcgggtatcggtaaatccggtcatatcggcaagaagattgccgcgacgcttgccagcaccggcaccccggcgttcttcgtgcatcctgccgaagcgctgcacggcgatctggggatgatcgaaagccgcgacgtgatgctgtttatctcctactccggttcagccaaagagctggatctcatcatccctcgcctgcaagaaaaatcggtggccctgttagcgatgaccggcaaatcccgttcgccgctggcgctggccgcgaaagcaaccctggatatttccgttgagcgcgaagcctgtccgatgcacctggcaccgacctccagcaccgtcaacacgctgatgatgggcgacgccctggcgatggcggtgatgcaggcgcgcggttttaatgaggaagatttcgcccgctcccatcctgcgggcgcgcttggggctcgtctgctcaacaaagttcaccacctgatgcgcacggacgatgccattcctcaggtcaaactcgacaccagcgtgatggacgccatgctggagctgagccgcaccgggctggggctggttgcggtatgcgacaatgaccgccaggtgaagggcgtcttcaccgacggcgacctgcgccgctggctggtgggcggcggcaagctggaggcgcgggtatccgaagcaatgacccagggcgggctgacgctgaatgccgacagccgcgcgattgaagccaaagaggtgctgatgaagcgcaaaatcaccgccgcgccggtggtggacgagcacggcaggctgtgcggcgcgatcaacctgcaagacttctaccaggcggggattatttaa

SEQ ID NO: 116423 - DNA, 774 bp, Enterobacter cloacae
atgaaaccacgtcagcggcaggcggccatacttgagcatctgcaaaagcagggaaagtgctcggtagaggatctggcccactactttgacaccaccggcacgacaatacgcaaggacctggtgttgctcgaaaactccggcgccgtcattcgtacctacggcggcgtggtgctcaataaagacgaagccgacccgcctatcgaccacaaaacgctgatcaatactcaccagaaagcgctgattgccgaagccgccgtcaaatttatccaggacggcgattccattatcctcgacgcaggcagtaccgtcctacagatgatcccgctgctcagccgctttaataacatcaccgtgatgaccaacagcctgcacatcgtcaatgccctgtcagagttcgacagcgagcagaccatcctgatgcccggcggcacctttcgtaaaaaatcggcgtcgtttcacgggcagctggcggagaatgccttcgaccacttcagcttcgataagctgtttatgggcacggacggcatcgacctcaacgcgggcgtgaccaccttcaacgaggtgttcagcgtcagcaaagcgatgtgcaacgccgcgcgggaagtgattttgatggcggactcgtcgaagtttggccgtaaaagccccaacattgtctgtagccttgaaagcgtcgataagctgattaccgacgcaggtatcgatccggcatttaaaaaagcgctggaagcgaagggcatcgacgtgatcgtaaccggagagaaaaatgagtga

SEQ ID NO: 116424 - DNA, 360 bp, Enterobacter cloacae
atggtcaccgcactcatcaccgtcgccgccctcgcctggctttgccagatggcgtttggcggctggcaaatccatcagtttaaccgcgcctttgacgccctgtgccagaaaggccgcgtgggcgttgggcgttccggcggacgctttaaaccgcgggttgtcgtcgctattgcgctggatgaaaacaatatggtttgcgattccctcatcatgcgcggcgtaacggtgtttgcccgtccgaccaaaatccaggcgatcgacggcatttcgctgcatgatttacaacctgatgtgatcttcccccatgattcactctgtcagaatgcactatcattagcgcttaatctgaaacatggataa

SEQ ID NO: 116425 - DNA, 780 bp, Enterobacter cloacae
atgagtcaggttgccgttgtcattggtgggggacaaaccttaggcgagttcctctgccatgggcttgccgcagagggctaccgcgtggcggtcgtggatattcagagtgagaaagccgcccgcgtagcggacgccatcaacaccgaatttggcgaagggatggcgtatggatttggcgccgacgccaccagcgagcagagcgtgatggcgctggcccgcggcgtggatgagatttttggtcgcaccgatctgctggtctacagcgcggggattgcgaaagcggcctttatcagcgatgtcgaactgggggattttgatcgctcgttgcaggtgaatctggtgggctatttcctctgcgcccgcgaattttcccgtctgatgatccgcgacggtattcagggtcgcatcattcagatcaactcaaaatcggggaaagtgggcagcaagcacaactccggctacagcgcggcgaagtttggcggcgtcgggctgacgcagtctctggcgctggatctggccgaatacggcataaccgtgcacgcgctgatgctaggtaacctgctgaaatccccgatgttccagtccctgctgccgaagtatgccgccaaacttggcatcaaagcggaggacgtcgaacagtactacatcgacaaagtgccgctgaagcgcgggtgcgattatcaggacgtgctgaacatgctgctgttttacgccagcccgaaagcctcgtactgcaccgggcagtcgattaacgtcaccggtgggcaggtgatgttctga

SEQ ID NO: 116426 - DNA, 363 bp, Enterobacter cloacae
atgaccgtgatttaccagaccaccattacccgcatcggccagagcgcggccgatgcgctgagcgaccagatgctgatcaccttccgcgaaggcgccccggcagatatcgaagagttttgctttatccactgccacggcgagttaaacggcaagctgaaggccggtggccagctggagctgggcaaggcgcgctatgccgtaaccgccgtcggtgacgtcgccgagcaaaacctgcgcgagctggggcacatcaccttgcgtttcgacggccagccgcgggcggagtatcccggcacggttcacgttgaggggccggttccgcaggctgtcaccccaggctgcacgttaaaatttatttcgtaa

SEQ ID NO: 116427 - DNA, 960 bp, Enterobacter cloacae
atgaaccggatccgcatagataaaggcacgggcggctggggcggcccgctggagttcgacgccaccgaaggcaaaaagatcgtctacatcaccgcgggcacgcgcccggcgatcgtcgacaggctgcgcgagctgaccggctgggaagcggtcgacggcttcaaggaaggcgagccgccggaagcggaaatcggcgtggcggtaatcgactgcggcggcaccctgcgctgcggcatctacccgaagcgccgcattccgacggtgaatattcactccacgggcaaatcaggcccgctggcgcagtacatccttgaggacatttatgtctcgggcgtgaaggaggacaacatcacgctggtgaatggcacacccgcgccgcaaaaagcatccccgcgcgactacgacaccagcaaaaaaatcaccgagcagagcgacggcctgctggcgaaggtcgggatggggatggggtccgccgtggcggtgctgtttcagtccgggcgcgacaccatcgacacggtgctgaaaaccattctgccgtttatggcgttcgtctcggcgctgatcggcatcatcatggcctccggcctcggcgactggattgcccacggcctcgccccgctcgccagccacccgctcggcctggtgacgctggcgctgatctgctccttcccgctgctgtcgccgtttcttggcccgggcgcggtgattgcccaggtcattggcgtgctgattggcgtgcagattggtctggggaatattcccccgcacctcgccctgcccgccctgtttgccattaacgctcaggcggcgtgcgacttcatccccgtcgggctgtcgctggcggaagcgcgccaggagaccgtgcgcgtgggcgtcccctccgtgctggtgagccgcttcctgacgggcgcgccaacggtgctaattgcctggtttgtctccggctttatttatcaataa

SEQ ID NO: 116428 - DNA, 564 bp, Enterobacter cloacae
atgatagaaaccatcacccacggcgccgagtggttcatcgggctgtttcagaaaggcggcgaggtattcaccggcatggtgaccgggatcctgcccctgctgatcagcctgctggtgatcatgaacgccctgattaactttatcggccagcagcgtattgaacgcttcgcccagcgctgtgccggcaatccgctgtcccgctacctgatcctgcccttcatcggcacctttgtgttctgcaacccgatgaccttaagcctcggccgctttatgccagagaagtacaagccgagttattacgccgccgcctcctacagctgccattcaatgaacggcctgttcccgcacattaaccccggcgagctgtttgtttacctcgggattgccagcggtctcactacgctgggactgccgctcggcccgctggcggtgagctatctgctggtcggcctggtgaccaacttcttccgcggctgggtaacggacctcactaccgccatttttgagaaaaaaatgggcattcagcttgatgagaaagtccagctttcgggagccacagtatga

SEQ ID NO: 116429 - DNA, 1212 bp, Enterobacter cloacae
ttggtggaaaaaagcgcggatttgcgtcggggaggtgtgtaccgcttccttgaggagttggggatgctttaccatactggattcttaccgaactcgttaaatggatgccacatgttcaagcgtcgttatgcagcgctgttgcctgcgcttattctcctgtccgcctgtagtagcaaacccaagaccgaagccgctcagccaacggcgggcgcgccttccggaggattcctgctggagccgcagcacaatatgatgcagatgggcggcgacttcgcgaataaccctgcggccgaacagttcatcgataaaatggtgagcaagcacggttttgaccgccagcagctgcatgccattttgtctcaggcgaagcgtctggactatgtgctgcgcctgatggacaggcaggcgccgacagcccaggtgccgaccgggccaaacggcgcgtggctgcgctatcgcaaacagtttattaccccggacaacctgcagaatggcgtggtgttctggaatcagtatgaagacgccctgaaccgtgcgtggcaggtctatggcgtgccgccggagatcatcgtcggtattattggggtcgagacccgctggggacgcattatgggtaaaacccgcatccttgatgcgctggcgacgctctccttcaactacccgcgccgcgccgagtatttctcttccgagctggaaaccttcctgctgatggcgcgagacgaacaggacgatccgctcgatctgaaagggtcgttcgccggggcaatgggctacggccagtttatgccgtcctcctataagcagtacgcggtagattttaacggggatggtcacatcaacctgtgggatcccgaagacgccattggcagcgtggccaactacttcaaagcgcatggctggacgccgggcggccaggtggcggtgcaggcgaacggcgaggcgtttggtctggaaaacggatttaaaaccaaatacagcgtggcgcagctggcagcggcaggcttaacgccgtcgcagccgctgggcaatgttgaccaggtgagcctgctgcgcctggatgtcggaaccggttatcagtactggttcgggctgccgaacttctacaccattacccgctacaaccacagcacgcactatgcgatggcggtgtggcagctggggctggcggtgtctcaggcgcgtgtgccggcagcgtcaccgtttagccagtaa

SEQ ID NO: 116430 - DNA, 654 bp, Enterobacter cloacae
atgatcgtgatgaacgacctggtggcgggttacgatcgccagcccgttacgcgcgcgctgtccggcgtgattgaacgcgggagcatgaccgctatcgtcggggccaacggctgcggcaaatccacgctgctgaaaacgctcgccggctttattccgcccgtcagcggtacgtttcgctggcaggggagatgtccggtggtgggctggctggcgcagcgtcacgcgctggaggcgcaatttcctctgaccgtgcaggacgtggtgagtatgggctgctggccagcaatctcactgtttgccggttttcgtcgggatacccgcatgcgcattgccggcgcgctggagcgcgtggggctggagtccatggcgttctctaccatagatgaactttccggcggccagtttcagcgcatgctgtttgcccgcgttttggtgcagcaggcgcccctggtgatgctggatgagcctttcaccggcgtcgatgaagcgacctgcaacgtgctgatggatctgatgctggagatgtatatgcaggggcagaccctgctggcggtactgcacgacagcgaacgcgtctcgcgccacttcccacaaacgctgcggctggatgctgatacgccgcactggaaaaccgagcgggtgagggtggcatga

SEQ ID NO: 116431 - DNA, 861 bp, Enterobacter cloacae
atgatctggcatctcttcttccagccgtttattgagtacggctttatgcggcgcgcgctggtggtttgcctggcgctctccgtcagcaccactgcgctgggcgtatttcttcaactgcgtcggatgagcctgatgggggacgccctttctcacgccattttgccgggtgtcgcggtgggctatctgctcagcgggatgtcgctgctggcaatgactgtcggcgggtttattgccgggatcgccgttgcgctggtggccgggctggtcagccgccgcacgccgcttaaagaggatgccagcttcgcggggttttacctgggctcgctggcgctgggcgtcacgctggtgtcgctgcgcggttcaaatgtcgatctgcttcatcttctgtttggctccattctcgccgtggatagcgcgtcagccctgttcgtgacgggcgtttgcatgttcacgctcctcacgctggcgattttttatcgggggctggtcagcgaagcgtttgataccgcgtggttgcaggtgaacgcgcgctggctgcccgggatgttacacggtctgtttctggcgctgctggtgctcaacctggtagccggttttcaggtgctcggcacgctgatggccgtcgggctgatgatgttacccgccgtggcggcacgctgctgggtgcgcacactgccagggttacttttgatggcgggtatcagcggtattttttgcgcgtggctgggcttaagcctttcctgggcagtgagtctgcccgccgggccctccattgtgctgaccgccagcgcattgttctttatttcagttttatttggcacgcgcagcaggctggcggatagcctgcgggcgcttttttaa

SEQ ID NO: 116432 - DNA, 858 bp, Enterobacter cloacae
gtggcgctcgcgctcggcatgatgacgcacggcgtaatggcgaaaacgcttaatgtggtgaccagcttttccatcctgggagacatcacgcagcaggttggcggcgatcgtgtgaaggtgacgacgctggtggggccggacggtgatccccatactttcgaaccttcgcccaaagacagcgcggcgctgagtaaagctgacgtggtggtggtcaatgggctggggctggagggctggctcgaccgtctggtgaaagcctccggattcataggccaactggtggttgcttcggacggcgtgaaaacgcacacgctggaagaggacggtaaaaccgtgaccgatccgcacgcgtggaacagcgcggcgaacggcgcgctgtatgcgcaaaatattctctcagggctggtgaaggccgatcctgaagatacggcggcgcttgaagctaccggtaaaccctatattgcgcagctctctcaactggacggttgggctaaaaagcgtttcagcgacatcccacaggcgaagcgcaaagtgctgaccagccacgacgccttcggctatttcagccgcgcctacggcgtgacgtttatggcgccgcaggggctgtcgtctgagagtgaagccagcgcggcgcaggtagcggagatcatcaatcagattaaagctgacggcgtgaaaacctggtttatggaaaaccagcttgacccacgcctggtgaagcagattgcgaccgccacgggcgcccagccgggtggtgaactttacccggaagcgctgtccgcgaagggcggcgtggcggacacctacgtcaaggcgtttcgccacaatgtggacaccctcgctaacagcatgaaataa

SEQ ID NO: 116433 - DNA, 498 bp, Enterobacter cloacae
atgactgaccatgaattgatgcagctaagcgaagtggtggggctggcgctgaaacagcgcggcgcgactctcacgaccgcagaatcctgcaccggcggctgggtggcgaaagcaattaccgatattgctggcagttccgcctggtttgaacgcggctttgtgacctacagtaacgaggcgaaagcgcagatgatcggcgtgcgtgaagccacgcttgagcagcatggcgcggtcagcgagccggtggtgatcgagatggcgattggcgcgctgaaagaggcgcgcgcagattacgctatctccatcagcggtatcgcggggccggacggcggcagcgacgtgaagcctgtcggcaccgtctggtttggctttgccacctcaaaaggtgaagggatcacccgccgggaatgcttcagcggcgaccgcgaaagcgtgcgtcgtcaggcaacggaatacgcgttaaaaacgctctggcaacaatttctacaaaatacttga

SEQ ID NO: 116434 - DNA, 1059 bp, Enterobacter cloacae
atggctatcgacgaaaacaaacagaaagcgttggcggcagcactgggccagatcgaaaagcaattcggtaaaggctccatcatgcgcctgggtgaagaccgttccatggatgtggaaactatctccactggttcgctttctcttgatatcgcactgggcgctggcggtttgccgatgggccgtatcgtagaaatctacggtccggaatcctcgggtaaaactaccctgacgttgcaggttgttgcggcggcacagcgcgaaggtaaaacctgtgcgtttatcgatgccgagcacgcgctggacccggtctatgcccgtaaactaggcgttgatatcgacaacctgctgtgctcccagccggacaccggcgagcaggcactggaaatttgtgacgcgctggcgcgctcaggcgcggttgacgtgatcatcgtcgactccgttgcggcgctgacgccaaaagcggaaattgaaggtgaaatcggtgactctcacatgggcctcgcggcacgtatgatgagccaggcgatgcgtaagctggcgggtaacctgaagcagtccaatacgctgctgatcttcatcaaccagatccgtatgaaaattggtgtaatgttcggtaacccggaaaccaccaccggcggtaacgctctgaaattctacgcttctgtccgtctggatatccgccgtatcggtgcggtgaaagagggggataacgtagtcggtagcgaaacccgcgtgaaggttgtgaagaacaaaatcgcagcaccgttcaaacaggctgagttccagatcctctacggcgaaggtatcaacttcctcggcgagctggttgacctgggcgtgaaagagaagctgattgaaaaagcgggcgcatggtacagctacaacggtgacaagattggtcagggtaaagcgaatgctatctcctggctgaaagagaacccggcggcggcgaaagagattgagaagaaggtgcgtgaactcctgctgaacaaccaggactctaaacctgatttcgtggtcgacggcgcggatgctgaagaaaccaacgaagacttttaa

SEQ ID NO: 116435 - DNA, 501 bp, Enterobacter cloacae
atgagtgaaccgacatcacgccgaccagcctactcacgcttgctggatcgggccgtgcgtattcttgccgtgcgtgaccatagcgaacaggagctgcggcggaaactgtcagcgcccgtcatgagcaaaaacggtccggaagacattgatgccaccgcggaagattatgaccgcgtggttgcctggtgctacgagcatcactatctggatgacggccgttttgccgctcgctttcttgccagccgtggtcgtaaaggctatgggccagcgcgtatccgccaggagctgaaccagaaaggggtagcccgtgaatcgattgaaaaagccatgcgcgaaagtgaaattgactggtgcgaactggcgcgtgagcaggcggtacgaaagtacggtgagccgctgccgcgtgaattttcagaaaaagttaaaatccagcgctttttgctctaccgcggcttcctgatggaagatattcaggatatctggcgtaattttaccgattga

SEQ ID NO: 116436 - DNA, 2628 bp, Enterobacter cloacae
atgagcaagagcaccgctgagatccgtcaggcgtttctcgattttttccatagtaagggacaccaggttgttgccagcagctccctggtaccgaacaatgacccgactctgctgtttaccaacgccgggatgaaccagttcaaggatgtgttccttggtctcgacaagcgtaattattcccgcgccacaacctcacagcgttgcgtgcgtgcgggcggtaaacacaacgatctggaaaacgtcggttacaccgcgcgccaccacaccttcttcgaaatgctgggtaacttcagcttcggcgactatttcaaacacgacgccattcaatacgcgtgggaactgctgaccggtgaaaactggttcaatctgccgaaagagcgtctgtgggtgaccgtgtatgagaccgatgacgaagcgttcgacatctgggaaaaagaagtgggtatcccgcgcgaacgtatcatccgtatcggtgacaacaaaggcgcgccttacgcgtctgataacttctggcagatgggcgacaccggcccttgcggtccgtgcaccgagatcttctacgatcatggcgaccacatctggggtggccctccgggaagcgcggaagaagatggcgatcgctacattgagatctggaacatcgtcttcatgcagttcaaccgtcaggccgacggcaccatggagccgctgccaaaaccgtccgtagataccggtatgggccttgagcgtatcgtggccgttctgcaacacgttaactccaactatgagattgacctgttcagcaccctgatcaaagccgttgctgaggtaacgggcgcaaccgatctgagcaacaaatcactgcgcgttatcgcagaccatattcgttcctgtgcgttcctgattgctgacggtgttatcccgtcgaatgaaaaccgtggctatgtgctgcgtcgtatcattcgtcgtgcgatccgccatggcaacatgctgggcgcgaaggacaccttcttctataaactcgttgggccactgattggcgtgatgggctctgccggtgacgagctgaaacgccagcaggcgcaggttgaacaggttctgaaaaccgaagaagagcagtttgcccgtacgctggaacgcggtctggcgctgctggacgacgagctggcgaaactcaagggcgacacgctggatggagaaaccgctttccgcctgtacgacacctacggcttcccggttgacctgaccgcggacgtttgccgcgagcgcaacatcaaagttgacgaagcaggctttgaagccgcaatggaagaacagcgtcgtcgtgcgcgtgaatccagcggttttggcgcggactacaacgcgatgatccgcgttgatagcgcgtctgaatttaaaggctacgaagagctggccctgaccagcaacgtgaccgcgctgtttgttgacggtaaagccgtagacagcattagcgcgggccaggaagcggttgttatcctggataaaacgccgttctatgcggaatcgggcggtcaggttggcgataaaggcgaactgaaaggcaatggcttcagcttcagcgtaagcgatacccagaaatacggtcaggcgattggtcaccagggcaaactggtttccggctctctgaaagtgggcgagggcgttcaggccaacgttgacgaagctcgccgcgcgcgcattcgtctgaaccactcggcaacccacctgatgcacgcagccctgcgcgaagtgctgggtacgcacgttgcacagaaaggttctctggttaatgacaaagtgctgcgtttcgacttctcgcattttgaagcgatgaagccgtctgaaattcgtgcggtggaagacctggtgaatgcccagatccgtcgtaacctgccaatcgaaacccacatcatggatcttgaggcagcgaagaagaaaggtgcgatggcgctgtttggcgagaaatatgacgaccgcgttcgcgtgctgagcatgggcgacttctctaccgaactgtgtggcggtactcacgcatcccgcaccggtgacatcggcttgttccgcatcgtttccgagtcggggacggcggcaggcgtgcgtcgtattgaggcggtgaccggggaaggcgcgattgccagcctgcatgcgcagagcgaccagctgcacgagatcgcgcagctgctgaaaggcgatagtcagaacctgggcgaaaaagtgcgtgtcgcgctggatcgtacccgtcagctggaaaaagaactccagcagctgaaagaacaggctgcggcgcaggagagcgcaaacctctccagcaaagcggtagacattaagggcgtcaaactgctggtcagcgatctggcgggcgttgagcctaagatgctgcgtaccatggtcgacgatctgaagaaccagcttggttcgacggttatcgtgctggcaacggtcgcagagggtaaggtttctctgattgcgggcgtctctaaggatgtgacggatcgtgttaaagcaggggaactgattggcatggtcgcccagcaggtgggtggcaaaggtggcggtcgtccggacatggcgcaagccggtggtacggatgcggcggcacttcccgcggcattagccagcgttgaaagctgggtaagcgcgaaactgtaa

SEQ ID NO: 116437 - DNA, 186 bp, Enterobacter cloacae
atgctgattctgactcgtcgagttggtgagaccctcatgattggggatgaggtcaccgtgacagttttaggggtaaagggtaaccaggtacgtattggtgttaacgctcctaaagaagtatctgtccaccgtgaagagatctaccagcgtatccaggctgaaaaatcccagcagtccagttactga

SEQ ID NO: 116438 - DNA, 567 bp, Enterobacter cloacae
atgtacgcacagtatgacggtttgatcttcgacatggacggcaccctcctggataccgaacccacgcatcgtcaggcctggaccgaagtcctgggccgttacggtatgcgtttcgatttacaggcgatgattgccctcaatggatcgcccacctggcgtatcgcacaggccgtgattgagctgaatcaggccgatctcgacccgcatcagctcgcgcgtgaaaaaaccgacgcggtaaaagccatactgttagacaccgtgcagcctttaccactcattgacgtcgtcaaggagtggcacgggcgtcgtcctatgtctgtcggtacgggcagcgagagcgcgattgctgaagcgctactcaaccaccttggcctgcgccactatttttctgccgtcgttgccgccgatcatgttaaacatcacaaacccgcaccggataccttcctgctctgtgcagaattaatgggtgttccacctgcaaaatgcgtggtgtttgaagatgctgattttggcattcaggccgcgcgtgatgccggaatggcggcggtggacgttcgcttactgtga

SEQ ID NO: 116439 - DNA, 429 bp, Enterobacter cloacae
gtgagtgacgcgctgtcactcgcttcattattcgccagcagttttttaagctccaccctcttaccggggaattcggaagtggtgctggtggcgatgctgttgtccggcgtaagtcagccctggttgctggtcttaatagcaacaatgggtaatagccttggagggctgactaacgttattcttggacgtttctttccgctacgcgaaaaatctcgctggcaggaaaaggcagtgggctggctaaaacgctatggcgctgccacgctgttattaagctggatgcctgtaataggcgatttactgtgtctgctggcgggatggatgcgcatttcctggggaccggtgctcttttttttgtgccttggcaaggcgttacgctatgttttactggcatgggtaacactacagggtatgacgtggtggcactaa

SEQ ID NO: 116440 - DNA, 1545 bp, Enterobacter cloacae
ttgatcccggacgtatcacaggcgctggcctggctggaaaatcaccctcaggcactgaaggggattcagcgtgggcttgagcgcgaaacgctgcgcgtaaatgcggatggtagcttagcgactacggaacacccgaaggcgttaggctcggcgctgacacataaatggatcacaaccgatttcgccgaagcgctgctggagttcatcacgccagtagacggtgatattgatcatatgctgacgatcatgcgcgacgtgcatcgcttcaccgcccgcaacctcggcgacgagcgtatgtggccgctcagcatgccgtgctatatcgagcaggggcaggatatcgagctggcgcagtacggcacctcgaatattggtcggctgaaaacgctgtatcgcgaaggactgaaaaatcgctacggcgcactgatgcagacgatctctggcgtgcactacaatttctctctgccgatggcgttctggcaggcgaagtgcggtgaaacggataaagaagcgatctccgcgggctatttccgcctgatccgcaactactaccgttttggctgggttattccgtatctgttcggcgcttcaccggccgtctgttcttcgttcctgcaagggaaaccgaccacgctgccgttcgagaagaccgaatgtggcatgtattacctgccgtatgcgacctccctgcgcctgagcgaccttggctataccaataaatcgcaaagtaatctcggaattacgtttaacgatctgcacgaatatgtggcaggcttgaagcgggcgataaaaaccccgtcggaagagtacgaaaaaatcggcctcgaaaaagacggtaagcgcctgcaaattaacactaacgtgttgcagattgaaaatgaactgtatgcgccgattcgtccgaagcgcgtgacgcgcagcggtgaaacgccgtcggatgcgctacagcgcggcgggatcgaatacattgaagtgcgctcgctggatatcaacccgttctcaccgattggcgttgacgaacagcaggttcgcttccttgacctgtttatggtctggtgcgtactggcggatgcgccggaaatgagttccgacgaactgctgtgtacccgtgccaactggaatcgcgtgattctggaagggcgcaagccgggtctgacgttaggtattggctgtgaaacggctcagttcccactgtctaaggtagggaaggatctgttccatgacctgaagcgcgtagcccagacgctggacagcgtgtacggcggcgaagcttaccagaaggtctgcgacgaactggttgaaagctttgataacccggaactgacattctcagcacgaattctgcgttctatgattgaacagggaattggtggcacagggcgttcactctcagcggagtaccgtgagatgctgatgcaggagccgttagagatcctgagcgaagcggattttgtggcagagcgtgatgcgtccgttgtgcgtcagaaagaggtcgaagcggcggatacggagtcgtttgaggcgtttctggcgaagcaggcctga

SEQ ID NO: 116441 - DNA, 516 bp, Enterobacter cloacae
atgccgttattagatagctttactgtcgaccatacccgtatggaagcaccagcagtccgcgtggcgaagaccatgaacacgccgcacggcgacacgatcaccgttttcgacctgcgcttctgcgtgcccaataaagaagtgatgccagagaaaggcattcacacgctggaacacctgttcgccggattcatgcgcgaccacctgaacggcaacggcgtggagatcatcgatatctctccgatgggctgccgcaccggtttctacatgagcctgattggtcagcctgatgagaaacgcgtcgcggatgcgtggaaagcggcgatggaagacgtgctgaaggtgaaagagcagaaccagatccctgagctgaacgtttaccagtgcggcacttaccagatgcactctctggaagaagctcaggagattgcccgtcatatcatcgaacgtgatgttcgtgtaaacagcaatgacgagctggccctgccaaaagaaaaacttcaggaactgcacatttag

SEQ ID NO: 116442 - DNA, 804 bp, Enterobacter cloacae
atgcccggtggcgcttcgctgaccgggcctacaatcctgatgacgacaaccaccaccttctcctttacccatcgcccgcttgtgccgttttcgcatgattatgctcatggcgacagcgagccgtggcatcagcacgactgcgcgcagctcctgcacagcctcaccggcgtcgtgcgggtcgataccgcatccggctgctgggtggtgccgcccggtcgcggcgtctggctacctgcgggtacgcagcacgccttgcgcatcaccggcaacgttgctgcccgcacgctgtttatcgacccgctggcgcgcgccgatcttccggcgacctgccagatcgtgcagatctcgcccctgctgcgcgagctgatcctgacctcccttacgcttcctgaatcttacgcacccggaagccgcgatgaacgtgtttatgagctgatcctcgatgaaattcgcctcatgccggtactgccgtttcacctgcccgagccggaaagcgaagcgctgcgccacctctgccagcagattcgaatggccccgggagaaagctggagcagcgcccaggccgcaggtattgtggggatgagcgaacgcacgctgaaccgtcattttcagcagcagacaggcctgagctacggcgagtgggtgagaagggcgcgactgctggaagccttggtgcggctggcgcagggccagccagtattacgcgtggcgctggatctggggtatggtagccacagcgcctttacggcaatgtttcgtcgggtgatgggtctctcacccagcgattacttcaggaatgactga

SEQ ID NO: 116443 - DNA, 1656 bp, Enterobacter cloacae
atgctgaacacacccgccgaaaaataccagccttaccccaccctttcgttgcccgaccgccgctggccggagcagattatcacccgcgccccgcgctggctctcgaccgacttacgcgacggtaaccaggcgctggccgagccgatggacagcgcgcgcaagctgcaattctgggatctgctgctgagctgcgggtttaaagaaatcgaagtcgccttcccgtccgcctcgcagacggacttcaattttgtgcgtcagctgattgaggagaaccgcatcccggatgacgtcaccattcaggtgttaacgcaggcgcgggacgatcttatccgtcgcactttcgactccctgcgcggcgcgaagcaggccaccgttcacctgtataacgccaccgccccgctgttccgccgtctggtattcggcatggagaaagcgcaaatcgtcgaactggcgacgcgcgcgacgcgcctgattcgtcagctgtgtgaagagaaccctgacacccgctggcagtacgagtactccccggaaaccttctgctttaccgaaccggagtttgcgctggagatttgtgaagccgtagcggagatctggcagccgtgcgcggcgcgtccgatgatcctcaacctccccgctaccgtcgaagtgagcacgccgaacgtctatgccgaccagatcgagtatttctgccgccacttcagccgccgcagtgacgtctgtatcagcgtgcacccgcataacgatcgcggtaccggcgtcgccagcgcagagctggccgtcatggccggggctgaccgcgtggagggctgcctgtttggtaacggtgagcgcacgggcaacgtctgcctggtgacgctggcgatgaacctctacagccagggcattagcccgaatctggatttcagtgatatgaatcgggtggttgaaacggtagaaacctgcaaccagctgcccgtccatccgcgccatccgtgggcgggtcgtctggcttacaccgccttctccggctcgcaccaggatgccatcaagaaaggtttcgatgcccgtaagcctggcgaacgctgggagatgccctatctgcccgtcgacccgcaggatattggctgtacctatgaagcggtgatccgcgtgaacagccagtcaggaaaaagcggaagcgcctggcttattgagcaaaaccacggcctgaaattgcctcgcgccctgcaacaggattttagccagcacgtgcagcaggaaacggataaccatggaaaagagatgacgcagaatgcgctctggcagctgttccgcgcccgctacggcctggtggcgagcccgccattagcgctgcaatcgtaccgcagcgacagccagcaggacggccagctgcggctgacggcaagcgtcgccacgcaagggggcacccgccagctggaaggccagggaaacggtttgctctccgccgccgctcacggcttaagccgctggatcaacgcaccgtttgtgatcaaggattatcacgaacatacgttaggcgaacgcagcgacagccgctcggtggcctatatccgctgcctgttccaggatgggaccagccgctggggcgtgggcatcgacagcgacgtggcacgcgcgtcgattcaggcgctttttaacgcggtcagtcattcctga

SEQ ID NO: 116444 - DNA, 1548 bp, Enterobacter cloacae
atgcaacagcaaaagccgcaaaaaccgctggagggggcgcagctggtcattatgaccattgcgctgtcgctggcgacattcatgcaggtgctggactccaccatcgcaaacgtggcgatccctacgatcgccgggaaccttggctcatcgctgagccaggggacctgggtcattacctcgttcggggtggcgaacgccatctccattcccatcaccggctggctggcgaagcgcgtcggtgaagtgaagctgttcctctggtcgacgatcctgttcgtgctggcctcctgggcctgcggcatgtccagcagcctgacgatgctgattttcttccgcgtcatccaggggattgtcgccgggccgttgattccgctgtcgcagagtttgctgctgaacaactatccgcccgccaagcgctccatcgcgctcgcgctgtggtcgatgacggtgatcgtcgccccaatttgcgggccaatcctcggcggctatatcagcgataactatcactggggctggatcttcttcatcaacgtgcccatcggtgcgctggtggtgctgatgacgctacagtctctgcgtggtcgcgaaacgcggaccgaacagcggcggatcgacggcatcgggctggcactgctggttgtcggcatcggcagcctgcaaatcatgctcgaccgcggcaaagagctggactggtttgcctctacggaaattattgtgctgacggtggtcgccgtggtggccatcagcttcctgattgtctgggagctgacggacgataatccgatagtcgacctctcgctgtttaaatcgcgaaacttcaccatcggttgcctctgtatcagcctcgcctatatgctctacttcggcgcgattgttctgctgccgcagctgttgcaggaggtgtacggctataccgcaacctgggcggggctggcctccgcgccggtggggttaattccggttctgctgtcgccgattattggccgtttcgcccataagctcgacatgcgcaggctggtgacgttcagcttcatcatgtacgccgtgtgcttctactggcgcgcgtatacgtttgaaccgggaatggactttggcgcctccgcgtggccgcagtttattcagggcttcgccgtagcgtgcttctttatgccgctgaccaccattacgctttccggcttaccgcctgagcggatggcggcggcatcgagcctgtcgaacttcacccgtacgctggcgggctccatcgggacttcgatcactaccacgctgtggaccaaccgggaatcgatgcaccatgctcaactcaccgaagcggtgaacccgttcaaccctaacgctcagcagatgtatagccagcttgaggggatggggatgacggagcagcaggcgtccggctggcttgcccagcagatcaccaaccaggggctgattatctcggcaaacgagattttctggatatcggcggggatcttcatcgtcctgctggggctggtgtggtttgccaaaccaccgtttggggccggtagcgggggcggtggggcgcactag

SEQ ID NO: 116445 - DNA, 1173 bp, Enterobacter cloacae
atgagcgcaaatgcggagaacaccctcccgcagcaaccggccaacaaaaagggcaaacgtaagagcgcccttattctgctgaccttgctctttattattattgccgtggcatatgggatctattggtttttagtcttgcgtcatgttgaagagacagacgatgcatacgtggcagggaatcaggttcaaatcatggcccaggtgtcaggcagcgtgacgaaagtctgggctgataacaccgactttgtgaaaaaaggcgatgtgctggtcacgctcgacccgaccgacgcccaacaggcgtttgaaaaagcacagacggcgctggcctccagcgttcgccagacccgccagctgatgatcaacagcaagcagcttcaggccaatatcgacgtgcagaaaacggccctggctcaggcgcagagcgacctcaatcgtcgtgttcctctcggcaccgccaacctgattggccgtgaagagttgcagcacgcccgcgacgcggtggccagcgcacaggcgcaactggacgtggcgatccaacagtacaacgctaatcaggcgatggtgctgggtacctctctggaaaaccagccagcggtgaaacaggcggcgaccgaagtgcgtaacgcatggcttgccctgcaacgtaccaaaatcgtcagcccgatgaccggctacgtttcccgtcgttccgtacagccaggggcgcagattagcaccaccacgccgctgatggcggtcgttccggcaaacaatctgtgggtcgatgcgaacttcaaagagacccagctggcgcatatgcgtatcggccagaccgcgaccgtggtcagcgatatttacggcgatgacgtcaagtacaccggaaaagtggtcggtctggacatggggaccggcagcgcgttcagcctgctgcctgcacagaacgccaccggcaactggatcaaagtggtacagcgcttgcctgtgcgtatcgagctggatcctaagcagctggcagaccatccgctacgaattggcctttccacgctggtgacggtcgataccgccaaccgcgacggtcagatcctcgcaagccaggtgcgcagtacgccagcttatgaaagtaacgcccgtgaaattagcctcgatccggtcaataagctgatcgatgacatcgtgaaggcaaacgccggttaa

SEQ ID NO: 116446 - DNA, 531 bp, Enterobacter cloacae
atggatagttcgtttacgcccattgaacaaatgcttaagttccgcgccagtcgtcatgaggacttcccgtatcaggaaatcctgctgacccgcctgtgcatgcacatgcagggtaagctgctggaaaatcgtaacaagatgctgaaagcgcaggggattaacgagacgttgtttatggcgttgattacgctggagtctcaggaaaatcacagcattcagccgtcggaactgagctgtgcgctggggtcatcccgtaccaatgcgacccgtatcgcggatgaactggaaaagcgcggctggattgaacgccgtgaaagcgataacgatcgccgctgcctgcatctgcaactgaccgagaaaggtcacgaattcttgcgcgaagtgctgccaccgcagcacaactgcctgcaccagctctggtctgccctcagcaccgccgagcgcgaccagcttgagcacattactcgcaagctgctcacccgtctggaccagatggatgaagacggcgtcatccttgaggcgctgcgctaa

SEQ ID NO: 116447 - DNA, 1185 bp, Enterobacter cloacae
atgacaaaaacaactcaagggcttagccccgcactcatccttttaatgtccgtggcaacgggtctggccgtcgccagcaactattacgcacaaccactgctcgacaccatcgcacgcgccttcgatctttcagccagctccgccgggtttattgtcaccgccgcgcagctcggctatgcggccgggctgctgttcctggtaccattaggcgatatgtttgagcgccggatgcttatcgtctccatgacactgctggcggcgggcgggatgttgatcaccgccagcagccagtcgttaacgatgatgattatcggcaccgcgctgacggggctgttctcggtggtggcgcaaattctggttcccctcgccgcgacgctggcttccccggaaaaacgcggcaaagtggtcggcactatcatgagcggcctgctgctgggcatcctgctcgcgcgaaccgttgccgggctgctggcgagcctcggcggctggcgcaccgtttactgggtggcgagcgtgctgatggttatcatggcgctggccctgtggcgcggcctgccaaaggtgaagcaggaaaatcacctgaactatccgcagctcctcgcctccgttttcagcctcttcacccgggataaactcctgcgcacgcgcgccgttctggggtgtcttaccttcgctaacttcagcatcttatggacgtcgatggcgtttttgctcgccgcaccgccgtttaactactcagaaggcgtgattggccttttcgggctggcaggcgcggctggcgcactgggcgcgcgcccggcgggtgggctggccgacaaaggcaaatctcatatgaccacctccgcagggctggttttactcctgctctcctgggcggccatctggtacggacacgtctccgtgctggcgctgattgtcggtattctggtgctcgacctcaccgtgcagggtgtacatatcaccaaccagaccgtgatttaccgcgtgaagccggatgcccgtaaccgtctgacggccgggtacatgaccagctactttatcggcggcgcggcgggctcgctaatctcagcctccgcctggcagcacgcgggctggacgggcgtatgcgccatcggcgccatcgtcgcggcgataaatctgctggtatggtggcgcggctatcaccgtcaggaagcaattcactaa

SEQ ID NO: 116448 - DNA, 996 bp, Enterobacter cloacae
atgcgacataacgtactttttgccacagcgtttgcgacccttgtctccaccagcgcagttgccgctgacctgccgggcaaaggcattaccgtgcagccggtgcagagcaccatttcggaagagtccttccagacccagattgtcagccgtgcgctggagaaactgggctatacggtgaataccgccagcgaagtggattacaacgtgggctatacctccattgcctccggtgacgccacctttaccgccgtgaactggcagccgctgcacgacgacatgtatgccgccgcaggcggtgacaagaaattctaccgcgaaggcacctttgtgaccggcgctgcgcagggatatctgatcgacaagaaaaccgccgataagtatcacatcaccaatattgaacagctgaaagatccgaagattgcaaaactgtttgataccaacggtgacggtaaagccgacatgatgggctgttcgccgggctggggctgtgaagcggtgattaaccaccagaacaaagccttcgatctggcgaagaccgtcgacgtgagccacggcaattactctgcgatgatggccgacaccatcgcccgctttaaagaaggcaagccggtgatctactacacctggacgccgtactgggtgagcgacgtgctgaagccgggcaaagacgtggtgtggttgcaggtgcccttctcctccctgccaggcgagcagaaagatatcgataccaaactgccaaacggcatgaactatggcttcccggtgaacaccatgcatattgtggcgaacaaagcctgggccgagaaaaacccggcggcggcgaagctgttctcggtgatgaaactgccgctggcagacattaacgcccagaacgcgatgatgcacgcgggtaaatcatccgaagctgatatcaaaggccacgtggatggctggatcaaagcccaccagcagcagttcgatggctgggtgaaagaggcgctagaggcgcagaagtaa

SEQ ID NO: 116449 - DNA, 1065 bp, Enterobacter cloacae
atggctgatcaatcaaacccatggggcaccactgaagcagcggacagcgcggcgcaatctgccgatgcgtgggggtcgacgcctgcgcctgccgatggcggcggcgcggcagactggctcaacagcgcaccagcgcctgccccagagcatttcaatattatggatccgttccacaagacgctgatcccgctggatagctgggtaacggaggggatcgactgggtcgttacccacttccgtccggtgttccaggggatccgcatcccggtggattacatcctgaacggcttccagcagctgatgctgggcatgcccgcgccggtggcgattatcctgttctcgctgatcgcatggcagttcggcagcgcgggtatggggatcgccacgctgatctccctgattgccatcggcgcgattggcgcgtggtctcaggcgatgatcaccctggcgctggtgctgaccgccctgctgttctgcgtggtgatcggcctgccgatggggatctggctggcgcgcagcccccgggccgcgaagattatccgcccgctgctggatgcgatgcagaccacgccagcgttcgtttacctggtgcctatcgtgatgctgttcggcatcggtaacgtaccgggggtggtcgtgaccattatcttcgccctgccaccgattattcgcctgaccattctgggcattaaccaggtgcctgcggatctgatagaggcatcgcgctcgttcggcgccagcccgcgtcagatgctgtttaaggttcagcttccgctggcgatgccgaccattatggcaggtgttaaccagacgctgatgctggcgctgtcgatggtggtgatcgcctcgatgattgccgttggcgggttaggtcagatggtactgcgcggcattggccgtctcgatatggggctggcgaccgtcggcggcgtcgggattgtgatcctcgccatcattcttgaccgcctgacccaggctgtcggtcgtgattcacgtagtcgcggcaaccgtcgctggtacaccaccggccctgtcgggttactcacccgcccatttacaaaataa

SEQ ID NO: 116450 - DNA, 1203 bp, Enterobacter cloacae
atggcaattaaattagaagtgaaaaatctttataaagtatttggcgagcacccgcagcgtgcattcaaatatattgagaaaggcctttcgaaagagcaaattctggaaaaaaccgggctatcgcttggcgtcaaagacgccagtctggccattgaagaaggcgagatttttgtcatcatgggattatccggttcgggtaaatccactatggttcgccttctcaatcgcctgattgaacccacccgcggacaggtgctgatagacggcgtggatatcgccagaatatcagacgcagatctccgcgaggtgcgcagaaagaaaattgcgatggtgtttcagtcatttgcactgatgccgcacatgacggtactcgataataccgcctttggcatggagttagccggcacgcccgctcaggaacgtcaggaaaaagcccttgatgcactgcgtcaggtcgggctggaaaattatgctcatgcgtatccggatgaactctccggcggtatgcgtcagcgtgtgggattagcgcgtgcattagcgattaatccggacattttattaatggacgaagccttctcggcgctcgatcccttaattcgcaccgagatgcaggatgagctggtaaaattacaggccaaacatcagcgcaccattgtttttatttctcacgatctggatgaagccatgcgtattggcgaccgtatcgccattatgcaaaatggtgaagtggtgcaggtcggcacaccggatgaaattctcaataatccggcgaatgattatgtgcgcaccttcttccgcggcgtggatattagccacgtattcagtgcgaaagatattgcccgtcgaacaccaaacggcattattcgtaaaacgccaggttttggcccgcgctccgcgctgaagctgttgcaggacgaagaccgtgaatacggttatctggttgaacgcggcaataaatttgtcggcgtggtctccatcgactctctgaaaaccgccctgagcgaaaaccagggaatcgatgcggcgttgattgacgctccgcttgccgtggacgccgaaacgccgctcagcgagttgctctctcacgtgggtcaggcgccgtgcgccgttccggtcgtcggtgaagaacaacagtacgttggcatcatctcaaaacggatgctgctacaggctttagatcgcgaggggacaaacaatggctga

SEQ ID NO: 116451 - DNA, 960 bp, Enterobacter cloacae
atgaaactgtcacgcgtaagtgccgttaactggaacaaaattcaggatgataaagacctggaggtctggaaccgcctgaccagcaacttctggctgccggaaaaggtcccgctctccaacgatattccggcctggcaaaccctgagccatgccgaacagcagctgacaatccgcgtctttaccggcctgacgctgctggacaccattcagaataccgtgggtgcgcccgcgctgatgagtgatgcgctgaccccgcacgaagaggcggtaatgtcgaacatcagctttatggaggcggtccatgcccgctcctacagctcgattttctccaccctgtgccagaccagagacgtggacgcggcctacgcctggagtgaagagagcgcgtcattgcagcgcaaggcagatctggtgctggaatattaccgggccgacgagccgctgaagaagaagatcgccagcgtgttcctggaatctttcctcttctattccggcttctggctgcctatgtactggtcgagccggggcaagctcaccaacaccgccgacttgattcgcctcatcatccgcgatgaagcggtacacgggtattacatcggctataagtatcagaaagggctggagaaagtcagcgcggaaaaacgcgaggaactcaaaggttttgccctcgatttactgatggatctgtatgacaacgagctgagctataccgaagagctgtacgccggaacgggctgggaagaggacgtaaaagccttcctctgctacaacgccaacaaggcgctgatgaacctgggctacgaagcgttattcccaccagacatggcggaggtgaacccggcgatcctcgcggcgctgtcgcccaacgccgatgaaaaccacgacttcttttccgggtccggctcgtcgtacgtgatgggtaaagcggtggaaacgcaagacgaggactgggatttttaa

SEQ ID NO: 116452 - DNA, 2145 bp, Enterobacter cloacae
ttggcaacgacaaccgcagaacgcgtgattcaggcgacgccggattaccacgcattaaacgccatgctaaacctctatgaccgcgaggggcgcattcagtttggcaaagatcatgaggcggtggacgccttttttgccgctcatgtacgcccgaacagcgtcgtctttggcagccagcaggaacgtctcgactggctggtaaaagagggttattacgaagagcgtgtcctgacacgctacgaccgcgccttcgtggtggcattgtttgaacgggcgcacgccagcggttttcgcttccagacgtttctcggcgcgtggaagtattacaccagctacaccctgaaaacctttgacggcaaacgctatttagaaagctttgaagatcgggtggtgatggtggcgctgacgctggcgcagggcgatgaagcgctggccgaaagactcacggaggagatcctctccggtcgcttccagcccgccacgccaacgttccttaactgtgggaaagcccagcgcggcgaactggtctcctgcttcctgctgcgtattgaagacaatatggagtcgattggccgtgcggtgaattcggcgctacagctttcgaaacgcggcggcggcgtggcgtttctgctttcgaacctgcgggaagcgggcgcgccgattaagcgcatcgaaaaccagtcttccggcgtcatcccggtgatgaagatgctggaagatgccttctcatacgccaaccagcttggcgcacgtcagggcgcgggtgcggtttatctgcacgcgcaccacccggacattctgcgttttctggataccaaacgtgaaaacgccgacgaaaagatccgcatcaaaaccctgtcgcttggcgtggtgatcccggatatcacgtttaagctggctaaagagaatgccgacatggcgctcttctcaccgtatgacgttgagcggatttacggcaaagcctttggcgacgtggcgataagcgagctgtacgacgagctggtggccgacgatcgcattcgcaaaaaaaccatcaacgcccgcgatttcttccagacgctggctgaaattcagtttgagtccggctatccgtacatcatgtacgaggacacggtaaaccgcgctaacccgattgccgggcgcatcaacatgagcaatctgtgctcggagattttgcaggtcaacagcgcgtccacctacgacgaaaacctcgactacgcggacgtgggcaaggatatctcctgtaacctcgggtcgctaaatattgcccataccatggattcacccgattttggccgcacggtagagaccgccattcgcgggctgacggcggtatcggacatgagccacatccgcagcgtaccgtccattgaggcgggcaacgccgcgtcgcatgccatcggccttgggcagatgaacctgcacggctatctggcgcgggagggcatcgcctacggtagcccggaagggctggatttcaccaacctttatttctacaccatcacctggcatgcgctgcatacctcgatgatgctggcgcgcgaacgccaccagcggttcgcaggctttgagcagtcccgctacgccagcggagagtatttcagccagtatctggaaggcgactggcagccgaaaaccgaaaaagtacgcgcgctgtttgcccgcgctggcatcaccctgccgacgcgtgagatgtggcaacagctgcgtgaagaggtgatgcgctacggcatttataaccagaaccttcaggcggtgccgccaaccggctccatttcctatatcaatcacgccacgtcgagcatccaccccatcgtgtcgaagattgaaatccgtaaggaaggcaaaaccgggcgtgtctactaccctgccccgtttatgaccaacgagaatctggcgctgtaccaggacgcctatgagattggcccggaaaagatcattgatacctacgccgaggcgactaaacatgtggaccaggggctgtcgctgacgctcttcttcccggacaccgccaccacgcgggatatcaacaaagcgcagatctacgcctggaagaaaggcatcaaaacgctgtactacattcgcctgcgccagctcgcgctggaaggcaccgaaattgaaggctgcgtgtcctgcgcgctgtaa

SEQ ID NO: 116453 - DNA, 411 bp, Enterobacter cloacae
atgagcacgctggtctacttttccagcagctcggaaaacacgcttcggtttatggagcgtctcgggctgcccgcgatacgcattccgctgaacgagcgggagcgtattcaggtagacgaaccctacattctggtggtgcccagctatggaggtggcggcaccgcaggggctgtgcctcgtcaggtgatccgctttctgaacgatccccataaccggcagctgattcgcggcgtgatcgccgcaggcaatcgcaacttcggcgaggcctttgcccgcgccggggatgtcatctctcaaaaatgcggcgtgccgtatctctatcgttttgaactgatggggacacagcaggacgtagagaacgtgcgtaaaggagtgaacgaattttggcaacgacaaccgcagaacgcgtga

SEQ ID NO: 116454 - DNA, 240 bp, Enterobacter cloacae
atgagcattattatttacactcgtaacgattgtgttcagtgccacgccacgaaacgggcgatggagagccgcggcgtggcatttgagatggtcaatattgatcaggtgcccgacgcggcagacaccctgcgggcacagggtttccgtcagcttccggttgtcgttgccggcgacaccagctggtctggcttccgtccggacatgatcaaccgccttgccgctcagggcgtcagtgcatga

SEQ ID NO: 116455 - DNA, 327 bp, Enterobacter cloacae
atgtttaacagaccgaaccgaaacgatattaatgacgacacacaggatattcgtaacgatgtcagccaattagcggacacgctggaagccgtattgaaatcctggggctctgacgcgaaggacgaagcagatgccgcgaaacgtaaggctcagtctctgctgcgtgaaacgcgggcaaggatgaatggccgctcacgtaccactcaggcggcctgcgacatggccagctgcgccaccaccttcgtacgtgaaaaaccactttgtacgctgggaacggtcgcggcggtcgggatttttgtcggcgccctgcttagcttgcgtaagtaa

SEQ ID NO: 116456 - DNA, 345 bp, Enterobacter cloacae
atgtatttacgacccgatgaggtggcgcgcgttcttgaaaaagaagggttcaccatggatgaggtaacatcaaaagcgtacggatatcgccgtggtgagaattatgtttacgtcaaccgtgaagcaagaatggggcgtactgctctcattattcacccgacactcaaagacagaagcctgtcatttgctgagcccgcctcggatattaaaacctgcgatcattatcagcaatttccgctctatttaggcggcgagacgcatgaacattatggtattccgcacggtttcagctcgcgtatggcgctggagcggttcctgaaagggctgtttggcgacgtacaataa

SEQ ID NO: 116457 - DNA, 450 bp, Enterobacter cloacae
atgttctcaccgcagtctcgcctgcgccatgcggtagcggatacgttcgcgatggtcgtttactgttccgtcgtgaatatgctgattgaaattttcctgtcgggaatgtcctttgagcaatccctctcgtcgcgcctggtggccattccggtgaatatcatgattgcctggccgtacggcctgtatcgcgatgcagtgatgcgtttagcccggcgtattagcccggcgggttgggtaaaaaacctggcggacgtgctggcttacgtaacgttccagtccccggtgtatgtggttattttgctgacggtgggcgcagactggcatcaaatcgccgctgcggtaagttcaaatatcgtggtatccatgctgatgggtgcggtgtacggttactttcttgactactgccgccgcctgtttaaagtcagcccttatagccaggcaaaagcgtaa

SEQ ID NO: 116458 - DNA, 405 bp, Enterobacter cloacae
atggctttaacgttacagaatcttaataatattcgtaccctccgggcgctggcacgtgaattatccatggatgttctggaagaagtgctggaaaaattccggattgtcactgaagaaaaacgcagcgagcaggctgaattagagcgtcaacgcgctgaacagcaggataaaattaatgctctgctggaactgatgaaagctgacggtatttctccgagcgatctgttaggcagtgatctggcgcaggcgggtcagccgacgaaaaaacgtaaagcgcgtgcggcgaaatatcgttttactgacgcgaacggtgaagaaaaaacctggaccggccaggggcgtacgccaaagccaattgcaaccgcactggcaaacggtaaatcgctggacgatttcctgatctga

SEQ ID NO: 116459 - DNA, 180 bp, Enterobacter cloacae
atgttttctgtcggtgattatgtccaaccgcgtcagggcggtccgaaactgaaagtgctcgaagtgaatggtgaaaacattgtggctgtgcaggccagcaatgcgcagggcgagaaatatcacctgaaagcggcggacgtggttctgtactccgaagacggtgactttggcgtctgctaa

SEQ ID NO: 116460 - DNA, 159 bp, Enterobacter cloacae
atgggtttttggcgcgttgtttttacgattattctcccgccgctgggcgtgctgcttggcaaggggctgggctgggcgtttattctgaatatccttctgaccatcctgggctacttccccggtcttatccacgcgttttgggttcagacgaagagctag

SEQ ID NO: 116461 - DNA, 930 bp, Enterobacter cloacae
atgaattccatctttaccgaagagaatttgctggccttcaccaccgcggcacgttttggcagttttagcaaagcggctgccgagctgggcgtgaccacctccgccatcagttacaccatcaaacgcatggagaccggactggacgtggtgctgtttgtacgtaacacgcgcagcattgagctgaccgaatccggtttttatttttatcgtaaagcgaccgacctgctgaatgactttcatgccatcaagcgcgggattgataccatttctcagggcattgagacgcgggtgcgcatctgcataaaccagcttttgtatacgccacgccataccgcgcgtttgctccaggtgctgaaaaaacagtttcccacctgccagatcacggtgacgaccgaggtgtataacggcgtctgggattccatcattaataatcaggccaatatcgccattggcgcgccggatacgctgctggacggcggcggcattgattacaccgagataggggcgatccgctgggtatttgccatcgcgcccacgcatccgctggcgttcgccccggagcccatttccgaaagtcagctgcgtctgtatcccaatatcatggtcgaggacaccgcgcataccatcaacaagaaggtgggctggctgcttcacggtcaggaggcgattctggtgccggacttcaacacgaaatgccagtgtcagatcctgggggaaggtattggctttttaccggaatatatgacgcgtgaggcggtggaggacgggctgctggtaacgcggcggatcaataatccacgtcaggattcgcgcatgctgctcgccacgcagcatgcggcgaccggtcaggtcacgcgctggatcaaacagcagtttggccccgaaggcgtgctgacccggatctacagtgacttactgtggcgtacctag

SEQ ID NO: 116462 - DNA, 606 bp, Enterobacter cloacae
atgtctgcaactgcactggttacagaatttctgctggcggcagaagaaggcaatatcgacgcgctaaaagcctgcctggagaaaggcgtggatattaacgcgaccaaccgccagaaaagaaccgccattattattgccagcctgaaaaagcattacgcctgtgtggagtttttaattgccgccggggcggatattgataaacaggaccagacctgttttaaccccttcctgatcggctgcctgaccaatgatttaaccctgctgcgcattgtccttccggcaaatccggatctcgatcgtctgacgcgctttggcggcgtgggcattacccctgccagtgaaaaagggcacgttgaaatcgtgcgtgagctgctggaaaaaaccgacatcaacgtcaaccacaccaattttgtcggctggacgccgctgctggaggccatcgtattaaacgacggcggcgcaaagcagcaggaaattgtgaagctgctgctcgatcacggcgcgaacccgcacatgaccgataaatacggcaaaaccccgctcgagctggcgcgggaaaaaggcttcaacgcgatcgcagacctgctgctggcggcaggcgcatag

SEQ ID NO: 116463 - DNA, 1542 bp, Enterobacter cloacae
atgccaaccaaaatcgtcataaaaaagaatacgtatttcgattcggtttccttaatgtcggtttccaccaaagccaataaattgccgggcgtcgagcaggcgtttgtggcgatggcgacggaaatgaacaaaggggtattaaaaaacctcgggctattaacgccggaattagcggacgcgaaaaacggcgacctgatgatcgttattaaaggcgacgcggcgaatgaggaaaccctggccgccattgaagcgttattcacgcgtaaagagcgcactggctcccatgaagcacgctacgcgacgattgccagcgccaaaacccatcgtccggacagcaaccttgcggtgatttccgtcaacggcaccttcgccgcgcgggaagcgcgccaggcgctggaaaacgatcttaacgtgatgctgttctccgataacgtatcgctcgacgacgagctggcgctgaagcagctggcgcatgaaaagggtctgctgatgatggggccagactgcggcaccgccattatcaacggcgcggggctgtgcttcgccaacgcggtgcgtcgcgggcagattggcatcgttggcgcctccggcaccggcagccaggagctgagcgtgcgcattcacgagttcggcggcggcgtgtcgcagctgattggcaccggcggacgcgatctcagcgagaagatcggcggcctgatgatgctcgatgctatcgacatgctggaggcggacgacgcgacccgggtgatagcgctcatctccaaaccgcctgcacccgcggtggctgagaaagtactggcccgggcacgcgcctgccgcaagcctgtggttgtgtgcttcctgggccgcaacgaaccgccagccgatgaagacggtttgcagtttgctcgtggcaccaaagaggcggccctgaaagcggtgctgcttaccggcattaaaaaagacgacctggatttacatccgctcaactggccgctgatcgaagaggtacgcgcccgcctgacgccgcagcagaagtacattcgcggcctgttctgcggcggcaccctgtgcgacgaagcgatgtttgccgtgctggagaaatttgacaatgtttacagcaacatccagccggatccggccaggcgtctgaaagacatcagcgtcagccaggcccacaccttccttgatttcggtgacgacgacttcaccaacggcaagccacacccgatgatcgacccgaccaaccgcatcagccgcctgctacaggaggcgcgcgatccgcaggtgggggtgatcgtgatggatttcgtgcttggctttggcgcgcatgacgatccggttggggtgatgatcgaggcgatcaaagaggcacaggcgatcgcgaaagccgacaaccgtccgctggaaattctcggctacgtgctcggcaccgatcaggatccgcagtcgttggcgcagcagtgccagctgctgactgatgcaggcgtcatctgggccagcagcagcaccaataccggattactggcacgcgaatttgtctgcaaaggggagagagcataa

SEQ ID NO: 116464 - DNA, 1416 bp, Enterobacter cloacae
atgacgatcttattcaaccagccgctgaacgtgattaacgtcgggattgcgatgttcagcgacgacctcaaaaaacagcacgttcccgtgacccagctcgactggacgccgccggggcagggcaatatgcaggtggtggacgcgctggatcggctggcggaaaaaccgctggcggagaaaattgccgccgcgaacaaaattgcccttgagcggattattcagtcccatccggtgctggtgggctatgaccaggcgatcaacgtggtgccgggcatgacccgcaccaccattctgcacgccggtccgcccgtctcctgggagaacatgtgcggggcaatgaaaggcgcggttaccggcgcgctggtgtttgaagggctggcgaaagatctggacgatgcggcaaggatcgccgcctccggagatattacgttctcgccttgccacgagcacgactgcgtgggctcgatggcgggcgtcacctccgcgtcgatgtttatgcacatcgttgagaacaaaacctacggcaaccgcgccttcaccaacctcagcgagcagatggcgaagatcctgcgcatgggggctaacgaccagagcgtgatcgagcgcctgaactggatgcgcgacgtgctcggcccgatgctgcgcgacgcgatgaagattatcggcgaaatcgacctgcgcctgatgctggcccaggcgctgcacatgggcgacgagtgccacaaccgcaacaacgcgggcaccacgctgcttattcaggcgctgacgccggggctgatccaggcgggctatccggtggcgcagcagcgtgaagtgttcgagtttgtcgccagcagcgactacttctccggtccgacgtggatggcgatgtgtaaggccgcgctggatgccgcccacggcattgagtacagcaccgtcgtcaccaccatggcgcgcaacggctacgagttcggcctgcgcgtttccggcctgccggggcagtggttcaccggcccggcgcagcaggtgatcggcccgatgttcgcgggctataagccggaagactccgggctggatatcggcgacagcgcgattaccgaaacctacggcatcggcggctttgcaatggcgacggccccggccatcgttgcgctggtgggcggcacggtggaggaagccatcgatttttctcgccagatgcgcgaaatcaccctcggcgaaaacccgaacgtcaccattccgctgctgtcttttatgggcatcccgaccgccatcgacatcacgaaggtcgcggacagcggcattctgccggtcattaataccgccattgcccacaaggacgccgggatcggcatgattggggcgggcatcgttcacccgccgtttagctgttttgaaaaggcgctgttaaccttccgcgatcgctacgttctataa

SEQ ID NO: 116465 - DNA, 1581 bp, Enterobacter cloacae
atgaaaaacatgaaactggagtggaaaagaggtgactgggcagcttatttcgggttgatgaccaacaacctgaccaatttgctgaccatgatggggctgctcatttttgtcgtcggcatcccgaaggagattgtttatggacgcatcgcgccagccttcgggctggcggtgctggtggcgagtctttgctatacgtggtttggcctgcaaatggcgcgcgccaccggacgaacggacgtcaccgcgctgccgtccggcccaagcgcgccgtcgatttttaccgtgaccttcctggtcttaatgccggtttaccagcaaaccggcgatgcggatttcgcgattcagattggcctggtgtggtgctttgtggaagcgatgatcctcgcgggcggttccttcctgggggaaaccatccgcaagatgatcccgcgtaccgtgctgctgtcgtgcctgtccggtcttggcctgctgctgctggcgatgaacccgatgttgcaggcgttcgaagcgccgaccgtgtcgtttatcgtcctgctgctgatcttcattaactggttcggtaaaaagccgatttttgccaaaatcccgaccggcctgctgctgttaattgccggtactctgcttgcgtggatctccggcctgcaaagcccggatgccattaaagcgtccatgtcatcattcggctttaacccgccagaagtgcacgtggacagcttcatgcaaggactgccgcacgcgctgccgtatctggcgtccgccgtaccgctggggctggcgaactacatctttgacctggagaacatcgaaagcgcccacgcggcgggggatgaatacccgacccgcaaggtaatgctggcgaacggtctggcctcgatgctcggctgcctgatgggcaatccgttcccggtcacggtctacgtcggccatcctggctggaaagcgatgggcgccagcatcggctacaccctggcgtccggcgtgaccatgttcatcgtgccgctgttcgggctgggggcctttatgctcgccatcataccgatgaccgccatcgtgccgattctggtgtttatcggcgtcgtcaccgccaaccaggtggtgagggaaaccccgaaagtggaggtacccgtcatcttcatctgcctgttcccgtggatcgccaactgggcgctgaccatgatgaacagcgtgatgagcgcggcggggaccagcgcggcgaaaatcggcaccgacgtgctgcacagcaaggggatctactacgaaggcctgatgcatctcggcaacggcgcgccgctcgccagcatgctctggggctgtatcgccatcttcgccatcctcaacaaaccgctgcgtggagccgtcgcggcggccggtggagcgctgctggcgctgtttggggtgatccacgcgccggtggtgggctttgccgagggcagttccctgatgttcgtcacggcctacctgatgatgggcgggatgtttgtggtgaagcatgtgctggatacctctgttaatccccctctccctgtgggagagggccgggatgagggcaccagaacgcaccttctaaaggaaacaaaatga

SEQ ID NO: 116466 - DNA, 957 bp, Enterobacter cloacae
atgaaagagcttatggtcgtcgccatcggcggcaacagcattatcaaagacaacgccagccagtcgattgagcatcaggcgcaggcggtcaaagcggtggctgagtcggtgctcgaaatgctggcttcggactatgacatcgtgctcacccacggcaatggcccgcaggtggggctggatctgcgccgcgccgaaatcgcccacgagcgggaaggactgccgctgaccccgctggcaaactgcgtggcggatacccagggcgggatcggctacctgatccagcaggcgctcaacaaccgcctggcggcgcgcggggaacaaaaagcggtcacggtcgtcacccaggtggaggtggataaaaacgatcctggttttacgcacccgacgaaacccatcggcgcgtttttcagcgaggcgcagcgcgacgaactgcaacttgcgcacccggactggcattttgttgaggattcaggccggggctatcgccgcgtggtggcttcaccgcagccgcggcgcatcgttgagtcggatgccatcaaggcgctgacgcagaaaggatttgtggtgatcggcgcgggcggcggaggcattcctgtggtgcgcagtgaacagggcgattaccagagcgtggacgcggtgatagataaagatctctccaccgcgctgctggcgcgcgagatccgcgccgacgtgctggtgatcaccaccggcgtggagaaagtgtgcatccacttcggcaagccgaatcaacaggcgctgagcactgtgaacgtggcgcagatgacgcgctacatggaagaagggcattttccggcgggcagcatgttgccgaaaatcgtcgcctcgctggaatttttacgccatggcggcaggcgggtgatcattacctcgccggactgcctgcccgcggcgctgcgcggtgaaacgggtacccacattattaatgaaggaagataa

SEQ ID NO: 116467 - DNA, 1380 bp, Enterobacter cloacae
atgagtgagaataaaagccgccgcgagtttatcagccagagcggcaaaatggttaccgcctgcgcgctgtttggcgccacgggttccgtcgcgtatgctgccgattcagcaaaggcaacctgcgagacgggtaaaccgatgaacatcaccgcaaaacattactatctcgacaacgtgctgctggaagccgggtttaacttcgacggcagcgtggcgacaagtacccgcaccgagctgaaaacgctggaaatcaaagacgggaaaatcgtcgccctgcgcgacaacaacagccacgcggacgcgaccctgccgcacttcgacgcgggcaaaaagctgatgctcccggcgatgcgcgacatgcacatccatctggataaaaccttctacggcggcccgtggcgctccctgaaccgtccggcgggcaccaccattcaggacatgatccgcctggagcagaagctgctgccggagttacagccctacacgcaagaacgcgccgaaaagctgatcgacctgctccagtccaaagggtccaccatcgcccgcagccactgcaacatagagccggtttccggcctgaaaaacctggaaaatttgcaggcggtactggcgcgccggggcgcaggctttgactgcgaaatcgttgccttcccgcagcacggcctgttgctgtctcattctgaaaagctgatgcgcgaggcgatgcaggcgggggcgcattacgtgggcgggctggacccgaccaacgtcgacggcgcgatggagaaatccctcgacaccatgttccagattgcgctggattatgacaaaggggtggatatccatctgcatgaaaccagcccggcgggcgtggcggcggtgaactacatggtggaagccgtggagaaaacgcctgcgctgaaggggaagctgaccatcagccacgccttcgccctggcgacgcttaacgagcaagaggtggatgagatcgccacccgcatggcggcacaacaggtgaccatcgcctccaccgtgccgattggcactctgcacatgccgctgaagcagctgcgtgataaaggcgtgtttgtcatgaccggtaccgacagcgtgatcgaccactggtcgccgtacggtctgggggacatgctggagaaagccaacctctatgcacagctctatattcgcccgaatgagcagacactttcgcgtgcgctgggcatcgccaccggcgacgtactgccgctgaacgacaaaggcgagcgcgcgtggccgaaagcgcaggatgacgccagctttgtgctggtggatgcctcctgttccgccgaggccgtggcacgcatctctccgcgtaccgcgacgttccataaggggaatctggtctggggctctgtgggctaa

SEQ ID NO: 116468 - DNA, 732 bp, Enterobacter cloacae
atggcacaaaacatctacgacaatccggcgtttttcgaaggctacgctcagcttccgcgctcggtgcaggggctggacggcgcgccggagtggcctgcgctcagggcgatgctgccggatttaaccggcaaatcggttatcgatctcggctgcggctatggttggttctgccgcgcggcgcgtgagctgggcgcgtctgacgtcacgggcgtggatatctccgaaaagatgctcgctcgcgcagtggagctcaccgccgatccacagattcactatcagcgtagcgatctggagtctctcaagctcaacgagaacagcctcgatctggtctacagctcgctggcgctgcactatctgccggaactgaacacattatttgcccacgttcagcgcgcgcttaaacccggcggttgcctggtcttctcaatggagcacccgatttacacctgcgcctcccgtcagggctggctgacggacaacagcggcgagcggttctggggcgtgaaccattatcaggacgaaagccagcgcgtcagcaactggctggcagacggggtgattaaataccaccgtacgctgggcaccacgcttaacgcgctgatcaaggccggattaacaataagcgaagtcaatgagtggggaccaacgcaggcgcaaattgacgcctggcccgcgctggcagaagaggcagagcgcccgatgctggtgctgatcgccgcccgtaaggcttaa

SEQ ID NO: 116469 - DNA, 603 bp, Enterobacter cloacae
atgaaaatcgtcattattggtgccagcggtaccgtcggtcgtgctgtgacagaagagctaagccgtcgccacgaggtgatccgcgtgggtcgcacgcagggcgatcatcaggtggatatcacctcgcaggcgagcgtgcaggcgctgttcaaaaagatcggtccggtggatgcgattgtctccgccagcggagggttgcacttcggcccgctctcaaccatgaccgacggcgagttcaaccagggtttgcaggataagctgctggggcaggttcgtctggcgctgaccggccagcactacctgaacgaaggtggctcgattacgctgataagcgggattgtggcgcacgagccgattgcccagggcgtgaatgccaccacggttaacgccgcgctggaagggtttgtgcgcgccgcggcctgtgaactgccgcgcggtattcgcattaatctgatcagcccgacggtgctgaccgaatccgccgaagcgtacgacggcttcttcccgggctttgaaagcgttcccgccgcgaccgttgcgcaggcttaccgccgcagcgtcgaaggggtgcagagcgggcgggtgtataaagtcggttattaa

SEQ ID NO: 116470 - DNA, 888 bp, Enterobacter cloacae
atggataagcttcgcggcatggagacgttcatcgcggtggtggaaagcggcagctttaccggcgcggcggcccggctggagatgtcggcggtaatggtcgggaagtatattgcgcagctggaatcgcagctcggtacgcggctgctggagcgcaacacccgtcgccagagcctgacggatgccggacgcgtttatttcgaagaggccaggcgcgtgctggagcaggtctcgattgctgaaaacgcggttgagcgtctgcgagccacgcccgccggcaccctgcgcgtgacggcgcctacctcgtttggcggctgcgttatcgcgcctctgacggccacgtttttgcagcgttacccggaagtgcgcatcgaactggatctcaccaaccgaatggtggatctggtagaggaaggggtcgatctggccattcgtatcggtgagatccgtaatgaggatctggtggcgaaatatctgtgtccctacaacatggtgatctgcgccgcgccggattatctggcgcgtcacggtacgccgcaaacgccagccgatctggtggatcacctgtgcctgtcgcacacggtctggacggcgcgtaacgagtggcggctgccgggagtggaaggcgaagtgcgctggaagcgtgatgccgtcttacgatgcaatgacggctacggcttacgcatggcggcgcgagccggggcgggactcctgctgcaaccggaagtgctggtggcggaagagctggcgagcggcaggctggttcgggttctggaagcgtttacgcccgcgccgaggccggtgcatttactgtggcgtcaggatttgcggccgctgcctaagctaacggaatttattgcccatattctgctaagattgggcacaatataa

SEQ ID NO: 116471 - DNA, 1182 bp, Enterobacter cloacae
atgtctgcaaacaaactcgccagcagcgcgcagggcctgcaatcctctgccatccgtgaattattaaaacatagcaaaatggcaggcgtgatttcgctgggtggcggtattccaaatccggacctgttcgatcatgagggtttaaaaatcgctgctgatgccgtgctgtctcagcattttggcgaagcgttccagtatggcctgacggaaggcgtcccggggctgcgcgaagagatccaacgcatctgtgaaggtcgcggcatcgcctgtaaagccgatgacttggtcattacttccggctcgcaacaatcgcttgacgtgctggcgcgggcgttaattaacccgggcgatacggtcgtcgtggagcggcctacctacctcgccgcgttgcaggtctttggcctggcgcaggcgaattttgaatccgttggcaccgacggcgacggcatgaaagtggatgaacttgaagcgctggtagccaccaaaaccatcaaagcggtttatatcgtgccaacctttggtaacccgggcggcgtgacgctctccgaagcgcgtcgtaaacagctggtggaattatcgaagcgctatgacttcgtgattatcgaagacgacccgtacagcgagatcaactacaccgacgaagcgttccgcccgctgattgctcatgccaaagatatcggcaatgaggataacgtggtgtacacctccaccttctctaaaatcctcgcgccgggcacccgcgtgggctgggtgctggtgccggagtggctgaagcgcgcggtggtgaacctcaagcaaaccaccgatctgcacaccagcacgctgtcgcagctgatgacgtacgagtatctgaaaaccggtcgtctggcgaatcagattaaaatgatccgcgaagcctatcgccagaaataccagacctttgcaacggaactggaagcggagctgggcgatgtgatgtcgttccacaagccaaagggcggcatgttcctgtgggcgaaaatgaacaacggcatcaatacgacgaaatggctggaaaaaacgttgagcaacggcgtcgtgtttgtgccgggtgagttcttctactgcaacgagccggaccataccacgctgcgcatgtctttcgttaccccaacggatgagcagcttaaagaagcggttcgacgcctcaaaatttccctgtaa

SEQ ID NO: 116472 - DNA, 366 bp, Enterobacter cloacae
atgacacttcaacaggcactccgcaaacccaccacgccgggcgaggtgttgcagtatgagtatcttgaaccgctcaatctgaaaatcaacgatctggcagagatgctaaatgtacaccgcaataccgtaagcgcgttggtcaataacaatcgcaaacttactgccgatatggcgatcaaactggcaaaagcctttaataccactattgaattttggctgaacttacagctaaacgttgatatctgggaagcgcaatctaactcccgcacgcaggaggagttaagccggataaaaaccgttgcggaagtcatggcgaagcgaaaatccggcaagccagacgttaccctgcacgggaacagcgcataa

SEQ ID NO: 116473 - DNA, 3852 bp, Enterobacter cloacae
gtggcaatttttgacattgaaaaggatgaattacttcggctctccgatactcagctagaagagctgatagctcggctagcagaagctgaagtggcaatacatggtcatagccctgcatgtgtaaattggtctggctcaattacagcacctgacggagggattgatatccatgttcaggttccagttgatcaactgaaaccaagctttcttgtaaggcctaatacggtatttcaggcaaagaaacataaaatgccaaaggctacaattgagaaggaaatgggcaccggccaaacgctttcacccatcatatctgaacaagccagaaaacaaggcagctacatcattgtcagtctgggtgatgattgctcgccctcaggaaaggcggatcgtctcaaagcgatgagggatgcagtaaaagatgatcctaacaaaagcaatcttcatctcgatttttacgaccgttccaaactcattcaatggctgcgccaacattcatcagtcatgctgtgggtaaaagggaagcttggacaagggtattccggttggcaaccctacggagcctggagcaatccaccccaaggcgttacagacactttaatctcagccccaggcgtaaccattactttaccgtcgggaaaggggcaaaaacttaaaattgatgaagcaattagcccaatgcgtgcccttattcgttcgacgaataaggcagttcgcattacaggattgtctggtgtcgggaagactcggatcgttcaggcgctctttgatgaaactgttggaacagatgcgcttgaccggaccgttgctatttatgctgatactggctctgagccagtaccgtcggctaaagcaatgcttgataagctgattgctgaggaccgacgagcaattatgatccttgataattgtccatcacaactccatgcttcgcttgccagcaaggtatcagccgcaggaaaagaagtaagcctcatcacaatcgagtacgacataagggatgacaaaccacagacaactgaggtcatccatattgagacagatggtccagaggtggcagagcaacttctcatccgtcgcttcccttctattggtaagaataatgcccgtcgtattgctgagtttgcagatgggaatgcaagagttgctttggctatagctgagagaggggaggaaggcgagagtttggctctactttctgatgcacagttgtttaatcgcttgtttgaacagcgtaatcaccctgatggtaatttacgggagcaagctgaaatattgtcactggtgtattcattctcggtatctagtccagatgctgctaccgatgaactggagatattaggggcgctctttgggtattccagaacccagttatttaaagccgttacgaagctgatggaacgtcatatcgttcagaaaagatctcactggagagctatcttacctcatgccattgctaatagattggcagcatccgcactcgacagtattcccgttgatcaacttagggcgacttttgaagctccggattgtgagcgtttattaatgtctttttcgcatcgcctagggttgttgcatgaccatcctgttgcgaaagaaattgtagaagcctggcttcagcctgaagggatgctaggaagaatagccgagttaaatgatatttcgtcacgaatacttgggtatatagggccggttgcacctgaagcattgctaaacagaattgaggtcgtactctcatcatctgattttaaaggtatggaaccgggctacaatctgcagcgacgtagtattctgcgtcttatacaattgatggcatacgaaccgaacgcctttgagcgatgcgccaagcttcttattaaaatggcagaggacgaagccgataataatgacctggattctgctcgaaacatggtcccaaggtttttccaggcgtatctgtctggtactcatgcatccctaagccagcgtattgctttaatgaacgaatgcattgcatcaagtattcttacgcgtagatctttgggcttcaagatgctgtcaaccgccctgtatggcccaccgtggtcaggggttgggattagtgagtttggagctcgaccaagagactatggatacgaacccaactatgatgaacttgtcgaatggcgcagcgcctttattgacgtcattatccaattagcggcatccggagatcctgagcttgaaaggcctgcaagatcaatcttagctgacaaattcaggggaatttggtttcaagaagcaatgcgagacaaactcgtcgatgctgctcgtacattaaattctttaagtccttggggggaaggttggaaagccgttcgttcaacggtctattttgactataccaagcgtagcgatggagatgaagttgagccgttgccggataatcttgctgccttagagaaggagttggagcccattgcgttaattccaacaataaagacatacgtgttgagtacaaatcatgattattgggcactggatgcggattttgatcatgaggactccgataattataccgcagccggaaaacgacttgaagctaaagcacttcaattgggacaggactttgccttgtcaaatcatgtgcttgaggagttaggagcagatctgttctctatcggtggaatgccttatcgtgctgtctttggtcgaggacttgctcgaggggcacatgatctacgtattggctggcagcgacttgttgaacaaattgaaaaacagccagatgctaacaaagactttggagttattgggggattcatcgaagaagttgactctatcgatccatcattagcacagaagtttctcgaccaatgtgcgcagcatcctgaacttagacaggtattggttggcttgcatccttgggggaaatttacagtaaatgatttggatcgctgcatgaagcatttggacgatccagacattcgcccttttatgtatgagtcaattctctggcgagaccaatacgccaatttaccgagagttcgtttacttgatcttgctaagtgccttctaaataaagttagcggcgacgatgttattttggatgcactatccatgaagcttcatggtaaagatgaatctacagatacgctcggtgcagactttcgattaatcggtcttgcagcagctatccagaggattcaaaacagcgacagagaccaagggggaacaatcgattatcgcatggaacaagttatccatgctgcattgcgtttcgatggtaatgacgcaagaaaaatagagtggttggacacaatattcagcgtcattgataaacattatggatatgtgtctggattccataaaactatagctacaactgctgcatcgatgccagaagcatttctcaatcgcatttttgaaggtactgaggaacagcggcaaagaagacaattctttattaatcgtggtggcttacgcacttatcccctggcaaaaataaatacaagcgttctaattgcatggtgccgcgccagaaatgatccctttgtttggcccgttgtagctggtggagtaaatctttggtcaaaaaatggtgagcagagtgcactgaccatacacgaaacggctatagaacttctagaggcgtcacctgagccgctagctgtactggagtcttttgctaagcgcattactccatcatcctggactggtagccttgccaacataatgcaagctagatcaaggactctaagtacgttgattaaacacgaacgtactgatatcgccgaggctgccaaagtagtttgcgaaaaaatgatacagtcggtggaacgtcaaaaagaatgcgaacaacgggaagatagtgaaagggaacagaggtttgaatga

SEQ ID NO: 116474 - DNA, 915 bp, Enterobacter cloacae
atggaatctgcacgtgataaacatacccgtgagattgtagaagcagaggatctgtggttgcttgattgcgttgatactgaaggctatgtgtgctgggggtgtggcataaccatgcatcctgctgcatgggaaaaagataaaaaagttagagcctattttaaaaagaaacgacatattcaacatcatcatgaatgtgatgctgatgctgaaagcacagtaattcgccaaggccagaaggcgagtgtccgcaacatactggacagtgctccgggtttaatgccctcgggattaaagttgatcgaaaaacgcccggttgttgaaccaagtttctctggtgatgaaagtaaatccagttcggcacgttcagcatcctcacaatctgctgaaggtaattcacctgaacgacaatcccggcgtcaagtgaatgctattcgcaatatttgccgtgccttcatccgtttccctcatgaccgggggatgtcgcttaacgttcccggtatcagtggtcaaatctacatgacggcgttcaaaaagctccggaatgaggttcaaccttacccggagccgaagatcttttatgcaccactgctctggaacaaatttactgaaaatgatgaaaacctcatcattccgttgtctggtgaatgggggaaagatgagtcaggtaaacctaaacctacccgaagctaccagatctacatcgattgggctagctggtcaaaagccaagcgtactgtggttcgtaaagagctggaggccgcccgaacagaggcaatagaggccaaagacaaagggctgaaagataaagcctgggtcttctttatcggcgagcaaaatgcagaaaatccggagatcttctacgttaacgactatcggctcatctgcgcaattgtaggacatatcacttatccctga

SEQ ID NO: 116475 - DNA, 621 bp, Enterobacter cloacae
atgaacacatacttaggatctcatggattacataacgtagacaatctggatagaatacttgaggtgctcggctatgccaccgaccaatataccagcattatggctgtgcgtgttgatttccattatcctccgatacttgataacggagataccatcggctgtttcattaatcgtgagcctggggcaatatctcgatccatcaactcactaaaagagatacttaaaaacagtgagcgtcgtaggagacgtaacggtgtcagagttcatcccaatactctgcgtgacgtatgggctaaggaattcagccaatcagggaaatgccacttccacgtttgctttttattcaacgaacaggcttacaacaaactaggcgattataatatcgacactagcttacgcatgatgatcaccagagcctggtacagtgcattaggattggagctggaggactacccagggctggttcacttccctgataactgccggtatatcttggaccgaaactcagcagattatatctatgagtacggggagctgattcaacgtctggactatctgaccaaactcgacagcaaaatttacgaagaaggtgaacggaatttcggtggtagccacaagtag

SEQ ID NO: 116476 - DNA, 759 bp, Enterobacter cloacae
atgtcacagcgtgtcacatacagtacatctaacaatacaacgatcgaaattttcaaaagatactgccgcattaaaaactgctcattatcatctgtaatttcattggcaacggatgccgtcgcgccagttttagaaaaaataatatcacatcatgatgaagctaatgaaattgaaaacaatctctttcaagcttgtttcttttccaagaacagaccattacgtagcatacctgtcaagtcgcaagaagagtattaccttgccatttggaatacttacatcaaatataacatcgacaaccttgaccacaatcgttataaacacaacttgcctaacagaaggattggggagaatgagaaaaaaaagataattgaaaatcaagaaggaattatagacaaatacaatgctaagaaaggaatattcatttatttagacagaaggatcaactatgctcacaagttatcagctgggtactcaaacctaatattaattaaagaaacatcttatgaagacgtttcctttgacttcagcaaaatgattatcgcccctatattagacctaatcacattaggaatagatgaaactgttcgtcgaaaaaacgataacaaaactgtgcagtgcatctgctggattccagtttattatataaacaacaaggcattaatgataccagtagttcatgaggacgatgtttctgcctcaacgaaaaatggagggaaaattattattgttgaaccattcaaagacgaagtaaaaatgtaa

SEQ ID NO: 116477 - DNA, 219 bp, Enterobacter cloacae
atgatcacatccaatgtaagaattttacgtttaaacaccattgtcattaaaactggcatagccagatccaccatttacgactggctaaacccaaaatcaccaagatacgactcttcttttcctaagccacggaagcttggaaagcagtctgtaggctggcttgagtcagaaattgacgggtggatcaatgaacgcgctcaggcctcaaatgaagcttaa

SEQ ID NO: 116478 - DNA, 576 bp, Enterobacter cloacae
atgtgcgacgatgcgattattaagtgtaggcctcggttagatattgagctttcgcacttgcgtgctaatgggtggattaaagggctgaatgaaaatttcagattgaatctcttgctggcaggtattgagtatcaatgggctaaagcagcctggaattatgacaaacggcgatcgattcaggctctaaatgtcgctctcacgctgctgcatgagtgctctggcgcatgtatgtgctgtgagcttattgatgaagagagaaaaatccataaagtgagagttaaggccgcagcgaaaggtggggctaccaaggcggaagtctataatccaataatggaagaggctattcgattactgcaaattactcctcaagccgtgggaggatggaagcgctggaccgatgccgcagaagcaattgagcgaccactttggttgttcatagaggaacaaaaaaagcacaacaacatcattgatttaaaagaagaaaatctagtaagtaagatcctgatatggggtaagaaaaatgttgagcttggtacagcgttgaatgaaaaagttcttaagccaaaaaaattataa

SEQ ID NO: 116479 - DNA, 1242 bp, Enterobacter cloacae
atggcaagacaaactaaacctctctccgttaaggaaatcgaatctgccaaacccaaggaagcggactatgtgctctatgatggcgatggccttgagctactgatcaaatccagcgggagtaaaatctggcaatttcgctacattcgccccgtaaccaagaagcgagcgaaaaagagtattggcccctacccgtcagttacgcttgccgatgctcgaagctatcgggcagaatcacgttctctccttgcgaaacaaatcgatcctcaggaacatcagcaagaacaactgcgtagttcgcttgaagccaaaactaatactttccagctcgttgcggaacgttggtggaatgtgaagaaagccagtgttaccgaggactatgcagatgatatatggcgctctcttgaaagagatgtctttccagcgattggtgacgttagcgttacagatatcaaagctcatacgctggttcaggctgtgcaaccagtacaagccagaggtgcactggaaactgttcgtcgcctttgccaacgcatcaatgaggtcatgatctatgcccaaaacacggggctgattgatgctgttcccagtgtcaatattggcaaggcattcgagaagccgcagaagaaaaacatgcccagtattcgtccggatcagctgcctcagttaatgcagacgatgcgaacggccagcattagcctttcaacaaggtgtctgttcatgtggcagcttcttaccatcacccgccctgctgaagcggctgaggctcgttgggacgaggtagacatggaggcacgagaatggaagatccctgcatcgcgcatgaagatgaaccgtgaccacacagttcctttgtcagaagaggcaatagctgttctggaaatgatgaagccgttaagtggcaatcgggagttcatatttcccagccgtatcaaacctaaccagccaatgaatagtcagacggttaacgcatcactaaagcgtgcgggctttggcggagtgctggtttcgcatggcctgcgatctatcgccagtacggcccttaacgagcaaggctttccaccagatgtgattgaagcagcacttgctcatgtggacaagaatgaggttcgtcgtgcttacaaccgtagcgattatcttgagcagcgacgcccgatgatgcaatggtgggctgattttgtaaaagccgctgatgcaggtagtttattaataaatggcgttcaaaacttgcgattggttatttaa

SEQ ID NO: 116480 - DNA, 483 bp, Enterobacter cloacae
atgacgaagaaaaaagcacataaacctggttcggcgaccattgcgcttaacaagcgtgctcgccacgagtatttcatcgaagaagaattcgaggccggccttgcgttgcagggctgggaagtaaaatcgctgcgtgccgggaaagccaatatcggcgacagctacgtgatcctgaaagacggtgaggccttcctgttcggcgcgaactttacgccgctgaccgtcgcctcttcacattacgtctgcgatcctacccgcacccgtaagctgctgctgaacaagcgcgaactggaatccctctacggacgcatcaaccgcgaaggcttcaccgtggtggcgctctctttgtactggaaaaacgcctggtgcaaagtgaaaatcggcgtggcgaaaggtaagaaacagcacgacaaacgtactgacctgaaagcacgcgagtggcagctcgacaaagcacgtatcatgaaaaacgcaggacgttga

SEQ ID NO: 116481 - DNA, 477 bp, Enterobacter cloacae
atgttattatttgtctgttgtgtgaccatggaaaatgctatgcctcagattagccgtaccgcgcttgttccctacagcgcggaacaaatgtatcagttagtgaacgacgttcagtcctatccggaatttattccgggatgcaccggtagccgggtgctggaatccggcccgacgcagatgactgcggccgtggatgtctccaaagcggggatcagcaaaacgttcaccacgcgcaataccctgacgagcaatcagagtattttgatgcatctggtggatggtccgtttaaaaaactgatgggagggtggaagtttacgccactgagcgctgacgcctgccgcattgagtttcatctggattttgaatttaccaataagctgatcgaactggcgtttggccgtatctttaaagagctggcctcgaatatggttcaggcgttcaccacgcgcgccaaagaggtttacagtgtcgcataa

SEQ ID NO: 116482 - DNA, 288 bp, Enterobacter cloacae
gtgtcgcataagattgctgttgaggtggtgtatgcgctgccggagaagcagtatttgcagcgcgtgacgcttgaagagggcgccaccgttgaggcggctatccgggcctccggcatccttgaacttcgccgtgatattgacctggcgaagaataaagtcggcatttatagccgtccggtaaagcttgctgatacgctgaaggatggcgatcgggttgagatttatcgcccgctgattgctgacccgaaagagctgcgccgtcagcgagcggagaaatcgggtaagtag

SEQ ID NO: 116483 - DNA, 339 bp, Enterobacter cloacae
atgcgctgtaaaacgctgaccgctgccgcagcggttcttctgatgttgaccgcaggctgttccactctggagaaagtggtttaccgtcctgacatcaaccaggggaactaccttacccctaacgatgtgtccaaaatccgcgtgggtatgacacaacagcaggtcgcttatgccctgggaaccccgatgatgtccgatccgttcggcacaaacacctggttctatgtattccgccagcagcctggtcatgaagatgtgacccagcaaaccctgacgctgaccttcagcagtgccggcgtgctgaccaacatcgacaacaagcctgccctggccaaataa

SEQ ID NO: 116484 - DNA, 1662 bp, Enterobacter cloacae
atgctggcacaactgaccatcagcaactttgccattgttcgtgagcttgagatcgacttccatagcggaatgacggcaattaccggagaaaccggtgcaggtaaatccattgccattgatgccctcggcttgtgcctcggcggtcgtgctgagggggatatggtgcgcacaggcgccgcccgtgccgatctctgcgcccgcttctcgttgaaagacacacctgccgccctgcgctggctggaagcgaaccagctcgaagacggacgtgagtgtttacttcgccgcgtcatcagcagcgatggccgctcccgcggttttatcaatggtacagcggttcccctttcccagcttcgcgagctgggccagctgctcatccagatccatggtcagcatgcgcaccagcagttaatcaaacccgaacaacagaaagccctgcttgatggctacgcaggtgagtacgcgcttactcaactcatggcggagcactatcgtcagtggcatcaaagctgccgcgaacttgcgcagcatcagcagcaaagccaggagcgtaccgcgcgcgccgagctgctggaatatcagctgaaagagctgaacgaatttaacccccaggcgggtgaatttgagcaaatcgacgaagagtacaagcgtctggccaacagcggtcagctgctttccaccagccagactgcccttaacatgctggcggatggcgaagacgtgaatttgcagagccagctgtataacgtgcgtcagcttgtgaccgaactgaccggcatggacaataagctttctggcgtactggaaatgctggaagaggccgcgattcagatttcagaagccggggatgagctgcgccactattgtgaacgtttggatctcgacccgaaccgtctgttcgaacttgagcaacgcatctcccgtcagatttcactggcgcgtaagcatcacgtaaccccggaagagctgccgaattactatcagtctctgctggaggaacagcagcagctggacgatcaggccgattcccttgaaaccttgtctctggcggtcaatctgcatcatcagcaggcgctggaaacggcgaaacggctgcatgacgtgcggcaacactatgcgctggagcttagccagcacattaccgacagcatgcatacgctggcgatgccgcatggggtgttcaccatagatgttcgctttgaagagaatcacctgacggcggaaggcgcagatcgcgtagaattccgcgtcaccaccaacccgggccagcctttgcaggcgatttcgaaagtggcttccggcggtgaactgtcgcgtatcgccctggccattcaggtgattaccgcccgtaaaatggaaaccccggcgttgattttcgatgaagtggatgtggggatcagcggcccgaccgcggccgttgtcggcaaactgctgcgtcagttaggtgaatcgacgcaggtcatgtgtgtgactcacctgccgcaggtcgccggttgtggtcatcaccactttatcgtcagcaaggaaaccgatggcgaaatgacggaaacgcacatgaagccgctggataaacgctcacgcttgcaggagctggcacgcctgctcggcggcagtgaagtcacccgcaatacgcttgcgaatgcgaaagaactgctggcggcataa

SEQ ID NO: 116485 - DNA, 879 bp, Enterobacter cloacae
atgaataatcatttcaggtgtattgggatcgtcggccatccgcgtcaccctaccgcattgacgacacatgaaatgttgtatcgctggctgtgtggtaaaggctatgaagtgatggtcgagcagcagatcgcccaggagttgcagcttaaaagcgtcagaaccggcacgctggcggaaattggccagcaggcggatctcgccgtggtggtcggtggcgacggcaatatgctgggcgcggcgcgaacgctggctcgctatgatattaaggttattggtattaaccgtggcaatctcggtttcctgaccgacctcgacccggacaatgcgcagcagcagctggcggacgtgctggaaggccactatatcagtgaaaaacggtttttactggaagcccaggtgtgtcagcaagactgccagaagcgcatcagcaccgccattaacgaggtggttctccatcccggtaaagtggcgcacatgatcgagttcgaagtctatatcgacgaaatattcgctttctcgcagcgttctgacgggctgattatttcaaccccgacggggtcaaccgcctactcactttcagccggaggcccaatcctgacgccatcgctggatgccattacccttgtgccgatgttcccgcatacgctctcggcgcgtccgctggtgatcaacggcgacagcaccatccgcctgcgtttttcccatcgccgtaacgacctggagatcagctgcgacagtcagattgcgctccccattcaggaaggtgaagatgtcctcattcgccgctgcgattaccatctgaacctgattcacccgaaagattacagctatttcaacacattaagctccaagctcggctggtcaaaaaaattgttctga

SEQ ID NO: 116486 - DNA, 594 bp, Enterobacter cloacae
atgagtagtaaagaacagaaaacgcctgaggggcaagcccctgaagaaattatcacggaacagcacgatgaagttgaggcagtagagccagacacgtctgctgagcaggtggacccgcgcgatgaaaaaattgccaacctggaagctcagttggtagaagcgcagaatcgcgaacgcgatggcgtactgcgtatcaaagcggaaatggaaaacctgcgccgtcgtaccgagctggacgttgaaaaggcgcacaaatttgcgctggagaaattcgtcaacgaactgcttccggtgatcgacagcctggatcgcgcgctggaagtggcggataaagctaacccggataacgcggcgatgattgaaggcattgagctgacgctgaaatccatgctggatgtggtgcgtaagttcggtgttgaagtgattgccgatacggatgtaccgctggatccaaatgttcaccaggccattgcgatggtggaatccgaagacgttgccgcgggtaacgtgctgggcgtgatgcagaaagggtataccctgaacggtcgtactattcgcgctgcgatggtgaccgtggcgaaagcgaaagcataa

SEQ ID NO: 116487 - DNA, 1242 bp, Enterobacter cloacae
atggtggtcatctccgcttatttctctggctctgaaaccggcatgatgacgctgaaccgctaccggttacgccatcgcgccaagcagggtaaccgtgccgcgcgtcgtgtcgaaaagcttctgcgtaagccggaccggctgattagcctggtgcttatcggtaacaacctggtcaatattctcgcctctgcactgggcaccatcgtcgggatgcgtctatacggcaacgcaggcgtggcgattgccacaggtgtgctcacgtttgtggtgctggtgtttgcggaagtgctgcccaaaaccatcgccgcgctttacccggaaaaagtcgcctacccgagcagcttcctgttagcaccgctgcttattctgatgatgccgctggtctggctgctgaatatggtgacacgggtgctgatgcgcatggtcggtataaaggcagacgtcaccattagtagcgcgctcagcaaagacgaactgcgtaccatcgtgaatgaatcccgctcgcagatctcccgccgcaatcaggacatgctcctgtcggtgctggatctggaaaaggtcagcgttgacgacatcatggtgccgcgcaatgaaatcgtcgggattgatatcaacgacgactggaaggccattgtccgccagctgacacactccccgcacgggcgtatcgtcctctatcgcgattccctcgacgatgccatcagcatgctgcgcgtgcgcgaggcctatcgtctgatgactgagaaaaacgagttcaccaaagaggtgatgctgcgcgccgccgacgaaatttactacgtgccggaaggcaccccactcagcacgcaactggtgaagttccagcgaaacaagaagaaagtcggcctggtggtggatgaatacggcgatatacaggggctggtgacggtcgaagatattctggaagagattgtcggggactttaccacgtcaatgtcgccttcccttgcggaagaagtcaccccgcaaaacgacgggtcagtgcttatcgacggcagcgccaacattcgtgaaatcaataaagcgttcaactggcatttgccggaagacgaagcgcggacgatgaacggtatgatcctggaagcgctggaagagatcccggcggcaggcacgcgcgtgcgcattgaacagtatgatattgatattctggaagttcaggacaacatgattaagcaggtgaaggtcctgcccgttaaacctttacgcgaaagtatcgccgaataa

SEQ ID NO: 116488 - DNA, 867 bp, Enterobacter cloacae
atgcaacggttggagcaggcgtcacgtaacgttatactgcttctctttcttattaagacaactgtcgacgcctatatgcctgttttcgcactgatcgcccttgttgcctactctgtcagcctcgcgctgatcattcctggcctgctgcaaaaaaacagcggctggcggcgcatggctattctttcggcagtgatcgcactgattagccatgcgtttgcgctggaatcacgcatcattcccggcgacggcagcgtgcaaaatctgagcgtactgaacgtcggctcgctggtcagcctgatgatctgtacggtcatgaccattgtcgcgtctaaaaaccgtggctggctgctgctgccgatagtctacgcctttgcgctgatcaacctggcgttagccacgttcatgcccaatgagtttattactcacctggaagccacgccggggatgctggtgcatattggcctgtcgctgttctcctacgcgacgctgatcatcgccgccctttacgccatgcaactcgcctggattgactaccagctgaaaaataaaaagctggcgtttaaccacgaaatgccgccgctgatggtgattgagcgtaagatgttccacatcacccaggtcggtgtggttctgctgacgctgacgctgtgcacgggcttgttttatatgaagaacctgttcagcgtggagaatatcgataaagcggtcctctccatcatcgcgtggtttgtctatattgtcctgttatggggccattatcatgaaggctggcgcggtcgtcgcgtggtctggttcaacgtagcgggtgcgggcattctcacgcttgcctattttggtagccgcttcatacagcaatttgctggctaa

SEQ ID NO: 116489 - DNA, 1362 bp, Enterobacter cloacae
atgtttgataatttaaccgatcgtttgtcgcgcacgctgagcaacatcagcggccgtggacgcctcaccgaagagaacatcaaggaaacgctgcgcgaagtgcgcatggcgctgctggaagcagacgtcgcgttgccggtcgtgcgtgattttatcaaccgcgtgaaagagaaagcggttggccatgaagtgaacaagagcctgactccgggtcaggagttcgtcaaaatcgtccgtaacgaactggtttcggcgatgggtgaagagaaccaggtgcttaacctggcggctcagccgccggccgtcgtactgatggcgggtctgcaaggtgcgggtaaaaccaccagcgttggtaagctggggaaattcctgcgcgaaaagcacaagaaaaaggtgctggtggtgtcggcggacgtgtatcgcccagcggcgatcaaacagctggaaacgctggccgagcaggttggcgtagacttcttcccgtccgacgtggcgcagaagcctgtcgatatcgttaacgcggcgctgaaagaggcgaagctgaaattctacgacgtgctgctggtggataccgccggtcgtctgcacgttgacgaagcgatgatggacgaaatcaagcaggtgcatgcctctatcaatccggtagagaccctgtttgttgttgacgccatgaccggtcaggatgcggcaaacaccgcgaaagcgtttaacgaagccctgccgttaaccggcgtggtgctgaccaaagtcgacggcgatgcccgcggcggtgcggcgctctctattcgtcatatcaccggtaagccaatcaagttcctcggcgtgggcgagaaaaccgaagcgctggagccgttccatccggatcgtattgcctcccgtatcctcggcatgggcgacgtgctgtcgctgatcgaagatattgaaagcaaggttgaccgcgcgcaggcggaaaaactcgccagcaagctgaaaaagggcgacggtttcgatctgaccgacttccttgagcagctgcgtcagatgaaaaacatgggcggcatggcaagcctgatgggcaaactgccaggcatgggccagatcccggacaacgtcaaatcccagatggatgacaaagtgctggtgcgtatggaggccatcatcaactcgatgacgctgaaagagcgcgcgaagccagaaatcatcaaaggttcccgtaaacgccgtatcgcagccggttgcggcatgcaggtgcaggacgttaaccgccttctgaaacagttcgacgacatgcagcgcatgatgaagaaaatgaagaaaggcggcatggcgaagatgatgcgcggcatgaaaggcatgatgcctcccggttttcctgggcgttaa

SEQ ID NO: 116490 - DNA, 249 bp, Enterobacter cloacae
atggtaactattcgtttagctcgtcacggcgctaaaaagcgtccgttctaccaggttgttgtgactgacagccgtaatgcacgcaacggtcgcttcatcgagcgcgttggtttcttcaacccactggccgctggcgcagaagaagaaacccgtctggatctggatcgtatcgctcactgggttggccagggcgctactgtttccgatcgcgttgctacgctgatcaaagcagcaaacaaagcagcttaa

SEQ ID NO: 116491 - DNA, 537 bp, Enterobacter cloacae
atgagcaataaagcacctgttgaaccgatcgtattgggaaaaatgggttcttgctacggtatccgtggttggctcagagtgttttcctccactgaagacgctgatagcatttttaattaccagccctggtttatccagaaagccggtaagtgggaagaggtcgagctggaaagctggcgtcaccacaatcaggacatcatcatcaagctgaaaggcattgacgatcgtgatgccgcgaatgcgctgactaattgtgaaattgttgtggattcgtcgcagttgccacagctggaagagggtgactactactggaaagaccttatgggttgccaggtagtgaccactgaaggctacagcctggggaaagtcatcgacatgatggaaaccgggtcaaatgacgttctcgtcattaaggcaaacctgaaagatgcatttggcatcaaggagcggttggttccgttcctcgatggacaggttatcaagaaagtcgatctcactactcaaaccattgaagtagattgggatcctggtttttaa

SEQ ID NO: 116492 - DNA, 768 bp, Enterobacter cloacae
atgtggattggcataattagcctgtttcctgaaatgttccgcgcgattaccgattacggggtaactggccgggcagtaaagaatggcctgctgagcatccagagttggagtcctcgtgacttcacgcacgaccggcaccgtaccgtggacgatcgtccttacggcggcggaccggggatgttgatgatggtgcaacccttacgggacgccattcacacagcaaaagccgcggcaggtgaaggcgcgaaggtgatttatctgtcacctcagggacgcaagcttgatcaagcgggcgtgagcgaactggcgacgaatcaaaagctgattctggtctgtggtcgctacgaagggatagatgagcgcgtaattcaaaccgagattgacgaagaatggtctatcggcgattacgttctcagcggtggtgagttaccagcaatgacgctgattgactccgttgcccggttcattccgggtgtactgggccatgaagcttcggcgacagaagattcgtttgccgatggattgctggactgtccacactatactcgtcctgaagtgttagaagggatggaagtcccggcagtattactgtctggaaaccatgccgagatacgtcgctggcgtttgaagcagtcgctgggccgaacctggcttagaagacctgaacttctggaaaacctggctctgactgaagagcaagcaaagttgctggccgagttcaaaactgaacacgcgcaccagcagcatgaacatgatgggaatgcgtaa

SEQ ID NO: 116493 - DNA, 348 bp, Enterobacter cloacae
atgagcaacattattaagcaacttgaacaagagcagatgaagcaggacgtaccttccttccgtccaggtgacaccgtggaagtgaaagtatgggttgttgaaggttccaaaaaacgtctgcaggcattcgagggcgtggttatcgctattcgtaaccgcggtctgcactctgcattcactgttcgtaaaatttccaacggcgaaggcgttgagcgtgtcttccagactcactctccggtagttgacagcattgctgttaaacgtcgtggtgctgtacgtaaagctaaactgtactacctgcgtgagcgtactggtaagtctgctcgtattaaagagcgtctgaactaa

SEQ ID NO: 116494 - DNA, 405 bp, Enterobacter cloacae
gtggataacgtactgcatcagcgtaactggaaacgcgcagcggcattgaccgcgctgtttgcgatcctgctgatcgtcgtggcgccgctgatctccgtctcgctgcaaaaagatcccatgagcgccatgccgggtatgcaccatgacatgagcatgatgtcgatggacgagcatcatggtgatatgccgcattctatgccagttgaccatgcggaagcatgcggctactgcgtgctgttagcgcatgtgccgggcgtgatgctggcgcttatcgttctgctcagcgtggtgttgcagcggctgcgcgtgaaaccgcctcgtcaggcggtcagccactggcactttttcccctggctttaccccgatacccgcgcgccgccgcgtcggtctgctttctccctttaa

SEQ ID NO: 116495 - DNA, 1371 bp, Enterobacter cloacae
atgactacctgcactccgcgcgcggcatggggaaacctgctgcgtcgcctccatttctatatcgggctgtttgtcggtccgtttatcttcttcgcagcgctgaccggaacgctgtatgtcgccacgccgcagcttgaaaaggcgctgtaccatcatgcactccacacggatgccgtgggtgaggcgcagcctcttgctgaacaaattgccgtggcggaaaaggccgtgggttcagcgctgcgtttacatgctgtacgtccggggctggaagggggcgaaacgacccgcgtgatgtttgccgacccggcgctgggtacctccgagcatcgggctatttttattgatcccaccagccttgagattcgaggggatatgaccgtgtacggcaccagcgggattttaccgctgcgtcagactatcgattatctgcatacctcgctgatgctgggcaacatcgggcggctctatagcgagttagccgcctcgtggatgtgggttgctgccctgggcgggatcgcgctgtggttctacacccgaccgaagcgccgtattaacaatcgtttccagaatcgtcgtcgcctgcatgtgatcttaggctggacgttactggcgggaatgctgttgttctcagtcaccgggttaacctggtcacaatgggccggtggcaacgtcgataagctgcgtgcagagatgaactggctgacgccgcaggtaaacaccaccctttccggtgcgccggaaatgagggatgaacacgccgaacatcgtggtcatcacgggggaatgacgatgcctgaaatgccagtcaaactgtcgctttttgacaacgtattgcaggtcgcccgccagtcagggattgatgcgaacaacgttgagatccgtccggcaagcagggtcgaccaggcctggacggtgacggaaatcgatcgccgctggcctacgcaggttgatgccgttgccgtggatccccactcactgaaggtgctggacagcactcgcttcggggatttcccgctgatggctaaactcacccgctggggcgtggatttccatatggggatcctgtttggtctggcaaatcagctgctgctcatcgcgtttggcgttgcgctgtgtgtgttgattatctggggataccggatgtggtggatgcgtcgccctgcaacgtcagccgcgaacccggtacagacgctctgccaaagctggctggcattgccgctgtggggaaggggagtgtcgttcctgataagcctcctgctggggctggcgttgccggtaatgggcgtcagtctggcggtctttattgtgattgactggctgcgctggcgagcggtttcaggcgtgtcgctcgccggaacatccgttaaatag

SEQ ID NO: 116496 - DNA, 486 bp, Enterobacter cloacae
atgttaaagcgatactttgcgccgttaatactggcatcactggtaatgtccggatgccagtcatcccctgaagggaaattcacgccagagcaaattgcggccatgaaatcctacggctttaacgaactgaatggcgactggtctctgggcctgtcggataagatcctgtttgataaaaatgacgccaggctgcgcccggaaagtgaaacgcagatccagactatggcctcacgcctggcggcaaccggtctgaaccacgccaggatggatggccatacggataattatggcgaagagagctacaacgaagcgctttcgttaaaacgtgccaatgttgtggcggatgcctgggcgaagggcgcgaacatcccgcgcagcaatctcactacgcggggcttaggcaaaaaataccctgtcagcagcaaccgcactgcgcaggggcgcgctgaaaaccgccgggttgcggtagtcatcagcacgccttaa

SEQ ID NO: 116497 - DNA, 1221 bp, Enterobacter cloacae
atgaataaggaagtcgcaccaacaccgcgtccgacgtttaaaagaacgttgcgacgaatcagcatgataagcgtcattataacgatgacgtttatatggttgctgctgtgtttcgcttccgtggtgacattaaagcaatacgcgcaaaaaaacctcgaacttaccggcgccaccatgagccacagccttgaagcctctctggtgttcaacgatgccgtggcggcaaatgaaacgctggcgaccctcggcaagcaggggcagttcgccgtggcggaagtgcttaacgcacatcataaacggtttgcctggtggtcatggaacccggcggataataccgacacgctgggcgcgctggtcaaccggtggttgttccctgttcctgtcgcacagcccatcatacataatggcaatgtgattggcgaaattcgtctgaccgcgcgagacagcctgattagccactttatctggctctcatttgcggtcctcaccggctgcattctttttgcctctgccgtcgcattgaccatcacccgctcgctacatcatggcatggttgttgaaatgcaaaacatcactgacgttgtgcatgacgttcgcactaaccgcaacttctctcgccgggtaacggaaggccgcattgaagagttccaccagtttggtgaagacttcaacagcctgctggatgaaatggaagagtggcagctcaagctacaggcgaaaaacgctcaactgttgcgtaccgccatgcacgatccgctcacggggcttgcaaaccgcgccgcgtttcgcaacaacattgcggcattaatgaacgacgcttcagcaaaaaccaattctgccctgctcttcctggacggtgataacttcaaggttatcaatgacacctggggtcatgccgcaggtgactgcgtactgatcgaagccgccaaaaggatggtcgagtttggcgaaaaacgtcatcagtcttaccgtcttggcggcgatgaatttgccatgatcctttacggcgtccacaccgcacgtgaggtcgaatttatttgcgctgcgctgtcgcagcaatttatccgtccgtttgatctgcataacgggcacacagcatcaatgtccctcagcattggctttgctctggcgtgggaaaatgcctccgttgaagcattactggagcaagccgatcgcaatatgtatctggtcaaaaaccagcgttcgaaaacaatatcctga

SEQ ID NO: 116498 - DNA, 537 bp, Enterobacter cloacae
atgagaaatgcaatcttgatcgctttgctccgactccccctggcgctaatactgttcattttagtagcccctgcaacggcaggctcgttcacggaaacggataaatcagtacgttcgattgtttctggcattgtgagctacacccgatggccagcactgtccggccagcctaagctctgtatttatgcctcttcccattacagacaggcgctcagcagtgaagatgaacacaacccgttgccctatagtcctgtcattgtgcatagcgatcgggaagcactcgcagcaaggtgtgatgccctctatttcgggagcgagtcgccggcaaaacaacaggaaataataaatcaatatcagggccaggcgttgctattaatgtcagaacaaaatcctgaatgcgttattggcagcgcattttgtctgataatagagcacaacctcgtcaggttttccgtaaatctggatgcgctggcgcgcagtggcgtaagagtcaatccggatgtattaatgctcgcacggaataagaagcatgaataa

SEQ ID NO: 116499 - DNA, 375 bp, Enterobacter cloacae
atgcgttcaattgcttttatgttgttgtcgctgattttgtcgggttgccagatcaatccttatacttttcagcctaactggaccagaccggactggttcacggccggtaaagaagacgctatgaatggtgttccggttaaagataaccaggctctggccgatagttttaatgaccctcaggttgatcgagcggaatatcttcgtggctacgctgacggacagaaaaaaatatgcgaagagggctttattcacgcctggggattagcgggcaaatcatttcctgccagctgcgatgcaactgaaaatgcagtaaaactgcatgaatcttggcaacaaggattggatgaaagtatgcgttccagcaggcttaattga

SEQ ID NO: 116500 - DNA, 1071 bp, Enterobacter cloacae
atgcaaaaagacgcgctgaacaacgtacatatcactgacgaacaggtgttaatcaccccggatcaactgaaggcggaattcccgctgagcgtcgcgcaggaagctcagattgagcactcgcgccagaccatttctgacattatcgctggccgcgatccgcgcctgctggtggtatgtggtccttgctctattcacgatcctgaaaccgccattgagtacgctcgtcgatttaaagcattagcggaggaggtcagcgatagcctctatctggtgatgcgcgtctattttgagaagccacgtacgaccgttggctggaaagggttgatcaacgatccgcacatggatggctcgtttgatgtggaagcaggactgaaaattgcgcgtcgcctgctggtggaactggtgagcatggggctgccgctggctaccgaagcgctggatccgaacagcccgcagtacctgggcgatctcttcagctggtctgcgattggggcgcgcaccaccgagtcacaaacccaccgcgagatggcgtctggcctgtctatgccggttggttttaaaaacggtaccgacggcagcctggccacggcgattaacgccatgcgcgccgccgccatgccccatcgttttgtcgggatcaaccaggcgggccaggtatgcctgctgcaaacgcagggcaacccggacgggcatgtgatcctgcgcggtggtaaagcgccaaactacagcccggcggatgtcgcgcagtgtgaaaaagagatggaacaggcgggactgcgtccggcgctgatggtagattgcagtcatggtaattcgaataaagattaccgtcgccagcctgcggttgcagaatctgtgattgctcagattaaagatggcaaccgttcaattatcggcctgatgattgaaagtaatattcatgaaggcaatcagtcatcggaacagccgcgtagcgcgatgaagcccggcgtctcggtcaccgatgcctgcattagctgggaaaccaccgatgcgctgctgcgtgagatccacaaagatttgaacggccagctggcgacgcgtctggcataa

SEQ ID NO: 116501 - DNA, 1122 bp, Enterobacter cloacae
atggttgctgaattgaccgcattacgcgatcaaattgatgaagtggataaggcgttgctggatcttctggcgcgccgcatggcactggttgctgaggtcggcgaggttaaaagtaaatacggcctgccgatttacgttccggagcgcgaggcctctatgctcgcctcccgccgtaaagaggcgcaggccctgggcgtatcacctgatttgattgaggacgttctgcgtcgcgtgatgcgcgagtcctattccagcgaaaacgacaagggcttcaaaaccctctgtccgtcgctgcgcccggtggttatcgtcggtggtggcgggcagatggggcgtctgtttgagaaaatgctgacgctttctggctatcaggtgcgcattctggagaaagaggactggtcgcacgcgccggagctgatgaaagacgccggaatggttatcgtcagcgtgccgatccatgtgacggagcaaataatcgcgaaacttcctccgctgccggaagattgcatactggtggacctggcctccgttaaaaatggtccgctacaggcaatgctggcggcgcacactggccccgtgcttgggttacacccgatgtttggcccggacagcggaagcctggcgaagcaggtagtggtttactgtgacggacggcagccggaagcctaccagtggttcctggaacagatccaggtctggggagcacgtttgcaccgcattagcgcggtagagcatgaccagaacatggcgtttattcaggcgctgcgccactttgcaaccttcgcctatgggctgcacctggcggaagagaacgttcagcttgaacaattgctggcgctttcctcgccaatctatcgtctggagctggcgatggtcgggcgactgtttgcccaggatccgcagctttacgccgacatcatcatgtcgtctgaaaataatctggcgctgatcaagcgctattatcagcgttttggcgaagcgatcaccttgctggaacacggcgataaacaagcctttatcgacagtttccgtaaagtggagcactggttcggtgattacgccacgcgattccagagtgaaagccgcacgctgttgcgccaggcaaatgacagtcgccagtaa

SEQ ID NO: 116502 - DNA, 873 bp, Enterobacter cloacae
atggctgaaccgcagctgctgttgaactataccgggcatctgcccgaatgcccgacatggagtgcagacgagaaggcgctctactgggcggatatcctggaaggggagatccatcggtaccatctgcccaccgcggaacactcggtgctctcattccatgaagaagttgggtgttttgccctgcgtgaacgcggcggatttatcgtcgcgatgcgaaacgccatctggctgaccgataaacacggcctgctccagcgtaaggtttgcgataacccgtccaacccgcagcttgcacgctttaacgatggcggtaccgatcatcagggacggttttatgcgggcacgttctgggggccgggagattataacggcgccatgctgatgcgtatcgacaacgacctgacgccgcaagtgatccagtgcgatattcacgggcataacggtttagcgtttagtcctgataaacggtggatgtttacttctgatacgccgaacggcgtgatctaccgtacgccgcttgatgagcagggagaacccggtaagcgcgaagagtttcgccggtttagcgagggagaaggtatacccgacggtgcggcaatggatgaggaaggctgctactggagcgcactgtttgacggctggcgtatcgcacggttttcaccgcaaggcgaacagctggaagagtatcggctgccggtacgctgcccgacaatggtctgctttggcggcgacgatatgaaaacgctgtttatcaccaccacgcgggaaaatatggaggcggaggagctggcgaaatatccgctttccggtgccatcttcaccctgcctgtaaatgtggcagggatgaagaaaagccgctttatcgaacgttaa

SEQ ID NO: 116503 - DNA, 1161 bp, Enterobacter cloacae
atgacaccggaaaacccgctcctggatttacgcgtaaaaatcagtgcactcgacgaaaaattactggccctgctggcagaacgccgcgcgctcgccgttgaagtgggcaaagccaagctcgagtcccatcggccggtgcgcgatatcgatcgcgaacgtgatttactggaacggttgattcaactcggcaaagcgcatcatctggatgcgcactacatcacccgcctgttccagctcatcatcgaagactccgttctgacgcaacaagccctgctccagcagcatctgaacaaaaccaacccgcactctgctcgtatcgctttcctcggcccgaaagggtcctattctcacctggcagctcgccagtacgcagcccgccatttcgaagagtttattgagagcggctgcgcgaaatttgcagacattttcaaccaggtcgaaaccggccaggcagattacgccgtagtgcctattgagaacaccagttccggtgccatcaatgatgtttacgatctgctccagcacaccagcctgtcgttagtcggcgagttgactatccctatcgatcactgcgtgctggtctctggctcaaccgatctgagtcagatcgaaacggtgtacagccacccgcagccgttccagcagtgcagccagttcctgaaccgttatccgcactggaaaattgaatacaccgaaagcacctcggcggcgatggaaaaagtggcgcaggcaaactcttctgccgtcgcggctctcggtagcgaagcgggcggcgcgctgtatggcttacaggtgctggaacgcaatctggccaaccagacgcagaatatcacccgtttcgtggttctggcccgcaaggccatcaacgtgtcggaccaggtcccggcgaaaaccaccctgctgatggcgaccggccagcaggcgggtgcgctggttgaagcgctgctggtgctgcgtaatcacaacctgatcatgacgaagctggaatcccgcccaatacatggcaacccgtgggaagaaatgttttatctcgacgttcaggccaacctggagtctgcgtccatgcagaaagccctgcgcgaactgggcgagatcacacgctccatgaaagtgctgggctgctatccgagcgaaaacgtggtcccggtcgatccggcttaa

SEQ ID NO: 116504 - DNA, 342 bp, Enterobacter cloacae
atgacaatgaacattaccagtaaacaaatggaaattactccggcaatccgccagcacgtcgcagaccgtctcgccaaactggataaatggcaaacacatttgattaatccacatatcatcctgtccaaggagccgcagggtttcatcgctgatgcaactatcaatactccaaacggccatctggtcgccagcgcaaaacacgaggatatgtacaccgcaattaacgatttgatcaacaagctggaacggcagctcaataaagtgcaacacaaaggtgaagcacgtcgcgccgcaacctcggtgaaagacgccagcttcgcggaagaagttgaagaagagtaa

SEQ ID NO: 116505 - DNA, 738 bp, Enterobacter cloacae
atgacgcgcatgaaatatctggtggcagcggccacgttgagcctggctttggtgggctgctccggttcgaatgaacaggtccctgacaatccgccgaatgaaatctatgcgactgcacaacaaaagttgcaggacggtaactggaaacaggcgataacgcaactggaagcgttggataatcgctatccgtttggcccgtattcgcagcaggtacagttagatcttatctacgcctactacaaaaatgccgatctgccgctggctcaggcaaccatcgatcgtttcatgcgtctgaaccctacccatcctaacatcgattacgtgatgtacatgcgcggcctgactaacatggcgctggatgatagtgcattgcagggcttcttcggggtggatcgttccgaccgtgacccgcaacatgcgcgtgatgctttcaatgacttctccaaactggtgcgtagctacccgaacagccagtacattaccgatgccactaagcgtctggtattcctgaaagatcgtctggcgaaatatgagtactccgttgcggaatactacacccgccgtggcgcatgggttgccgtggttaaccgtgtagaaggcatgctgcgtgattatccggatacccaggccacgcgtgatggcctgaagctgatggaaaatgcgtatcgccagatgcagatgacggctcaggctgacaaagtggcgaaaatcatcgccgcgaacagcagcaacacctga

SEQ ID NO: 116506 - DNA, 981 bp, Enterobacter cloacae
atggcacaacgagtagaactcaccgcaacagtctccgaaaatcagctcggtcaacgcttagatcaggctttggccgaattgttccctgattattcgcgttcacgcataaaagaatggatccttgaccagcgcgtgctggtaaacggcaagatctgggacaaaccaaaagagaaagtgtttggtggggaagctgtcgccatcaatgctgaaatcgaagaggaagtccgcttcgagccgcaggatatcccgctggatatcgtctacgaagatgacgacattctggtcatcaacaagccgcgcgactttgttgttcacccgggcgcgggcaatcctgacggtacggtacttaacgctctccttcattattatccgccgattgccgatgtaccgcgtgccggtatcgttcaccgtctggataaagacaccacgggtctgatggtggtggcgaagacggttcccgcccagactcgcctggtggaatcgttgcaactgcgcgaaatcacccgtgagtatgaagcggtggcgattggtcatatgacctctggcggcacggtggaagagcctatcagccgtcacccaaccaagcgtacgcatatgtctgtacacccgatgggcaaaccggcggtaacccactaccgcatcatggaacatttccgtattcatacgcgcctgcgtctgcgtctggaaaccgggcgtactcaccagatccgcgtgcacatggcgcatattacccatccgctggtgggggaccctgtttacggcggtcgtccgcgtccaccaaagggcgcatcggatgaattcatctccgtgctgcgtaaattcgatcgccaggcgctgcatgcgacgatgctacgtctttaccacccaatcaccggaattcagatggaatggcatgcgccgatcccacaggatatggtggaacttatcgacgcgatgcgcgcagatttcgaagaacataaggatcacgtggactggttatga

SEQ ID NO: 116507 - DNA, 732 bp, Enterobacter cloacae
atgaccaaactgattgtcccggaatggccactgcctgaaggcgtggccgcctgtagttcaacccgtatcggtggcgtgagccagggcgcgtgggagtcactgaacctcggtgcgcactgtggtgataacctggagcacgttgaagagaaccgtaaacgcctctttgctgcgggaaaccttccttcaaaaccggtctggcttgagcaggtgcatggtaaagcggtgctgaagctgacgggggagccctatgcgtctaagcgcgccgatgcttcgtacagcaatacgccgggaacggtttgcgcggtgatgactgctgattgcctgccggtgttgttctgcaatcaggcagggactgaagtggctgctgcccacgccggatggcgaggcctgtgcgaaggcgtgctggaagagaccgttgcctgcttccatgacgattctgcaaatctcatcgcctggcttggcccggcgattggcccgcaggcgtttgaggtagggcccgaagtgcgggatgcctttatggaaaaagatccgcaagcggtcgaagcgtttgtggcttccggagataaatatctggccgatatttatcagcttgcccgccagcgcctgaataacgtcggcgtgacccaaatcttcggcggagatcgctgtaccttcaccgaaaagggtgattttttctcctatcgccgcgacaagacgacaggtcgtatggcaagtttcatttggctgatataa

SEQ ID NO: 116508 - DNA, 2574 bp, Enterobacter cloacae
atgcgtctggatcgtcttactaataaattccagcttgctctcgccgatgcccagtcccttgcactggggcacgacaaccaatttatcgaacctcttcatttaatgagcgccttgctgaatcaggaagggggatcggtacgtcctttattaacgtccgctggcattaatgccggccagttacgcaccgccatcgatcaggcgctgagccgtttaccgcaggtagaaggtaccggcggcgacgtgcagccgtcgcaggatctggtgcgcgtgctgaacctttgcgacaagctggcgcaaaaacgtggggacaactttatttcgtcagagctgtttgttctggcggcgcttgaatcacgcggtaccttaaccgacctgctgaaatccgccggtgcaaccaccgctaatgtgacccaggcgattgagaaaatgcgcggaggtgaaagcgtgaacgaccagggagccgaagaccaacgtcaggctttgaagaaatttacggtcgacctgaccgaacgtgccgagcagggcaaacttgacccggtgatcggccgtgacgaagaaattcgtcggactatccaggtactgcaacgtcgtaccaaaaacaacccggtgctgattggtgagcctggcgtcggtaaaaccgccatcgttgaagggctggcgcagcgtatcgttaatggcgaagtgcccgaagggctgaaaggccgtcgcgtactggcgctggatatgggcgcgctggtggccggggcgaaataccgcggtgaatttgaagagcgtctgaaaggcgtgctgaacgatctggcgaaacaggaaggtaacgtcattctgtttatcgacgaactgcacaccatggtgggggcgggtaaagctgacggcgcaatggatgccgggaacatgctgaaacctgcgctggcgcgtggtgaacttcactgcgtcggcgccactacgctggacgagtatcgtcagtacattgaaaaagatgccgcgctggagcgtcgcttccagaaggtgtttgtcgctgaaccaagcgttgaagataccatcgccattttgcgaggactgaaagagcgttatgagctgcaccatcacgtgcagatcactgacccggccatcgttgcggcggcgacgctttcgcatcgttacattgccgaccgtcagttgccggataaagccatcgaccttatcgatgaagcggcgtccagcatccgtatgcagattgactcgaaaccggaagagctggaccgactcgatcgccgcattatccagctcaagctggaacagcaggcgctgaacaaagagtctgatgaagcgagtaagaaacgcctcgatatgctcaacgaagaactggacgagaaagagcgtcagtattctgagctggaagaagagtggaaagctgagaaagcctccctctctggcacccagacaatcaaggcggagctggagcaggcgaaaattgccattgagcaggcgcgtcgcgtgggggatctggcacggatgtccgagctacagtacggcaagatccctgagctggaaaaacagctagagattgccacgcagtcggaaggcaaaaccatgcgtctgttgcgtaataaagtgacggatgccgagattgccgaagtgctggcgcgctggacgggtattcctgtggctcgcatgatggaaagcgaacgtgagaaactgctgcgtatggagcaggatctgcatcagcgcgtcattggacagaacgaagcggtcgaagcggtatctaacgccattcgtcgtagccgtgcggggctgtccgatccgaatcgtccaatcggctcgttccttttcctggggccaaccggtgtcggtaaaactgagctgtgtaaagcgctggctaactttatgttcgacagcgatgacgcgatggtgcgtatcgatatgtccgagtttatggagaaacactccgtctcgcgtctggtcggtgcgcctccgggatatgtcggttatgaagagggcggttacctgacggaagcggttcgtcgtcgtccttattccgtcatcctgctggatgaagtggaaaaggctcatcctgacgtgtttaacattctgttgcaggtgctggatgatgggcgtctgacggacgggctgggaagaacggtcgacttccgtaacacggtggtgatcatgacctcgaacctgggttccgatttgattcaggaacgcttcggtgagctggattatagccatatgaaagatcttgtgctgggtgtggtcagtcaaaacttccgtccggagttcatcaaccgtattgatgaagtggtcgtgttccatccgctgggcgagaaacacatcgcgtcgattgcgcagatccagttgcagcgtctgtacaaacgtctggaagagcgtgggtatgaaatccacatttccgacgatgcgctgaaactgctgagcgagaatggttacgatcctgtttatggtgcgcgtccgttaaaacgtgctatccagcagcagatcgaaaacccgctggcacagcaaatcctctctggggagctggttccgggcaaagttattcgtctggaagccaacgacgatcgcattgtggcagtgcagtaa

SEQ ID NO: 116509 - DNA, 2481 bp, Enterobacter cloacae
atgtcttctacattgccgctgaccctcagcgcacttctggcgcgtcgtgactgggaaaacccgggcgtgacgcagtggaatcgtctggccgcacacgcgccttttcatagctggcgcgatgataccttcgcccgcgaggataagccttcgctgagcaagcgtctgcttaatggcgtctggcgattcagctttttcccggcgccagagcaggttcccgagacatggttaacggacgatctggctgacgccgttgagatgcccgtgccgtcgaactggcagatggagggatttgatactcccatctataccaacgtcacctatccgataaatgtgaacccgccgtatgttccggctgaaaacccaaccggttgttactcgctcacatttgatatggatgacgcctggctgtgcagcgggcaaacccgcattatttttgacggggtgaattcagcttttcatctgtggtgtaacggccagtgggtgggttattcgcaggacagccgtctgcctgcggagttcgatctcagcgcggtgctgcgaccggggcagaaccgtctggcggtgatggtgttacgctggtgcgacggaagctacctggaagatcaggacatgtggcggatgagcggcattttccgcgacgtctcgctgctgcacaagccggaaacgcgaattgccgattatcagatcgtgaccgatctgaatgccgaatgcgatcgggcgatactccgggttgacgttgcgctggaaggctcacgctacgccgaatgcgaggtggcgtttaccctgtggcgtaatggcgaagcctgcgcgcaaaccacgcagcagcccggatcggccatcgtggacgaacgcggcagttgggctgaacggcttacggtggcgatacccgtgaacgctcccgcgctgtggagcgctgaaacaccggaatgctatcggctgacaatgtcgcttcgggatgcgcagggtaacgtgctggagactgaagcctgcgatgtcggtttcagacgcgtcgaaatcagcaacggcctgctgaagcttaacggcaaaccgctgctgatccgcggcgtgaaccgtcacgaacatcatcctgagaaggggcaggtgatggatgaggcgaccatgcgccgcgacatcgaactgatgaagcagcataacttcaacgccgtgcgctgctcgcattatccgaaccatcctctgtggtacacgctttgcgatcgctacggcctgtacgtggtcgatgaggcgaatattgaaacccacggcatggtgccgatgagccgcctggcggacgatccgcgctggttgcctgccatgagcgaacgcgtaacgcgtatggtgcagcgggaccggaatcatccgtccatcatcatctggtccctggggaatgagtccgggcatggggcgaatcacgatgcgctgtaccgctggctgaaaaccgccgatcccacgcggccggtgcagtacgaaggcggtggcgccagtacggccgctaccgatattgtctgcccgatgtatgcccgcgtcgatcaggatcagccattcccggcggtgccaaagtggtcgattaaaaagtggatcggcatgccggacgaaacccgtccgctgatcctgtgcgagtatgctcacgcgatgggcaacagctttggcggctttgccagctactggcaggcattccgcagccatccccggttgcagggcggatttgtctgggactgggtcgatcaggcgctgacgaaaaaagcggaagacggcacggcattctgggcctacggcggcgattttggcgataagcccaacgaccgtcagttctgcctcaacgggctggtgtttcccgatcgcactccgcaccccgccctttacgaggcgcagcgtgcccagcagttctttacctttacgctggtgagcaccgttccgctggtcgtcgagatccagagcgaatatctgttccgtcatactgacaacgaatatctgcgatggtcggtggcgcgtgacggtgcggtattggcctccggcgaaacacccctttctgttgcgcctcaggagacgcagcgcgttgagatcccgctgcctgagcttgacgctgagccgggcgaggtctggctcaacgtggagatcgttcagccgcaggccacgccgtggtcgccgcccggccaccgttgtgcctgggatcagtggccgctcccggctccgctgtaccttgcgccaccgaaagcaggcggaacccctccgcagctaacggtgcaggacgaggcgctggacattactcatcagcagcagcgctggcagtttagccgtctcaccggaaacctggcccagtggtggaacgagggcgctgaaacgctccgttccccgctaacggataacttcacccgcgcgccgctggacaatgacattggcgtcagcgaggcgacccgcatcgatccgaacgcgtgggtggaacgctggaaagcggcagggagtagagtaagaggcagggcgtag

SEQ ID NO: 116510 - DNA, 1071 bp, Enterobacter cloacae
atgaaagcgatcactctttatgacgttgcccgcgtggcgggcgtttcctatcagaccgtttcccgggtgattaacgacgcagaacacgtttctgcccgtacgcgggaaaaggtccggcaggccatggcggcgctacactatgtgcctaaccgtggcgcgcagcagctggccgggaaacgtacccgcacgctggggctgatgaccagcgatctggcgctgcatgcgccgtcgcaaatcgcctcagctgtaaaatcccgggcagtggagcagggggctagcgtactcatctccatggtggagcaacccgcgcagtgtcaggctgctttgcaggaattactggcgcagcgcgtggaggcgctgctggtgaacgttccgctggaagatgcacaggcagaaatgcttcaggaaatggcctcgccgaccctggttctttttctcgatgtttcccccacagctcgggttaacagccttgttttcaatgccgaacagggcgctggcctgggggcagagcatctgctttcgctggggcaccagcgaattgcgctgctcgccgggccggaaagttctgtctctgcccgggctcgtctggcgggatggaaaaccacgctggcccgggccggcgtggaggcgtttgcggtggcgcagggcgactggagcgcggcctcgggctatgagaaagggcatcagctcctggcgggcgcgcagctgccggaggcgatcctcgtcgctaacgatcagatggcgcttggcgttttacgcgcctgtgcggaaaaaggcgttgcggtaccggggcagatctcggttgtcgggtttgatgatacggctgacagcgcgtggttttcacctccgctcaccaccgttcggcaggcgttccgcgaggccggtgagcgcagcgtggagcggctgatggcacctgcccatcacgacgaatgctggcaggaacaacttcccgttacgttgatcgtgcgtcattccaccgcgccgcgcgccgcacagcaggccgatcgtgaagatctggcgcaacagctcagaactctggcgctgctggcggagaagctggcgcgcagctag

SEQ ID NO: 116511 - DNA, 612 bp, Enterobacter cloacae
atggtacgtcgtctggtacaactttatgtcggtttaggcctgtatgggctttcaaccgcgatgtttattcgttcggatctgggtgtcgacccgtgggatgtctttcaccttggcgtcgccatccagaccgggatgagtatcggcacggtgattattttaaccggggccgcggtgctgctgctgtggatcccgctgcgtcagctgccgggactgggtactatcagtaatgtgatttgtattggtctggcggccgatgcgtcaatggcgctgatccctgagctcacctcgctgcccgtgcgcatcaccctgctggtttccggcattgtggttaacgcccttgccaccgggatgtatatcggcgcgggttttggcgcaggcccgcgcgacggtctgatgaccggcatacatacccggctgggctggtcgatccgcagcgtgcgtaccgcgatcgaggtgaccgtgttgatcgtcggctacctcctcgggggagcgtttggcgttggaaccgtactgtatgcattaaccatcggcccgctgatccagctctgtttgccgtggtttcggcagagaccgcgcattcagaaagccgcgcggccggagcggattgtttaa

SEQ ID NO: 116512 - DNA, 1422 bp, Enterobacter cloacae
atgtcatcacgtcgttttggaagccagtctctggtacgcctgttagggcactggcagcaagcctcttcccgcaccccgctgtggcgccagctggctgacgcgttacgcctgttaattctggatggcaggctagcgttaaacacgcgcctgcccggagagcgggaactggccgccgctctgagcgtaagtcgtaccaccatcagcagcgcgctggcgcatctgcgggaagagggttatctggagagccgtcacggcagcggttcgcgggcgatcctgccagacagctgcgccgtgcccacgctttctactgccagcgcggcgctggatctctcaaccgccgcactcaacgcgggaccagagatccaccaagcctacgcccacgcgctgacggccatcacgccgaatctggcgctgaccgggtacgatcagcttgggcttccggcgctgcgtgaagctatcgccgcccgctacaccgcacgcggtctgcccacccgggcagacgaagtgatggtggtgaacggcgccgtcagcggcttcgccctgatcttaagaatgatgaccggtcccggggatcgcgtggtggtggatcatcccacctacccgctggcgatagccgctattcagggggcgctatgccggcccgtgggcgtctcgctgcctgaaacgggctgggataccgacggttttgccgcaacgcttgcccagaccgccccgcgtctggcctatctgatgccggattttcataatccgaccggacgttgcatggatgccgtgacgcgccagaccataaccgacatcgccgcgcagacccgcaccacgctggtggtggatgaaaccatggtcgatctctggttcgatgttcccccgccgccgccgctggccgcctttaacccggaggccacggtgatgacgctgggttccgcaggtaaaagcttctggggtgggctgcgtctcggctggatccgcgcctcgtcacgcactatcgccaccctcgcgcaaacgcgcgacacgctggatctgggctctccggtgctggaacagctggccacgctgtggcttatcgaaaacagtgcaaccttcctgcctgcccggcggcaaatgctggcagaacggcgcgaccgctgcggccagatgctgcgggaacatttccccgaatggcggtttcaggaagcggagggagggctttcatactggattgaattacccggcatgctggcgacacagctggcggcacgcgccgaaacgacaggcatcattatgggcaccggcacgcgttttggactatcaggcgcgtttgaccgctacctgcgtatgcccttctcactcagttcaccagaacttgaagaggcattattgcggatcaaaccgctgtggcgtgcattaaataaaagtgtagcgccagtaaaacggagcctggtgtaa

SEQ ID NO: 116513 - DNA, 216 bp, Enterobacter cloacae
atgaaacaacaactatcgactgccagtgactacaacgaggcctgcaatctgttacgttccggctacgtgaaacatgttcgtcttggctggaatgtaggaagtgatgagttctttcgtattgcgtctgactggtgtgataccggtgcaaaaataaagaaagaaggggataatttcattatttcgctgaaaggcttcccgattccacctcaacattaa

SEQ ID NO: 116514 - DNA, 252 bp, Enterobacter cloacae
atggttactgcggttttaaacgttaaaattgatgaagcgctaaaagaaagacttcgccactatgcggaagacaataatgagaatttaagcgtgaccacagagaaactgctgctgctggcatttgaagcagtagaagaggcgggagtatcggaagaggatgttgataatcagcatacggaagaagagagcgtaactccatttactcctaaagaaatcaaagcactacgtaaacttctgaagaagagaaaatga

SEQ ID NO: 116515 - DNA, 312 bp, Enterobacter cloacae
atggacgaacatgacactttcccacagcgagtgtggcaaatcgtagcctcgatcccggaaggctgtgtcacgacctatggggaagttgcccggctggcgggttctccgcgcgcggcgcgtcaggtaggcggcgtgctaaggaggctaccagaaggaagcacgttaccgtggcaccgggtcgtcaatcgccatggcgccatttccctcaccgggccagacttgcagcgccagcgtcaggctttactttcagaaggggtgcaggtgtccggggcaggacaaattgatatgcagaagtatcgctgggagtactga

SEQ ID NO: 116516 - DNA, 528 bp, Enterobacter cloacae
atgaaactcgtgcctatgctcagtggtgtagcaattgcggtagcgttgtccgcctgtgctggtaagagtgccgatgtaccggtgccaacagcaagcgcaaacgggattaacaccctttcacagcaagctattcagcagccaaatgtttccggtacgatctggatcaaacagaaggttgcgctgccgccggatgcggttttaacggtcacgctgtctgatgcttccctggcggatgcgccttccaaagtgcttgcgcagcgcgcggttcgtacagagggtaaacaggcgccgttcagctttgtgctgccgtacaacccgtctgacgtgcaacccaatgcgcgtatcctcctgagcgcggcggtaacgatcaacgataagctggtctttatcaccgataccgtgcaggaagcggtcaacaaaggcggcaccaaaatcgacctgaccctggtaccggtgcagcaaactgaagtacctgttgcaacgcagaacaatcagccgactctgcctacaccgccaacacagctgtaa

SEQ ID NO: 116517 - DNA, 861 bp, Enterobacter cloacae
atgagtcaggcactgaacaatctgctgacattactgaacctggaaaaaatagaagaagggctatttcgcggacagagcgaagatttaggcttacgccaggtttttggcggccaggtcgtggggcaagcgctgtatgccgccaaggagaccgtcccggcagaccgtctggtgcactcgtttcacagctactttttacgccccggtgacagcgctaaaccgattgtttacgacgtggaagttctgcgtgacggtcaaagcttcagcgcccgtcgcgtggcggccatccagcatggcaaacccatcttctacatgaccgcctcgttccaggcgccagagccgggctatgagcatcaaaaaaagatgccgtctgccccgtcgccggacgatctgaaatcggaaaccgaaattgcccgcgctctcgcgcatctgctgccgccgcaggtaaaagagaagtttctgtgcgataaaccgctggagatccgctcggtcgaatttcataacccaatgaaggggcataccgctgagcccgcccgccaggtgtggatccgcgccaacggcagcgtacccgcagatttacgcgtgcatcagtacctgctggggtatgcgtcggatttcaacttcctgccggttgcgctacagccgcacggtgtgggcttcctcgaaaaagggatgcaggtagccacaattgaccattccatgtggttccaccgtccattcgatatgaacgaatggctgctttacagcgtggaaagtacctctgcgtccagcgcgcgcggctttgtacgtggggagttttacactcaggatggcgtgctggtggcttctaccgtgcaggaaggtgtgatgcgtaatcgcgggtga

SEQ ID NO: 116518 - DNA, 1287 bp, Enterobacter cloacae
atgaagaaagcaacaatgaaaacaggtctgggttcgctggcactgctgccgggcctggcaatggctgcacctgctgtggcagacaaagccgataacgcctttatgatgatttgcaccgcgctggtgctgttcatgacgattccggggatcgcgctgttttacggcggcctgatccgcggcaagaacgtactctccatgctgacgcaggttgccgtcacgttcgcgctggtgtgtgtgctgtgggtggtttacggttactcgctggccttcggggagggcaacgccttcttcggcaacgttaactgggcgatgctgaaaaatatcgaactgaccgcggtgatgggcagtttttatcagtatattcatgtcgcgttccagggctcattcgcctgcatcaccgtggggctgattgtgggcgcgctggctgagcgtatccgcttctctgcggtactgattttcgtggtggtctggctgacgctctcctatatcccgattgcgcatatggtctggggaggtggtttgttggcttcccatggcgcgctggactttgcgggcggtaccgttgtgcacatcaacgccgcggtagcaggtctggtaggcgcatacctgattggtaagcgcgtgggcttcgggaaggaagcatttaagccgcacaatctgccgatggtctttaccggcaccgccatcctctattttggctggttcggcttcaacgcaggttcagccagcgccgctaacgaaatcgccgcgctggccttcgtgaataccgttgtggcaaccgccggcgctatcctctcatgggtatttggcgagtgggccgttcgcggcaagccatcgctgctgggtgcctgttccggggcgattgccggtctggtaggtattacgccagcgtgcggttacgtgggcgtgggcggtgcgctgctgatcggtatcgtcgcaggactggcggggctgtggggcgttaccgcactgaaacgtgttctgcgcgttgacgatccgtgtgatgtattcggcgtacacggtgtgtgcggcatcgtcggctgtatcatgaccggtatctttgctgcccaatctctgggcggtgtgggttacgcagaaggcgtgaccatgatgcatcaggtgctggtacagctggaaagcatcgcgatcaccgttgtctggtccggtgttgtggcctttatcggttacaagctggctgatatgaccgttgggctgcgcgtgccggaagagcaggagcgcgaaggcctggacgtcaacagccacggcgagaatgcctataacgcataa

SEQ ID NO: 116519 - DNA, 339 bp, Enterobacter cloacae
atgaagctggttacggtggtaatcaaaccattcaaactcgaagacgtgcgtgaagcgctgtcttccatgggtattcagggactgactgtcaccgaagtgaaaggctttgggcgtcagaaaggtcatgccgagctttatcgcggggcggaatacagcgttaacttcctgccaaaagtgaagattgatgtggcgattgccgacgatcagcttgatgaggtgattgatgtcgtcagcaaagcagcctacaccggaaaaattggcgacggcaaaattttcgttgccgaactacagcgcgtcattcgcatccgtaccggcgaatctgacgaagcggcgttgtaa

SEQ ID NO: 116520 - DNA, 1782 bp, Enterobacter cloacae
atgcgtaagtttggacagatgtggccgacgttaaaacggctgctggcctatggctcgccgtggcgcaaaccgctttccatcgccgtgctgttgctgtggatcgccgcgattgcggaggtgaccggtccgctgcttatcagttatttcatcgacaatatggtggcgaaaaactatctgccgctggggctggtggcggggctgggcgtggcgtatgtcggcctacagctgacggcggcggggctgcactatgcgcagtcgctgctgtttaaccgggccgccgtgggcgtggtccagcagcttcgcacggatgtgatggatgccgcgctgcgccagccgctgagcgagtttgatactcagccggtcgggcaggttatttcgcgcgtcaccaatgacaccgaggtgatccgcgacctctatgtaaccgttgtcgcaacggttctgcgcagtgccgcgttaattggcgcgatgctggtggcgatgttcagcctggactggcgtatggcgctggtggcgatcgctattttcccggcggtgctgattgtgatggtaatttaccagcgctacagcacgccgattgttcgtcgcgtgcgcgcttacctcgcagatatcaatgatggcttcaacgaagtgatcaacggcatgagcgttatccagcagtttcgccagcaggcgcgttttggcgagcgaatgggagaagccagccgctcgcattatatggcgcggatgcagacgttacggctggatggcttcctgttacgcccgctgctgagcctcttctctgcgctggtgctgtgcgggctgttgatgctgtttggcctgacgacgcgcggaaccatcgaggtgggggtactgtacgcatttatcagctaccttggacgccttaacgaaccgctgattgaactcaccacgcagcaatcgatgctgcaacaggcagtggtcgcgggcgaacgtgtattcgagctgatggacaggccgcgtcagacctatggcgatgacgaacgcccgctggaaagtggatccatagcgtttgatcatgtctcgtttgcctaccgcgacgaccagcttgtcttgcaggatatcaacctcgaggtaccgtcgcgcggttttgtcgccctggttgggcataccggtagcggcaaaagcacgctcgccagtttgctgatgggctactatccgttgacgcaaggggagatccgtctggacggacggccgcttgccgcgcttagccacaacgcgttacgtaagggcgtcgcgatggtgcagcaggatccggtggtactggcggataccttttatgccaacgtgacgctgggacgacctttcacgcctgagcaggtatgggaggtgctggaaacggtacagcttgcggatctggcgcgcgggttaagcgaggggatccatacccggctgggtgagcagggcaataatctctcggtcgggcaaaagcaacttcttgcgctggcgcgcgtgctgattgagacgccacaggtgttaattctggatgaagcgaccgcaagcattgactccggtaccgagcaggcgatccagcaggcgctggctgccgtgcgggatcgcactacgctggtggtaatcgcccaccgcctctcaaccatcgtcgatgccgataccattctggtgctgcaccgtggccaggccgttgaacgggggacgcacagagcgctgcttgaggcaaaaggacgctactggcagatgtatcagttgcagctggcaggcgacgaactggccgccagcgcgcgcgaggaagagtcactcagcgcctga

SEQ ID NO: 116521 - DNA, 1755 bp, Enterobacter cloacae
gtgcgattatttgcccaattaagctggtactttcgtcgggagtggcaacgctacctcggcgcggtggccctgcttattatcattgccattctgcaactaatcccgcccaaagtggtgggttacgtcgtggatggcgttacggaacaacattacaccgccgcacgggtgatgatgtggggcggtacgctggtgctgacggccgtggtggtttacctgctgcgttatgtctggcgcgtgctgctgttcggcgcgtcctatcagcttgccgttgagctgcgcgaggacttttaccgtcagctgagccgccagcaccctgagttttatctgcgtcaccgtaccggggatctcatcgcccgcgccactaacgatgtagaccgcgtggtgtttgccgccggtgaaggggtgctaacgctggtggattccctggtgatgggctgtgcggtactgattgtgatgtctacgcaaattagctgggagctcacgctgctggcgctgctgccgatgccgctgatggcgctggcaattaaccgctacggcgagcagctccatgaacgctttaagctggcgcaggcggcgttctcgtcgctgaacgatcgcacccaggagagcatgaccagcatccgcatgattaaagcgtttggtctggaagaccgccagtccgcgctgtttgccgccgacgccgccgataccggcgcgaaaaacatgcgcgtggcgcgtattgatgcccgtttcgatccgacaatttatattgcgattggcatggcgaacctgctggcagtgggcggcggcagctggatggtggtgcaaggcacgatgaccctcgggcagttaaccagctttgcgatgtaccttgggctgatgatctggccgatgctggcgctggcctggatgtttaatatcgttgaacgcgggagcgccgcttacagccgtatccgcgccatgctggcggaagtgccggtcgtgaacgatggcagcgagccggtatcggaaggtccgggtattctcaaggctgatatccgcgcctttatctacccgcaaacggaacatccggtgcttgagaacgtcagtttcacgctgcgtcctggtcagatgctgggcatctgtggcccgacgggttccggtaaaagcaccattctgtcactgattcagcgccattttgacgtgagcgaaggcgatatccgtttccacgacgtccctctgccacgtctgctgctggatgactggcgcagccgcctggcggtcgtcagccagacgccgtttttgttttcagacaccattgccaacaatatcgcgctcgggtgtccgacggcgacacaggaccagatcgagcacgtggcgcgtctggccagcgtccacgaggatattctgcgcctgccgcagggctacgacacggaagtgggtgagcggggcgttatgctctccggcggacaaaaacagcgtatctctattgcccgcgcgctgctgctggacgctgagatcctgatactggatgatgcgctgtccgcggttgacgggcgtactgaacatcaaattttgcataaccttcgccagtggggagaggggcgcacggtcatcatcagcgcgcaccgtctgtcggcccttaccgaagccagtgaaattctggtgcttcagcacgggcatattgctcagcgtggtcagcatgagcagctcgccgggcagaccggatggtatcgggatatgtaccgctatcaacagcttgaagccgcgctggatgaggaggtcgccgatgcgtaa

SEQ ID NO: 116522 - DNA, 459 bp, Enterobacter cloacae
atgttagataaaattgatcgtaagctgctttctttgctgcaaagcgactgcaccctctctttgcaggcgctggcagatgccgttaatctgaccaccacaccgtgctggaagcgcctcaagaagctggaagatgatggcattctgctgggacgcgtggcgttgctggatcccgaaaaactggggcttggactgaccgccttcgtcctgataaaaacgcagcatcacagtagcgaatggtactgccgcttcgtcacccaggtttccgacatgcccgaagtgctcggcttctggcgcatggcgggggaatacgactatctgatgcgcgttcaggtggcagacatgaagcgctacgatgatttctacaagcggctggtcaatagcgtaccaggcttgtccgatgtcacctccagtttcgccatggaacagattaaatacaccacagcgttacccattgaataa

SEQ ID NO: 116523 - DNA, 1047 bp, Enterobacter cloacae
atgaatagcacctgggttaaacatgccatcagcgaaataaatgccgactatcagcgctcggcagacacccacttgatccgcctgcctctgcctggatttcccggcattcagctttacctgaaggatgaaagcacccatcctaccggcagcctgaagcatcgcctggcgcgttcactctttttatacggtttatgtaacggctggatcaaagaaggcaccacgattattgaatcgtcgtccggatcaactgccgtctccgaagcctactttgcccgcctgctgggcctcccgtttatcgccgtgatgccctcctgcacggcgaaacgtaaagtcgaacagatcgaattttacggcggacgctgccactttgtggaaagcgcctgcgaaatctatgcggcctccgaaatgctggcccgcgaactgaatggtcactatatggaccagtttaccttcgccgagcgcgccaccgactggcgcggcaataataacattgcggacagcattttccgccagatgacccacgagccgcatcctgttccctcttacattgtcatgagcgcgggcacgggcggaacctccgccaccatcggacgttatatccgctgtcagggttatgatacgcagctgatggtggttgacccgcaaaactcggtgttcctcgattactggcaatcccgcgatgccagcctgcgcagccccgtggggagcaagatcgaagggattggtcgcccgcgcgtcgaaccctcgttcattccggacgttgtggatgagatgctccgcgtgccggacgccgccagcgtcgcgacggcgcactggctggagacacagcttggccgtaaagtcggggcttccaccggcaccaatatgtggggcgcgctacagctggccgcgaggatgcgcgaagaaggccgtaccggctctgtcgtcacgctgctgtgcgacagcggggagcgctacctggacacctattacaacgcagaatgggtacaggccaatattggcgatgtagaaccgtggaaagcgcagatttcacagctggtgaaataa

SEQ ID NO: 116524 - DNA, 819 bp, Enterobacter cloacae
atggctcggctcgctgcatttgatatggacggcacgctgttaatgccggatcaccgtttaggggagaaaaccctgaacacacttaagcgcctgcgcgagcgtgaagtcaccctgacgtttgccactggtcgtcatgttctcgagatgcgccatctgctgggaacatttgccctcgatgcgttcctgatcaccggcaacgggacgcgcattcactccgtcgacggcaatatgctgcaccgtcaggatctgaatccggaagtggcggacattgtcctgcacagcacctgggatacgcaggccagcgtgcatgtttttaatgatgaaggctggtttaccgggcgtgagatcccggccttgctgcacgctcacgtttacagcggctttaaatatcagcttatcgatttgcgccgcattccggcacacaaggtgaccaagatctgcttctgcggcgatcacgacgatctctgccgcctgcgtattcagcttaacgaggcgctgggcgaccgggcgcacctgaccttctcggcggtggactgccttgaagtgctgccggtgggctgtaacaaaggatctgcgctggcggtgctgagcgatcatctggggctgacgatgcaggactgtatggcctttggtgacgccatgaacgaccacgagatgctgagcagcgtgggtcgtggactgattatggggaacgcgatgccgcaacttatcgccgcgctcccgcatttaccggttatcggacactgtcgtaacgaagcggtgtcccattttttgacgcattggctggacaaaaataacctcccatattcccccgaatag

SEQ ID NO: 116525 - DNA, 813 bp, Enterobacter cloacae
atgcgccagcttaatcgtcttaaccagtatcagcgtctgtggcacccctccgccggcgcaccgcagcaggttaccatcagtgaacttgccagccgctgcttttgcagcgagcgacatgttcgcaccctgctgcgccaggcgcaggaggcgggctggctaagctggcacgcccgctccggacgaggtaagcgtggggaattacgctttcacgtcaccccggactcgttgcgtaatacgatgatggaagaggccctgaaaagtggacagcagcacaacgcgctggagctggcccagctcgcgcctgaagatttgcgatcgctgctgcatccgtttatgggcgggcagtggcagaacgatacgccgacgctgcgtattccctactatcgctcgctggagccgctccagccagggtttctccctggccgggcggagcagcatctggcgggacaggtattctctggtttgacgcgttttaatggtaacagcagtgaacccacgggcgatctggcgcatcactgggaaatctccgctgacggcctgcgctggcatttctacattcgctccaccctgcactggcataacgtcgataaaatagagacggcacagctccggaaaagcctgacggcgctgttatcgcagcccggcatgggcacgcttttccgcagcgtcttacgtatcgaaaccacgcatccgcagtgcctgacgtttattctccatcaacctgactactgctggcgcacaggctggcaacctactgtagccgtctggcgcatcccgattaccccgtggtgggcagcggtccctttcgactga

SEQ ID NO: 116526 - DNA, 867 bp, Enterobacter cloacae
gtgcgtctggaaagccacgagcagtatcaccttggccatccgttgcttaaggctatcgagtactggatcacgccccagctttttgactacagtctgggcaccagctgtcgccacccggtgcaaatcgccattggcgaggccgacgagctggccagcctgcggctggtgagtaacagcaccagtctgggtttctgctacctcacgctgaaacagagcccacgtctgagcgaacttcaggcaaagcggctgattaatatcattcatctctcaacgctgctgcacacgcttcccctgaacgaagggctcatcacccctaccgaggaactgcttcccggctgggcgatcccccaatggcctgatttaaccgacgttgcgctgccagaggcattgacgctcgtctaccacctgccggttgagcttcacaccatggccagccagttaaaagcataccttgcgcggcagggttgtgaactgaccgtcatctttcacgacgccaaaacgtgggacgggtgccagcagcttgccgatgcagacatcatgatgggagacagactgattggcgaagcgccagcgtacacgcttgagcagtggctccgctgcgatgcgctctggccgcatctgctgagcgcaccggcatacgcccatttgcaggccacgctggatgcggtgcagacgcaggccgacgaacgtgaccgacacgcaggacttcaggctatattcagccggttaatggagacagccgtcctgacgccgctctttaactaccagtatcaaatcagcgcgcctccgggcgtcaacggcatacgccttaacactcgcggctggtttgacttcaccgaagcctggcttcctcccccaaacgcgtga

SEQ ID NO: 116527 - DNA, 696 bp, Enterobacter cloacae
atgaaacgtgccgtcgtcgtgttcagcggaggacaagattccaccacctgcctgattcaggcgcttcaccagtatgatgaagtgcactgcgtcacttttgattatggtcagcgtcatcgcgctgaaatcgatgtcgctcgtgaactggccctcaaactgggcgcccgcgctcataaagtgctggacgtgacgctgttaaatgaactggccgtcagcagcctcacccgcgacagcattccggtgcctgattacgaaccggatgccagcggcattccgaacaccttcgtaccgggccgcaacattctcttcctgaccctgacggcgatctatgcctaccaggtgaaagccgaagcggtgatcacgggcgtatgtgagaccgacttctctggctacccggactgccgggatgaattcgtgaaagcactcaatcacgctgtcgatctgggaatggcaaaagagacccgcttcgaaacgccgctgatgtggctggataaggctgaaacctgggccctggccgactactggggcaagctggatgttgttcgcaacgagaccctgacctgctacaacggcattaaaggggacggctgcgggcagtgtgccgcctgtaacctgcgcgcgaacggtctgaatcattattttgcggataaagcgggcgtgatggccgcgatgcagaaaaagaccgggctgaaataa

SEQ ID NO: 116528 - DNA, 399 bp, Enterobacter cloacae
atgcagacacaaatcaaagtccgtggttatcacctcgatgtttaccagcacgtcaataacgcccgctaccttgaatttcttgaagaggcgcgctgggacggcctggagaacagcgaaagcttccagtggctgaccgcacacaacatcgcgtttgtggtcgtcaatatcaacattaactaccgccgcccggctgtgctgggggatgtgctcaccgtgaccagtgaggtccaacaactgaatggcaaaagtggtgtattgagccaggtcgttatgctggagccagaagggcaggtggtggccgatgcgctgatcacctttgtctgtatcgatctcaaaacccagaaagcgttgccgctggaaggggagttgcgcgaaaagctggagctgatgatcgcgtaa

SEQ ID NO: 116529 - DNA, 381 bp, Enterobacter cloacae
atgaaatgtggaatcaaagcactgttaattacactggctattgccacttccgggatgagtgcgggcgcgctggcggcgtccccctcggttaaagcgcaggccgcacaaaaccaggccgatgcaacgttacaaggtcatgttaaagccaacgcgacggtcagcacgaaagccattgaggacgagggtacgcgggtcagtatcaatactgcctctgcggacgatcttgcccgcgttatgaatggcgtgggtctaaaaaaagcgcaggccatcgtcagctatcgtgaagagtatggccctttcaaaacccttgacgatctcaagcaggtgccgggtatgggcagcgcgctggttgagcgcaatctcgcacacctgacgctgtaa

SEQ ID NO: 116530 - DNA, 1872 bp, Enterobacter cloacae
atgatggacagcttacgcacggctgctaacagtctcgtgctcaagattattttcggtatcattatcgtgtcgttcatattgaccggtgtgagtagttacctcatcggcggtggcgcgaactacgccgcaaaagtgaatggccaggaaattagccgtgggcagttcgagaacgcttttgctggtgaacgtaaccgcatgcagcaacagctgggcgaccaatactctgaacttgcaaccaacgaaggctatatgaaaaacctgcgtcagcagacgctgaaccgccttatcgacgaagcgctgctggatcagtacgcgaaaagcctgggtctgggcatcagcgatgagcaggttaaaaaagccatcttctcgacgcaggctttccagtctaatggaaagttcgacaacgcgcgttacaacagcattgttaaccagatgggtatgacggctgaccagtacgctcaggcgctgcgtaaccagttgaccacgcaacagctgatcaacgcggtggtgggcaccgatttcatgctgaaaggcgaaactgaagagctggcggcactggtggcgcagcaacgcgtggtgcgtgaagcgacgattgatgtcaacgcactggcagcgaaacagcaggttagcgacgctgaagttaatgcttactacgagcaaaacaagaacaacttcatctctccggaacagttccgcgtaagctatatcaagctggatgcagctgcgatgcaggaaaacgcgactgacgccgagatccagtcttattacgaccagcatcaggatcagttcactcagccgcagcgtaaccgttacagcgtgatccagaccaaaacggaagcagaagcgaaagccgtgctggacgagctgaacaaaggcgctgatttcgccaccttagcgaaagcaaaatccaccgacattatttctgccaaaaacggcggtgatatgggctggctggaagagtccactaccccggacgagctgaaaaatgcaggcctgaaagagaaaggccaactgtctggtgtaatcaaatcctccgttggtttcctggtggcgcgtctggacgatattgtggcggcgaaaaccaagccgctggctgacgttcgtgatgatatcgctgcgaaagtgaagcaggagaaagcgctggacgccttctatgctctgcaacagaaagtgagcgatgccgcaagcaacgacaatgaatcactggcgggtgctgagcaggctgctggcgttaaagcggttgagacgggctggttcagccacgaaaacctgccggaagaactgaacttcaaaccagtttcagatgccattttcaatggtggtctggtcggtgagaacggtacgccgggcagcaactcagacatcattaccgttgacggtgaccgagcgttcgtactgcgcgtcagcgagcacaaagccgaggcagtgaagcccctggcggaagtgaaagatcaggtggtggcgctggtcaaacacaacaaagcggcacagcaggcaaaactggatgcagagaaaattctggccgatctgaaagccggtaagaacgatgcgctgaaagcggctggcctgagctttggcgaagcaaaaacgctgagccgtaccggtcaggatcctgtcagccaggcggcgtttggcctgagcctgccggcgaaagacaaacctgtctatggtaccacgaccgatatgcagggtaatgtggtgcttctggcgctggatgaagtaaaagccggtacgctgccagacgcgcagaagaaggccatggttcagggaattacccagaacaatgcccagattgctttcgaagcgatgatgagcaacctgcgtaaagaagccaaaatcaaactgggtgatgtggtcactcaggagcaataa

SEQ ID NO: 116531 - DNA, 273 bp, Enterobacter cloacae
gtgaataaatctcaactgattgacaaaattgctgcgggtgctgatatttctaaagctgcagcgggacgtgctttagatgctttaattgcttctgttactgaatctctgcaagctggggacgacgttgcactggtaggcttcggtacttttgcggttaaagagcgtgcagcccgtactggccgcaaccctcagaccggtaaagagatcaccattgctgccgctaaagtgccgggtttccgtgcaggtaaagcgctgaaagacgcagtaaactga

SEQ ID NO: 116532 - DNA, 2355 bp, Enterobacter cloacae
atgaatcctgagcgttctgaacgcattgaaatccccgtattgccgttgcgcgatgtggtggtttatccgcacatggtcatacccttatttgtagggcgggaaaaatctatccgttgcctcgaagccgccatggatcatgataaaaaaatcatgttggtcgcgcagaaggaagcatcaacggatgagccgggtgtaaacgatcttttcaccgtcgggaccgtggcctctattttgcagatgctgaagctgccagacggcaccgtgaaggtgctggtggaaggcttacagcgtgcgcgtattaccactctgtcagacgatggcgagcacttctctgcgaaggcagagtaccttgattcaccggaacttgatgagcgcgaacaggaagtgctggtacgcaccgcgatcagccagttcgaaggctacatcaagctgaataagaaaatcccacctgaagtgctgacgtcgctgaacagcatcgacgatcctgcacgtctggcggataccatcgctgcgcacatgccgctgaagcttgctgacaaacagtccgtgctggaaatgtccgacgttaacgaacgtctggaatacctgatggcgatgatggagtctgagatcgatctgctccaggttgagaagcgcattcgcaaccgcgtcaaaaagcagatggaaaaatcgcagcgtgagtactatctgaacgagcaaatgaaagccattcagaaagagctcggcgagatggacgatgcgccggatgaaaacgaagcgctgaagcgtaagatcgacgcggcgaagatgccgaaagaggcgaaagagaaagccgaagctgagttgcagaagctgaaaatgatgtctccgatgtcggcagaggcgaccgtcgtgcgcggctatattgagtggatggtgcaggttccgtggaatgcccgcagcaaggtcaaaaaagacctgcgtcaggcgcaggaaatcctcgataccgaccactacggcctggaacgcgtgaaagaccgcattcttgagtacctcgcggtacagagccgtgtgaacaaaatcaaaggtccaattctgtgcctggtagggcctccaggcgtgggtaaaacctctctgggccagtccatcgccaaagcgaccggacgtaagtatatccgtatggcgctgggcggcgtacgcgatgaagcggaaatccgcggtcaccgccgtacctacatcggttctatgccgggcaagctgatccagaagatggcgaaagtgggagttaaaaacccgctgttcctgctcgatgagatcgacaaaatgtcttcggacatgcgtggcgatccggcgtcggcgctgctggaagtgcttgatccagaacagaacgtggcgttcagcgatcactacctggaagtggactacgacctgagcgatgtgatgttcgtggcgacctccaactccatgaacattccggccccgctgctggaccgtatggaagtgatccgtctctccggttataccgaagatgagaagctgaacattgctaagcagcacctgctgccgaaacagattgagcgtaacgcgctgaaagccaacgagctgaccgtcgaggacagcgcgattattggcatcattcgctattacacccgtgaagcgggcgttcgtagcctcgagcgtgagatctctaagctgtgccgtaaggcggtgaaacagctgctgctggataagagcctgaagcacattgtgattaacggcgacaatctgcatgcttaccttggcgttcagcgcttcgactacggtcgtgcggacaacgaaaaccgcgttggtcaggtgaccggtctggcatggacggaagtgggcggcgatctgctgaccatcgaaaccgcctgtgtcccgggcaaaggcaagctgacctacaccggttcactgggtgaagtgatgcaggagtccatccaggcggcgctgaccgtggtgcgcgcgcgtgcggaaaaactgggtatcaacccggatttctacgaaaaacgcgacattcacgttcacgttccggaaggggcgacgccgaaagatggcccaagcgcgggtattgccatgtgtacggcgctggtttcctgcctgacagggaacccggttcgtgctgatgtggccatgaccggtgaaattacgctgcgtggtcaggtactgcctatcggcgggttaaaagaaaaactgctggcggcacaccgcggtgggatcaaaaccgtattgatcccttacgaaaataaacgcgatctggaagagattccggacaacgttattgccgatttgcagatccatccggtgaaacgcattgaggaagttctgactctcgcactgcaaaatgaaccgtccggaatgcaggttgtaaccgcaaaatag

SEQ ID NO: 116533 - DNA, 1275 bp, Enterobacter cloacae
atgacagataaacgcaaagatggttcgggcaaactgctgtactgctctttttgcggcaaaagccagcatgaagtgcgtaaactgattgccgggccgtccgtgtatatctgcgacgaatgcgtcgatttatgtaacgacatcattcgcgaagagattaaagaagtcgcgccgcaccgtgagcgcagcgcgttaccaacgccacacgagattcgccaccacctggacgactatgtcattggtcaggagcaggcgaaaaaagtgctggcggtggcggtatacaaccactacaaacgtctgcgtaacggcgataccagcaatggcgtagagctgggcaaaagtaacattctgctgatcgggcctacgggttctggtaaaaccctgctggcggaaacgctggcgcgcctgctggatgttccgttcaccatggcggatgccaccaccctgaccgaagccggttatgtgggtgaagacgttgaaaatattatccagaagctgctccagaagtgcgattacgacgtacagaaagcccagcgcgggatcgtctatatcgatgagatcgacaaaatctcccgtaaatcagacaacccgtcgatcactcgtgacgtctcgggcgagggcgtgcagcaggcgctgctgaagctgattgaaggtacggttgcggctgttccaccgcagggtggacgtaaacatccgcagcaggaattcttgcaggttgatacctccaagatcctgtttatctgtggtggtgcgtttgcaggcctggataaagtgatctctcaccgtgtggaaaccggctccggcattggttttggcgcaacggtgaaagccacgtctgaaaaaccaaacgaaggccagctgctggcgcaggttgaaccggaagatctgatcaaattcggtttgattccggaatttatcggccgtctgccggttgtggcgaccctgaacgaactgagcgaagacgcgctgattcagatcctgaaagagccgaaaaacgcgctgaccaagcagtatcaggcgctgtttaatctggaaggcgttgagctggaattccgtgacgaagcactggacgcgattgccaagaaagcgatggcgcgtaaaaccggtgcccgtggcctgcgttctatcgtagaagcagcattgctcgacacgatgtacgatcttccttctatggaagacgttgaaaaagtcgtgatcgacgagtccgtcattggtggccagtccaagccgttactgatttacggtaaaccggaagcgcagcaggcatctggcgaataa

SEQ ID NO: 116534 - DNA, 624 bp, Enterobacter cloacae
atgtcatacagtggcgaacgagataactttgcaccccatatggcgctggtgccaatggttattgaacagacctcacgcggtgagcgttctttcgatatctattcccgtctgctcaaggaacgcgttatctttctgaccggccaggtggaagaccatatggctaacctgatcgtggcgcagatgctgttcctggaagcggaaaacccggaaaaagacatttacctgtacatcaactcgccaggcggtgtgattacggcgggcatgtcaatttatgacaccatgcaattcatcaagccggatgtcagcaccatctgtatggggcaggcggcgtccatgggtgctttcctgttaaccgcaggggcgaaaggtaagcgtttctgcctgcctaactcccgcgtgatgattcaccagccgctgggtggttaccagggccaggcgacggatattgaaatccacgcccgagaaattctgaaagtaaaagcgcgcatgaatgaacttatggcgcagcatacgggtcaacctctcgagcagatcgagcgcgataccgagcgcgatcgcttcctctctgcaccagaggcagttgagtacggcttagtcgactccattttgacccatcgtaattga

SEQ ID NO: 116535 - DNA, 1299 bp, Enterobacter cloacae
atgcaagtttcagttgaaaccactcaaggccttggccgccgtgtaacgattactatcgctgctgacagcatcgaaactgctgtgaaaagcgagctggtcaacgtagcaaaaaaagtacgtattgacggcttccgcaagggcaaagtaccaatgaatgttgttgctcagcgttatggcgcttccgtgcgtcaagatgtgctgggtgaactgatgagccgcaactttatcgacgcgatcatcaaagaaaaaatcaatccagccggcgcgccgaactacgttccaggtgaatacaagcagggcgaagacttcacctactccgtagagttcgaagtgtacccggaagttgagctgaaaggtctggaatctatcgaagttgaaaaaccgatcgtttccgtgactgacgaagacgttgacggcatgctggataccctgcgcaagcagcaggcgaactggaaagagaaagaaggcgctgttgacgcggaagaccgcgtaaccatcgacttcaccggttctgtagacggcgaagagttcgaaggcggtaaagcgtctgacttcgtactggcgatgggccagggtcgtatgatcccaggcttcgaagacggtatcaaaggccacaaagcgggcgaagagttcaccattgacgtgaccttccctgaagaataccacgctgaaaacctgaaaggtaaagcagcgaagttcgttatcaacctgaagaaagtggaagagcgcgaactgccagaactgactgaagaattcatcaagcgtttcggcgtggaagatggttctgttgcgggcctgcgtaccgaagtgcgtaaaaacatggagcgcgagctgaacggcgctgtacgtaaccgcgtgaagtctcaggcgattgaaggtctggtgaaagcgaacgacatcgacgttcctgctgccctgatcgacagcgaaatcgacgttctgcgccgtcaggctgcacagcgcttcggtggcaaccagcagcaagcgatggaactgccacgcgagctgttcgaagagcaagcgaaacgtcgcgttgttgtcggcctgctgctgggcgaagtgattcgtacccacgagctgaaagctgacgaagagcgtgtgaaaggcctgatcgaagagatggcttctgcatacgaagacccatcagaagtgatcgagttctacggtaagaacaaagagctgatggacaacatgcgcaacgtcgcactggaagagcaggctgttgaagcggtactggcgaaagcgaaagtgaccgaaaaagagacctctttcaccgaactgatgaaccagcaggcgtaa

SEQ ID NO: 116536 - DNA, 315 bp, Enterobacter cloacae
atgatacgtgaacagatagaagaaaaattaagggcagcgttcaaccctgtgtttctcgaagttgtcgacgaaagctatcgtcataacgtgccggcaggttctgaaagccactttaaagtggttctggtcagcgatcgcttcacgggagaacgtttcctgaaccgacaccgcttgatctacagcaccttgacggaagaactctccacaaccgtacatgcgctggcgctgcatacctacaccattaaggaatgggaagggctacaggatacggtattcgcatcaccgccttgtcggggtgcaggcaccatcgcctga

SEQ ID NO: 116537 - DNA, 579 bp, Enterobacter cloacae
atgttaaaaaaactcttctttccgttggtagcactctttatgctcgccggctgcgcgactccgccgacgaccattgacgtttcaccaaaaattaccctgcctcagcaggatccaagcctgatgggcgtcacagtcagcattaatggcgccgatcagcgtcaggaccaggcgctggcaaaagtgactcgcgacaaccagcaggtcacgctgaccgcctcccgcgacctgcgcttcctgttgcaggaagtgctggaaaaacagatgacctcccgtggctacatgattggcccaagcggcgcggttgatctgcaaatcatcgtgaacaacctgtacgctgacgtctcccagggtaacgttcgctacaacattgcgaccaaagccgatatcgccatcattgctaccgcgaagaacggcaataaaatgaacaaaaactaccgtgcaagctattccgttgaaggcgcattccaggcctccaacaaaaatatcgctgacgcggttaacagtgtgctgactgacaccattgccgacatggcacaggacaccagcattcacgacttcatcaagcagaacgcccgttaa

SEQ ID NO: 116538 - DNA, 1476 bp, Enterobacter cloacae
atgtccagtcactacttacgtattttccagcaaccgaaatcagctattctgctgatccttggtttcgcctccggtttaccccttgcgctcacctccggcacgttacaggcgtggatgacggttgagaacatcgatcttaaaaccattggtttcttctcgctcgtcggccaggcttacgtctttaagttcctgtggtcgccggtgatggatcgctataccccaccgttcctcgggcgccgtcgcggctggttagtgatgacgcaggtgctgctgttgctggccattgccgcaatgggtttccttgagccgtcaacacagctgcgctggatggccgcgcttgcggtggtcatcgccttctgctccgcttcgcaggacattgtttttgacgcctggaagacggacgtcctgccagcagaagagcgtggcgccggtgcggcaatcagcgtgcttggctaccgcctgggtatgctggtttccggcgggctggccctctggcttgccgaccgctatctcggctggcagggaatgtactggctgatggccgctctgctgatcccctgcattattgccacgctattcgcgcctgaaccgagcgatgtgattccggtcccccgctcgctggagcaggccgtcgccgcaccgctccgcgatttctttggtcgcaataatgcctggctgatcctgctgctgattgtcctttataagcttggcgacgctttcgccatgagtctgaccaccaccttcctgatccgcggcgtcgggtttgatgcgggcgaagtcggcgtggtgaacaaaaccctggggctgtttgccacgatcgtcggcgcgctgtacggcggtgtattgatgcagcgcctgacgctgttccgcgctctgctgatcttcggcatccttcagggcgcatcgaatgccggttactggctgctgtcgatcaccgacaagcatatgatcagcatggcgacggcggtattctttgaaaacctgtgtggcggtatgggcactgcggcatttgtcgccctgctgatgacgctgtgtaataagtcattttccgccacccaatttgcgctactgtctgccctttctgccgtcgggcgcgtatacgttggccccgtcgcgggctggtttgttgaagctcacggctggccgacgttttatctcttctcggtggtggcggcggtgccggggattttattgctgctggtctgtcgccagacgctggaatatacccagcggacggaacacttcatgccgcgcacggaatatcaggctgcctatcggtttgccctgcgtctgctgatggctggttgtcttgcgctggtagtgtggctcacggtactcatcttgaatgcgacgaccaccttgtcgcttccgtttgaaacccagctgcttgatgcaggggtgttactcgccatcgtgggtatcctgaccggtgggatgctggatttcatgtcattgcggaaaacgcagatgacatga

SEQ ID NO: 116539 - DNA, 948 bp, Enterobacter cloacae
atgagactcaggaaatacaataaaagtttgggatggttgtcattattcgcaggcactgtattactcagtggctgcgattctgcactactagaccccaaaggacagattggactggaacaacgttcattgatactgacggcttttggcctgatgttgattgtggttattcctgccatcttgatggctgttggtttcgcctggaagtatcgtgcgagcaataaagatgcgaagtatagccctaactggtcacactccaataaagtggaagctgtggtctggacggtacctattctgatcatcctgttccttgctgtactgacctggaaaaccactcacgcacttgagccgagcaaaccgctggttcacgatgaaaaacctattaccattgaagtggtctccatggactggaaatggttcttcatctatccagaacagggcattgctaccgtgaatgaaatcgccttcccggcgaacactccggttcagttcaaagtgacctccaactccgtaatgaactccttcttcatcccacgtctgggcagccagatttacgcgatggccggtatgcagactaacctgcacctgatcgcgaatgaagcaggcacctacgacggtatctccgccagctatagtggcccgggcttctcgggtatgaagttcaaagctatcgctacgccagaccgcgcgactttcgaccagtgggttgcaaaagcgaagcagtctccaaacaccatgtctgacatggcggcgttcgaaaaagtggctgcacctagcgaatacaacaaggtggagtacttctctaacgtgaaaccgaatctgttcaaagacgttattggcaaatttatggatcacggcatgagcatggacatgacccagcctgaaggcgagcacaacacgcaccagggtatggaaggcatggacatgagccacgcggaaaccgctcactaa

SEQ ID NO: 116540 - DNA, 1992 bp, Enterobacter cloacae
atgttcggaaaattgacactggatgcagtgccctaccatgaaccgattattatggttacggtggctgcaattatcattggtggcgcggccttagttggcctgatcacttacttcggtaagtggagctacctgtggaatgagtggctgacttcggttgaccacaaaaaactcggtatcatgtactgcatcgtcggtatcgtcatgttaattcgtggctttgcggatgcaatcatgatgcgtagccagcaggcgcttgcgtctgcgggcgaagccggcttcctgccaccgcaccactacgatcagatctttaccgcccacggcgttatcatgatcttcttcgtggcgatgccgctggtaatcggtctgatgaacgtggtcgttccgctgcaaatcggcgcgcgcgacgttgcgttcccgttcctgaacaacctgagcttctggttcacggttgtcggcgttatcctggttaacctgtcactgggtgtgggcgaatttgctcagactggctggctggcctacccgccgctgtcgggaattgagtacagtccgggcgtgggcgttgactactggatttgggcgcttcagctctccggtgtcggtaccaccctgaccggtattaacttcttcgtgaccatcctgaagatgcgtgcaccaggtatgacgatgttcaagatgccagtatttacctgggcatctctgtgcgccaacgtcctgattatcgcgtcgttcccaattctgaccgtcaccatcgcgctgctgaccctggatcgctatctgggtacccatttcttcacgaatgatatgggtggcaacatgatgatgtacatcaacctgatttgggcctggggtcacccggaagtgtacatcctggttctgccggtgttcggtgtgttctccgaaatcgcggcaaccttctcgcgcaaacgcctgtttggttacacctctctggtgtgggcaaccgtatgtattaccgtcctgtcgttcatcgtctggctgcaccacttcttcaccatgggtgcgggtgccaacgtaaacgccttcttcggtattaccaccatgattatcgcgatcccgaccggggttaagatcttcaactggctgttcaccatgtaccagggtcgtatcgtgttccactcagctatgctgtggaccatcggcttcatcgtgaccttctccgtaggtgggatgaccggcgtactgctggcggtaccaggtgctgacttcgttctgcacaacagtctgttcctgattgcgcacttccataacgttatcatcggtggcgtggtcttcggctgcttcgctggtgtgacctactggtggccaaaagcgttcggtttcaccctgaacgaaaaatggggtaaacgcgcgttctggttctggatcatcggcttcttcgtggcgtttatgccgctgtacgtgctgggcttcatggggatgacccgtcgtctgagccagcagatcgatccgcagttccacccaatgctgatggttgcagcgggcggcgcagcgctgattgcctgcggtattctgtgccagctgattcagtactacgtgtctatccgtgaccgtaacctgaaccgcgacctgaccggtgacccatggggtggccgtacgctggagtgggcgacctcttctccgcctccgttctataactttgccgtagtgccgcacattcacgagcgtgatgcattctgggaaatgaaagaaaaaggtgaagcgtacaagcaacctgagcattacgaagagatccatatgccgaaaaacagcgccgcgggcatggttattgccgctttcgcaacggtatttggtttcgcaatgatctggcacatctggtggatggcgattgttggcttcgctggcatcgtaatcagctggattgtgaagagctttgacgaggacgtggactactacgtaccagtccgtgaagttgaaaagctggaaaaccagcattttgacgagatttctaaagcggggctgaaaaatggcaactga

SEQ ID NO: 116541 - DNA, 615 bp, Enterobacter cloacae
atggcaactgatactctggcgcactcaactgcccacgcgcatgaacatgcgcaccatgatacaggaccgacgaaagtcttcggtttctggatctacctgatgagcgactgcatcctgttctgctgtctgttcgcaacctatgccgttctggtgaacggcacagcgggcggcccgaccggtaaggacatctttgaactgccgttcgttctggttgaaaccgcactgctgttattcagctccatcacctacggcatggcggctatcgccatgtacaaaaacaacaagagccaggttgtctcctggctggcgttgacctggctgtttggtgctggctttatcgggatggaaatctatgaattccatcacctgatcatggaaggtttcggcccggatcgtagcggcttcctgtcagcgttcttcgcgctggtaggcacccacggtctgcacgtgacctcgggtctgatctggatggcggtgctgatgttccagatctcccgtcgcggcctgaccagtactaaccgtacccgtattatgtgcctgagcctgttctggcacttcctggacgtggtatggatctgtgtgttctctgttgtctatctgatgggggcgatgtaa

SEQ ID NO: 116542 - DNA, 327 bp, Enterobacter cloacae
atgagtcattctaacgatcatggcgcttcccacggcagcgtaaaaacctacatgacaggtttcatcctgtcgatcattctgacggtgatcccgttctggatggtgatgaacggttctgcatctaagccggttatcctgggcgcaatcctggtgaccgcggtgattcagattctggtgcatctggtttgcttcctgcacatgaacaccaagtccgatgaaggctggaacatgacggcctttatctttaccgtgattatcatcgctatcctggtagtcggttccatctggattatgtggaaccttaactacaacatgatggttcactaa

SEQ ID NO: 116543 - DNA, 888 bp, Enterobacter cloacae
atgtttaagcaatacctgcaagtcacgaaaccaggcatcatctttggcaacctgatctccgtaatcggagggttcctgctggcctctaaaggcagcattgattacaccctctttatttacacgctggtcggtgtgtcactggtggttgcgtccggttgtgtatttaacaactacatcgacatggatatcgacaagaagatggaaaggaccaaaaatcgggtgctggttaaaggcctgattgctccttccgtctcgctggtgtacgccaccttgctgggtattgctggctttatgctgctgtggtttggtgctaacccgctggcctgctggctgggggtgatggggttcgtggtatatgtgggcgtctacagcctgtatatgaaacgtcactccgtctacggcacgctgattggttctctctccggcgcggcgccgccggtgattggctactgcgccgtcacgaacgagttcgacagcggtgcgctcatcttgctggctatctttagcctgtggcagatgccgcactcctacgccatcgcgattttccgctttaaggattatcaggcggcgaacattccggttctgccggtcgtgaaaggcatttcggttgccaagaaccacatcacgctctacatcatcgcttttgccgtggcaacgctgatgctctctctgggcggttacgccggatataaatatctggtggtagcagctgcggtgagcgtatggtggctcggcatggccctgcgcggttataaagtggaagatgacaaggtctgggcacgcaagctgtttgtgttctcgattgtcgccatcacctccctgtccgtgatgatgtccgtagacttcatggtgccagattcacaacacctgctgacttacgtctggtaa

SEQ ID NO: 116544 - DNA, 429 bp, Enterobacter cloacae
gtgcttaaaacgatatcccctctgatttcacccgagctgctgaaaacgctggcagaaatgggtcatggtgacgagattatttttgcagatgctcactttcccgcgcacagcctggggccaaagacgatccgcgcagatggcctgctcatcagcgatttgctggccgcggtgataccgctgtttgaactggacagctatgcgccaccgctggtgatgatggcccctgtcgacggggatacgctcgatatacaggtagaagcgcgctatcgcaacgcactctttggtgaggcggaaggggaggggattacgcgtattgaccgttatgcgttttatgcgcgggcacagaaagcgtacgccatcgtggtgacgggcgagaccgcgaaatacggcaatatactgttaaagaaaggggttacgccgtacccataa

SEQ ID NO: 116545 - DNA, 1485 bp, Enterobacter cloacae
gtgaaaattacggaccgttatacaaacattaatccggcctgccagcctgctccggcgggctggcagcctgtggggaccgcgatgaaaaaatgttttctggttctcgattgtggcgcgacgaacgtgcgcgccattgcgctggatcccgaagggaatattgtggcgcgcgccgcggtggcgaacgaaagcgaaagcgccgctgaaaatccggcctggcaccagtggtcgctcgacgccatcatgcaacggtttgccgtctgttgtcagaaaatcagcgcagcgctgagcgagcatcacctgtgcggaatgagtgtgacgacctttggcgtggatggcgcactggtagatgagcggggagaactgctttacccgatcattagctggaagtgcccgcgaaccgtgccggtgatggaagcggttgcccgttcatgctccccggcagaactacagcagatcaccggcgttgggcagtttagttttaacacgttgtataagctaggctggcttcaggacaaccatcccgatctgttacagcgtgctcacgcctggctttttatctcctcgctaatcaaccatcgcctgaccggaaagatgacgaccgatctcacgatggccggtaccagtcagatgttcgatctgcatcagcagcgcttcagtgaaacgatcttaagcaagatcggcgtgcctcattcccttttcccgccgctggtttcccccggagaaaggattggtgaattgcggcccgacgctgcatccaggctcggattgccttgcggagtgccggtgatctccgccgggcacgacacgcagtttgccctttttggcgccggggcgggaattaatgagccagttctctcttcgggtacctgggagattttaatggcgcgcacctcgcaggttgataccgctttactggggcaatacccgggtgcgacctgcgaactggatagccggacggggctctataatccgggaatgcaatatctggcgtctggcgtactggagtggatccgcgcgctgttctggtcgcctggtaccgactgggacactattctggctcaggcggcggcaattccgaacggcgcggatggcgtcacgatgaatacccaactgctcgattctccactcgccggctggcagggcgttacgctcaccacaacgccagcccatttttaccgcgcagccctggaaggactcacggtgcatctgcaagaaaaatgcctggcgctggaggcgatcgcgcaatttaaggcgcgtgaactcctgctggtggggggaggtagccgcaatatgctgtggaatcagctcaagtccaatgcgcttgggatcccggtgaaggttcttgaagaggctgatacgaccgtgctgggggcgtctttgtacggatggtggggcgtcggagaaacggccagcgctgaggctgctcgcgatcgggtccactatcgttaccgttatttctatcctgaggagcaaccttgtgcttaa

SEQ ID NO: 116546 - DNA, 1779 bp, Enterobacter cloacae
atgaaaacgataaaagcgttaccccggattggcattcgacctgttattgacggccgccgaatgggcgtacgcgagtctctggaagagcagaccatgaacatggcgaaagccacggcggcgctactcagtgaaaaattacgccacccctgcggtacgcccgtagagtgcgtaattgccgacagctgcattgccggaatggcggaatccgccgcttgcgaagagaagttcagcacgtgccacgttggtctgacgatcaccatcaccccctgctggtgttacgggagtgaaaccattgatatggatccgctgcgcccgaaagcgatctggggctttaatggcaccgagcgtccgggggcggtatacctcgcagcggcgctggcagcgcataaccagaaagggatcccggcgttttccatctacggccacgatgtacaggatgcgggcgacgagaccatcccggcagacgttgaggaaaaattgttgcgcttcgcccgggcgggcctggcggtcgccagcatgaaggggaaaagttatctgtcggtgggcggtgtctcaatggggatcgcgggctcgattgtcgatcacaacttctttgaatcctggctggggatgaaggtgcaggcggtggatatgaccgaactgcgtcgccgcatcgatcataagatttacgacgaacaagaacttgagctggccctgagctgggcgaaggcacatttccgtttcggcgaggataaaaacgcagagcagtatcgtcgcaatgaacaggaaaatgccgcgatcctgcgggagagcctgctaatggcgatgtgcatccgcgacatgatgcagggcaaccctaaactcgctgcgatgggccgcgtggaggaatcgctgggctataacgccattgcgtccggtttccaggggcagcgccactggacggatcagtatccaaatggcgataccgcagaggcgctgctgaacagctctttcgactggaacggtattcgccagccgttggtagtggcgacggaaaatgacagccttaacggggtagcgatgctgtttgggcatctgatgaccggcaccgcgcagatttttgctgatgtacgcacctactggtcgccggagtcggttgagcgtgttaccggccagaagctcactggacgggctgagcacggcattattcatctgatcaactccggctcggcggcgctggacggtacagcggagcagaaagacgccgaggggaaaccgaccctgaaaccacactgggacattactgagcaggaagccaacgcgtgcctggccgcaacccactggtgtccggcggtgcatgaatacttccgcgggggcggtttctcatcaaacttcctcacccggggtggcgtgccatttaccatgacccgcgtaaacctcatcaagggtgtgggtccggtattacagatagcggaaggctggagtgttgagctgccggaacacgtacatgacattctgaataagcgcaccgattcaacctggcccaccacctggtttgccccacgcctgaccggtaaaggcccgttcagcgacgtctattcagtgatggcgaattggggcgctaaccacggggtattaaccgtcgggcacgtcggcgctgatttcatcaccctggcgtccatgctgcgcatccctgtatgcatgcataacgtaccggaggcgctgatttatcggccgacggcctggggcgctcacggtatggatccggaagggcaggattaccgcgcctgtgaaaattacggaccgttatacaaacattaa

SEQ ID NO: 116547 - DNA, 1500 bp, Enterobacter cloacae
atgtcagagactcttattcagatgacgcgcatcaccaaacgctttcccggcgtgctggcgctgaatcaggttgatttcgatttacgccgcggcgaagttcatgccctgttaggtgaaaacggtgccggcaaatcgacgctgatgaaaatattatccggtgtttaccaacccgattccggtgaaattcgctttgaagggcaatccgtatcattcagcgatccgctaagtgctcagcacgcaggtattacgattatccatcaggaatttaatctctttcccgatttaaccgtggaagagaatatctttattggccgtgaattctgcaaaaatagtcgctggcagttagataaacgcgcccagcgacaggcggttgagaaaatactgcacacgctgaatttaaaaatcgccccggacgcccgcgtcagtgaattaaccgtagcccagcagcagatggttgaaattgccaaagcgatttcggtcaatgccaaagtgctaatcatggatgaacccaccgccgcgctgaccgaaagtgaaatcgagagtttatttgacgtcacgcggatgctcaaggctcagggcacggggatagtctacatctcgcaccgtctggaagaattggcgctgatcgccgatcgcgcgaccgtcatgcgcgacggacaatacatcgccaccgtagattatgaaacggttcagatcggcgagcttatcgccatgatggttggccgcaatctcgataacatctacccaaaacgcccgccgcatcagcgcagagaaaaagtgctggaggtgaatggcctgacgcgaaatggtgtactgcacgacatcaactttaccctctggcgcggagagatcctcggcctcgctggcttaatgggcgcaggccgaacggaactgggccgggccctgtttggcgccgatgcgatcgacgccggtaccctgacgctgaacggcacccccacacggattaaagacgtggctgacgccattgagaaaggcatcagctatttaacagaagaccgcaaaaaagagggactcgccctcggcctttccgttgagatgaacattatgctcggcaattacccggactacgccggcgccgcgggtaatgtcgatgaaaagcgctgccgggagtccagccagaaactggtggatgcgctgcgaataaaaacgccgcatctggaacaggcggcactgaatttaagcggcggtaatcaacagaagatcattattgcccgctgggtctgtaaagataccgatattttaatttttgatgagccaacccggggaattgatgttggcgccaagctggaaatttatgaactaatgaaccgccttgtcgctaaaggtaaatcgatcatcatgatttcatccgaactgccggaagtattaggaatgtgcgaccgcatacttgtgatgcgcagcggccacattgccggcgaaatagaggctgagcacgccacccaggaaaaaatcatgcaatacgccacgctggaggattaa

SEQ ID NO: 116548 - DNA, 984 bp, Enterobacter cloacae
atgtccgttaccgttccatcgccgcaaagcggaagtcatacgatgaaaataaataaagcgctcctgatgcgtctggcacctctttttagcctggtattgctggttctgtttttcagcttcagctcaccgttcttctttaatactgaaaatatcatgactatcgccttgcaaacggcggtgattggcatcatggccattggcgtaacctttgtgattattaccgccgggatcgacctgtcgctcggatcggtggtggcgttctcaggggttgcggtgggcatcgccgccgggtttggtatgccgctgccggtctgtattctggcaggcgtgctcgccggcgggctttgcggctatgtgaacgcgtttctggtcaccaaaatgaccataccaccgtttattgccaccctcggcttaatgatgtcggtacgcggcatcaatatggtgatgaccgatggccgcgcgatttatttttctgactacccgcagttcaagctgctagcgcagggtcgcctgttcgacgtcctgccttacccggtgttctacctggtcatcgtggcactgatcgccatgtggatcctgaagaaaacggtgatgggccgctatatctacgctgtcggcagcaatgaaacggcggcacatctttccgggatcaaagtccagcgagtgaaaattttcgtttacgccttatgcggcctgttaaccggcgtggccggggtgatcctcgcctctcgtctcaattcaggccagccaaccgtaggcgtgggttatgagctggaagccattgcggcggtagtgatcggcggtaccagtctgatgggcggcgtgggcacgattggcggcaccatcataggcgcgttcattatgagcgtgctgaaaaacggcctcaatctcatgggcgtgtcccagttctggcagatggtggcgatgggcgtggtcgtcgttgccgccgtctacctggacacgttacgtaaaagaatgcgttag

SEQ ID NO: 116549 - DNA, 951 bp, Enterobacter cloacae
atgaaaaccagccatatcctgagcgccctgtcgctcgttgccatcctgtccagcagcgcgctggcaaaagatttaaacctgccggtagtcagtaaaggttaccagcacgaattctggcagacggtcaaaatggggacggaagctgccgcaaaagagttgggtgacaaaaccagctacgttggccctgccgatgaaacgcaaatcgccgagcagatccagttagtcgaaaacaccatggcacaaaagccaaacggcctgttgctggccgcgcttgatgcaaacgcccttgccccgctggtcgaaaccgccaacagccgggggatcaaagtggtgaccttcgactcgggcgtgaactccgatatcccggccagctttgtcgccaccaataaccgtaaggcgggcgcacaggctgcggatgcgctggcggagcaggtaggccagaaggggaaagtgggtattatcgcccacgtagccggaacgacgtccgccattgagcgctctgaaggattcagcgagcgaatgaaagagaagtacccgaatattcaggtactgccggtgcaatatagcgatggcgacccgcaaaaggcgatggataaaaccattgatatggttcaggccaacccggatatcgccggtatttatgccaccaacgaaggctcaaccctgggcgttgcgaacgcgatcgacagccagaatttgaagggcaaagtgaaagtcatcggttttgacagcaccgaagccatcattaacttcctcaaaaacggcgtgattcagggcttcgtggtgcaggacgcgtaccagattggttatcagggcataaaggcgctgaacgcggtgatttccggacagacggtggctaaggaaattgatattccagtgaaatatgtcaatgcgcagaatatcaacacccctgaaattgataaactgttacatccgtttggtaaaaaataa

SEQ ID NO: 116550 - DNA, 1593 bp, Enterobacter cloacae
atgatgagtgacggctatttcctcggagtcgatgtgggttcagccagcgttcgtgctgggctttactctgcgcaaggcgagcgtttgagcttcgcgacccgtccgatttcgcagtttcacgccagcaacgcgcgcgtggaacagtcctccgcggagatctggcagcaggtttgcgcggtggtgcgggaagccgtcgactcctctgggatctcacccgacgccatttgttcgattggcttcgacgccacctgctcgctggtcgcgctggatgctgagggtaacggcctgagcgtgtcccccgacagtccggcatcgcaggacatcattatgtggatggatcatcgtgctcacgaagaaactgttcgcatcaatgccacacgcgatcctgccctgtgctacgtgggcggcgaggtgagtattgaaatggaactgccaaaactgctgtggttgcagcgacatcatcctgaaacatggaatcaggcctggcgctttttcgaccttgccgattttctggtctggaaagcgacgggccaggacgccgccagcctgtgcaccctcacctgcaaatggaactaccttgcgcatgaggcgcagttcagcgaatcgctgctcagggaggtagggctggagaccttactgacaaaaattcccgatactattctggacgtcgctgaatgcgtcgggaaactcagcccacaggcagcgcaagctctggggttgcccgaagaggtggttgtggcaagcggcatgatcgatgcccacgcgggtggcgtggcgctgacgggctcacacccggagggcacgctggcgctcatcagcggaacctcgaactgccatatgcttgccagtcagacggagatccatacgcccggcgtctgggggccttactggagcgccatgctgccgggctactggctgacggaaggcgggcaaagtgctgccggggcgctggtcgactggacgttgcgcgagcacggagccagcgcagacctgtttgcaaaagcagaagcggcgcaacgccatccggtggcgctgctcaacgactgggtagccgcgcttgaacaggaagaaaaatatcccacccgcaacctgcacattctggccgatcaccacggcaaccgctcgccgcgttcgcgtccggatgcgcggggcagcgtggtcggtctgacattagaaaccggtgaacgtgcgctggcgaggctctacctggccacgctacaggccatagcctatggcacacgacatattatggataccctgaaacatcacgggcacaccttgtcgcgtattgtcatttgtggaggagccacccataaccggctctggctgcgggagtatgccgatgccacgggctgcgatattcatctcttagccgaagaagatgccgtcactctcggcgcggccatttgcggcgctgtggcgagcggtgcatgggcaacgctcaccgatgccacccgggaaatggtcaaagccggcgacatcatcacccgtcggccggaaaccgcggctttccacaggcaaaaatatgaggcgtacctgatgctgtggacccagcagcaggcgcttaatctcctgatgcagcaggaaatgtaa

SEQ ID NO: 116551 - DNA, 996 bp, Enterobacter cloacae
atggccaaaacagttgaacagatagcgaaggatctgaatttatccgtcaccaccgtgcggctggtactgagcgggaaagccgaacagtatcggatcagcgtgaaaacacagtcccgaattaatgaacacgtcgagcgcttcggctataccctcaaccattcggcgcgcagtcttaagctaaacaaaaccgagacgctgggactcatcgtgcccaacatctcgaacgtgttctttgcaacgctcgccgagaaactcgaactgcgctgccgccgttcgggctaccagctgatgatcagctgtacttacaacgatgtggattacgaaaataagctggtcaaagccctgatggcgcgcaacgtggacggcttgtttatcgttccctcgacgctggaaaaccagcagcatcatttgcggcagatccaaaaaccactggtgctcctcgaccgggattttggctttactgacaacgcgctggttgagagtcataacgaggccgggggggatgaactggcccgcaacatgctggcagagagaaaaacgccgctctggttccttgtgggcgataccgcactgcccagtattacggaccgtctgaacggctacttacaggccctgaaaacagccggtattcaccatcgcgagtgggtcatcgaagggccggacaatacgccggagggcggatatgccctgatggattcgcttatcgacagccagggtgttccgcaggcgtttatcgcctcatcgttacccgttctggaaggggcaattgaagccctgcggacgcgtaccggcaccgtgccccaacacatcaatatcggcaccttcgatgagcaccccatgctggggttcctgcctaacagcgtctggtccatgcagcaggatgaagatacctgggcggaaaaagcgtttgaactgatgcagcgagccatcgacggcgaagcggtcaacgagacggcgaaagtcgatatgaagctggtcaaacgttcccgccagtaa

SEQ ID NO: 116552 - DNA, 648 bp, Enterobacter cloacae
atggaacgagcccgattagccagagacattatcgacacctgccttgagatgacccgcatggggttaaatcagggcaccgccggcaatatcagcgttcgctatcgcgacggcatgctgattacgccgaccggaattccctacgagcatctgaccgaagagagtatcgtctatgtagatgcacaggggcggcacgaagaagataaactgccctccagcgaatggcgttttcatcaggttgtgtatcagacccgcccggatgctaacgccgtcgtccataaccatgcggttaactgtaccgccgtctcgatactcaaccgccccattcctgctattcactatatgattgccgccgccgggggaaactccattccctgcgccccttacgcgaccttcgggacgcgcgcgctgtcagagcatgtcgcggtcgcattacgcgatcgcaaagcgacgctcttacagcaccaaggcctgataacctgcgaagaaaatcttgaaaaggcactgtggctggcgcaggaggtagaggtgctggcaaaactctacctggccacgctggcgatagtagatcccgttcctgtactcagtgacgatgaaattgccattgttcttgagaaattcaaaagctacggattgcgcgtcgaggcgtaa

SEQ ID NO: 116553 - DNA, 1362 bp, Enterobacter cloacae
atgaacgattataaaatgacgccaggcgaactgcgtgcgacctggggtttagggactgttttctcgctgcggatgcttggcatgtttatggtcctgcccgttctgaccacatatggcatggcgttacagggtgccagcgaagcgctgattggtctggcgattggtatctacggcctggcgcaggcgatattccagatcccctttggcctgctctccgaccgcgtgggtcgcaaaccgctgattgtcggcgggctgctggtgtttgtacttggcagcatcatcgccgccctctcccactccatctggggaattattcttgggcgcgccctgcaaggttccggggcgattgccgccgccgtgatggcgctgctgtcagacttaacccgcgagcaaaaccgcaccaaagccatggcgtttatcggcgtcaacttcggcgtcacgtttgccattgccatggtgctggggcctgttatcactcatgcgctcggcctgcacgccctgttctggatgattgcggtgctggcgaccattgggatcgcactcacgctgtgggttgtgcctgacagtaaaaaccacgtcctcaaccgtgaatccgggatggtgaaaggctgcttcagcaaagtcatcgccgagccgcgcctgcttaagctgaacttcggcattatgtgcctgcacattctgctgatgtccaccttcgtcgccctgcccggtcaacttgccgcagcaggtttcccggcggcagagcactggaaaatttatctggtcacaatgctgatctcgtttgtctccgttgtgcccttcattatttacgccgaagtgaagcgcaaaatgaaacgcgtcttcgtgggctgcgtggcgttattgctgattgccgagattgtgctgtggggcgctggcccgcatttctgggaactgatcgccggcgtacagctgttcttcctggcgtttaatctgatggaagccctgctgccgtcgcttatcagcaaagagtctccggcaggatacaaaggcaccgcgatgggcatttactccaccagccagtttctcggcgtggcgatcggcgggtcgctcggcggctgggtggacggtctgtttgactcccagaccgttttcctcgccggtgcgctgctggcgatgctctggctgtttgttgccagcaccatgaaagagccgcgctatgtaagtagcctgcgggtagaaattcccgatgacgtggcaatcggtgaagcgttaaaacagcgtctggaagcgacagagggcgtgagcgaagtgctgattgtcccggaagagcgcagtgcgtatgtcaaaattgacagcaaagtgactaaccgctttgaggtggagcaggcgctgaaggcctga

SEQ ID NO: 116554 - DNA, 492 bp, Enterobacter cloacae
atgccatctttcgatattgtttctgaagttgatttgcaggaagcgcgtaacggcgtagaaaatgctgtccgtgaggttgagtcacgtttcgattttcgtggcgttgaggcgaccattgaactgaacgacgcgaacaagacgatcaaagtcctgagcgagtctgatttccaggtcaaccagttgctggatatcctgcgcgccaagctgctcaagcgcggcattgaagggacctcactcgatgtaccggaagattttgttcacagcggcaaaacctggtttgtggaagcgaagctgaagcaggggattgagagcgcggtacagaaaaaaatcgttaagcttatcaaagacagtaagctcaaagtgcaggcgcagatccagggtgaagagatccgcgtgaccggaaaatcccgtgatgacctgcaatccgtgatggcgctggtgcgtggcggcgatctcggtcagccattccagtttaaaaacttccgcgattaa

SEQ ID NO: 116555 - DNA, 912 bp, Enterobacter cloacae
atgaaagtaacagtgcttggatgcggagcccttggccaactctggcttacagcgctatgcaaacagggacacgacgttcagggctggctgcgaattccccagccctattgcagtgtgaacgtaattggtacagacggttcaattttcaacgagtctttgacggcaaacgatccggaatttcttgccaccagcgatttgctgctggtcacgctgaaggcctggcaggtctccgatgcggtgaaaagcctggccgcccagttacctgaacgcacgccaatcctgctgattcacaacggtatgggtaccattgaagagctaaaatctgtccggcaaccgctgctgatggggacaaccacccacgcggcacgtcgcgacggtaacgtcattatccatgttgccagtggtatcacccatatcggtcctgcgcgtgaacagcccggcgattacagctatcttgcggataccctgcaaagcacgctgcctgacgtcgcctggcacaataacattcgcgcggaactgtggcgcaaactggcggtcaactgcgcgatcaatccgctgaccgccctgctggattgccctaacggtgagctgcgcaagcatcccgatcgggtagcgctgatttgccgggaagttgccgccgtcattgaacgcgaaggctaccacacctcagagtccgatttacgttattatgtcgaccaggtcattgagagtacggcagaaaatatctcctcaatgttgcaggatatccgggctatgcggcataccgaaattgattacattaccggttatctgttaaaacgcgcccgggcacacggtattaccgttgcggaaaacagccgtctgtttgagttagtaaaacgaaaggagagtgagtatgagcgcatcggcactggtatgcctcgcccctggtag

SEQ ID NO: 116556 - DNA, 594 bp, Enterobacter cloacae
atgagcgcatcggcactggtatgcctcgcccctggtagcgaagagacagaagcggtcaccaccattgatttgatggtgcgtggtggtattaaggttactaccgccagcgtcgccagcgacggaagtctggcgattacctgctcgcgtggggtgaagatcctggcggatgcaccgcttgtacaggtggcggacggtgattacgacatgatcgttttgccgggtgggctgaagggtgcagagtgtttccgcgacagcccgctgctggttgaaaccgttcgtcagtttcatctttccgggcgtatcgtcgcggcaatctgtgcggccgcaggtacggtgctggttccgcacgacattttccccatcgggaatatgaccggctttcctggcctgaaggacacaattccggaagaccagtgggtggataaacgcgtggtctgggatccgcgcgttaacctgctcaccagccaggggctgggcaccgccattgattttggcctgaagattattgacctgctggttgggcgcgaaaaagcgtacgaagtggcgtcatcgctggtgatggcggcggggatttataatttctacgaagcctga

SEQ ID NO: 116557 - DNA, 1269 bp, Enterobacter cloacae
gtgattacatttcttgagcacagagtcattcctgtactgattcgcgtaggcgaaaataaaatactggtcgccgtgcgcaacggtattgcgctgaccttacccttcaccatcatcggtagcctgtttctcattctcgccaatctaccgatacccggctggagtgaatggcttggcccgtttgccgaaaagctcagcgccccggtgggcgttacctttggtgcgatagggctgatttctgcggtgggtatcagctacaacctcgcgaaggagtacaacctcaacgctatcacctgctgcatagtcacgctggtggttttcttactggcgcaactcaacgacagctatcagctcaacgttgacaatcttggtgcggcggggctgttttctgccatcatcctggcgattttgacggtgcacatcgtgcgattttttatccggcacaacgtcgtgatcaccctgccggagggcgtgcctcctgccgtggcgcaatcttttgcgagcctgatccccgccgcggtagcaatcactctgaactggctgattagggtcatcctgaattttgatatcaaccacttcttcaccctgctgctcagcccgctcgtctccggcctcggttcgctgccgggcatgctggtgcttatttttctgatttcgctgctgtggtgctgcggcatacatggcgacaacgtgctttccggcatcaccagtcccattttcctgaaatacatcgctgaaaatactcaggcctatctgcatcatcagcccattccccatattaccgccgacgggttttatatcgtctttatgtgcctgggcggaacgggcgcgaccatggggctggtcattgccatgctgcgttcccgcagtcggctgtacaaatcagtgggcaagctctccctgccctccgcgatattttgtattaacgaacctgtcattttcggttgcccgatagtcttcaacccactgctgatgatcccgtttaccctgacgccgatgatcctgtgcatctcaacctggtcgctgatgtacttcgacatcattggtcgccccgtcttacagatcccctggaccatgccgccgattttcgccgcatggttcgtgaccggcggcaatatccctgccgtgatctggtccgtctgcacgctggttatttccgccctggtctggctgccgtttttcaaactggccgagcgcaaacaacttgaaaccgaagcggccgaagagaatgcccgccgcaacgcggacacgctttccgaccccatcttgtaa

SEQ ID NO: 116558 - DNA, 1326 bp, Enterobacter cloacae
atgaaaaagctcaaggttgtcactattggcggcggctccagctacacgccagaattgatcgacggttttatcaaacgctacgcagagctgccggtcaccgattattatttgctggatattgaagagggaaaagagaagctggagattgtcggaaagctggcccagcgcatggtagctgaagccgggctcccaatgaatatccacctgacgctcgatcgggaagaggcgctgaaagatgccgattttgtcaccacgcagctgcgtgtcggctttcttgatgcccgcatcaacgatgaaaaaatcccgctaaaatacggcgttctggggcaagagacgacaggtcccggcgggtttatgaaagctcaacgcacgatcccggtcctgctggatatctgtaaggacatggaaagatggtgcccgaacggctggctgattaacttcaccaacccggccgggattgtcaccgaggcaatcacccgccactcggccattcggaccataggcatttgcagtggcgcaaatagcatgatgatggacatcgccaaagcctacggcgtgcagaagtcggacgtttacgcacgcattattggtctgaaccatcttatttttgccgaccaaattttcctcaagggagaggattataccgacgactttattgaaaaactggccgagggcagcgcaaataactccctgaaaaatataccggacattgggtttagtgcccgctttgccagggcactccacatgtaccctatctcctacctcaaatactattttttgacccgcgagatgaccgacgccgcgctgcgcgatgcaaatactaagggaacccgcggcgagcagacgcgcgaaattgagcaacggctttttacgctttatcaggacccccatctcgcgcacaagccgaaagagctggagcagcgcggaggcgcctggtactccgatactgcatgctcgatcatcagcgctatttataacgataaaaaagagatccacgtcgtaaatgttcctaacaggggcacaacacccgatctgccggatcacgttacgctggaaaccaacgccatgatcgaccgaaacggcgcgcatcccctcgcctatggcaggctgcccgtgaagatccgcggcctgatccagagcgtgaaggcctatgaagagctcaccgttgaggccgctgtcactggaaattacgacacggcgctgctggcgctgagcgtaaatccccttgtgccttctgccgccgcggcagaacagatccttaatgaatatcttgaggtcaaccaccgttatttaccccagtatgctaaacgtaaggacgcacaatga

SEQ ID NO: 116559 - DNA, 723 bp, Enterobacter cloacae
atgaacgtagaacagacagacgattatgcggcgctgagtgacgccgtggcgaaagcggtcattgaaaccgttacgcaaaaacccgatgcgctgatttgcatcgcgggtggagatacgccgctgggcgtttttgccgcgctggtgcacgccagcaaacagggtaaggtcgatttttcccgtgcggcatttgttggcctggatgagtggctggggctcggtcaggccgataaaggcagctgccgggagatggtatggggccatttcttcagccacctggccctgcgcgacgatcagatctgtttctttgatggcctgacgcaatcccccgaggaagagtgtcagcgtgtggataactttattacggcccacggtgggcctgacatcattgtgttggggatcggtatgaacggccatatcggcttcaatgaaccgggcgccgccctcgataccggttgccacatcgtggacctggatgcggtgacgcaggccgtttcggttaaatacttcggccagcagcgtcatatccgtcagggcatttcgctggggatgaagactatcctggcctcacgggccattattttgatggcaagcggcgagaaaaaagccgacatcatcgcaacaaccgtcaattccgcaccggacccggcggttcccgcgacgctgctaaagccgcacccacggttaaggatcattgtcgataaagcggcagccgctaagctgtaa

SEQ ID NO: 116560 - DNA, 735 bp, Enterobacter cloacae
atggaaaaaaaacataagtactgggaaatcaaagagagaatcaaaaaagatattctcaatgaagtctacaaaaagggcgaaagcattccgtcggagcgcgatcttgccggtatttatgacgttacgcgcgtaacggttcagaaagccatggcgatgctggtacaggaagggtatatcgagcgtatccacggcaagggcatgtttgttttaaagaatactgccagcaatatttacattctgaataatgaaaagagtgacagtattctcgggttttcccgtgaatttcaggggcgggtcaacgtaaccagccgcttgctgacgttgacgacccttcacgccgacgcggcgctggcacagcacctcgaaattgcgcagggtgatgatgtctggtttattcgccgtatccgtttactggacggacagccggtgttaattgaagacagcaatattcctcacaaggtggttgccactgttccgcaggctattctcgaagtgggatcgctgtatggctatattgaagactttaccggtaagaaaatcagcgacgccgattcactgattgaagcggatctttttgatgaggagctggcggcccatctcaatattctgccaggccagccgatgttgaaaattaccgaagtcacgcgcctcgatgacggtagagcatttaacttctccatcagctacaaccgggcagatattttccgcgtcaagaatatgcacatcaaacgataa

SEQ ID NO: 116561 - DNA, 1449 bp, Enterobacter cloacae
atgaagtttatcattaaattgttccctgaaatcaccatcaaaagccaatccgtgcgtttgcgctttattaaaattctcaccgggaacattcgtaacgtattaaaacactacgacgaaacgctcgccgtggtgcgtcactgggaccacgtagaagtccgcgcgaaagacgaaaacaaacgtcttgatattcgcgacgcgctgacccgtatcccgggtattcaccatattctggaagtggaagacgttcccttcaccgatatgcacgatatcttcgaaaaggcgctggtgcagtaccgcgaccagatcgaagggaaaacgttctgcgtgcgcgtgaagcgccggggtaagcatgagtttagctctattgaggttgagcgctacgtcggtggtggtctgaaccagcacgttgaaacggcgcgcgtgcgcctgactaacccggacgtcaccgttaaccttgagatcgaaaacgatcgcctgctgctggtcaagggtcgttatgaaggtattggcggtttccctatcggcactcaggaagatgtgctgtcgctgatctccggtggtttcgactccggcgtgtccagctatatgctgatgcgtcgtggctgccgcgtgcactactgcttctttaacctgggcggcgcggcgcatgaaatcggcgtacgtcaggtggcgcattacctgtggaaccgcttcggcagctctcaccgcgtgcgttttgtggcgatcaactttgagccggtggtcggcgaaatcctcgaaaaagtggacgacggtcagatgggcgtggtgctgaagcgcatgatggtacgtgcggcgtctaaagtggctgagcgctacggcgtgcaggcgctggtcaccggtgaagcgctggggcaggtctccagccagacgctgaccaacctgcgtcttatcgataacgtgtctgatacgctgatcctgcgtccgctgatctctcacgataaagagcacatcatcgatctggcgcgtaaaatcggtactgaagattttgcccgcaccatgccggaatattgcggtgtgatctcaaaaagtccaaccatcaaagcggtgaaggcgaagatcgaagcggaagaagagaacttcgatttcagcatcctggaaaaagtggtggcggaagcgtccaacatcgatatccgtgagatcgctcagcagaccgagcaggaagtggttgaggtggagacggtcagcggcttcggtgctaacgatacgattctggatatccgttctgttgatgagcaggatgacaagccgttgcaggtggaaggcgtcgaggtggtttcgctgccgttctacaagctgagcacccagtttggcgatctcgaccagagcaaaacgtatctgctgtggtgcgaacgtggggtcatgagccgtttgcaggcgctgtatctgcgtgagcagggcttcgcgaacgtgaaggtgtatcgcccgtag

SEQ ID NO: 116562 - DNA, 243 bp, Enterobacter cloacae
atgccgaagaaaaacgacgcaccggccagtttcgaaactgcgctgagtgaactggagcagatcgttacccgtcttgagagtggcgatctcccgctggaagacgcgctcaacgaatttgaacgcggcgtgcagctcgcgcgccaggggcaggtaaaactccagcaggccgagcagcgtgtgcagatcctgctttccgacagcgaagacgctaaaaccacgccattcacaccggacgccgagtaa

SEQ ID NO: 116563 - DNA, 900 bp, Enterobacter cloacae
atggatttttccaacgcgcttcaggcgcgcgtcatccgcgccaacgatgcgctgcgccgattcattgagccgcagccttttcagaacactccactggttgaagccatgcactatggcgcactcttggggggtaaacgcctgcgtccgttcctggtgtatgccacgggcaatatgttcggtatcagcgataacacgctggacgccccggcagccgccgtggagtgtatccacgcctattcgctgatccatgatgatttgccggccatggacgatgacgatttgcgtcgcggtcagccaacctgccatatcaaatttggcgaagcgaatgccattctggcgggggatgcgctgcaaaccctggccttctccattctgagcgatgcgccgatggttgaggtgagcgatcgcgatcgtctggcaatggtgtccgaactggcaatggccagcggcgtcgccgggatgtgcggcggccaggcgctggatttagaggctgaagggcgtcaggttactctggaacagctggagcgcatccaccgtcacaaaacgggcgcactgattcgtgcagccgttcgcctgggcgcgttgagcgcgggtgaacgcgggcgtaaagccctgccggttctggacagatacgcagaaagtatcggtctggcattccaggttcaggatgacattctggatgtggtgggcgatactgcaacattgggaaaacgtcagggtgcggatcagcagcttggcaaaagtacctaccccgccctgttgggccttgagcatgcccaacgtaaagcccgggatctgatagacgatgcccgccggtcgctgaatgagctggccgcgcaatcgctggatacctcggcactggaagcgctagcggactacataatccagcgtgataaataa

SEQ ID NO: 116564 - DNA, 1863 bp, Enterobacter cloacae
atgagttttgatattgccaaatacccgacactggcgttagttgactccactcaggagttacgtctgttgccgaaagagagtctgccgaagctgtgtgacgagctgcgtcgctacctgctcgacagcgttagccgctccagcggccacttcgcctccggacttggcacggttgagctgaccgtggcgttgcattacgtctataacacgccgttcgatcagctgatctgggatgtaggccaccaggcctatccgcacaaaattctgaccggacgtcgcgataaaattggcaccattcgccagaaagggggcctgcacccgttcccgtggcgcggcgagagtgaatatgatgtgttaagcgtcggccactcttccacctccatttctgcgggcattggtattgccgttgccgccgaaaaagagaataaacaacgccgcaccgtctgcgtgattggcgacggggcgatcaccgccgggatggcctttgaggccatgaaccacgcgggcgatatcaaaccggacatgctggtgatcctcaacgataacgaaatgtcgatctccgagaacgtcggcgcgctgaataaccatctggcgcagctgctgtccggcaagctttactcctcactgcgtgaaggcggtaaaaaagtcttctccggcgtaccgccgattaaagagctgcttaagcgtaccgaagaacacatcaaaggcatggtcgtgccgggtacgctgttcgaagagctgggctttaactatattggcccggtggacggccacgatgtgctgggcctggtgacgacgcttaaaaacatgcgcgacctgaaaggcccgcagttcctgcatatcatgaccaaaaaagggcgtggttacgaaccggcggaaaaagatccgatcaccttccacgcggtgcctaagttcgaccataccagcggttgtctgccgaaaagcagcggcgggatgccaagctactcaaaaatctttggcgactggctgtgcgaaacggcggcgaaagacaacatgctgatggcggtgacgcctgccatgcgtgaaggctccggcatggtggagttttccaaaaaatacccggaccagtatttcgacgtggctatcgccgagcagcacgcggtaacttttgctgcgggcctggcgattggcggctacaagccggtggtagcgatctactctaccttcctgcaacgcgcctacgatcaggttatccatgacgttgccattcagaagctgccggtgctgtttgctatcgatcgcgcgggcattgtgggggctgatggccagacgcaccagggcgcgtttgatctctccttcctgcgctgcatccctgatatggtgatcatgacgccaagcgacgaaaacgagtgtcgtcagatgctgtataccggttaccactatcaggacggcccctgcgcggtacgttacccgcgcggtaatgcccttggcgttgaattacagccgctggaaaaactggatatcggtaaaggtctggtgaaacgccgtggtgaaaaagtggcgatcctgaactttggtacgttgatgccggaagcggcaaaagtcgctgaaaacctgaatgcgacgctggtcgatatgcgcttcgtgaagccgctcgatgaatctctgattctgagcatggcggaaagccatgacgtgctggtcacgctggaagagaacgccatcatgggtggcgcgggtagcggcgtgaacgaagtgctgatggcgaaccgtaaagccgttccggtgcttaatctcggcctccctgaccacttcatcccgcaaggcacccaggatgaggcgcgcgccgacattagtctggacgccgccggtatcgaagctaaaatccgcacctggctggcctga

SEQ ID NO: 116565 - DNA, 975 bp, Enterobacter cloacae
atgcaatacacgacattaggaaaaacggaccttaaggtgtcccggctttgcctgggatgcatgacgtttggcgagcctgaccggggaaatcatgcctggacgctgccggaagagagcagccgccctatcatcaagcgcgccattgacggcggcatcaacttcttcgataccgccaacagctactcagacggcagcagcgaagagattgtgggccgcgccctgcgagattttgcccgtcgtgatgatattgtggtcgccactaaggtgtactacccgtcaggcgatctggcggaaggcctttctcgcgcgcagatcctgcgttccattgatgacagcctcagacgcctgaacatggattacgtcgacctgctgcaaatccaccgctgggattacaacaccccgatcgaagagacgcttgaagcgttaaacgacgttgtgaaagccggtaaagcgcgctacatcggcgcatcgtccatgcatgcctcacagtttgcccaggcgctcgatctccaggcgcagcacggctgggcgcgctttgtcactatgcaggatcactacaacctgatttaccgggaagaagagcgcgagatgctgccgctctgctaccaggaaggcgtggcggtgatcccgtggagcccgctggcgcgcggaaggttaacccgtccgtggggggaaactaccgcccggctggtatcggatgaagtgggtaaaaacctgtatgacgatacagaagccagcgatgcgttaattgccgaacgcttagccgggatcgccgacgatatcggtgcaacgcgcgcgcaggtggcgctggcgtggctgctgagcaagcgcggtgtcgccgcgccgattgtgggcacgtcgcgggaagaacagctggatgagttgttaagtgcggtggacttatcgttgacgccggagcagattgccgagctggagacgccgtatcagcagcatccggtggtagggtttaaataa

SEQ ID NO: 116566 - DNA, 972 bp, Enterobacter cloacae
atggcatgcggcgaattctccctgattgcccgttatttcgaccgtgtcagaacctctcgtcttgatgttgaaaccggcattggcgatgactgcgcacttctcaatattcccgaaaaacagacgctggcaatcagcaccgacaccttagtgtgtgggcgtcatttcctgccggatatcgatcctgccgatctggcgtataaagcgctggcggtgaacgtcagcgatctggcggcaatgggcgccgacccggcctggctgacgctggctctgaccctgccggaggtggatgaagcctggcttgaagccttcagcgatgccctgtttgaacagctgaattattacgatatgcagctgattggcggtgataccaccgccggtccgctgtccatgaccctggcaatccacggctatgtgcctgccgggcgcgcgctgaagcgctcgggtgcaaaaccaggcgactggctctacgtgaccggtacgccgggcgacagcgcggcagggctggcgatccttcagaaccgtttaacggttgaagatgctgacgatgcggcgtatctggtgaagcgccatctgcggccaacgccgcgtattctgcacggtcaggcgctgcgagagcgggccagttcggctatcgatttgtctgacgggctgatctccgatctcggccatatcctgaaggccagcggcgtgggcgcacgcgttgacctggatctgttcccgctgtcggagcaactgcttcgccatgtcgaacctgaacaggcgctgcgctgggcgttatccggtggagaagattatgagctgtgcttcaccgtgcctgagctgaatcgcgggacgctggatgtggcgctagcgcatctcggcgcgaaatttacctgcatcgggcaggtgatgccggaaagtgaagggttgctgtttgtccgcgacggcgccccggttacgcttgactggaaagggtacgatcactttgggtga

SEQ ID NO: 116567 - DNA, 420 bp, Enterobacter cloacae
gtgaaacctgctgctcgtcgccgcgcccgtgaatgtgccgtccaggcactttactcctggcagttgtcccagaacgacatcgctgatgttgaataccagttcctgtcagaacaggacgtgaaagacgttgacgttctgtacttccgtgaactgctgtcgggagtggcgactaatagcgcgtatctcgatggtctgatgaagccatacctgtcccgtctgctcgaagagctgggccaggtcgaaaaagcagtgttgcgtatcgcgctgtttgagctgtctaaacgtgatgatgtgccgtacaaagtggccatcaacgaagcgatcgaactggcgaaaaccttcggcgctgaagacagccacaagtttgttaacggcgtgctggataaagccgcacctgcgatccgtccccacaaaaagtga

SEQ ID NO: 116568 - DNA, 471 bp, Enterobacter cloacae
atgaacattattgaagctgctgtagctaccccggacgctcgcgtcgccatcaccattgcgcgtttcaacaacttcatcaacgatagcctgctggaaggtgcggttgacgccctgaaacgtatcggtcaggttaaagatgacaacattaccgtcgtttgggttccaggcgcttacgaactgccactggcggcgggcgcgctggcaaaaaccggtaaatacgacgcggtgattgcgctgggtaccgttattcgtggcggcactgcgcacttcgaatacgttgcgggcggtgcaagcaacggtctggcacacgttgcacaggatgctgaaatccctgtcgcgttcggcgtgctgaccaccgaaagtattgaacaagccatcgaacgtgctggcactaaagccggtaacaaaggtgcagaagctgcactgaccgcgcttgaaatgatcaatgtattgaaagccatcaaggcctga

SEQ ID NO: 116569 - DNA, 1104 bp, Enterobacter cloacae
atgcacgatgagatgtacatggcgcgcgccatgaagctggcgcagcgcggtcggtttaccactcaccctaaccccaatgtcgggtgcgtcattgttaaagatggcgagatcgtgggggaaggttttcactaccgcgcaggcgagccgcatgctgaagtgcatgccctgcgcatggcgggtgagaaagcgcgtggcgcgacggcctatgtgacgctggagccatgcagccatcacggacgtacgccgccgtgctgtgaggcgctgattgcggggggcgtctcgcgcgttgtcgccgccatgcaggatcctaatccgcaggtggcgggccgcgggctgtatcgtctgcaacaggaaggcatcgacgtcagccacggcctgatgatgcaggatgccgaaaacatcaacaaaggcttcctgaagcgtatgcgcaccggcttcccgtttatccagcttaagcttggcgcgtcactggatggccgcacggcgatggcgaacggcgagagccagtggatcacctcgccgcaggcaaggcgcgatgtgcaacgtctgcgcgcgcaaagccatgctattctcaccagcagtgaaacggtactggctgacgatccggccatgaccgtgcgctgggaagagctgaatgcggatacgcaggcgctctatccgcaggagaacctgcgtcagccgctgcgcattattattgatagccagaaccgcgtgacgccggagcaccgcatcgtgcagcagccgggtgaaacctggattgcccgcaccaaagaagatacgcgcgagtggccggaaggcgtgcgcagcattatggtgccggaacataacgggcatctcgatctcgtggtgctgatgatgttgctcggcaaacagcaggtcaacagcatctgggttgaagccggtccgacgctcgccggcgcactgcttcaggcggggctggtggatgagcttctcgtctacgttgcgcctaaactgttaggtaatgacgcgcgcggcctgtttgtgctgcccggccttgaaaaactggccgatgcgccgcaactctcattcagcgagattcgtccggtaggcccggatgtctgcctccatttaacgacagcgtaa

SEQ ID NO: 116570 - DNA, 450 bp, Enterobacter cloacae
atgcattgcccattttgctccgctgtggataccaaagtcatcgactcgcgtcttgtaggcgaagggtcttccgtgcgtcgtcgtcggcagtgtctggtgtgcaacgagcgttttaccacctttgaagtggcagagctggtaatgccgcgcgtggtaaaaagtaacgatgtgcgcgaaccgttcaatgaagagaaactgcgtagcgggatgctcaaggcgctggaaaaacggcccgtcagctccgatgacgtcgaaatggcgttaaaccatattaaatcttatctgcgggggttaggcgagcgcgaagtgccgagcaaaatgatcggcaatctggtgatggaacagctgaagaagctcgataaagtcgcctatatccgctttgcctccgtttaccgcagcttcgaagacatcaaagagtttggcgaagagatcgcccgcttacaggattaa

SEQ ID NO: 116571 - DNA, 540 bp, Enterobacter cloacae
atgacaagacgttacctgaaaatagtgctggtggggagcctgttcacgctcagcgcctgcgcacagcaaagcgaagtccgcgagatgaaacaaagcgtgaatacgcttaacgtggcgatggacaaacttaataaagaaaccgtgaagatcacccagcagaacgcgctgaatgccaaatccagcaatggcgtttatttattgccaggtgcaaacacgcccgcgcgtctgaacagccagattggcaccctaaagatgtctctggtgaatgttgcagcgaatgccgatggtactcgcgcaacattacgcattcagggtgagtccaacgatccgcttcccgcgttcagcggcaccgtagagtggggccagattcagggcaccacggagagctatcaggaagtgaacgtgaagaatcagctcttcaccgcccccgccagcacgctggcgccgagcgatgttgatatcccgctccagctgagcggactgaccccagaacagctgggctttatccgtattcacgacattcaacccgccgcgcaataa

SEQ ID NO: 116572 - DNA, 891 bp, Enterobacter cloacae
atgattatgaaaaaaacattactcgcagccggtgcagttctggcactctccacctctttcactgttaacgcagcggaaaacgacaaaccacaatacctttccgactggtggcatcagagcgttaacgttgtaggcagctaccatacccgtttcggaccgcagatccgtaacgatacctacctcgagtacgaagcattcgctaaaaaagactggtttgatttctatggctacatggacgcaccggtattcttcggcggtaacaccgacgcgaaaggtatctggaaccacggttccccactgttcatggagatcgaaccccgcttctccattgataaactgaccggtaccagtctggcgtttggtccgttcaaagagtggtatttcgcaaacaactacatctacgacatgggtcgcaacaagtccggtcgccagagcacctggtacatgggtctgggtacagacattgagactggcctgccgatgagcctgtccatgaacgtctacgcaaaataccagtggcagaactacggcgccgcgaacgagaacgagtgggacggctaccgtttcaaagtgaaatacttcgtgccaattacccaactgtggggcggtaacctgagctatatcggcttcaccaactttgactggggttcagacctgggcgataacgatttccgcgacctgaacggcagaaaagcgcgcactaacgactccatcgcgtccagccacatcctggcgctgaactacgatcactggcactactctgttgttgcgcgttactggcacaacggtggccagtggaacgacgacgccagcctgaactttggcaacggcgacttcagcgttcgctctaccggttggggtggttacctggtcgtgggttacaacttctaa

SEQ ID NO: 116573 - DNA, 681 bp, Enterobacter cloacae
atgacccgacgcgctgaccgtttgttccagattgtgcagatccttcggggcaggcgtctgacaacggcagcgcatctggcggaaaggcttggcgtgtccgagcgcacggtgtaccgcgatatccgcgacctgtcgctttccggcgtgccggtggaaggcgaggcgggaagcggatatcggctgatgtcgggttttgatttacccccgctgatgctgaccaacaaagagtccgaggcgctgatggtggcgattcgcctgctcaaaacctggggcggggaatcgctgtcgcgcgagctggagtcggcccaggaaaaagtgctggcgatcctgccagaagagagccgccgcaaagctgagcagacgcggatttacgcgccggatattgcccttcagccccattcccgtagtggtttcgacgtgatccatcaggcgatttccgcccagcgcgtgctggcgctgcattatcgtgatgaggccgggcagttaacctggcgtgaggtgcagccgcttgggctgttcttctggggggagcactggctgttggctgcgtggtgcgagcgacgcgatgactaccgctgtttccggctcgaccgatgcctcaatattgtgcagacggagaggcggtttagcgagagtgcggacaggtcattggcagattttttgcgcaaggtgaggcagtaa

SEQ ID NO: 116574 - DNA, 366 bp, Enterobacter cloacae
atgaaaagtgttattaactggtttgaaattccggtcgccgatatggatcgcgccatcaaattttatgagtcggtgatgcaggtcgcgctgcggcgcgagaagatggacgtggctgatctggcgattttcccgcacgaggatccggccaccggcggcgcgctggcgaaatttgacggcgttacaccgtcttcgcagggcgctattatttacctgcatactgacaatctggcggccacgctcgatcgtattgcttctgcgggcggtgagtgcgtgtttggcccgctggaactgccgcaagacattggcactatagccctgtttaccgacagcgaaggtaatcgcgtcggcctccatcaaccggtatga

SEQ ID NO: 116575 - DNA, 972 bp, Enterobacter cloacae
gtggcacaggaatatactgttgaacaattgaaccacggccgtaaagtctgggactttatgcgctgggactactgggccttcggcatttcaggttttctgctgatcttgtccatcgtcattatgggcgtgaaaggctttaactggggtctggatttcaccggtggtacggtgatcgaaattaccctggaaaaaccggtcgatatggaccagatgcgtgagtctctgcaaaaagcgggctttgaagagccgctgctacagaacttcggcagcagccgcgacatcatggtgcgtatgccgccggtacacgatgccaacggcagccaggagctgggcagcaaggtcgtccaggttattaacgaaacgaccagccaggatgcaacggttaagcgtattgagtttgtcggcccgagcgttggtgctgacctggcgcagaccggtgcgatggcgctgctggtggcgctgatctcgatcctgatttacgtcggtttccgctttgagtggcgactggcggcaggcgtggttatcgccctggcgcacgacgtggtgatcaccatgggcatactgtctctgttccacattgagattgacctgacgattgtggcatccctgatgtccgttatcggttactcactgaacgacagtatcgtggtatctgaccgtattcgtgaaaacttccgtaagatccgtcgcggcacgccgtacgaaatctttaacgtgtcgttgacccagacgctgcaccgtacgttgatcacctccggcaccaccctgatggtgatcctgatgctgttcctgttcggtggcccggtgctggaaggcttctcgctgaccatgctgatcggtgtgtctatcggtacggcctcgtctatctacgtcgcgtccgcactggcgctgaagctgggcatgaagcgcgagcatctgatccagcagaaagtcgagaaagaaggggcggatcagccgtccattctgccgtaa

SEQ ID NO: 116576 - DNA, 1815 bp, Enterobacter cloacae
atgctggtcgtcgtgattatcgtcggcctgctgtacgcgcttcccaacctgtatggtgaggatccggccgttcaaatcactggcgcgcgcggtgtcgccgccagtgagcaaacgctgatccaggtccagaaaacgttacaagaagaaaaaattaccgctaagtctgtggcactggaagagggcgcaattcttgctcgcttcgacaccaccgacacgcagctccgcgcacgtgaagcgctgatgggcgtgctgggtgataagtatgtcgtggcgcttaaccttgctcctgcaaccccacgctggctggctgcgctgaacgcagagccaatgaaactgggtcttgacctgcgtggcggcgttcacttcctgatggaagtggatatggataccgcgctcggcaagctacaggaacagaatatcgacagcctgcgcagcgatctgcgcgataagggcattccgtacaccaccgtacgtaaagaagataactacggcctgagcatcacgttccgcgacagcgcggcacgcgatcaggctgtgacgtatctgtctcagcgtcaccgcgatctggtgatcacctctcagggcagcaaccagctgcgtgcggtaatgaccgacgcgcgtctgagtgaagcacgtgaatacgccgttcagcagaacattaacattctgcgtaaccgtgtaaaccagctgggcgtggctgagccactggtacagcgtcagggtgctgaccgtatcgtggtcgaactgccgggtatccaggataccgcccgtgcgaaagagattctgggcgcgactgcgaccctggagttccgtctggttaactccaatgtcgaccaggctgctgcggcttcaggccgtgtgccgggcgattctgaagtgaaacagacccgcgaaggccagccggttgtgctgtacaaacgcgtgatcctgaccggtgaccatattaccgactccacttcaagccaggatgagtacaaccagccgcaggttaacatctcgctggatagcgcaggtggcaacatcatgtctaacttcaccaaggacaacatcggcaagccgatggcgaccctgttcgtggagtacaaagacagcggtaagaaagacgccaatggccgtgccgtgctggtgaaagaggaagaggtgattaacatcgccaacatccagtctcgtctgggtaacagcttccgtattaccggtatcagcaacccgaacgaagcgcgtcagctctctctgctgctgcgtgccggtgcgctgattgcgccaattcagattgttgaagaacgtaccatcggtccaaccctgggtatgcagaacatcaaacagggtctggaagcgtgtctggccggtctggcggtgtccatcatcttcatgatcttcttctataagaagttcggcctgattgcgacctccgcgctgattgccaacctggtgctgatcatcggtatcatgtccctgctgccgggggcgacgctgaccatgccggggattgcgggtatcgttctaacccttgcggtggcggtcgacgccaacgtactgataaacgaacgtatcaaagaagagctgagcaacggtcgttctgtacagcaggcgattgaagaaggctacaaaggggcgttcagctccatcttcgatgcgaacgtaacaacactgattaaggttcttatcctgtatgcagtgggtactggcgcgatcaaaggctttgcgattactaccggtatcggtgtcgcaacgtcgatgtttaccgctattgtcggcacccgtgccatcgtgaacctgctgtacggcggcaagcgcgtcaaaaagctgtctatctga

SEQ ID NO: 116577 - DNA, 333 bp, Enterobacter cloacae
atgagcttttttatttctgatgcggtagcagcaacgggtgcaccagcgcagggcagcccgatgtctctgattctgatgctggttgtgttcggtctgatcttctacttcatgatcctgcgtccacagcagaagcgtactaaagagcacaaaaacctgatgaactccatcgcgaagggcgatgaagtcctgaccaatggtggcctggtgggtcgcgtaaccaaagtagcggaaaacggctacattgctatcgccctcaacgacaccactgaagtggttatcaaacgtgacttcgtagctgccgttctgccgaaaggcaccatgaaggcgctgtaa

SEQ ID NO: 116578 - DNA, 1128 bp, Enterobacter cloacae
atgaaatttgaactcgataccaccgatggccgcgcgcgtcgcggtcgtctggtgtttgatcgcggcgtggtagaaacccccgcgtttatgcctgtgggcacgtacggcaccgtaaaaggaatgacgccggaagaagttgaagccactggcgcacagattatcctcggcaacaccttccacctgtggctgcgtccgggtcaggagatcatgaagctccacggcgacctgcacgatttcatgcagtggaaaggcccgatcctcaccgactccggcggtttccaggtcttcagcctgggcgatatccgtaagatcactgagcagggcgtacacttccgtaacccgatcaacggcgatccaatcttcctcgatccggaaaaatccatggagattcagtacgatctcggctccgatatcgtaatgatcttcgacgaatgtacgccatacccggcggactgggactacgccaagcgttccatggagatgtccctgcgttgggcgaagcgtagccgcgaccgttttgacgccctgcaaaacaaaaatgcgctgttcggcattattcagggcagcgtttacgaagatttacgcgatatctcggttaaaggtctggtagagataggctttgatggctacgctgtcggcggtttggctgtgggtgagccgaaggaagacatgcaccgcattctggagcatgtctgcccgcaaatcccggcggataaaccacgatacctgatgggtgtgggtaaaccagaagatctggtggaaggcgtacgtcgcggcattgatatgttcgactgcgttatgccaacccgaaacgcgcgtaacggtcatttgttcgttaccgatggcgtggtgaaaatccgtaacgcgaagcataagagtgacaccagcccgctcgattccgagtgcgattgctatacctgtcgcaattattctcgcgcgtatctgcatcatctcgatcgttgcaacgagattttgggggcgcgtctcaataccattcataatcttcgttattatcagcgcttaatggctggtttacgtaaggctatcgaagagggtaaattagagagcttcgtgaccgatttctaccaacgtcaggggcgggatgttccaccgttgaacgttgattaa

SEQ ID NO: 116579 - DNA, 1071 bp, Enterobacter cloacae
atgcgcgtcgccgatttctcctttgaactacctgaatccctgattgctcactaccccatgcctgagcgtagcagctgtcgcttgctgtcactggacgggccaacgggcgcgctgacgcacggtactttcaccgatctgctcgacaagctcaaccctggcgatctgctggtctttaacaatacccgcgtgatcccggcgcgtctgtttggccgtaaagccagcggcggtaagattgaggtgctggtcgaacgtatgctcgatgataaacgtattctggcacatattcgcgcctctaaagcgccgaagccgggcgctgaactgctgctgggggatgacgagagcatcaaagcgaccatgaccgcgcgtcacgatgcgctatttgaagtggaattcaacgacgagcgcacggtgttcgatatcctcaacgccatcggccacatgccgctgccgccgtatattgagcgcccggacgaagaggccgaccgcgagctgtatcagaccgtctacagccagaagcctggcgcggtggcggcgccaacggcgggcctgcactttgatgaaccgctgctggaaaagctgcgcgcgaaaggcattgagatggcgttcgtgacgctgcacgtcggcgcggggaccttccagccggtgcgcgtggacagcatcgaagaccacatcatgcactctgagtatgccgaagtgccacaggaggttgtggatgcggtgctggcggcgaaagcgcgcggtaatcgcgtcgtggccgtcggtacaacgtcggtacgttcccttgagagcgctgcgcaggccgcgaaaagcgagctgattgagccgttctttggcgatacgcagatctttatctacccgggctatcagtacaaagtcattgatgcgctggtgaccaacttccatctgcctgaatcgacgctgattatgctggtttccgcgtttgcggggtatcagcatacgatgaacgcctacaagtctgcggtagaacaaaaatatcgcttttttagctacggtgacgcgatgtttatcacgtacaatccgcaggctttgaatgagcgtgtcggggaataa

SEQ ID NO: 116580 - DNA, 582 bp, Enterobacter cloacae
atgaattttctcgctcatctgcatctcgctcatctcgcggacagctccctctccggcaatttgctggccgattttgtacgcggcaaccccgcggaagcgtactcccctgaggttgtcgacgggatttttatgcaccgccgcatcgacgtgctgaccgataacctgccggaagtgacggaagccaaagcctggttccgccccgaaacccgacgcgtggcgccgatcacgctcgacgtcatgtgggatcatttcctgtcgcgccactggtcccggctgtcgcctgatatgtcgctgcctgagtttgtgcgctacgcccacgcgcaggtgtcgatcattttgccggactccccgccgcgctttgtgaatctgaataactatctctggtctgaacgctggctggagcgataccgcgagatggatttcattcagaacgtcctgaacggcatggcgagccgtcgaccgcgtctggacgcgctgcgcgactcatggcatgacctggatgaacattatgatgcgctggaaacccgcttctggcagttctacccgcgtatgatgacgcaggcgaaaaataaagaactgtga

SEQ ID NO: 116581 - DNA, 603 bp, Enterobacter cloacae
atggttctggtaactcgtccggctccggattttacagctgccgccgttctgggcaatggtgaaatcgttgaaaacttcaacttcaaacagcacaccaacggtaaagcgaccgttctgttcttctggccaatggacttcactttcgtttgcccgtctgagctgatcgcgttcgacaaacgttacgaagaattccagaagcgtggcgtggaagtggttggcgtctccttcgactctgaatttgtacacaacgcatggcgtaacacccctgtcgaaaacggcggcatcggtgcagtgaaatacgcgatggttgcggacatcaaacgcgaaatccagcaggcttacggtatcgaacatccggacgctggcgttgcactgcgtggttctttcctgatcgacgcgaacggcatcgttcgtcaccaggttgtgaacgatctgccgctgggtcgtaacatcgacgaaatgctgcgcatggttgacgcgctccagttccacgaagagcacggtgaagtgtgcccggctcagtgggaaaaaggtaaagaaggtatggcggcttccccagacggcgtagctaaatacctgtctgagaacgtatccagcctgtaa

SEQ ID NO: 116582 - DNA, 1380 bp, Enterobacter cloacae
atgaaatggatgaacgcggttgtttgtgcggcactgctggccgtggccggtccggcattctgcgagggcgcgccagcggaatccccgcgggattatgcctatggcctgtcccttgatacctctgcctcttcgccgtggtatcgggtcatgctgccgctggcggtttatcagcagagcacatcgcccgatctgcgcgacgtgcgcgtgtttaatcagtcgggcgagccggtaccgttcagcctggttaccacgacgcgtccgcagccggcaccgaccaccacggcgctgcgcctctttgcgcttaacgcctcgccgggcggagaagaggacagcggcgataaaattatgctacgggccagaaacggcgtggaaattgtgctggaagggcaacacgcagcggctgccggacagcactatctgctgaccctgccggaaaacgcgacggaggttccgctctctcagctccagcttttctgggacacgccgcagggctcgtggcaggggacggcatcggtctattacagcgaggatctgaaaaactggtataccctgcgcgaagagatgcccctgctggacgtgatgagtggacaggatcgcctgaagctcgaccgcatcgataccgatctggtgttatcgcctgaggcgaatcgttatctgctgctggtgctgaacacggggcgttctgccctgacgttaaccggcgtcaacgcgattaacgcgactgaacagccggaatctgagcacattagcctggcgggagagggggagcggttatccgaaagcgaagccgtgtggcgctggaaacatccgcagcctctgagtgcgatcggcttcatgctgaatggcgacggtgttctcccggcagaaatagcctggcgggaggcggataaggatcggtggcatacgctgaaaaaagaggtgatctaccagctcggcggcaaaacgtctgaacctgttccgctccctggcggactggtcgaggcggtaaaaatcaagaccctcaatgcgcgtttgcctgagaacctgcctggcgtgaccgggcaacgcgtgcgctacgatctggtgtttaacgcgcaggggaaggggccgtacctgctcgcgtgggggaacggggctgcgaaaccggcgagcgtggagacggatatgctgatcccgaccgaactgcgtaaaacctacgatctggcagccctgccgatggcggatacgctggaacctgtcccgctgggtggcgaggcgcgtttaaccgcgacgtctgcggctgagcaggaaagcagaatgaaaacgctgatggtctggggcgtactgattgcgggggtgatggtgcttgcgggtatggcatggcgcatctggcgcgaggtaaaaaaagacggcgcagcataa

SEQ ID NO: 116583 - DNA, 2610 bp, Enterobacter cloacae
atggacgagctttacatccttggctgtttgttcctggtttttgcgctggtcgtggcacccgtgctcgcggtgataggttttaaccgaagcacggcggcgcggcaggagatcgcccggcttcgccagcgcattgaggcgcttgagcagcgcggtgtcactgagaaagcgccggagccggtgcagaccgccgcgccggtggagacgccagcgtcggtggcagaagccgttaccccacctgtcgatccctggcgtcccgaaccgcccgtcactgaagcagaaccagcgcttgtaccggcggcaaaacggccttccgcctttggcggcatcctgtcctcgctgacgcgctggtttatgcagggcaatccgctggcaaaactggggattgtactgctcttcctcggcctctctttcctgctgcgctataccgttgaacattcactgtttccgattgagctgcgtcttgccgccacggcgctgtttgccatggttctgctggccgttggatggcggctgcggcacaggcagcggatctacgcgctgatcctccagggcggggcgaccggcgtgctttatctgaccgtctttggcgcattccggctgtggcaaatgctgccgatgacgctggcgtttgcgctgctggtggtgatttgcgcggcgagcgtcgggctggccgtgctgcaaaaggcgctgagccttgccatgctggcgagcctcggcggataccttgcgccgctgctgttgtctaccggaggcggcagcgttgtggcgctgttctccttctatctcatgctttccatcggcattctcgccatcagcatctggcagcactggcgcgagctcaacctgctcgggctgctcttcacgtttggcgttggcggggtatgggggctgagcgactaccagcctgaagactatgctatctgtcagctgttcctgattgccaatacgcttatttttggcgtgtttagcgtggcgctgtcgctgcgggcgcaggaaaaaggcaaacagattattgacggcgcactgctgtttgctccgccgctgattggttttgggatgcagtatggcatgacgtctcactggacgtacggcccggcgctcagcgcgctgggctatggtgcgttttatctctcactggcgtttctcgcactgcgacgctatccgtctgtcgggcggccactggttatggcggcgctggcgatcggcggcgggtttgccacgcttgccataccgctggcgctttcagcgcgctggacggcgatggcctgggcgctggaagggttgggtattctctggctgggcgtgcaacagcagcagcggcgcatgagctatagcgggacggcgctgctggtgctggcgctcggcagcgcgatatgggcgcaaatggacggcgtcacctcgttgagcctgctgcttattttcgcagtgctcagtctttgctggctggctgcggcctggctgtggcagaaaatcgcacagccgggcagttgggcattgctggccggtgggctgctgttctggttagtggcgcagctgggcgcgtcgcagctgttcctgaagcaggagttatcggttctggaaggcgtaatggcgctgacggcggcgtcggcctggggatggcggcaggctgccgctcgtctggcgtggcgggagctggatgccagcaaatggctgctgtggccggtgatgctgctgatggtgctgtatcagatctggcaacagcaaatcctggcggccggctgggcaaatctggcctgggctattgcgctgcctgccgccctgatgctgctgcggcgcgacgaagataaacttctgccgcgcatctcaatgggactgcatctgtcgctggtgtggatgattttactcgccatagccgccgagctttactggtttgcccgctccctgccgtggggcatggcggcctggggaagcggcattgcgatggctgttggcggtggggtgattatggcgctctccgcggccgtacggcgtcgcgggtggccgttccgggtatggcctgcgctctacgcctgccttgccgcgatccctgtggttgtggcgctggtggtattgctggtcgtgaccaatttgcaggacggtgtggtctatcaacagacatggctgccgctggtgaacccgcttgaggaaggggcggcgttctcgctgctggggctggtggtgttttatcgggaagtggatcgctactatccggcatcgtttgcgcagtcccgtccgtggcccgccgttgtgctgatggccctgggtttctggtggcttaacggcgcattgctgcgcgcgctggcgtggtacggcgaggtggcctggaattgggagtcgttgtggcattcgcggcttatccagaccacctttgccctgttctggatgttgtgcgcgctggtggtcatgatccgcgccacccgtcacgcctcccggcagcagtggcttggcggtgcggcgctactgggggtggtcatgctcaaactgatgctggtggacagcgcgggcggtggcggcctggcgcgcgccgtcgcgtttattggcgtggcgatcctggtcctgattgtgggctatttctcgccgctaccgcctaaggcaggagaagaaaaatga

SEQ ID NO: 116584 - DNA, 1818 bp, Enterobacter cloacae
atgttaaacgcctggcaccttccggttgccccatttgttaagcaaaacaaagacaaccttgtgattacgctctggctggcaggggacaatcagcctgaacgtgtgaccctgcgcgccgaagtggataacgaagaaacgtcgctgaaaatgcacaaagtgcgcagccagccgcagccgggcgtcacggcgtggcgggcaaatatcgatttgcgcagcgggcagccgcgtcgccgctacggcttcaagctgctgtggaacaaccggcagctgtggtttaccccgcagggcttcagccgttttcctccggcccggctggagcagtttaccgtggatcacccggataacggcccgcagtgggttaacgatcaggtcttttaccagattttcccggaccgctttgcgcgcagcgaaaagcgcaacgccgatcaggacaaggtttattaccatcatgcggtcggtcacgacattattctgaaaaaatgggacgagccgctgaccgcccaggcggggggatcgaccttttacggcggcgatctcgacggtatcagcgaaaaactgccgtacctgaaaacgctcggcgtcacggcgctgtacctgaacccggtgtttaaagcgccaagcgtgcacaaatacgatacgcaggattatcgccacgttgacgagcagtttggcggtgacgaggcgctgctgcggctgcggcacaacacgcaaaaagagggtatgcgcctgatccttgatggcgtgttcaatcacagcggtgattcgcacgcgtggtttgaccgtcataatcagtcgatgagcggcgcatgccataatccggactcaccgcagcgtgactggtacagttttgatgagaatggccgcgccctggactggctgggctacccgagcctgccgaagctcgatttccagtcgccatcgctggtgaatgagatctacggcgacgacgacagcatcgtgcgccactggctgaaagcgccgtggaacatggacggctggcggctggacgtggtgcatatgctgggtgaatcaggcggggcgcggaataaccttcaacatgtcgccgccattacccggtcggcaaaagcggcccggtcggaagcgttcgtcttcggggagcactttggcgacgcgcgtcagtggttgcaggctgatgcagaagacgcggcgatgaactatcgcggcttcaccttcccgctgtggggtttcctcgctaacaccgatatctcttacgatccgcagcatatcgacgccgaaacctgcatggcgtggatggaaaactatcgcgctggcctgtcgcatcagcagcagctgcggatgtttaaccagctcgacagccatgataccgcgcgctttaaatcattgctgggtaaagatgtggcgcgtctgccgctggcggtgacctggctctttacctggccgggcgtaccctgcatctactatggcgatgaagtggggctggaggggaataacgatccgttctgccgtaaaaccttcccgtgggagagtgaaaaacaggatcaggatctgctcagcctgtaccagcgtatggcgacgctgcgcaggcagagtcaggccctgcgctacgggggctgtcaggtgatgtacgcccacgataacgtggtggtgtttgtccgcgtctataaccagcagcgtgtgctggtggcgatcaaccggggcgaggcgtgtgaagtggtgctggaagattcaccgctgctggccggtaaaacgtggaagatcaaagagggtaaagcgacgttccaggagagcgtgctcacgctgcccgcgatttccgctgcggtctggttcggcagctaa

SEQ ID NO: 116585 - DNA, 1374 bp, Enterobacter cloacae
atggaaagcactaacaaacttaaacgtggattgagcacccgccacatccgctttatggcgctgggctcggctatcggcaccggtcttttttatggctcggcagatgccatcaaaatggccggtccaagcgttctgctggcctacatcatcggcggcgtggcggcctatatcatcatgcgtgcgctgggggagatgtcggttcacaacccgtctgccagctcgttttcacgctatgcacaagaaaacttaggcccgctggccgggtttatcaccggctggacttactgcttcgaaattctgattgtcgccattgccgatgtgacggcgtttggcatctatatgggggtctggttccccgccgtgccgcactggatctgggtactgagcgtggtgctgatcatctgcgccgtcaacctgatgagcgtgaaggtgtttggcgagctggagttctggttctccttcttcaaggtcgcgaccattattatcatgatcctcgccggtttcggcatcatcatctggggtatcggcaacggtgggcagccaaccggcatccataacctgtggagcaacggcggcttcttcagcaacggctggctcgggatggtcatgtcgctccagatggtcatgttcgcctatggcggtattgagattatcggcatcaccgccggggaagcgaaagatccggagaagtccattccgcgcgccatcaactcggtgccgatgcgtatcctggtgttctacgtgggcacgttgtttgtgattatgtccatctacccgtggaaccaggtgggcaccaacggcagcccgtttgtcctgactttccagcatatgggcattgcgtttgccgccagtattctcaactttgtggtactgaccgcctcgctgtcggccatcaacagtgacgtgttcggcgtgggtcgtatgctgcacggcatggcggagcagggcagtgcgccgaaggtgtttgccaaaacgtcgcgtcgcggcaccccgtgggtaacggtgctggtcatgaccgtggcgctgctgttctcggtttacctgaattacatcatgccggagaacgtcttcctggtgattgcgtcactggcgacctttgcgacggtgtgggtgtggatcatgatcctgctgtcgcagattgcgttccgtcgccgcctgtcgccagaagaggccaaagcgctgaagtttaaagtgccgggcggcgtgccaacgaccattgtcggtctcatcttcctggtcttcatcattggcctgattggttatcacccggatacccgtatttccctgtacgtgggcttcgcgtggatcgtcctgctgctggtgggctggatgtttaaatgtcgccgcgatcgtcagctggcggaagcacagtaa

SEQ ID NO: 116586 - DNA, 1320 bp, Enterobacter cloacae
atgacccatcacttgaaatcgcgtgacattatcgcgctgggctttatgacatttgcgctgttcgttggcgcaggtaacatcatttttcctccaatggttggcttacaggcgggtgaacacgtctggacggctgcgtttggcttcctgcttactgccgtgggcctgccggtactgaccgttatcgcgctggcgaaagtcggtggcggtgtggacagcctcagcaccccgattggcaaagtggctggcgttctgctggcaaccgtctgctatctggccgttggcccgctgttcgcgaccccgcgtacggcgaccgtctcctttgaagtgggtatcgccccgctgaccggtgacggcgcgatgccgctgtttatttacagcctcatttacttcgccatcgtgatactggtttctctctatcccggcaaactgctggataccgtgggtaacttcctggcaccgctgaaaattgtggcgctgatcgtgctggcggttgcggccatcgtctggcctgcggggcccatcagctccgcgatggacgcttatcagaacgcggcgttctcaaacggttttgtgaacggctatctgacaatggatacgctgggtgcgatggtgtttggtatcgttatcgttaacgccgcgcgttcccgcggggtgaccgaagcgcgtctgctgactcgctacaccatctgggctggcctgatggccggtgtcggcctgacgctgctgtatctggcgctgttccgtctgggttcagatagcgcaacgctggtcgatcagagcgcaaacggcgcggcgatcctgcatgcttacgtgcagcacacctttggtggtgcaggcagcatgctgctggcggcgctgattttcctggcctgtctggtgacggcggtgggtctgacctgcgcctgcgcggagttcttcgcccagtatctgccgctctcttaccgcacgctggtgtttatcctcggcatcttctccatggcggtgtcaaacctcggtctgagccacctgattcaggtgtcaattccggtgctgacggcgatctatccgccatgtatcgtgctggtggtgctgagcttcacccgcccgtggtggcataactcgacgcgaattattgcgccggccatgtttatcagcctgatttttggtatccttgacgggatcaaagcatcagcatttgcagaaatcctgccagcctggacacagcgtctgccgctgtccgagcagggcctggcctggctgatgccttccgttgtagcgctggttctggcgattatctgggaccgtgcggcagggcgtcaggtgacatccaacgcccattaa

SEQ ID NO: 116587 - DNA, 1296 bp, Enterobacter cloacae
gtgctggaacgtctgtcatggaaaaggctcgtctttgaactgatcttatgctgcattccggccctcattctgggggctatctttggctatctgccgtggtttttactggtggccgtgacgggattgctcgtctggcatttctggaatttactgcgtctctcctggtggctgtgggtcgacagaagtatgacacccccgccgggaagcgggagctgggaaccgctactctacggcctgcaccagatgcagatgcgtaacaaaaagcgccgtcgtgagctgggaagcctgatcaaacgctttcgcagcggtgcggagtcgctgccggacgcggtgatcctgacgacagaagaagggacaatcttctggtgtaatggcctcgcgcaacagctactgggcctgcgctggccggatgataatggtcagaacatcctgaaccttctgcgttatcccgagttcacgctgtatctgaaaaagcgggatttttcgcgcccgcacaatctgaagctcaataacggtcgccatctggaaatccgcgtgatgccctacagcgatcggcagtggctgatggtggcgcgggacgttacccagatgcaccagcttgagggcgcgagacgtaacttctttgccaacgtcagccacgagctgcgtacgccgttgacggtgcttcagggctacctggagatgatgcaggagcaaacgcttgaggggccgccgcgtgagaaagcgctgcataccatgcgggagcagacgttccgcatggaagggctggtcaaacagctgctgacgctttcaaaaattgaggctgccccgtcgctggcgctaaacgacatcattgatgtgccgatgatgttgcgggtggtggagcgcgaagcccaaacgctgagtcataatcagcacaccctgagttttgacgttgataacacgctgaaagtgctcggcagtgaagatgagctgcgaagcgctatctcaaacctggtctataacgccgtgaatcatactccgaaaggaacgcatatcgcggtgcgctggcagcataccccggcgggcgctgagtttagcgtcgaggataacggaccggggattgggcctgaacacctcccgcgtctcaccgaacggttctaccgggtggataaggcgcgctcgcggcagaccggcgggagcggactggggctggcaattgtgaagcatgccgtcagccaccacgaaagccggctcaatatcgaaagcaccctcgggaagggcacgcgctttagcttcgtgattccggaacgattaattgccaaaaagagcgcctga

SEQ ID NO: 116588 - DNA, 690 bp, Enterobacter cloacae
atggcgagacgtattctggtcgtagaagatgaagctccgatccgtgaaatggtgtgcttcgtgcttgaacaaaatggcttccagccggttgaagcggaagattatgacagcgcggtgaaccagctgaatgaaccctggcccgatctgatcctgctggactggatgctgcctggcggttccggattgcagtttatcaagcatatcaaacgcgaggcgatgacccgcgatatcccggtggtaatgctgacggcgcgcggcgaggaagaggatcgcgtgcgcggtctggaaaccggcgcggacgattacatcactaaaccgttctccccgaaagagctggtggcgcgtatcaaagccgtgatgcgccgtatttcaccgatggcggtggaagaggtgattgtgatgcaggggctgagcctggatcctacctcacaccgggtcatgaccggtgaaaatcccctcgatatgggaccgaccgaatttaaactcctgcacttctttatgacccacccggagcgcgtttacagccgcgaacagttgctgaataacgtctggggaactaacgtctatgtcgaagaccgaacggttgacgtccatattcgccgcctgcgtaaagcactggaactgagcggccacgatcgcatggtacagacggtccgcggcacgggttatcgcttctcgacccgtttctga

SEQ ID NO: 116589 - DNA, 1206 bp, Enterobacter cloacae
atgcgcatacttcacacctcagactggcacctgggtcaaaatttttacagcaaaagccgcgccgcggaacatgaagcgttcctgaactggctgctggagacggctcaggctcacgaggtggacgcgattattgtggcgggcgacatttttgataccggatcgccgccgagctatgcgcgtgagctgtacaaccgttttgtggtcaacctccagcaaaccggttgtcacctggtgattgtcgccggaaaccatgactcggtggcgacgctgaatgaatcccgcgatattctggcgttcctcaataccaccgtggtggccagcgccggacacgcgccgcagatcctgaaaaaacgcgacggcacgccgggcgcagtgctgtgcccaattccgtttttacgcccgcgcgatatcgtgcaaagccaggcaggtctgtccggcagcgaaaaacagcagcatctgttgcaggccatcacccgctattatcaccagcaacatacggaagcctgcgccctgcgcggcgatcaggccattccgatcattgccaccgggcacctcaccaccgtcggagccagtaagagtgatgcggtgcgcgagatctatatcggtacgctggacgcgtttccggcgcaaaacttcccccccgccgactacattgccctcgggcatattcaccgggcgcagatcatcggcggctgcgagcatatccgctactgcggctcgcccatttcgctcagttttgacgaaacgggcaaggccaaatccgtgcatctggtgagcttcaccggaggcaaactcagcgccgttgagacgcttgaggtgccggtcacccagccgctggcggtgctgaaaggcgatctggccgccattaccgctcagcttgagcagtggcgcggcgcagcgcttaatccccccgtctggctcgatatcgaaatcaccaccgacgactacctgtacgatatgcagcgtaaaatacagacgctgacggaagaccttcccgtggaggtgctgctggtacgccgcagccgcgagcagcgcgagaaaatactgctcaacgcccagcgtgaaacgcttagcgaacttcgggttgaagaggtgttcgcgcggcggcttgcgcatgaagaggtggacgaggccagacgcaccaggcttaacgagctgtttgcccagaccctgcattccctccatgacgaggacgaaaacgcatga

SEQ ID NO: 116590 - DNA, 3132 bp, Enterobacter cloacae
atgaaaattctgagcctgcgtctgaaaaatctgaattcgctaaagggtgagtggaaaattgatttcaccgcggagccgttcgccagcaacgggctgtttgccatcaccggcgcaaccggcgcgggtaaaaccacgctgctggatgccatctgcctggcgctttaccacgaaacgccgcgtcttaataaggtctctcaggcgcaaaacgacctgatgacgcgcgataccgccgaatgcctggcggaagtagaatttgaggtcaaaggcgttgcttatcgcgctttctggagccagaaccgcgcccgcaaccagccggacgggaacttacaggcaccgcgcgttgagctggcccgctgcgaagacggcaaaattctggccgacaaagtcacggataagctggaacaaaccgccgcgcttaccgggctggactatggtcgctttacccgctcgatgttgctctctcaggggcagtttgccgccttcctgaatgctaaaccgagcgatcgcgcagagctgttggaagaactgaccggcacggaaatttacggccagatttccgccatggtttttgaaaaacacaaagcggcacgtaacgcgctggagatgtgcgaagcgcaggccgcaggggttgtgctgctgagcgaggaacagcagcagcacttgcagcaaagtttgcaggcacttactgacgaagaaaaagtcctgctggcacagcagcaaagccaacagaaagattttcagtggcttacgcgtaacgacgaactgatacgtgagcagcagcgtgcagccgcttcgcagcagcaggcgcaacaggctctgacggacgccgcgccccaactggcgaagctcaagctggcgcagcccgccgcccagctacgtccgctatgggagtatcagcaggagcagaccacccgcctggcgcagacaacagagcgaattgttgaagtaaatactcgcttactcgacagagcggtgcagcgctcgcgtattcgcaacggtgcgctgcgcaaccgtgaacagttgcagacagagcacaaggtactgacgcagtggctgaccgaacacgatcgtttccgtcagtgggggcaggaaattgccggctggcgggcgcattttacgcaactgggtcgcgataaaaatcagcttgttgcccagtcagcgcgcatggctgagcttcgtcagaagctggctgagatgcctgaaagtaggttgacgctgacggctgaggatctcgcgacggcaatggagcaacaggcacagtcgcgggcgctccgccagcgtctgacagcgcttcacgctcgctatcagccgctgcaaaaacgactgcgccagaatgcggaaagcgtgcagaaagcgcaggctgagcaggctaagttcaatgaaacgctgatcctgcggcgtcagcagttcaaagagaaaaatcagcactatgccgacctgaaagcgctctgtgagcgtgaggcgacaatcaaggatcttgagaactatcgtgcacagctcgaagcgggtaagccttgcccgctctgcggttcacgcgaacacccggcagttgtgcagtatcaggcgcttgaactgactgacaatcagcgccgccgcgacgcgctggagaaagaggttgccgcgctaaaagaggaaggattgctggtgctcgggcaggtgaatgcgctgacccaacagatccagcgcgagacagaggaagcacaggctctctctgaggaagagcaagcacttactaaggagtggctggaggtctgcgcctccctgaacatagcgctgaatattcaggatgatatagccccctggatgagcgaacaggaacagtatgaacgccagctgtatcagctcagccagcgtctgacgctgcaaaaccagctcaatgaacaggaaggtcaggcgcgccagtaccagcagcagctgacggcgacgcgtcaggcgctggcggcctcgttacaatcgctgtcgcttagcgtgcccgatgaaggggctgaaagcgcctggctgagcgcgcgcgaaagcgaatataccctgtggcaggaaaaacaggcccagcacggtacgattcaggaaggtattaacgccctgatgcccattctggaaacgctgccggttaccaatgatgcagaagccgacgcggttatccctgagaactggcgcggcatccacgacgaatgcgtgtcgctgcaaagtcagctcaccaccctacagcaacaggagacgcttgagcgtgaacggctccagcaatcacaggctcagttcaacgccgcgctgaccgcgagctgctttgccgatcgggacgcatttctctccgccctgctggatgaaacgtcgatccaccagcttgaacaacaaaagcagacgctggaaaaccagctccagcaggccacggcgctttcgatgcaggcaagccagcagcttcaggcgcatcaggcacagcgccccgaggggctggaaaccgatgccgcaacgcttcaggcgcagttacaccagctggcgcaacagcttcgggacaacaccacgcatcagggggagatccgccagcagctcaaacaggacgccgataaccgtctgcaccagcaggcgcttatgcagcagattgaggaggcggcgcgtcaggccgacgactggggctatctcaacgcgctgataggctccagcaccggcgataaattccgtaaattcgcccaggggctgacgctggataatctggtgtggcttgccaaccagcagctcaaccgtctgcatggccgctatctgcttcagcgtaaagccagcgacgcgctggagctggaagtggtcgatacctggcaggccgatgcggtacgcgatacccgtaccctttccggcggggagagtttcctggtcagtctggcgctggctttagcgctttccgatctggtcagtcacaaaacgcgcattgactcgctgttcctggatgaaggattcggcacgctcgacagcgaaacgctggacaccgcgctggacgcgctcgacgcgctgaacgccaccgggaaaaccattggcgtgatcagccacgtagaggcaatgaaagagcgcattccggtgcagatcaaagtgaagaagatcaacgggctgggatatagcaggctggacagggagtttgcggtgcagtaa

SEQ ID NO: 116591 - DNA, 906 bp, Enterobacter cloacae
gtgcgtattgggattgatttgggcggcaccaaaacagaagttattgcgctgagcgagcagggggagcaactgtttcgccaccgtctgcctacgccgcgcgatgattatcaccagaccatagagacgattgcccgcctggtcaatatggcagagcaggcaacgggcgagacgggcacggtcgggatggggatccctggctccatttcgccgtataccggcgtggtgaaaaacgccaactccacctggctcaacggtcagccgtttgataaagacttaagccaacgcctgaaccgggaggtgcgtctggcgaatgacgctaactgccttgcggtctctgaggccgtggatggcgcagcggctggcgcgcagaccgtatttgcggtcattatcggcaccggctgcggggcgggcgtggccttcggtgggcgctcgcatattggcagcaacggcaccgcgggcgagtggggacacaatccgttgccgtggatggacgaagatgaactcaaataccgcgccgaagtaccgtgctactgtggcaagcagggctgtattgagacctttatttccggcacggggtttgccaccgattatcatcgtctgagcggtcagccgctgaaaggtaacgagattatgcgtctggttgaggagcaggatccggtggctgaactggcgctcagccgctacgaaatgcggctggctaagtcactggcgcatgtgatcaatattcttgatcccgacgtgattgtactgggcggcggcatgagcaacgtcgaccggctgtacgccacggtgccaacgctggtgaaacagtgggtatttggcggcgagtgcgaaacgccgatccgcaaagccgtccacggagattccagcggagtgcgcggcgcggcgtggctctggccggaataa

SEQ ID NO: 116592 - DNA, 915 bp, Enterobacter cloacae
atgctgtggttcaaaaatttgatggtttaccgtctcagccgcgacgtttcgctgcgtgcagaagagatggaaaaacagttagccgcttactcctttaccccttgcggtagccaggatatggcaaaaaccggctgggttccgccaatgggttctcaaagcgatgcgctgacccacgccagcagcacggggcaaatcatcgtttgcgcccgtaaagaagagaagatcctgccgacgcccgtggttaagcaggcgctcgaagcgaaaatcttcaagctggaagctgaacagggccgtaagcttaaaaaaaccgaaaaagattcgctgaaggatgaagtgctgcactcgctgctgccgcgcgcttttagccgctttagccagaccatgatgtggatcgacactgttaacgggctgatcatggtggactgcgccagcgccaaaaaagcggaagatacgctggcgctgctgcgtaagagccttggctcattaccggtggtaccgctggcgctggaaacgccgattgagctgaccctgaccgagtgggtgcgcagcgggactgccgcgcagggcttccagatccttgatgaagcagagctgaaagcgctgctggaagatggcggcgtgatccgcgcgaagaaacaggatctggtgagcgacgaaatcgccgtgcacattgaagcgggcaaagtggtgaccaaactggcactcgactggcagcagcgcattcagtttgtgatgtgtgatgacggctccgtgaagcgccttaagttctgcgatgaactgcgcgatcagaacgaagatatcgaccgcgaagattatgctcagcgctttgacgcagactttatcctgatgaccggcgagctggcggcgctgattcagaacctggtggaaggtctcggcggcgaagcgcagcgctga

SEQ ID NO: 116593 - DNA, 288 bp, Enterobacter cloacae
atgcttcaaagtaacgaatacttttccggtaaagtgaaatccattggttttaccagcagcagcactggccgcgccagtgtcggcgtaatggcggaaggggaatacacctttggcaccgcagaagcggaagagatgacggtggtcagcggcgcgctgaacgtcctgctgccgggtgaaacggagtggaaagtctatagtgccgggcaggtcttcaacgtgccgggccacagcgagttccatttacaggttgcagagccaacctcttatctgtgccgctatctgaaataa

SEQ ID NO: 116594 - DNA, 426 bp, Enterobacter cloacae
gtgctcgacaatcaggactatgacgttattttgctgatgagcacggcacccgttaaaggattcagcgcgcgtaatgccattctgctcgaaccgatgcggattatccccccgctggtggcctcaattgttgatggtcatcaggttggggtcatcgttcccgttgaggaactgctggataaccagacggtgaagtgggccgcgctggagcacaccccgctttacgcgctggcaaacccgttctgggacagcgaagcgaagctgattgcggccgggcaggagttgatcgacagaggggcggatgtcctgatgctcgactgcctgggcttccatcagcggcatcgtgatttactgcaaaaggcgctggatgttccggtgctgctctctaacgtcctgatggcgcgcctggcgtcagaattactggtgtaa

SEQ ID NO: 116595 - DNA, 273 bp, Enterobacter cloacae
atgaaggcgacgttggcgatcctcacgattggtgtggtgcctgtaagcgaagtattaccgctcttaaccgagcatgtctctgaacaacaaattacgcatctcagtctgttagggaagctcagtcgggaagaggtcatggaagactacgcggtcggagagggggaagatcccctggcaacgttactcagtgacggtaaactggcgcatgtgtcacgccagaaaatcgagcgcgctacagggcgtgatcgaagtgctcgacaatcaggactatga

SEQ ID NO: 116596 - DNA, 192 bp, Enterobacter cloacae
atgccaaccagacctccctatccacgtgaagcccgcatcgttaccgttgaaaaaggtaatggcgatcagaccgtaacctggtaccagctgcgtgccgatcaccctaaacctgattcgctgatcagcgaacatgaaaccgaacaggaagcgctggatgcgaaacggcgctatgaggatcctgagaagtcctga

SEQ ID NO: 116597 - DNA, 525 bp, Enterobacter cloacae
atgaacccacccatctttttagttggccctcgcggctgtgggaaaaccaccgttggtctggagctggcgcgtctgtgccagagtcagtttgtcgatactgaccattggctccaggagaatgccggtaagaccattgccgatatcgttgaggatgagggttgggagagctttcgtgcgcgtgaaacagccacgctggaagcggtgaccgcgccgtcaaccgtgatcgcgaccggtgggggcattattctggcgccgtataaccgccagtttatgcgcgaaaagggtgtcgtgatctacctctgtgccccggtctctacgctggtggggcggctggaggcgtttccggaagagggacagcgcccggcgctgaccgcgaaaccgctgagtgaagaggtcagcgacgtcctcgccgaacgcgatgcactgtaccgcgaggcggcacaccacgttgtggatgcgtcagcgtcacccgagaaagttgcgattcagattattaccgccctgcgtttggcttgcgccagctaa

SEQ ID NO: 116598 - DNA, 459 bp, Enterobacter cloacae
atggcgatttgggttgatgcggacgcgtgtccgaatgtcatcaaagagattttatttcgtgctgccgagcgcgtgcagatgccgctgacgctggtggcgaaccagaatatccgcgtgccgccctccagatacatccgttctctgcgcgttccggccgggtttgacgtggcggataacgagatagtacgcctgtgtgacgcaggagatctggtgatcaccgcggatatcccgctggctgccgatgtactggcgaaaggggcggcggcgctgaacccgcgcggagaacgctattcgccggcaacgatccgggagaagctcaccatgcgtgattttatggatacgcttcgttccagcggcgtgcaaaccggtgggccggacagcctgtcgcagcgcgatcgccagcagtttgccgccgagctggataaatggctgctggaagtgaagcgccgcccggcgtag

SEQ ID NO: 116599 - DNA, 810 bp, Enterobacter cloacae
atggataagaaaatcgggtttatcggctgcggaaatatgggcaaagctatcctcggcggactgattgccagcgggcaggtgttgccggggcagatttgggtctataccccatccccggataaagtcgcggcgctgcgtgatgagtatggtgtcaacgctgccgaaagcgcacaggacgtggctcaggtggcggatattgtctttggcgccgttaagccgaatatcatgattaaagtcctgagcgagatcacctccagccttaacaaagagaccctggtggtatcgattgccgcaggcgtgaccctcgatcagctcgcccgcgcgctgggccacgaccgtaagattgttcgcgccatgccaaacaccccgtcgctggtgaatgccggtatgacatccgttaccccgaacgcgctggtcacatctgaagacgtggcggatgtactgaatattttccgctgcttcggcgaagcggaagtgattgccgaaccgatgatccacccggtagtcggcgtgagcggctctgccccggcgtatgtctttatgtttatcgaagccatggccgatgccgccgtactgggtggaatgccgcgcgcgcaggcctacaaatttgcagcgcaggcggtgatgggttcggccaaaatggtgctggaaacaggtaaacatccgggcgaactgaaagatatggtgtgctcaccggggggcacaaccattgaagccgtgcgcgtgctggaagatcgcgggttccgctccgccgtgatcgaggcgatggaaaaatgcatggaaaaatcagagaagctcagtaagtcctga

SEQ ID NO: 116600 - DNA, 1104 bp, Enterobacter cloacae
atgatgaatgatgagttttatgacaatcacgagaacattcgggaagcgtggcaccagcagctttctcaggatgattcataccgttccggtctgcgatttgcccggcgaatacggctggcacgcatcgttggtctggcggcgctatttgttccgcttgccagcgttctggtgagccagtttctttccggcgtctggtggttattgctggtgggctgggtctttgtctggccccatctggcctggcagctggcttttcgttcggctgaaccccacagcagtgaaattgttaatctgaaaatcgatgccattattgccggtgtctggatggggctaacagggttcagtgcgctaccaacggcggcgctgatcgtgatgatcggcatgaatatgatgggatcggggggatgtcggttatttctgacaggactggcgctgcttgctctgtctgctctgctcaccgtgcaatccacgggtagtcctgtggtattgacctctgaaccgctggcgttgtggctgacgctccccgtgctggtggtctaccccatactgtttgcctggctcagccaccgcacggcgatccgtctggcagagcataagcgtcggcttgagctgatgagtacccgcgacggaatgaccggcgtattcaatcgccgtcactgggaaacgctgctacgtaacgaatttgaggcctgccgtcgaagccatcgacaggcgacgatactgctcatcgatatcgatcacttcaagacgatcaacgacacctgggggcatgacgtgggagatgaagcgattgtcgccatcacgcgccagcttcagctgaccctacgctcaggcgattatattggccgttttggcggggatgagttcgcggtgatcatgtccggcacgcctgccgacagcgcgattgctgcgatgtcgcgcgtccacgaacggctggtcaacatgccgctgcacggagcacctatggcgaggttgtgtatcagcgttggggttgccccctggggggcgcagttcacccactatcgtgaatggctaaaggcggcggacgtggccctctataaagccaaaaatgccggacggggccgcaccgaagtggccgcctga

SEQ ID NO: 116601 - DNA, 321 bp, Enterobacter cloacae
atgaaaacaacaatactggttaccctgctctctggcctgtgtctgatcgcctcagcacacgcggaagagaaaacgttaacgccccagcagcagcgcatgacgacctgtaaccaacaggcgacatcgcaaagcctgaaaggggatgcccgtaaaacgtacatgagcgactgccttaaaaatggtgcggctaaacccggtgtaaaaagcctgaccccacagcagcaaaaaatgcgtgagtgcaacgcccaggcgacacagcagatgctgaaaggcgacgatcgcagcaagtttatgagcgcgtgcctgaaaaaacaggcgtag

SEQ ID NO: 116602 - DNA, 261 bp, Enterobacter cloacae
atgaaaaatctcattgctgagttgttggttaagcttgcccaaaaggaagaagagtcgaaagagctggttgcccaggtcgaggcgctggaaatcgttgtgacggcgctgctgcgacagatggcaaaaccggagcaggaggcgttgatcgacaacgttgaaggcgcgctggaaaaagcgcgtcctgattcccaggtgcctgcggaagatgcggagctgcttcagcaatacgtaaagaagcttttaaggcatcctcgcagctaa

SEQ ID NO: 116603 - DNA, 1215 bp, Enterobacter cloacae
atggaatcctggaaagttaatctcatttcagtctggttcggctgcttcttcaccggactggctatcagccagatattgcccttcctgccgctgtatgtgtcgcagctgggagtgacttcccatgaagcgctctcgatgtggtccggcctgacgttcagcgtgacgtttctggtctccgccattgtgtcgccgatgtggggcagcctggcggatcgcaaggggcgcaagttgatgctgctccgcgcctcgctggggatggcgatagccattttgctccaggccttcgccaccaacgtctggcagctgtttattctgcgggcgataatggggctgacctccggttacattccgaatgccatggcgctggtggcctcacaggtaccgcgtgagcgaagcggctgggcgctcagcacgctttccacggcccagatcagcggggtcattggcggcccgctgctcggcggcttcctggcggaccatgtcgggctgcgtgcggtctttatcattaccgcgatcctgctaacgatcagctttctggtcaccctttttctgattaaagagggcgggcggcctgttgtcagtaaatccgaacgcctgagcggaaaagcggttttcgcctcgctgccttatcctggcctgatgattagcctctttgtgacgacgatggtgatccagctctgtaacggttcggtagggccgattctggcgctgtttatcaagtcgatggcgccggacagcagcaacattgcttttctgagcgggatgattgccgcggtgccgggcgtgtcggcgctgatgtctgctccgcgtctggggaaactgggcgacaggatcggtacggcacgtattctgatggcaacgctcatcattgcggtgatccttttctttgccatgtcattcgtcaccacacctcttcagctcggcatcctgcgcttcctgcttggcttcgcagatggcgccatgctgcccgctgttcagacgctgctggtgaaatattccagtgaccaggtaaccggccgcatttttggctacaaccagtcgttcatgtatttaggcaacgtagcgggcccgcttatcggcgcctcggtctcggcgatggcgggtttccgctgggtatttgccgcgacggcggtggtggtcctgctgaatattattcaactggcctttgccttgcgacgccgcaggcgaatcgctgaggcaaagtcggcccggtaa

SEQ ID NO: 116604 - DNA, 684 bp, Enterobacter cloacae
gtgaaaggaaaaggtctgcttattcttattgttattgccgggatcgccacggtgggctaccgctggttgccgccgtattacaagcctttcgtgccgcttacgcttgacgatccgcccggaaaaataacccagtttaaacttcgacgtttaacaccgcaggcatgcgaaagcctgttagcgcaggcgaatcaacgccagcttatccgtacccaggctgtcgctgacagcgccggtgagtgtccgctgagtaacgtggtgcgcgtgcgcgattttggcccggtgagcctgaacagcagctttctggccagttgtccgctggcgttaagttcggcgctgtttgtcagccagcaggcccgaccgctcaccaaaacctggaccggaagcgagcttacgcgtattgaacatctgggcagcttcgcctgccgcaatatctacagccgcccggatgcgcggcgcagcgaacatgccacggcggatgcgctggatatcagcgctttcaggctggcaaatggacagcgcgttaccgtcctgaacggctggaaagcggaaaagacgcagccctggctacaggccctgctctcggcaagctgtggctattacggtaacggtctggggccggactataatgccgcccatgccaaccatttccatctggggatgcgcggctatggattatgtcgatga

SEQ ID NO: 116605 - DNA, 1098 bp, Enterobacter cloacae
atggcaaagcagcgcgtaggtattgtctttgggggaaaatcggcagagcacgaggtgtcattgcaatcggctaaaaatatcgttgatgcgattgataaaagccgttttgacgtggtgctgctgggcattgataaacagggtcagtggcatgttaacgatgccagccagtatctgttacacgctgacgatccggcgcacattgcccttaatccttctgatatcagcgtcgcaacggttccgggcgtggaacagggacagcttatcgatgccgggaacgcgcaggcgctggcacagattgacgtggtattccctatcgttcacggcacgctgggcgaagacggctccctgcaaggcatgttgcggatggcgaacctgccgtttgtcggttccgatgtgctgggctctgccgcctgcatggataaagacgtcacaaaacgtctcctgcgcgacgctggtctgaatattgcgccgttcgtgacgctcactcgcgccaaccgcgataaacacagcttcgcgcagatccaggcgcaactcggcctgccgctgtttgtgaaaccggcgaatcagggctcgtccgtcggcgtcagcaaagtcaccagcgaagcgcagtttaacgatgccgttcgtctggcctttgagtttgaccataaggtggtggttgagcagggaattaacggacgcgaaattgagtgcgccgttctgggcaacgacttcccgcaggcgagtacctgcggtgaagtcgtgttgaacagcgacttctattcctacgacaccaaatatattgacgacaaaggtgcccaggttgtggttcccgccgcgctcgatcctgacgttaacgacaagatccgggcgatcgccgttgaagcctatcaggcgctgggatgctgtgggatggcgcgcgtcgacgtgtttctgacgccggataacgaggtggtgattaacgaaatcaacactctgccgggctttaccaatatcagcatgtacccgaagctgtggcaggccagcgggataagctatccggaactgatcacccgcctgattgaactggcgctggaacgtcacgccgctgacagcgccctgaaaagttccgttaactaa

SEQ ID NO: 116606 - DNA, 222 bp, Enterobacter cloacae
atgaagctcacttccaaattacgccgtgactggcattactacgcctttgcgatcgggctgatctttattctcaacggtgttgtcgggctgctgggatttgaagcgaaaggctggcaaacctatgcggttgggctggtaacctgggtaatcagtttctggctggcgggatttattatccgccgtcgtcccgatgagacgacgacggcagagaaagctgactaa

SEQ ID NO: 116607 - DNA, 303 bp, Enterobacter cloacae
atggcagactttacattgtcgaaaccgatttttggcggaaaacaaccaaaaacctccacggcggggaatattgcctatgccctgtttgttctgttttgtttctgggcaggaacccaactgctgaatatgctggtgcatgcccctggcgtgtatgagcatctgatgcaggtgcaggatacaggccgcccgcgcgttgaaatcggtttaggcgtgagcaccgtatttggactcattcccttccttgcgggcagcatggttctgggcgtgattgcccttgtcctgcgctggcgcaaccgccactga

SEQ ID NO: 116608 - DNA, 1098 bp, Enterobacter cloacae
atgccatttgccgtaccacgtgcattaccgctgacgttactcgccgcttttgtgctggcgggctgtgccgaaaaaggggctgccccgctcaaagaaggggagaagcccgttgatgtggcgagcgtggtgcggcaaaagatgcccgccagcgtgaaggatcgcagtgagtgggctgatgcgctggcagcgaccttcaaaagccagaagatcgcgcctaccgaggagaatatctgctcggtgctcgcggtggcgcagcaggaatcgatgtatcagtcagatcctgtagtgcctggcctgaacaaaatcgcctggaaggagatcgaccgccgggccgaatcgatgcatatcccggttttcctggtgcataccgcccttaaaatcacctcgccaaacggtaaaagctacagtgaacggctggatacggtgaaaaccgagaaacagcttagcgccattttcgatgatttcatcaatatggtgccgatggggcagaagctgtttggctcgctaaatccggtgcataccggcggtccgatgcaggtcagtatcgcatttgcggaaaagcataccgacggctatccgtgggatatcgacggtacggtacgtcaggaggtcttctccctgcgcggtgggctgtggtttgggacgtatcacctgctgaattatccggccaactacgataaaccgctgtatcgctttgccgactttaacgcgggctggtatgccagccgaaatgcagccttccagaatgcggtaagccgcgccagcggtgtgaagctcgctttggacggcgatctcattgcttacggcagcagtgaggccgggaccaccgaacgtgcggtgcgaaaactctcgacgaagctggagatgagcaacagcgacattcgccgacagctggagaagggcgacagcctggcgtttgagaaaacggatctgtataagcaggtctttgcgctggccgagaagaaaagtggaaaggctttacccagagccattctgccaggcattcagctggaaagcccgaagatcacgcgtaacctgacgaccgcctggttcgcgaaacgcgttgacgatcgtcgggcacgctgtatgggactgtaa

SEQ ID NO: 116609 - DNA, 1221 bp, Enterobacter cloacae
atgtttaagtcttttttcccaaagccggggccctttttcctgtcggcatttatttgggcactgctggctgtcattttctggcaggccggtggcggcgcgtggctgacccgtcttatgggggcaacgggcgatattcccattagcgcagcgcgcttctggtccatgagctatctgcttttctacgcttattacgtgctctgcgtagggctttttgccatgttctggtttgtctattctcctcaccgctggcaatactggtcgattctcggcacgtcgttaatcatctttgtcacctggttcctggtggaagtgggcgtagcggtcaacgcctggtatgcgccattttacgatctgatccagacggcgctgagttcgccgcataaagtgaccattaaccagttctaccatgaggtggggatcttcctcggcatcgcccttatcgccgtggtgattggcgtgatgaataactttttcgtcagccactatgtgttccgctggcgtaccgcgatgaacgaacactatatggcacactggcagcacctgcggcatatcgaaggtgccgcacagcgtgtgcaggaagacaccatgcgttttgcctctactctggaagatatgggcgtgagctttatcaacgccatcatgacgctgatcgccttcctgccggtgctggtgacgctctcgtcgcacgttccggagctgccgattgtcggccatctgccatacggcctggtgattgctgcgattgtctggtcgctgatgggaacggggctgctggcggtggtggggatcaagctgccggggctggagtttaaaaaccagcgcgtggaagcggcctaccgtaaagaactggtgtatggcgaagacgatgccaaccgtgcgtcaccgcctaccgtgcgtgagctgtttggcgccgtacgtcgtaactatttccgcctctatttccattacatgtatttcaatatcgcgcgcattctttatcttcaggttgataacgttttcgggttgttcctgctgttcccgtccatcgttgcgggtacgattacgctcggtctgatgacccaaatcaccaacgtctttggtcaggttcgcggttcgttccagtatctgatcagctcctggactacgctggtggagctgatgtccatctacaaacgtttacgcagtttcgagcgtgagctggacgataaggacgtgcaggaagtcacccatacattaggttaa

SEQ ID NO: 116610 - DNA, 1161 bp, Enterobacter cloacae
ttgaaacgttgtctgctctctatcgccgcgctgtgtgcggtgagcctgtccaccgcccaggcagcacagcctctgacggccccggttctggcctctgacattgccgatcgctacgcgaaccttatttattacggcagcggtgcgacgggaatggcgctggtcgtgatcgacggtaaccagcgggtgtttcgcagcttcggtgaaacacgaccgggaaataacgttcgtccgcagctggattccgttatccgtgtcgcatcgataaccaagctgatgaccagcgaaatgctggtgaaactgctcgatcagggcgtggtgaaactcgacgatccactcagcaaatatgcaccgcccggcgctcgcgttccgacatatcagggaacgccgatcagactggtgaatcttgcgacccataccagcgccctgccgcgagaacagcccggtggcgctgcgcatcgccctgtctttgtctggccaacccgcgagcaacgctggaactacctgagcacagcaaccctgaaatcggccccgggctcgcaggccggctattctaacctggcgtttgatctgctggccgacgctttagcgacggcgtcgggtaaaccttaccctcaactgtttgaagagcagatcacgcgtccgctcgggatgaaagataccacgtacaccccttccccggaccagtgcaagcgtctgatggtggcggaaaaaggggccagcccgtgcaataacacgctggccgccattggcagcggtggcgtttactctacgcctggcgacatgatgcgctggatgcaacagttcctctcatcggatttttacgcgcgtagcaatcaggccgaccgaatgcagacgctcatctaccagcgtgctcagctacgacgcgtcattggcatggatgttccaggtaaagccgatgccctcggcatgggctgggtgtatatggcgccaaaagatggccgaccggggattattcaaaaaaccggtggaggtggcgggttcatcacctacatggcgatgattccgcaatcaaacgtaggcgcttttgtggtggtcacccggtcgccaaatacacgcttcgtgaatatgagtgatggcgtaaataatctggtggccgagctgagtgccaataaagcgcaggtgcttacggcctctaactga

SEQ ID NO: 116611 - DNA, 627 bp, Enterobacter cloacae
atgaacgttaatgcgaagccactttctgaattaagccggctcataaagtgtctggaagtcgccggtaccccatttaagatcgaaccacaacaattaataactaccggcaataatgatgatgaaccattgaccgttgtcatacaatccggcctgacggccgtccaccgtaaatcagacgaattacttatgggtattgcgcgggcaccgtatatccacggtttaagcgcatggataaatgaaaactatcttgaatattctttgatggcacagacgccttgtaccggattttatttaccggcatctgacgcgtaccagcttattcaggacgcgcaactttggcaagaggctttctgctggctgtcatggcttaaccatttattgggaaaacgtgacatgcaattggtcggaaataattcctatagccaaatccgggcgatgctgatcaatatggccgagtgggatgacacgctacgttcaaaaattggtgttatgaatcatattcagcgtagcactcgtatttctcgttcggtcgttgctgaggttctggcggcgctgcgacaggggaactacatcaatatgagccggggcaaactgatcagtatcaaccgtttgcccacggactattga

SEQ ID NO: 116612 - DNA, 2775 bp, Enterobacter cloacae
atgcaaacatggaaaaagaaactggttgtatcacaacttgcattagcctgcacactggctatcgcttctcaggccaatgcgaaagatatatccggcacaacatataatacttttggctatgacaataccgcgtccacgccctggtattatggttatgctgactgggattattcagatgccacacatgatggtgacatttatccagtcatcaataaatcaaccgtaaacggagttatttcgacatactatctggatgatggtgtcaatggccgtgcgaacgcgttaagtatttctaacagcaccattaacggcatgatcacgtcagagtgtatgaccacgacgtgtgcagatggcgtggatactgacggtaccactcatacccagtatgatcgttttagcctgactgttgataactccaccatcaacgatacctacgagcattacgcctacgatgtcgtcaatggtgaaaccactgaaacgcattatctggacacctatggtctgggtaacgcgatcacgctggacgttgaatctgacatcgttattcagaacaactcccatatcgcgggcatcacgctgacgcagggttatcaagagctggataacacgccatacgacggtgttgaaggcgttgctaacagcagcaatatctttaccgatacgctggtggtgaaagattctgtgctgacctctggtgcgtacagcgatctgggtaccagtggcttctacggtcaaacggcgaagccgagcgactacggtgaaaccaacgccacggctgcggatgatgcggcgctgatcgttgttgctggcgcgtctgataacgctatgcagaccaccgctaccttcgatcactctaccattaccggcgacatccttttcgccagcacctttgataacaacttctacgagaatggcgatccggcaacggataccaccgatgacggcgtctataacccaaccaccaacggctgggatgataccgacaagctggatgtcacgctgaccaacggcagtaaatgggtgggtgccgcgcagtccagcgttgaagccatcggcacggcgcagatgtatggtgaaggctacagcgatgtagactggcacacgctttctccaaacagcatctggcctgattctacctttgacagcaacggtcatgttgcaggtgaagaagtttatcagagcggcctgttcaacgtggcgctggataacggttccgagtgggatacccgtaagatctccaacatcgacgcgctgacggtgaacaaccagtctcaggtcaatgttgaaaactccggcctgctggcagattccatcaccctgaccaatgcgtctagcctgaatattggcgacagcggtggtgtggctaccgacagcctgtatctggatagctacagccgtgctgcactcactgaagagacagctgagctgtatgccaacaccattaccgtggacaacggtgcagagctggcgctgggtctgggtcaggttgatacgcacaatatggtgctgaccgatggcggtgtgcttaacgttgccagccgtgattatgtgctgaacagcgacctgaacaacgcacgctatatcaccaacgatcgctctaaagcggattacgactatggtgttgtcgcgctgaactctgacggccatctggcggtgaacggtgacgttgccggtaactataaagtgcgcatcgacgatgcgaccggcgcaggctccgtagctgactacgaaaacaaagagatcgttcgcgtctatgacaataacgcggataccgctgccagctttactgcggcaaacaaagctgatttaggtgcatacacctatcaggcgcagcagaagggcgacaccgttgttctccagcaggaagagctgactgactacgccaacatggcgctgagcattccttctgctaataccaacatctggaatctgcaacaggataccgtgggtacccgtctgaccaacagccgtcatggcctggcagataacggcggcgcatgggtgagctatttcggcggcaactttgacgcggataatggcaccgttagctacgatcaggacgtaagcggcattatggtaggtctggatactcagatcgacggtaataacgcgaagtggattgtcggtggtgcggctggtttcgcgaagggtgatatcagcgatcgtactggtcaggtcgatcaggacagccagactgcgatgatctacgcgtcggcgaagttcatgaacgacatcttcctcgacagctccctgagctacacccgcttcaacaacgacctctctgctaccatgagcaacggtcagtatgttgatggtaataccacgactgacgccgttggtttcgggatgaaactgggctatgactggaaaccaaacctgtctggctacgtcacgccttacgcggcgatctctggcctgttccagtccggtgatgactaccagctaagcaacgacatgcgtatcgatggtcagtcttacgacagtatgcgttatgaactcggcgtggatgcaggttataccttcaactacggcggcgagcaggcattaacgccttacttcaaactggcttacgtgtatgacgatgccgacaacaatgctgatatcaacaatgacagcattgataacggcgtggaaggctctgcggttcgcgtgggactgggcactcagttcagcttcacgaaaaacttcagtgcttacactgatgcgacttatctgggcggcggcgacgttgaccagaactggggagcaaacctgggtgtgaaatacacctggtaa

SEQ ID NO: 116613 - DNA, 975 bp, Enterobacter cloacae
atgaccgatttaattgcacgtccccgtcgcctgcgcaagtctcccgcactgcgcgccatgtttgaagagacaacactgaccttaaacgatctggtgttgccgatttttgttgaagaagagatcgatgactacaaagccatcgacgcgatgccgggcgtgatgcgcattcctgaaaagcatctggcccgcgagatcgaacgcattgcgaatgcgggcatccgctcggtaatgacgttcggtatctcccaccacactgacgcgaccggcagcgatgcctggaaagaagacggcctcgtcgcccgcatgtcgcgcatctgcaaagagagtgtgccggagatgatcgtcatgtccgatacctgcttctgcgaatacacctctcatggccactgtggtgtgctgtgcgatcacggcgtggacaacgatgcgaccctgctgaatctgggcaggcaggcggtagttgccgccgctgcgggtgcggatttcattgcgccttctgcggcaatggatgggcaggtacaggcgatccgtcaggcgctggacgctgcgggcttcaccgacaccgccatcatgtcctattccaccaaattcgcctcctctttctacggtccgttccgtgaagcagccggcacggcgctgaaaggcgatcgtaaaacctatcagatgaacccgctgaaccgccgcgaagcgattcgtgagtctctgctggatgaagcccagggcgctgactgcctgatggtgaaaccagctggcgcatacctggatatcctgcgcgacattcgcgaacgcaccgaactgccgctgggcgcctaccaggtgagcggcgagtacgcgatgatcaaattcgccgcgcaggcgggtgccatcgacgaagagaaagtgatcctcgaaagcctgggggcgatcaaacgcgcgggcgcggatctgatcttcagctatttcgcgctggatctggctgagaagaaaattctgcgttaa

SEQ ID NO: 116614 - DNA, 1701 bp, Enterobacter cloacae
atgtttagtctcgacagcgttcttgatgacctttggcctcaggcgaggcccgcaccctggcaaaaaagtctgttaaaaagactgcttcacgaagacgaatttcagcagtttgccgccagccaccgtcacctgaaagggctggatatggtggagcaggttctggaacaccttgatattcactgctccgtttccgcccgcgacctcgaacaaatccccgaacacggcccactcattgtgatagcgaaccacccgaccggcaccctggatgggctggcgctgctgtatgccgtttcccgcgtgcgccgcgacgtcagggttgttaccaacaggatgctgtcccaccttgagcccctcagttcattatttattcccgtagataatatgggcggcagaaccgcaaaatcctcgctgatacagatggagcagcacctgcaaaacgccggcgtgctgatcttctttccggcgggcgaagtttcccgcccaacgcgcaaaggcatccgcgataaaaaatggcatccgggctttatcaagctggccggcaaactacgggtgccgctactcccggtacatatccaggcgcacaacagcctgctgttttatgccagtaccctggtctcgccaacggtatccatgctgctgctgatgcaacagatgtttcgccgccgtcacagtcagttgccgatcaaaatcggccagcagattgcctggaatgaccggtttagttctaccctttcatcgcgtgagatggccgagcagtgtcgtcagcacgtgatacgtcttggcaagggattgcctggcgtctttaaaacccagtgcgccattgcccgcccggaagacagggcgacgctcaagcgcgaactggcgcaggccgagtgtctgggcaaaacgagcgatggtaaggccatctatctttggcagcgcaacgggcaggaagaggcgcctctgctgcgcgagctggggcggctgcgcgagattgcctttcgtgccgtggaggaaggcagcgggaagcgccgggataccgacagctacgatgatgactatctgcaccttattctgtgggatgacgatgacctggagattgtcggcgcgtaccgctttatgccaacggccatgcaggtggaaaagcgcggcgtcgaggggttgtacagctacagcctgttccactacgacgaaaaaatgcaggacatactggagcacggtattgagctggggcgcagctttatacagccgcgctactgggggcgtcgcggtctggactatctgtggtcaggcattggcgcctatctggcacgctatccccattaccgttacctgtttggtccggtgtccatctccggcggcttaccgccagccgcacgggatctgctggtggcgttttatcgtctctggtttccggccagccatcccctagccgcctcgcgtcaaccctacccggcctcacttccggacgtgctggcacagtttggcggagtggattacgtggatgacctgacaaagctgaaatccctgctcggcaacctgggttgcggcatcccgccgctctacaaacagtattccgagctatgcgaacccggcggcgtgcagtttatcgatttcggcagcgatccggcgttcaataactgtatcgacgggctggtgctggtggatctgtgttatctgaaggcaaaccgctatcagcggtatatagaagcacacctttag

SEQ ID NO: 116615 - DNA, 852 bp, Enterobacter cloacae
atgagtgaacgactgaccattaccccgctggggccatatattggcgcgcaggtgtcgggcctggacgtaacccgtccgctgagcgataaccagtttgagcagctgtaccacgcggtgctgcgtcatcaggtggtattcctgcgtgaacaggccattaccccgcagcagcagcgcgcgctggccctgcgttttggcgacctgcatatccacccggtctacccgcatgcggaaggggtggaggaaattatcgtgctggacacccataacgataacccgcccgataatgacaactggcacacggacgttacctttatcgacacaccgccagccggggcgattctggcagcaaaacagctgccggaaacgggtggggatacgctgtgggccagcgggattgccgcgtttgaggcgctctccgcgccgctccagactctgctgagcggcctgcgggcggagcatgacttcaaaaaatcgttcccggagtacaagtaccgcaaaagcgaagaggagcaccagcgctggctggatgcggtcgcaaaacatcccccgctgctgcacccggtggtgcgtacccatccggtgacgggcaaacaggcgctgtttgtgaatgaagggtttaccacgcgtatcgtggacgtagcggaaaaagagagtgaggcgctgctcggcttcctgttcgcgcacatcaccaaaccggagttccaggtgcgctggcgctggcaggagaacgatctggcgatctgggataaccgcgtcacgcagcattacgccaatgcggattacctgccgcagcgaaggattatgcagcgggcgactatcctgggggataagccgttttaccgtgcgccttga

SEQ ID NO: 116616 - DNA, 828 bp, Enterobacter cloacae
atgagcattgttttcagtgaaaaaacgcggcggacgcgccttgccttacgctggccgttctctcgccagctcaccttaagcctcagcacgctggtggtgctgctggcggtatggtgggcggttgccgcgcagcagtgggtcagcccgctgtttctgcccccgccaggccaggttctggaaaaactgattactatcgccgggccgcagggctttatggatgccacgctctggcagcatttaggcgccagtctgatgcgtattctggtggcgctgctggcggcggtcattattggcgttccggtggggatcgcgatgggactgagcccgacggtacgcggcattctcgacccgctgatagagctttaccgtcccgtcccgccgctggcttacctgcccctgatggtgatctggtttggcatcggcgagacgtcaaagatcttactgatatacctggcgatatttgcgccggtagccatgtcggccctggctggcgtaaaaagtgcgcagcaggtacgcatacgtgcggcgcagtcgctcggcgccagccgcgcgcagatactgctgttcgtcattttaccaggcgcgctgccggagatactgaccgggctgcgcatcggccttggggtgggctggtctacgctggtggcggcagagctgatagccgccacgcgcggccttgggtttatggtgcagtcggcgggagagttcctggcgactgacgtggtactggcagggatcgcggtgatcgccgcgattgcctttggattagaactgggactgcgcgcgctacagcgtcgcctgacgccctggcatggagaaatacaatga

SEQ ID NO: 116617 - DNA, 768 bp, Enterobacter cloacae
atgctgaacattacaaacctgtctgccgattacggcggcaaacccgccctggaagagatcaacctgacgctggacagaggtgaactgctggtggtgctggggccgtccggctgcgggaaaacgacgctgctgaacctgatcgccgggtttgtaccgtatcagcacggcacgatccagctggaagggaaacgggttacggggccaggcgcagagcgcggcgtggtcttccagaatgaaggattactcccgtggcgaaacgttcaggaaaacgttgcgtttggtctgcaactggccggtgtagcgcgtgaacagcgcctgagtacggcgcgcgatatgctgaaaaaggtcgggctggagggggctgaaaaacgctttatctggcagctttcaggcgggcagcgtcagcgcgtcgggatcgcccgtgcgctggcggctaacccacagctgctgttgctggacgaacctttcggggcgctggatgccttcacccgcgagcagatgcaaaccctgctgctgcgcctgtggcacgaaaccggcaagcaggtgctgttaatcacccacgatatcgaagaggccgtgtttatggcgacggagctggtgctgctctcaccggggccgggacgcgtgctggagcgcctgccgcttgagtttgcccgccgctatgtggcgggagagccggtacgcagcatcaaatccgatccgctgtttattgaacagcgtgaatacgtcttaagccgcgtgtttgagcaacgggaggcgttctcatga

SEQ ID NO: 116618 - DNA, 963 bp, Enterobacter cloacae
atggcaatttcatcgcggatcacacttctcggcgcactggcgctgtgggcatttcaggcgcaggcggtggacgtcaccgtcgcgtatcagacttccgctgagccggcgaaagtcgcgcaggcggacaacaccttcgccaaagcgagcggggcgaacgtcgactggcgcaagttcgacagcggcgcggcgattgtgcgggcgttagcctcgggcgacgtgcagattggcaacctgggctccagcccgctggcggtggccgccagccagcaggtgccgattgaagtcttcctgctggcgtcgcagctcggaaattccgaagcgctggtggtgaagaaaagcatcacgaaacccgaagatttgatcggcaaacgcatcgcggtgccgtttatctccaccacgcattacagcctgctggcagcgctgaaacactggggcattaagccgggccaggtgcagatcatcaacctgcaacctccggcgattattgccgcctggcagcgtggcgacatcgacggagcatacgtctgggcgcccgccgtcaacgagctggaaaaagagggcaccgtgctgaccgactccgaaaaagtggggcagtggggcgcgccaacccttgacgtctgggtcgtacggaaggactttgccgagaaacaccctgaagtggtgaaagccttcgccaaaagcgccatcgacgcacagcagccatacatcagcaacccggatgaatggctgaaacatcccgccaacctggagaagctctcacgtctgagcggcgtgccggaagctgacgtgccggggctggtaaaaggcaacacctatctgacgcctgcgcagcagatccagcagttgaacgggccggtgagcaaagcgattgtcgacactgccacgttcctgaaagagcagggcaaagtgcctgcggtggcggcggattacagccagttcgtgaccgatcgctttgtgaaataa

SEQ ID NO: 116619 - DNA, 933 bp, Enterobacter cloacae
atgtcgcagaataatccgcttaccgccctccttgaaaaccagccgtttgtcgtgctggatggggcgatggcaacggagctggaagcgcgcggttgtaaccttgccgacagcctctggtcggccaaagtgctgatggaaaacccggagctgatccgggacgtgcacctcgactattaccgcgcgggggcacaggtggcgatcaccgccagctatcaggccacgcctgcgggctttgccgcacgcgggctcgacgaggcgcaatcccgggcgttgattggcaaaagcgtagagctggcacgcaaagcgcgggaagcgtacctggcagagaatgcgcaggcgggcacgctgctggtggcggggtcggtagggccgtacggcgcgtaccttgccgatggatctgaatatcgcggcgattatgtgcgtcgcgctgaagagttcaccgcgttccaccgtccccgcgtggaggcgctgctggatgcgggcgcggatctgctggcctgtgaaacgctgccttcgttcccggagattaaggcgctggcggcgttgctgacggcgtatcctcgcgcccgggcatggttctcatttaccctgcgtgacagcgagcatctgagtgacgggacgccgctgcgggatgtcgtttctgcgctcgaaagctacccacaggttgtcgcgctggggatcaactgtatcgcgctggaaaacaccaccgcggcgctgacgcatctgcacagcctgacgtcgctgccgctggtggtctatccgaactctggcgagcattatgatgcggtgagcaaaacctggcatcaccacggtgaagcctgcgagacgctggcggggtatttaccgcagtggctggatgccggtgcgaagctgattggcggctgctgtcgtaccacgccgcaggatattgctgcgctgacggttcagcgctga

SEQ ID NO: 116620 - DNA, 1401 bp, Enterobacter cloacae
atgcaaacagaacaacaaaacgggcagcttaagcgcaccatgaaaacccgtcacctgattatgctctcgctggggggcgttatcggcacagggttattcttcaataccggatacatcatttcgacaaccggcgcggcgggcacgctgctggcgtatcttattggtgcgctggtggtctggctggttatgcaatgcctgggggaactttccgtggcgatgccggaaaccggcgcgttccacgtctacgccgctcgttatctcggcccggcgacagggtataccgtggcttggctctactggcttacgtggacagtggcgctgggatcgagctttaccgcagccgggttctgtatgcagtactggttcccgcaggttcccgtctggacgtggtgcgtcgtcttttgcgtggtgatttttgctcttaacgtcatttccacgcgcttcttcgccgaaggggaattctggttctcgctggtgaaagtcatcaccatcatcgccttcattattctcggcggggcggcgatcttcggttttatcccgatgcaggacggttcaccggcgccgggcttaagcaacattactgccgaaggctggttcccgcacggcggtctgccgatcctgatgaccatggtggcggtcaactttgccttctccggaacggagcttatcggcatcgcggcaggagaaacggaaaacccacacaaggttattccggttgctattcgcaccaccatcgcccggctcatcatcttctttattggcaccgtgtttgtgctggcggcgctgatcccgatgcagcaggctggcgtggagaaaagcccgttcgtggtggtgtttgaaaaggtcggcattccgtatgcggcggatatctttaacttcgtgatcctgacggcgatcctctcggcggcgaactcgggcctgtatgcctctggccgtatgctgtggtctctgtctaacgagaaaacgctgccacgctgctttgcccgcgtcaacaaaaacggcgtgccgctgacggcgctctccgtttccatgctgggtggcgtgctggcgctgttctccagcgtggtcgcgccggatacggtgtttgtggccctgtcagccatttccggttttgcggtggtggcggtgtggatcagcatctgcgcgtcacacttcgtgtttcgtcgccgtcacgtgcagtccgggcagccactttcggcgttgcagtatcgcgcgccatggtatccgctggtgcccgtgcttggctttatcctctgtctggtggcctgcgtcggcctgtggtttgaccccagccagcgtattgccctttattgcgggcttccgtttgtcgccctgtgttatggtgcgtactacctgacccgaaacctgaccacgcaggagcctgaacatgtcgcagaataa

SEQ ID NO: 116621 - DNA, 1110 bp, Enterobacter cloacae
atgcgatttaacggactgaccaaaggtttctttattctcatcctggcccttgttacctgggctttctttgacgtgctgtcaccctatttctcggcgattctgtgggccgcgatcctgaccatcattttcaacccggtgaaaaacaaattgcgtaccgcgctgggcgatcgcaacgggctggcttccctccttacactcggcattatctgcctgatcgtgtttattccgttgatggtgatcctttcctcgctcgcggtggaactgaacatggtttacaccaagctgcaacagaacaacacgcagttcccggaagtcatcgccggtattttcaaccgactgccggactgggccagcggcttcctggcggatcacaacctgaccaacgccgcgcagattcagaaaaagctttccgatgtcgcgttacagggtggacagtatctggcgggaagcgcgttcctgattggtaaagggacgttcggctttgctattagcttcggcattatgctgtacctgctgtttttcctgctcaaagacgggccctatctggtgcgccagatcctcgactcgctgccgctgtctgactttgccaaacagcacctgttcgctaagtttgtcggcgtctcgcgagccacggtaaaaggtacggcggtcgtggcagtggttcagggtacgcttggcggtatcgcctttgccatcgtcggtattgacggtagcgtactgtggggagcgctgatggcgttcctctccctggtgcccgccgtcggctcggctatcgtctgggttcccgccgcgatcttcctgtttgccactcaccagctgtggcagggtctgttcattgtgggcttttttgtcattatcgtcgggctggtggacaaccttttacgtccgctgctggtgggcaaagacaccaaaatgccggactacctgatactgatcaccacgctcggcggtatggagctgtacggcattaatggttttgtgattgggccgctgattgccgccctgtttatcgcctgctggaacctcttctccggccgcgaccacgcaggcaacgccgaggagctggacgcagactttatcgaagagggaaaaaaccctccggatctctaa

SEQ ID NO: 116622 - DNA, 1785 bp, Enterobacter cloacae
gtgcgaatcgccacgatcacaaactgggcctatggtgtcacggtgtgcctgaccattgcctccggtatcgtcatgctgatggcttcccatgccgacaacgtagagcgtcaggctgttaagcaacgacaaatttttgaccagcttacggaagagattgaagcagaaacctggatgctctccgatttagcgcgcctttacgccatcaaaaaagagcccgatgtgctgaaagcgtaccaggcgaaagaaggtgaactgaagaatattgaacacaaagtgggacagttaaaagatacgggcgcaacgggcgaagagctggcgctgctgtatgaagggctgaagattgttgatggcctacaggatgaacagcaggcagcaattgccagcgtcgcccggggtgaggaacaacaggccattgcgttactcttcggcaaaatctacgaacttgaaacggaacgcgcccagagcaagattgaccattttcgtatgctgctggataagcgcattattgccgatgtccaggcggcgaccaacacgtcgaaaacgctgcgtaccgcctcagaggtgatggtcggcctgaccgccctgctcttcttattcgtgatgggctttattctcaagcaccgcgtgctgcgcccggtggtgcgcctcagcgatgtggttcaccgcctggcctcacaggattacgccgtcgaaacgcccaatttcaacctggtcgatgagataggcgatatggcgcaggccattcgcattttccgcgagaacgggctggcaaggcagcggcttgaaaaagaacgcgacgcagactgggccatccgcgagctgctcgcacgaatgacccagcgcttgcaggggtgcgagaacgtcagcgacgtgattgaggtggcagagctgtttgctcccaacattgcgccgggtatcgccggacgtctgtatatcatggatcgaaacccgtgggagatgcgctgtgcggcggaatggttatctccacagggagaaaaaaatgctttccaccccgatcaatgctgggccatacgccgtggtcagagccacccaccggtcaacggcgagccggatatcggttgccagcatctgcctgaatcacaaaaagacagctcactgtgcgtgccgctcattgcgcagggggaagccattggtttgctgtcgtttcagaacatcacgcctgaaacagcgccgtcccgcgcatatctcgaattaatggcggaagccctgggtctggcgctggccaaccagcgtctgcgcgatgccctgctggaaaaagcgctattcgacccgctcaccggcttgcgtaaccgccaccacctggaagataccctgcgcactcagatagctcaggcaatgcgcaatgatgagccggtgagctgcatgatgatcgacatcgatcactttaaaagcattaacgatcgcttcggccatgaggctggcgatcatgtgataaagagcgtggcgacaattgttcagcgtgccgtgcacgatgccggcctggccttccgctttggtggcgaagagtttctggtgctgctaacgggtgcggatgaggaagcggctcacgcctgcgcaactgagatttataacggcgtccatacgctgtcgctgcgctatgggcttgctgagattggcccagtggatgtgtcgatcgggatcgccagttacccgcagcacgcccaaagcgacgacctgctgcgcgcggcagacgtggcgctttaccgggcgaaagagctggggcgctcgcggatcgtcagtttcagtatgctggagacgggttaa

SEQ ID NO: 116623 - DNA, 495 bp, Enterobacter cloacae
atgcgaataatcctaatgctgtgctgctttttggtacaaagtttaagctgggctggcgaactgccaaagcctgtgggcaaacccatcttaacaattaccggtaatatagaaaatacgaacgaaaatggaaaagccgtttttgatattgccagcctggaaaaactggggatggtgagtttccagacgacctctccctggtataatggccgcacgaagtttgagggtatcccgatgcgcaaactcatggagtatgtgggtgctaagggttctgttctgaatgtggttgcactcaatgattatactaccgtcatccctctcagcgacttccagaaatacaacgccatcctggctttaaaggtcaatggcgaatatatgcgcatccgcgataaaggtccgtcattcatcgtctacccttatgacagtcttcctgaactcaataatcagatttattactcgcgatcggcctggcaggtcagcaaaatgaagattgaatag

SEQ ID NO: 116624 - DNA, 1938 bp, Enterobacter cloacae
atgaacaggatactggttggaatcattttttctctttttatcactacgggatatatagcctttcttgtctacgaccgtcagcaggagttgcaaaaattgactcactacactgagtcctggtctgtagcccaactggtatctgaatattaccgatttgaatcatggattggactgtacgcaaccgagactgatgacgttacggtagaccaggttcgcatgcgcctggaaatcatgctgagccagaatgatttattgaaagagggcggcctgggtcgttatataaacagcgcgaaagcgcatcaggtgctcgccttacgcctggaaaatatactgaactatctggatggtcatcttgagaaaatgagccgttcagagttaaagctctatctgaaaaatatgcattcactggatgcaccgctaagccagctttcatcaacggctttaacaaaagatgttaatacaatcaatgaaactaacctaaaaatacaggttctgtattatatttattcagcactttcgctgttactggttattttaagcttcatactgggctttttgattatctatcaaaataaaaacatcctcaaagcacatacacaggttaaaacgttggctgaagaacttcagctgtccaaagaaaccctgcaaatccagaatacaaaactggaatacgatgtttatcatgactcccttaccggcatgaaaaaccgtcttttcttctgggatgatctcaataaacttaatctacaggctgaggaaaaacatatttcggtcacggtgatgttattcgatttagaccggttcaaagaggtgaatgatacctacggtcatgatgctggcgatttactgttacgtgaggtatccacgcgccttaacgctttgagccgcttttcagagacattttatcgtttgggcggcgacgaatttgcgtttctctccagtggcttaaccgaagccgcagctgtttcacgcgcgcgagaaatcagtgatagcatcagcaagccctatacaattaataatcaactcatcaaaatagccacctgtgtgggtattgttttatcggataacgaacgacgttcagattacctttataaatttgccgatctggcgctctatgaagccaagaaagaaggttctcagcaaatcaaagtcttccgccagcgaatgctacagaagttgcaggaaagcagaacccttgaaaatgatatggcaagagcaatagagaatgatgagtttattgtttattaccagcctattgtgaattccgtcagcaaggaaatttacggctatgaagcgcttattcgctggatgcaccccgtcaaggggatgctctccccggatagctttattttcgccgctgaaaaaacaggcatgatcaacgagataggtaaaactgtacttaaactggcgtgtagggaggcggtctcctgggctgttccggccaggatctccgtcaacgtctcacctgttcaattgggcagcaaatcatttattaatacggtgcagtccgttctggctgagaccgggctcccggctaaccgtcttgagttagaggtcacagagtcttccctcttcagtgacagaaataaccccattgcgatcctcaaaaaactacgctcactgggcgtaagaatttctattgatgattttggcacgggttattcgtcgctctccagactcagcgaactgaattttgataaaatcaagatcgataaatcttttgtcaatccgatatctacgcaggaagatgcgcttaatattgtgaagctgattaccggtatggctaaaagccttaatatgggcgtcattgccgagggcgttgagaccgaagagcagcttgagcggcttcaggctctgggttgcgagcttgtgcagggatatcttttcagcaaaccacagcctcaggtcgacagcaaaattaagagcggccaggaatga

SEQ ID NO: 116625 - DNA, 258 bp, Enterobacter cloacae
atgaatttatcccgtcaggaacaacgtaccttacacgttctcgccaaaggtggccgtattgtgcacgtccgcgataactctggccgcgtcaccgccgttgaatgctatagccgcgaagggctactgctggctgactgcacgctcgccgttttcaaaaagctcaaaaccaaaaagctgatcaaatccgttaacggtcagccctaccgcattaacactacggggctgaacaatgttcgcgctcagcctgataatcgttga

SEQ ID NO: 116626 - DNA, 537 bp, Enterobacter cloacae
atgaaagcacggtataagtggttattaatgcttggaggatacgctgttattagctacttcttccttgctgatttggccttatctgttaaggtcccagttagtgacgttattagtaacttaattgacttatctgctatatttttggcaatagttggaatgtgggttgcttatagttatccagctgccatatcaaaaattgttaatgataacgatgatttaagcttaataacctcctatcattcagcgaaaagacttgaagcactcattatgaatattttggttgcatctatcgtcttaattagttgtttgtttttaaatgcatttataatacctgtaattaagagcagtgagttttttaaggaacatatctccttaactaagcaatttggatattgtggcatttggtttttatgtcttatacagattgtgatgatattacaaattgttcgcgctaatcttagctttttagacgatttagatactctgattattaagctggcctcacagcgcaagaaaaaccctcataataagtcttaa

SEQ ID NO: 116627 - DNA, 1119 bp, Enterobacter cloacae
atgctcacagcaacaattactttttataaaattgaagaatttggtttttataaaagaaataaagaaaaaaatccaaatcgtttgttcggtgatgaaaattctgtctttagcgactttagtaaatggcttgctgcccaagaaaatttaggaagtacttgtacgtttgaggtgaataaagaagagggtggtcaaaacatttattgtaaggattattacaagcatgaagacggcgatgaatatcttattattttatggaatgagatgtcaaatgcagacaataaaattcttgctatgcctaaaactgcaaaaataggttctaatggtgtcaaagaacccaagactgaagatgatgatattattgggctaccatcatatttctggtttattccggacaggggtatctttgctgttgtttattttaaacacagcgtgtcaaatataaaggccatgcaacaatatattaaagaatattgtcatgcgcttagtgggttcatttctttagatgctaaaggggtaacttactataccgacggcttgtctcctaaaggaaaatatagatttaaattcaaccataaaaaaatagttaataaaaacaaacgacgtaaattagttgaaactcctgaaaaaattacagaaattgttcgtaaagttgaaatacctaaggttattactgacccacgaaataaaataagaagagcaatgaatgcaattcaaatagggttgcgtagggtggttcctgatttcctaatggatggagatgacaatccaaaagagattaatgatgttaatgaggctttaaaaaacgcttctaaacaaattattgaggtcagaattccattctcaggtgatgaggacactattaattatattcttgataaatatgatgaaaactttgatgagtctgctacgcaaaaagtaggattcaaactcaagggcgatcctaatgttgtatggcttcatgaatcggtaatcaaaactgaggtcgaattggatgttaaaattagtgaggattctttaccaacagctgttgatgttatgactgcaatcagcgctaagcgtgatatgatattacaagtgttgaatgattctgaagaagttaaagataaaatggcggtataa

SEQ ID NO: 116628 - DNA, 273 bp, Enterobacter cloacae
atgcgagtgatgaaaatttactgcccggagtgtatgtctgcggcaacggtgaggaaaacaaaccgaaagcaccccaaattatcagatgtgtactgttattgctcaaatgtagagtgtgggcacacgtttgtgatgaacgtttccttctcacacacgattagtcccagcgctttgcgcggccagggacggattaaagagctaatggatgccctgccaccggacgagcgacaaaaagcattagaactcctgttggcagccaaagagagtcactga

SEQ ID NO: 116629 - DNA, 2688 bp, Enterobacter cloacae
atgaaagttcagtctgtatctgcggtttcgggggcagcaaacgggcgatggccacacatcctttccgcgttagggattaatgttccttccgcccgacgccacggtgcctgtccggcctgcggcggaaaagatcgcttccgtcttgatgacaaagaggggcgcggaacatggttctgtaatcagtgcggcaatggcgatggccttgatttagtccgtctggtgacagggcgctcagtgaaggaggttgcgggaatggtctctgaggttctggcattacctgaagtacaggataaacccgctatgccagccaggaaaaaggtggcgggaaaagagaccggagcagaccgctatcagaaacttaaaaagttgtctcaaaacggtgaatcagcctatctgaccggaaagggattgcagggttactctttaccgcttcttactgctgccataaatctggcggggatgacttttccagctgggtcgctgctgctgcccttaactgacatcaccgggaatgttacaggcggtcagcttattaactctgatggtgataaaagtcttttacccggcagtcaactgtcaggcgcgtttattgccgtggctgatgttccgtctgatgctccagaacaggtcattatcactgaaggatatgccactgcgttgacggtcagccgcctggctgacggttggatcgttgctgccattgcggccacaaatttggtgaaggttgcggagcaaatccgcattcgatggccggacacccggattatcctggctggagataacgatcttgttgacgggaaagagaacactggccgggtatgggctgaaaaagccgcgaaagccgtagatggttgggtaacgcttcctccggtacgtcataaagccgactgggatgattatcgtcaggaaaccgggaaggaaagggcgcgtgaagccttccgggaggaaatgacgttgcacggaaaagggcaaaccagattaccgcaggggttcaggctcacgaaagaatatttgtggtatgacaagctggtgaataaatcagatggtgatactgagatccgtaatatcaagatttgcagtccgctgcgtgtgactgctatcaccagcgatgctgacggcagtaattatggccgtctgctggaatgggaggacaccaacggcattagccgaaaatgggcaatgccgatggaaatgctgggtggtagcggagaggaactgcggcgcgtactgctggtcaatgggctttcttatatcaatatcaacgggatggccagagcgcacctgatggaatacatctccctgtgcaagcccgacagaaaagtgacctgcgtgaataaaacaggctggcatggcggcgtttatgttcttcaggatgaagtgatcggcagagagtcacagtctgtcatcctccagacttccagcgttcaggggcgtgattttcgtgttacgggcaccacggaagaatggcgggaaaatataggccgctattgcgtcaataatgcccgactggcctttgccgtaagcctggcattcgccgcgccgcttctgaagctggttggtataggtggcggcggttatcacctgaaaggtgaatctacagacggtaaaaccacaaccatgaaagtggctgcttcggtgtgcggtggtacggatttctggcatacatggcgtgctaccgggaacgcgctggaaggaacggccagccgccgcaatgatgccacactgatgcttgatgaaatccgcgaggtggatggcagagaggcggggaatattgcctacatgctggcgaacgggcagggcaaagcccgcgcccgaactgatggttcggtacgggaaacaaaccgctggaatttgttgtttctttccacgggggagctgtcactggtcgagcatgccgccaatgctggagagcgaacctacgccggggttgaagtacgcatgatccagatcccgagtgattcgggcaagcatggggtatttgaggagctgcacggctttagtggtggtaaagcgctggcggagcatctggaacacgccgttattcattatcatggctcacccttccgcgactggctgcattgtctgacagccgatctccaggaactgaccagccaggcgaaagcgctgctgaaggactacacccgcaggctgaccccagcggatgcaggaaaccaagttgggcgtgccgttacccgttttgcgctggttgctatggctggagaacttgccacacaagccgggataaccggatggcctgaaggtgaggcgttcagggctgctgagtgttgcctggcctcatggatggctgatcgagggcataccgcgaaccaggaggataaaaccgcactggagcaggtcagggattatatgacacgtaaccagttcagccgctttgctgactggcacgacgacaagaaccgtccactgtcgatgatggggttcaggaaagtggacaagggcgacaacgtgacagaatccactgtgaccttctacgtattgccatctggctggaaagaaatttgtaaagggttcgattcgcgaaaggtagccagattgtgtgttgaggcgggctggctgaaagccggggaagacgggagaacgcaaaacagcgttcgcctgccagaaatagggcttaagcgcgtttaccagtttaatacgcaagtactgggtagcgccgatcccgaatag

SEQ ID NO: 116630 - DNA, 411 bp, Enterobacter cloacae
atgcacgctaatatcgggatcaacgcaacagaatttcgggcggcatttctgcgctcctgcattgctgacgcctatatctccctgatgctgcggattaatggggaagctgtgtatatcgaggatggcgagcgtatcgagctgacacctgagcgtgtggccatgaatattctttatcacattgaagcgccctggattaacgaattcggccaggaagaggggcatcgcctggcgtgtgacgttctggagcgaatgctgtcacccggttatatggctgaaaatattcgcctttccgcatttggtgtttctgagctacgcgaagtgtaccgggacatcgttttcggtgcgcccgatggagaagtacctcctggtttcagcattaccactgcgggagttggggaggtactgttatga

SEQ ID NO: 116631 - DNA, 240 bp, Enterobacter cloacae
atgagtgaattaacgaaagcaaagtatgtctgccagttaagtgaggccggagagaatcgccttttacgaatagctcaggctagcgaatttcttgccgaaattctttcaatgcctgtaatgagcggaacgaaaacgatttctgctgaaggtgccgcagcgctaatggcatgtattgcagaacagctggaaggcgtagtgaaggaaaccagcaccatgaaaggagaaagcgatgcacgctaa

SEQ ID NO: 116632 - DNA, 573 bp, Enterobacter cloacae
atgtcaggatttagatggatgttcaataaactaaattcggttataaatttcttgcgccttgccaattgctcgggctatattcgcaccgttgccgcaaaatcggcaaccgggcgtggaaacccgtgtaatctgaaggcgacaccagacgcgccacgcgtctttttttgtgtccgtgtctttgcacacctattgcttttacagcggtttctttgccgttgtagctatcgagtaatggtggctcaggcggggctgacttcggtcaggccggtatccttcagagccggtatttccacccccgtctgggctaccaccagtgggcgtggaaactccggtggtagcgttaaccgctatctgaaggagattgccgccatggcttcgatccctacattgtcacatcaagaatttacctttgtttttctcgcagtgcgccgtactgactgctatgcacgcccgttacctgttcgaattgtcgcaacgtgcgaacatgctgcgcgtctgaaactcgttactgaatttgtactcagctttgctgcccgtatccctgttaaatcatacggggaggctagcgcatga

SEQ ID NO: 116633 - DNA, 1005 bp, Enterobacter cloacae
atgtacgcattcaaagccgaaaggccggacgctgcacgccgttatcacagtaaattcgtatctggtacaaactaccaggagtcttcaaatagacggttttcattaagcaaaccaactgaaaatattttgcgaagctcaattcttgagtctggttggttaatcaataatatcactttgcgtgacgttaatgctatttcaggtaatgccattaatattggagccagcgagttacatacaggacgagttcatggtggcagattccataagatgttagcgataaatggcactgaattttttctgtccgaaactgacacatgtgcacgaatcagctatttagatatgtcacatatttatcatacaggtgctcagggcgaatttgataaatcggtcagtgcgttttttagtcaggcttatgcacttgatatgttgcgggttggttttaatggagagtcaattgctgatacgactgatccagagatgaataaaaaaggtgaagacgtaaatatcgggtggcatgcgctggcaaaaaactatcagggtggtcaacaagtcttaactactcctgtaaccctcggtgaaaccggggaatggaagaatctcgacctgcttgctaatcacctcattacagagctgattgccgatccttatcgtgaagatccacgcttggtggttctcgtgggtgccgagcttgctgctaaacagcgacttaagctcttcaacgcggctgatcgcccggctgatgtggatgctgcgcaaatggcagtcagttcggttgccggacggtttgcttttatcccgccgttcatgccgggaaaacgtcttgcggtcactacgctggataatctgcacatttatacccagtcccgaacccgatcattccgggctgagtttgatgatgagaaaagtgaatacgttaattcttatcttcgcaatgaaggctatgcgctgggggagcctgagctttatgccgctgtggatgagagcgctgtaactttctccgactga

SEQ ID NO: 116634 - DNA, 885 bp, Enterobacter cloacae
atgactaatatgacatctattaaactcccaatggagggtaaatccttttatccttctcttaaatgcgaacaagttacggtattagatacttataaggtcagtatcttcaatgaaggatatggtgattctgcatgtataataagaatcatcgagatctttatgttaaataaattgcgtcataaaggagaggaattacgttctttaacagggctaacaatccccgatacggaagcgactgccgatgaaatcaatctcttaatgagtcgacttgaggtgctatgtcagcgtgaagaagaagagttatccttccgacaaaaggatgttagctctgccgagtacgcattaaaaaatgcagggttgaatgttaactccagaacagtttctgaagtaaaaaacaaaaatgccgtgaaaggggcgcgtgatgcctatgaacgacagtacaattctgcatttttacgacagaaagagcagcaaacgcgggtaagtctcttcagagggttcggaagtttgttacttgaagaggctgaacatatcgggaagaatattagtaaaaaatatcttaactcgttttccagaccgttaacttctcccgctgagtttattaacgttttaaacgatgcgactttagttcgggatgtgagatttatcttggatgttctatgtgcactggataatgcagttgagcacattcttaaatgttgtgcatacccaaatgaccgttacgaactggaaagaggtgggataagtcgaactatggcctatcgggagtactatcgcgctgaaaatgccattcttcgctccgtagtaagcgatcgtgaatatgcagagcatgctgtgaaatataatcagctctctgaatacaagaaaaaaatatttcgtaaataa

SEQ ID NO: 116635 - DNA, 201 bp, Enterobacter cloacae
atggcgctcactgatactcgccctagtgcagactcactaattgatatgaagtatatcacctctgattgcttgtttactgataagtggatttataagctgatctctcttggtaaatccccgaagccgattaagttaggacgtatgtcaaggtggcgtgctggtgattattatgcctggagagatagtcacacatctaattaa

SEQ ID NO: 116636 - DNA, 798 bp, Enterobacter cloacae
atggcaaataaatctactcctttaaaattatttcgcacacattataaagtgactgaagttgctaagatactaagttgtgaagaagaagatattttgtatctggccggggagaacgattttttgttctcagcctatgtaggcagggagggtaacttctcaaagcatcgtgtaagaaatataagtgaatttattaatcatattgattcattggataaggacgatgagggttatagttatattagtcaatatagcctcttaaaaatatatgaagtaaaaaatgataaaaatttagttattgcacgtatcaaaggttattttaaatatccgccaaaagtccaaaaagactttatcttttttagtggtcaatttccagattacccttcacttctcgttccagctgggaaagtgttttcaaatgatgttaaatttatccagatggactggaaaaattcggatggcttttttttggagcatgatgggtatcttgaaagcgaggacgttcgaaagcttcataacatcattaataatgagtcatcgtctgctgatgtatataaaacgctatcaattgctcaacaagagcgacatgcagcaaaaagaaatcaagttttgagtgtggccatttatctttataaagaaaattcgaatgttaaaaaagacaacgctacagcgttaacagagcttatcttcacccgagccgatgaattttggcctgataagaaagaacccccgttgtccttcccagtaattagtaagttgatttcaagtattttcaaaaaacctgtttttacaaataattaa

SEQ ID NO: 116637 - DNA, 1191 bp, Enterobacter cloacae
atgatgctgaatgcccgaaaggttgaagccgcgaaaggaaaagagaagagctacaagctgtctgatggaggtggtctgtatcttcaagtagaacccaatggctcgcgttactggcgtatgaagtaccgttttgctggcaaagagaagcgtttatcttttggtgtctatccaacggtttctttggctgatgccaggcaaaagcgtgaagacgcaaagaaattgctcgcagccggtgaagaccctggcgaagtgaagaaagccaaaaaacatgctttaaccgctgctacagagatactcaatccattcaaagaagtggcgttagagtggcacaaaatgaagtcacctaaatggtctgaaggctacgcttcagacatcattgaggcatttgagaaagacatcttcccgaagattggccatcgacccattgctgatattaagcccctagagctgcttgaagttctgagattaatagaagccagaggagcaatggaaaaagcgaagaaagtccgtcaacgatgcggtgaagtattccgctatgccatcgtaacaggccgagcgatctacaacccggcaccggatcttgccagtgcaatgcaagggcacgaagcagttcactatccattcctgaaagctaacgagctgccggagttctttactactcttaacgcttattcaggaagtccgattgtattactgggtgcatatttgctcatcttaacaggtctcagaactggagagttacgagcagcggaatggcgtgaggtggattttgagaacgcactgtgggaaatccctaaagaacgcatgaaaatgcgtagggctcatattgtaccgctatcaagacaagcattagctcatctcgggcgattgaaagaactgacaggcaactatccgctcatgtttcctggacgcaacgatcccagtaagtgcatgagtgaagccagcatcaaccaagtttttaaacgtattggatatgctggtcgtgtgacggggcatggtttcaggcatacgatgagtacgattctacacgagaaaggttttaacagtgcttggattgaaacccagcttgcacatttggataaaaattctattcgtgggatttacaaccatgctcaatatttagaagggcgcaggaatatgatgcaatggtatgcggattttattgagggaataaatcttaatggcaaataa

SEQ ID NO: 116638 - DNA, 1254 bp, Enterobacter cloacae
atgcttgaacaaatgggcgcagccgcgaaagcagcctcttataaactggcgctcctttccagccgcgagaaaaaccgcgtgctggaaaaaatcgctgattatctggaatctcagtcgcaggaaattttgctcgccaacgagcaggatctgctggaagcgcgtcgcaacggcttaagcgaagcgatgctcgatcgtctggcgctgaccccggcgcgtctgaaaggtatcaccgacgacgtccgtcaggtgtgcaacctccccgacccggtagggcaggtgattgacggtggggtgctcgacagcggattacgccttgagcgtcgccgcgtgccgcttggcgtcattggggtgatttacgaagcgcgtccaaacgtgacggtggatgtcgcctccctgtgcctgaagaccggtaatgccgcgatcctgcgtggcgggaaggagacctggcgcaccaacgccgcgacggtaaacgtcattcagcaggcgctggaggagtgtggtttaccggcgggtgccgtgcaggcgattgaaagccccgaccgtgcgctggtcaacgagatgctgcgcatggacaaatacatcgacatgctgatcccacgcggcggcgcgggcttgcacaagctgtgccgtgagcaatctaccattccggtgatcaccggtggtattggcgtatgccatatcgtagtggatgacaccgcggaggtagaacctgcgctgaagattatcgtcaacgctaaaacacagcgtccaagcacctgtaatacggtggaaacgctgctggtgcatcagggcatcgccagtaccttcctgccagcgctgagcaagcagatggcggaaagtggcgtcacgctgcatgcggatgagaagtctctcgccctgctgaaagacggtccggcgaaggtcgttccggttaacgcggagcagtacgacgatgagtatttgtcgctggatctgaacgtgaaggtggttgcggatctcgatgacgctattgcgcacattcgtgaacacggaacccagcattctgacgcgatcctgacgcgcaccctgcgcaatgccgatcggtttgtgaatgaagtggattcgtctgcggtttacgtgaatgcctcgacgcgcttcaccgatggcggccagtttggtctgggcgcggaggtggctgtgagcactcagaagctgcacgcccgcggtccgatggggctggaagcactgaccacctacaagtggatcggctacggtgatgatacgattcgtgggtaa

SEQ ID NO: 116639 - DNA, 1104 bp, Enterobacter cloacae
atgagtgacagccagacgctggtggtaaaactcggtaccagtgtgttaacaggcggatcgcgccgcctgaatcgtgcccatatcgttgagcttgtacgtcagtgcgctcagttgcatgccgcagggcatcgtattgtgattgtgacttccggggcgattgccgccgggcgtgaacacctgggctaccccgaactccccgcgacgatcgcctccaaacagctgctggccgccgtgggacaaagccgactcatacagctctgggaacaactgttctccatctacggcattcacgtcgggcagatgctgctgacgcgtgcggatatggaagacagagaacgtttcctgaacgcccgcgatacgctgcgtgcactgctggataaccatatcgttccggtcattaacgaaaacgacgctgttgccaccgctgaaatcaaagtgggcgacaacgataacctctctgcgctggcggcgatcctggcaggggccgataagctactgcttctgaccgatcagcaggggctgtttaccgctgacccgcgttctaatccacaggcagaactaattaaagacgttcacggcattgacgatgcgctgcgcgccattgcgggtgacagcgtttctggtctggggacaggcggcatgggcaccaagctccaggccgcggacgtggcgtgtcgggccggtatcgacaccatcatcgccgcgggcagccgtccgggcgtgatcggtgatgtgatggaaggcatctctgtgggcacacgattccacgctcaggcatccccgctggaaaaccgaaagcgctggatctttggcgcgcccccggctggcgaactgaccgtggatgaaggcgcgaccgccgctattctggaaagaggaagctcgttacttccaaaaggaattaaaagcgtgacaggcaacttctcgcgtggtgaagtgatccgaatccgtaaccttgaaggtcgcgacatcgctcatggcgtaagtcgttataacagcgacgcgctgcgtcggattgctggtcaccattcccagcagatcgacgccatcctgggctatgaatatggcccggttgccgtgcatcgtgacgacatgattattcgttaa

SEQ ID NO: 116640 - DNA, 1053 bp, Enterobacter cloacae
atgaaaaagagcactctggcattagtggtaatgggcgtagttgcttccgcatctgttcaggcagcagaagtttataataaaaacgggaataaactggacgtgtacggcaaagtaaaagcaatgcactacatcagtgatgatgatgctaaggatggtgaccagacttacgttcgtttcggctttaagggtgaaacgcagattaacgatcagctgacgggctacggacgttgggaagctgagttcgcaggtaacaaagctgagagcgactcttctcaaaaaacacgtctggcatttgccgggctgaaactgaaagacttcggctcactggattacggccgtaacctgggcgcgctgtatgacgtcgccgcatacaccgatatgttcccggagttcggcggtgacggcctggcgcagaccgataacttcatgacgaaacgcgcctccggtctggccacataccgtaataccgatttctttggcctggttgacggcctgaacatgaccctgcaataccagggcaaaaatgaaaaccgcgacgtgaagaagcaaaacggtgacggcttcggtacctccctgagctatgacttcggcggcagcgatttttctgtgattggtgcgtatgccagctccgatcgcactaacgatcaaaaccttcaggcacgcggcgaaggtaaaaaagcagaaggctgggcaaccggtttgaaatatgatgccaacgatatttatctggccactatctattccgaaacccgcaatatggcccctatttccggtggctttgcaaataaagcgcaaaacttcgaagtggttgcgcaatatcaatttgactttggtctgcgtccatctctgggttacgtgcagtctaaaggcaaagatatcgaaggtatcggcgatgaagatatcgtgaaatacatcgacgtaggtgctacatattatttcaacaaaaatatgtctgcgtttgttgattataagatcaaccagatcgatgacgataataaactgggcgtaagcagcgatgatatcgttgcgctgggcatgacctaccagttctga

SEQ ID NO: 116641 - DNA, 402 bp, Enterobacter cloacae
atgacgttaccgagtggacacccgaaaagtagactgattaagaagttcatggctcttggcccgtatattcgagaagagcagtgtgaagagaatcgcttttttttcgactgcctggctgtttgcgtcaacgtgaagcctgcacccgaaaaacgtgagttctggggctggtggatggaaatggaagcacaggaaaaccgttttacctatagctatcagtttggcctgtttaataaagacgggcactggcaggcgacgagcatcaaagatcaggaagtgatcgatcgtctggagcatacgctaaaagaatttcacggcaaagctcgtgatctgctggcaacgctggatctgaagctggagcctgcggacgatttttccagcgaagcggtgaaactgagagcctga

SEQ ID NO: 116642 - DNA, 1245 bp, Enterobacter cloacae
atgacgcaggcgaatcttaccgaaactctcttcaaaccccgtttcaagcaccctgaaacgtcgacgctggtgcgtcggtttaatccggggacaatgcctgccgttcagtcagcgttagacggtaagaacgtgccccactggtatcgaatgattaaccgcctgatgtggatctggcgcggcatcgatccgcgtgaaatcctcgacgtgcaggcgcgtatcgtgatgagtgagtccgagcgtaccgacggcgatctctacgatacggtggtgggctaccgtggtggaaactggatctacgaatggtcaaagcaggccatgctctggcagcaaaaagcgagccaggaagaagacgccactctcagcggaaagcactggctgcatgcggcaaatctgtacagcatcgctgcatatccgcatcttaaaggcgacgaactggcagagcaggcccaggcgctggcaaaccgggcttatgaagaggccgcgcagcggttgcctggccggatgcgtgaaattgagttcgccattcccggtggcagcccggtgaccggattcctgcatatgccggagggggaagggccgttcccgacggttctgatgtgcggtggactggactcgttacaaattgactattacagcctgtatgagcgctactttgccccaaacggaatcgccatgctgacgcttgatatgccttccattggtttttcatccaaatggaaacttacgcaagactccagcctgctgcaccagcatgctttaaaagcgctggagaatatcccttgggttgaccacacccgggttggcgcgtttggcttccgctttggcgctaacgtcgcggtacggcttgcctaccttgaatcttcacgcctgaaggccgtcgcctgtcttggcccggtggtgcatgctctgttaagcgatcctgcgcgtcagggtagcgttcctgagatgtatctggacgtgctggcgagccgacttggcatgcatgatgcttcagacgaagcgttgcgcattgaacttaatcgttattcattaaaaacgcagggcttactcggccgccgctgcccaaccccgatgatgtccggtttctggaagaacgatccgtttagcccggaagaggagtcacgcttaatcacgtcgtcatcttctgatggtaaattgctggaggtacccttcagcccggtgtaccagaattttgacaaagcgctgaaagagatcacacgctggatcacgcagagattgtgttaa

SEQ ID NO: 116643 - DNA, 459 bp, Enterobacter cloacae
atgagcgaaaaatacgtcgtcacctgggacatgttgcagattcacgcacgcaaactggctgcgcgtctgatgccttccgaacagtggaaaggcattattgccgtcagccgtggcggtctggtaccgggggcgctgctggctcgtgagctgggtattcgtcatgtcgataccgtatgtatctccagctacgatcacgacaaccagcgcgaactgaaagtgctgaaacgcgcggaaggcgacggtgaaggctttatcgttatcgacgatttggtggacaccggcggtaccgcggtggctatccgcgaaatgtatccaaaagcgcacttcgtcacgatcttcgcgaaaccagcgggtcgcccactggttgatgattacgtcattgatatcccgcaggatacctggattgaacagccatgggatatgggcgtggtcttcgtaccgcctatctctggccgttaa

SEQ ID NO: 116644 - DNA, 1458 bp, Enterobacter cloacae
gtgtctgaactgtctcaattatctccacaaccactgtgggatatttttgccaaaatctgctccattccgcacccttcctatcacgaagaacagcttgccgaacatattatgggttgggcaaaggaaaaaggtctgcacgctgagcgcgaccaggttggcaatattcttatccgcaaacctgccaccgcaggtatggaaaaccgtaagccagtggtattgcaggcgcacctggatatggttccgcagaaaaacaacgacaccgttcacgacttcacaaaagacccgatccagccgtacatcgacggtgagtgggtgaaggcgcgcggcacgactctgggcgcagataacggcattggtatggcttccgcgctggccgtgctggctgacgacagcgttgaacacggtccgctggaagtgctgctgaccatgactgaagaagcgggcatggatggcgcgttcggtctccaggcaaactggctgcaagcggacattctgatcaacaccgactccgaagaagagggtgagatctacatgggctgcgcgggcgggatcgattttatctctaccctgccgctgtcccgcgaagcgatccctgccggattcgagacctttaagctgacgctgaaagggctgaaaggcggtcactccggcggtgatattcacctgggcctgggcaacgccaacaaactgctagcgcgtttcctggcgggccatgccgctgaactggatctgcgtctggtggacttcaacggcggtactctgcgtaacgcgatccctcgcgaagccttcgccaccgtggcggtatctgcgtcgaaagcggacgaactgaaaaaactctccagcgtgtatctggagatcctgaaaaacgaactgtctgcgaaagagaaaaacctgacggtggtgctggagtccgttacgacggataaagccgcgctgaccgcacagtctcgtgacacgttcgtccagctgctgaacgcaacgccaaacggcgttattcgcaactctgacgtggcgaaaggcgtggtggaaacctccctgaacgtgggcgtggtgaccatgggtgacgacagcgcagagatcatctgcctgatccgttccctgatcgacagcggtaaagagtacgttgtgagcatgctggaatctctgggtaccctggcgggcgcgaaaacgtctgcaaaaggcagctacccgggctggcagccggatgcaagttctccggtcatggcactggtgcgtgaaacttatcagcgactgttcaacagcaccccgaacattcaggttattcatgcgggtctggagtgtggtctgttcaagaaaccgtatccggatatggacatggtctccatcgggccaaccatcaccgggccacactccccggatgagcaggttcacattgaaagcgtcggtcactactggacgctgctgactgagctgctgaaagcaattcctgttaagtaa

SEQ ID NO: 116645 - DNA, 1059 bp, Enterobacter cloacae
atgcgcaaaataatccatgtcgatatggactgcttttttgccgcagtggagatgcgtgacaacccggcgctgcgggatattccgatcgccattggcggcagccgggttcagcgcggtgtcatcagcaccgccaactatcctgctcgcaaatacggtgtacgcagcgccatgccgacagcgatggcgctgaaactgtgcccgcatctcactcttttgcccggacgttttgatgcctataaagaagcatcgagccacattcgggagatcttctcccgctacacctcactgattgaaccgttatcgctggatgaagcctatctggatgtcacccagagcatgcactgccacggctccgccaccctcatggcgcaggagatccgccagactatttttaatgagctgaacctgacggcatcggcaggcgtcgcgccggtcaaatttctcgccaaaatcgcctccgatttaaataagcccaacggccagtacgtcatcactccggaagaggttccggcgtttttaaagacgctgccgctcagcaaaatccccggcgtgggcaaagtctccgccgcgaagctggaaagtatggggctacgcacctgcgaagacgttcagcgcagcgatctggcgctgctgcttaagcgttttggcaagtttggccgcgtactgtgggaacgcagtcagggcattgatgaccgggatgtgaacaacgaacggctgcgtaaatcggtcggcgttgaacgcacactgagcgaagatatccatgactggaccgagtgtgaaaccattattacggaacagctttatcctgagcttgaacgacgcttactgaaggtcaaaccggatctgcttattgcccgacagggcatcaaactgaaatttaacgattttcagcagacgacgcaggagcacgtctggccacgcctcaacaaagaggatcttatcgcgacggcgaaaaaggcgtgggaagaacggcggggcggacgaggggtgaggctggtggggctgcacgtcaccttgctggatccgcagctggagcgtcaactggtgttgggactgtag

SEQ ID NO: 116646 - DNA, 201 bp, Enterobacter cloacae
atgctgacttttctggcgacctttgcggtgtttgtgctggtgatcttcggcatgtccttaggctggatcatcaagcgtaaaagcattcagggcagttgcggaggcatctcttccatcggaatggaaaaagtgtgcgattgtccggaaccgtgcgatgcgcggaaaaagcggatggctcgcgagcagcaacgcattatttag

SEQ ID NO: 116647 - DNA, 1224 bp, Enterobacter cloacae
atggaaattattcttggcgtggtgatgttcacgctgatagtactggtgctgtcagggctgatcctggcggcgcgtgcgaagctggtcaattccggggatgtgatcattgatatcaatgacgatccgcagaatcagatccgtaccccggcaggggataagctgcttaacacgctctccggcaacgggatttttgtctcgtctgcctgtggcggcggtggctcctgtggccagtgccgtgtgacggtcaaagagggcggcggtgatattctgccaacggaactgtcgcatatcacgaagcgtgaagcgaaagagggatgccgtctggcgtgccaggtcgctgtgcgccagaacatgaagattgagctgccggaggagatcttcggcgtgaaaaaatgggaatgcgaagttatctctaacgataacaaagccacgttcatcaaagagctcaagctgcgtgtccctgaaggggagagcgtcccgttccgtgcgggtgggtatatccagattgattgtccggcacacaccgtcgcgtatgctgacttcgatgtgcctgaggagtaccgggcagactgggataaatttaacctcttccgctttgtttccgaggtaaaagagcccgcgcttcgcgcctattccatggctaactatccggaagagaagggcattattatgctcaacgtgcgtatcgccacgccgccaccgaatgtgcctgatgcccctcctggcgtcatgtcgtcgtatatctggtccctcaagcctggcgacaaagtgacgatttccggcccgttcggcgaattctttgccaaagataccgatgcggagatggtctttatcggcggcggtgcgggtatggcgccgatgcgttcgcatatttttgaccagctcaaacgacttggcagcaagcgtaagatcagcttctggtacggggcgcgttcactgcgcgaaatgttctatgacgatgagtttgaacaactggcgcgtgataaccctaactttaccttccatgtggcgctatccgatccgcagccggaagataactggacaggctatacgggcttcatccacaacgtgctgtatgaaaattacctcaaacagcacccggcaccggaagactgcgagttctatatgtgtggtccaccaatgatgaacgccgccgtgattaagatgctaaaagatcttggcgtggaagatgagaacatcatgcttgatgatttcggaggctga

SEQ ID NO: 116648 - DNA, 597 bp, Enterobacter cloacae
atggctcattacctgagtttatttgtgcgcgcggtgtttgttgaaaacatggcgctcgctttcttcctgggcatgtgtacgttccttgccgtttctaaaaaggtatcgacggcatttggtctgggcgtggcagttaccgttgtgctggggctttccgttccgattaacaacctggtattcaacttcgtgctgcgcgatggcgcgctggtggagggggttgatcttagcttcctgaacttcatcacctttatcggagtgattgcggcgcttgttcagatcctggagatgatcctcgataaatacttcccgtcgctgtacaacgcgctggggatcttcctgccgctgatcgccgtgaactgcgccatcttcggtggcgtctcgtttatggttcagcgcgattacaacttcagtgaatcggttgtgtatggcttcggttccggtatcggctggatgctggcgattgtcaccatggcggggatccgtgaaaaaatgaaatatgccaacgtacctgcggggcttcgtggcttagggatcacctttatcaccaccggcctgatggcgttgggctttatgtccttctccggtgtgcagctataa

SEQ ID NO: 116649 - DNA, 639 bp, Enterobacter cloacae
atggctgatacgggtgaactgaaagaagttaaaaaggtgctgattggcccgctgttagccaataacccgataacgttacaggtgctgggggtgtgctcggcgctggcggtgaccaccaagctggaaacggcggtggtcatgacgctggcggtaacgctggtgacagcgttttccagcatgtttatctcaatgatccgccaccacatacccaacagcgtgaggatcatcgtgcagatggcgattatcgcctcgctggtgatcgtggtcgatcagctcctgcgcgccttcgcctatgaaacctcgaagcagctttcggtgtttgtcggtctgataatcaccaactgcatcgtgatggggcgtgctgaagcctatgcgatgaaaatgccaccgctggcgagctttatggacggtattggcaacggcctgggttacggcgtgatcctgttgacggttggtttcctgcgcgaacttattggcagcggcaagctgtttggcattccggtgctggatacggtacagaacggcggctggtatctgccgaacggcctgttcctgctggccccaagcgcatttttcattatcggtttgctgatctggctgattcgtacgttgaagcctgaacagcaggaaaaggagtaa

SEQ ID NO: 116650 - DNA, 795 bp, Enterobacter cloacae
gtggctgagatcaaaaataacgacagcatcagcaaaacgctgctggtggtgctggtactgtgtctggtctgttccattgtcgtggccggttctgccgtagggttaaagccgctacagcaggagcaacgagcgctggataaacagcgtaacatcctggccgtggccgggctgatgcaggaaggcatgacgaaggatgacgtcgcagcggtgtttgccgaacgtattaccgcacggctggtggatttaaaaaccggggagttaatggataaagacccggcgaaatacaaccaggcgctggcgctaaaagatccgcagatgagcaccacgcttgacgcctcgcaggatccggcaggcattaagcgtcgcagcaatgtcgcggagatttacctcgtccgtgacgagcaaaagcgcatccaggaaatcgtgttgcccatctatggcaacggtttatggtcaatgatgtacgcctttgtggcgttggaaaccgatggtcgtacggtcaaaggcattacttattacgatcagggcgaaacaccagggctgggaggcgaagttgagaaccctaactggcgggcacagtttgttggtaaaaaagtgctcgacgacaacggccagcctgcgctgaaggtggtgaaagggggcgcgcgtcccggcgatgaatttgccgttgatggcctttccggtgccacgctcacctctaacggtgtgcagcacagctttgatttctggatgggtgaactgggctttggtcccttcctgaagaatgtacgtgaaggagcgctgaataatggctga

SEQ ID NO: 116651 - DNA, 1236 bp, Enterobacter cloacae
atgggcttgaaacacctctttgaaaaaattgagccgcactttaccgaagggaagctcaaaaagtactacccgctgtatgaagcgaccacgaccattttctacacgccgggtctggtgacgaaaggcgcggcgcacgttcgcgacgccatcgacctcaagcgaatgatgattctggtctggtttgcggtcttcccggccatgttctgggggatgtataacgttgggttgcaaactattccggcgctgcaccatatgcacgatgcagagcagctggcgcaggtgattcagtctgactggcactatcgtctggcgcagtcgctgggggtgagctttgcggcagatgccggctgggtcagcatgatgacgctgggcgctgtcttcttcctccctatctatatgactgtctttatcgtgggcggtttctgggaggtgctgttcgctattattcgcaaacatgagatcaacgagggcttctttgttacctctattctgtttgcgctgattgttccgccaacgctgccgctctggcaggcggcgatggggatcagctttggcgtggtgattgccaaggagatcttcggcgggaccggacgcaacttcctcaatccggcgctggcagggcgcgcgttcctgttctttgcttatccggcgcaaatctcgggcgacctggtgtggacggcagcagacggattctccggcgcgacgccactttcacagtgggcggctggcggcggcgaaacgctggtcaataatgcaaccggacagcctgtcacctggtttgatgcgtttatcggcaatattccgggctccatcggtgaagtgtctaccctgatgattttgatcggcggggccatcatcctctttggccgcgtggcgtcctggcgcattgtcgcaggcgtcatgctcgggatggtactcaccgccacgcttttcaacttcattggttcagacacaaacccgatgttctccatgccgtggtactggcaccttgtgctgggaggctttgcgtttggcatgatgttcatggccaccgatccggtctcggcttcgtttaccgacagaggtaaatggtgttacggcgcgctcattggggtgatgtgtgtactgattcgcgtggtcaacccggcttatccggaagggatgatgttggccattctgtttgccaatctgtttgcgccgctgttcgactacctggtcgtgcgcgccaacattaagcggaggaaggcgcgtggctga

SEQ ID NO: 116652 - DNA, 1344 bp, Enterobacter cloacae
atgtttagaattagaaaaggactcgatctgccaatctctggcgtgcctgaacagcacgttaccaccggcgccagtattcatcatgtcgccattgtaggtgatgattacgtgggcatgcgtcccgcgatgctggtacaggaaggcgatcgcgtaataaaaggccaggcgctcttcgaggataaaaaaaatcctggcgttatgtttacagccccagccagcggcaccgttgtcgccatccatcgtggtgagcgtcgcgttctgcaatcggtagttattcaaattgaaggcgatgagaaacgcgaatttgcgcgttttgacgccgccgatctcgctaccctcagccgcgacgcggtgcagacgcaactgctggagtcgggactgtggacggcgcttcgcacgcgcccctatagcaaaacgcccgtgcctggcactgtgccggccgctatcttcgttacggccatcgacaccaacccgctcagcgcagatccgcagcctcttatcctggcggaacgaaacgctttcgatgccggcctcaccgtgttaacgcgcctgacgccgggtaaagtgcatgtctgtcaggccagcggcggtaagctgggcgggcatccgcaagggcaggtggcctttaatgaatttgccggcccgcatccggccgggctggtgggaacgcatattcatttcctggagccggtaagcctgacgaaacaggtctggcatcttaattatcaggacgtgatcgctatcggtaagctgttcaccacgggtgagctgtgcgcagaacgcattattgccatcggcggccctcaggcaacccaaccgcgtctggttcgcacgctgcttggggcagacctgacggcgctgttggctggcgaaacgaaagagggtgaaaaccgtattatttccggttcggtgctgagcggcaggcacgcgacaggcccgatggcctggctgggtcgtttccatcttcaggtgagcgttgtgcttgaaggacgcgagaaagagctgttcggctgggtgctgcctggtgcagaaaaatactcggtaacgcgcaccacgctcggccacttcctgcgtcgtaagctgtttaacttctccaccagcaccaacggcggtgagcgcgccatggttccgattggcaactacgaacgcgtgatgccgctggatattctgcccaccgtgctgctgcgcgatctcctggccggcgataccgacggtgcccaggcgttgggctgtctggagctggacgaagaagatctggcgctgtgtacctatgtgtgtccaggtaaatacgaatatggacccgtattgcgcgaggtgttaacccgcattgagcaggaaggataa

SEQ ID NO: 116653 - DNA, 135 bp, Enterobacter cloacae
atgaacaacaatccagagaggccggagtgtaccattttcggccctgcctggggcagcaaatccgccgtctggcgcgccgaaatgcgagctattgcgcaaagttcctggagtcaggacattatgaatgggttataa

SEQ ID NO: 116654 - DNA, 741 bp, Enterobacter cloacae
atgcgtaaaatcgcattgttcattgcgatgcttctgataccgtgcatgtcgtttgccgggctgcttggcagtaatagttcaacgacgccggtcagcaaagagtataaacagcagttgatgggatccccggtttatattcaaatcttcaaggaagagcgcacactcgatctgtttgtcaaaatgggcgagacgtatcagctgctcgatagctacaaaatctgtaactattctggcgggctggggccgaaacagcgccagggtgacttcaaaagtccggaagggttttacaacgttcagcgtaaccagctaaaaccggacagccgcttctataaagcgattaacatcggtttccccaatgccttcgaccgtgcgcacggttacgaagggaaatacctgatgattcacggtgcctgcgtgtctgtcggttgttatgcgatgacggattccggcattgatgaaatcttccagtttgtcacgggcgcactggtcttcggccagccgaacgttcaggtcagcatctatccgttccgtatgacggatgcgaacatggcgcgccataagtactctgtttacacagatttctggaaacagctaaaaccgggctatgactacttcgagcagacccataagccgccggtggtgtccatcgtcaatggccgttacgtggtgagtaaaccgctcagccatgaagtggttcagccgcagctggcgtcaaattacgcggtccccgagacaaaatag

SEQ ID NO: 116655 - DNA, 768 bp, Enterobacter cloacae
atgtgcgaactgctcgggatgagcgccaatgtgccaaccgatatctgctttagttttaccgggctggttcagcgcggtggaggaaccgggccgcataaagacggctggggtattaccttctacgaaggcaaaggatgtcgcacgtttaaagatccacaacccagctttaactcacccattgccagactggtgcaggactatcctattaaatcctgttcggtgatcgcccatatccgccaggccaatcgcggcgaagtggcgctggaaaatacccatccgtttacccgtgaactgtggggccgtaactggacctatgcgcacaacgggcagctttcgggctataagtcgctggaaaccggcaatttccgtcctgtcggtgaaacggacagcgaaaaagcattttgctggctgctgcacaagctgaccgagcgctacccccgtacgcccggcaacatgaccgccgtttttaagtacatagcgtcactggcgtctgagttacgcgagaagggcgtctttaatatgctgctgtctgacgggcgctacgtgatggcgttctgctcgacgaatctgttctggatcacccgacgtgcgccgtttggcgtcgccacgctgctcgatcaggatgtggaaattgattttcagaaggagaccacaccgaacgatgtggtcactgtcattgcaacgcagccgctgaccggcaacgaaacctggcaaaagatcatgccaggcgagtgggcgctattttgtctcggggaccgcgtaatttga

SEQ ID NO: 116656 - DNA, 579 bp, Enterobacter cloacae
atgtaccaggatcttattcgtaacgaactgaacgaagcggcggaaacgctggcgaattttctgaaagatgatgccaatattcacgctattcagcgcgcggcggtcctgcttgccgacagcttcaaagccggcggtaaagtgctctcctgcggtaacggcggttcccactgtgacgccatgcacttcgccgaagagctgaccggacgctatcgcgaaaaccgtccgggctacccagcgattgcgatttccgacgtgagccacatctcctgtgtaggcaacgacttcggttacgaccatatcttttcccgctacgttgaagccgtaggccgtgaaggcgacgtgctgctgggtatctccacgtccggtaactctgctaacgtgatcaaagcgatcgccgccgcgcgtgagaagggcatgaaagtgatcaccctgaccgggaaagatggcggtaagatggacggtacagcggacattgaaatccgtgtaccacacttcggttatgcggatcgcgttcaggaaattcacatcaaagtgatccacatcctgatccaactgatcgaaaaagagatggttaagtaa

SEQ ID NO: 116657 - DNA, 2445 bp, Enterobacter cloacae
atgatgattttgagcattctcgcaaccgttgtactgctcggtgtgttgttctatcaccgtgtcagtttattcctgagtagcctgattcttctggcctggacggctgcacttggcgtcgctggcctgtggaatatctgggtccttgttcccctggccatcattttgctgccgttcaacctgacgccgatgcgtaagtcgatgatctctgcgccggtgttcaggggattccgtaaagtgatgccgccgatgtcgcgtacagagaaagaagcgattgacgccggtacgacctggtgggaaggcgatctgttccagggcaacccggactggaaaaagcttcacaactatccgcagccgcgtctgaccgccgaagaacaagcctttattgatggtccggtagaagaagcgtgccgcatggcaaacgactttgccatcactcacgaaatggccgacctgccgcctgagctgtgggcatacctgaaagagcatcgcttcttcgcgatgatcattaagaaagagtacggcggtctggaattctccgcttacgctcaggctcgcgtactgcaaaaactggcgggtgtctccgggatcctggcgatcaccgttggcgtgccaaactccttaggcccgggcgagctgttacagcattacggtacagaagagcagaaagatcactacctgccgcgtctggcgcgtggtcaggaaattccgtgcttcgcgctgaccagcccggaggcaggctccgatgccggcgcaattcctgataccggcgtggtttgcatgggcgaatggcagggccagcaggtgctgggcatgcgcctgacctggaacaaacgttatatcaccctagcacctatcgccacggtgctgggcctggcgttcaaactctctgacccggaaaaactgctgggcggtgaagaagagctgggtattacctgtgcgctgatcccaacctcgactccgggcgttgaaattggtcgccgtcacttcccgctgaacgtacccttccagaacggtccaacccgcggtcaggatatctttgttccgattgactacatcatcggtggcccgaaaatggccgggcagggctggcgtatgctggtggaatgtctgtctgtgggccgcggcattaccctgccgtcgaactcaacaggcggtctgaaatcggtggcgatggggattggggcttacgcgcatatccgccgtcagttcaaaatctccatcggcaagatggaaggtatcgaagagccgctggcgcgtattgcgggcaatgcctacgtgatggacgccgcagcctcgctgattacctacggcattatgctgggcgaaaaacccgccgtgctgtcggcgattgtgaagtatcactgtacccaccgcgcacagcagtcaattattgatgcaatggatatcgcaggcggtaaaggtatcatgctcggcgaaggcaacttcctggcgcgcggctatcagggtgcgccgattgccatcaccgtggaaggggcaaacatcctgacccgcagcatgatgatcttcggccagggtgcgattcgttgccatccgtacgtgctggaagagatggctgccgcgcagaataatgatgtggatgccttcgacaagctgctgttcaaacatatcggtcacgtcggcagcaacaaggtgcgcagcttctggctgggcctgacgcgcgggctgaccagcgcgacgccaaccggcgatgcgaccaaacgttactaccagcacctgaaccgtctgagcgccaacctggctctgctgtctgacgtttccatggcggtgctgggcggtagcctgaagcgtcgcgaacgcatctccgcccgtctgggtgatgtgctgagccagatcttcctggcctctgcggtgctgaaacgctacgacgatgaaggccgtcaggaagcggatatgccgctggtgcactggggcgttcaggatgcgatgtatcaggccgaacaggcgattgacgatctgctggcgaacttcccgaaccgcttcgtggcgggtgccctgcgcgcggtgatcttcccgaccggtcgtcatcacctggcgccgtccgacaagctggatcacaaagtggcaaaaatcctccaggtaccaagcgcaacccgctctcgtattggtcggggtcaatatctggcacctaccccgcataacccggtaggtttgctggaagaggcgctgcttgacgtgatggccgccgacccgattcaccagaagatctgcaaacagctgggcaaaaacctgccgtttacacgactggatgagctggcaaaacaggcgctggcgggtggcatcatcgacaacagcgaagctgcgattctggtgaaagccgaagagagccgtctgcgcagtattaatgtggatgatttcgaacctgaagagctggcgacacagccggtaaagctgccagagaagcaccgcaaacctgaagcggcataa

SEQ ID NO: 116658 - DNA, 771 bp, Enterobacter cloacae
gtgcctggtttaaagatttctgttttgcagcaacctttagtgtggatggacggccccgccaaccttcgccattttgatcgccagctggaagagattaccggacgcgatgtgattgtcctgccggagatgtttaccacaggtttcgcgatggaggcagcaaaacagtccatgccgcaggacgaggtggtggcctggatgcacgccagggcgcaggaaacaaatgcgctgattgccggtagcgtcgcactccagaccgggcgcggaccggtcaaccgcttcctgctggtcgagccggaaggaaaagtccatttctacgataagcgccacctgttccgcatggcggatgaacatcaacattatgaagccggaagcgaacgcgtggtatttgaatggcgcggctggcgtattctgccgctggtctgctatgacctgcgcttcccggtgtggtcgcgcaaccgcaacgattatgacctggcgttgtacgtcgccaactggcccgccccacgctccctgcactggcaggctttactgaccgcgcgcgcgattgaaaatcaggcttatgtcgttggctgtaaccgcgtgggaacggacggcaacgggcatcactatcgcggtgacagccgggtgatcagtccgcagggagagattattgccacctccgagccgcatcaggcaacacgaattgacgctgagatctcgttaacgacgttaaaggagtatcgggagaagtttccggcctggcaggatgcagatccgtttagcattggttga

SEQ ID NO: 116659 - DNA, 1602 bp, Enterobacter cloacae
atgaccaaagcgcttgattttacgtccggttacgattcacgccgttcgccgatgctgggccataacgcggttgccacgtcgcagccgctggcggcgcaggcggggatgaagatgctgcaactgggcggcaatgccgtcgatgcagccattgccaccgcgatggcgctgacggtagttgagccgaccggcaacgggatcggcagcgacgcctttgccatcgtctgggacggtgaaaagcttcacggcctcaacgcatcaggccgctcgccggccagctggcatgcggatctgtttgccggaaaaagcgcagtgccggaaattggctgggacgcggtgaccgtgccgggagcggtatccggctgggtcgcgctggcggagcgcttcggcacgctgccgctgaccacgctggcgcagcctgccattgactacgcgcgcaacggctttcccgtctcgccgctgattggtcatctctggcagcgaggctatagcaagctgaaagatcagccgggcttcagcgcctgcttcgcgccggaaggccgcgccccgcgcgtgggggaaatcttccgtaacccggcgcaggtcagctcgctggagctgattgccaaaaccaacggtgacgcgttttaccgcggcgagctggcgcagaaaatcgctgcttttgccaaagaacacggtgcgcatctgacggcagaggatctggcaaaccaccgcgtggactgggttgacctgctgtcgcgcgacttcgcgggcggctcggttcaggaattgccgccaaacggtcaggggatcgccacgctgattgcgctcggcattcttgagcagtgcggcattgagaagcaccacccggactccgtgcagtctctgcacctgtccattgaggcgatgaagctggcgctggcggatctcgatcgctacgtggcggatgaagaacacatggccttcgcggcgaaagaactgctgagcgaccattacctgaagtcgcgcgcggcgcttattaaccacgatagcgcctctgattttgtctacggttccccgacgcagagcgggacggtttacgtcagcaccgcggatgcgagtgggatgatggtctcgtttattcagtccaactatatgggcttcggttcaggcattgtggtgccggataccgggatcagcctgcaaaaccggggctgcggctttgtgctggatcctgcgcacccgaacgcgctggcgggcagcaagcgcccgttccacaccatcattccgggatttgcgatggacggcaacggcaagccgctgatgtccttcggcgtgatgggcggcccgatgcaggcgcaggggcacatgcagatggcgctgcgcattatgctgcacgggcaaaacccgcaggcggcaatcgatgccccgcgctggcgcgtggtgcagggcagggaggtgatcgtcgaatcaacgttcgatcgcaatactatcgcggcgctgcgcgagcgcgggcatcagatcgtggtggaagatccgcttcaggattataacttcggcggtgcgcaggtgatttaccgtatgccggaagggcactacgtggccgcgacggaaagccgcaaagacgggcaggcactggtgagttaa

SEQ ID NO: 116660 - DNA, 876 bp, Enterobacter cloacae
atggcggaactgacgacgcaaaccgttgcccccacgctgccgcgcgcgcagaaccggatgctgaagaaatttctcggcaataaaagcgcggtgattggcgcgcttgtggtgggcttttttgtcctggtggcgctgctggcgccgtggatcgcccccttcgacccggtcaaagccaacttcctggcggtgcgcaaagcgccgtcggcgatgtactggttcggcaccgacgagctggggcgtgacatcttatcccgcattatttggggggcgcgcacctcgctgatggcgggctgtatgtcggtcattattgccgtggtcatcggcgtgccgctggggctggtggcgggctacttccagaagatgtgggacggcgtgatctcgcgctttattgaggccttgctggcctgtccgttcctgatcatggcgatcgcgctgggggcatttttgggcccaagcctgacgaatgcgatgatcgccattggtctctcggcaatgccgatcttcgcccggctgacgcgcggccaggtgatcgccattcgcaacgaagagtatatcgacggcgcgcgggcgattggcctgccggatcgctggatcatcattaaatacgtcctgccaaacgtgatgtcgccgatcctcgtgcaggccacgctggcgatcgcctcggcgattatcgccgaagccagcctgtcgtttttggggctgggacagcagccgccaaatccgtcctggggctccatgctcaacaccgcgaaagggtttctggagcaggctccgtggatgtccgttttccccggcgtggcgattttccttgccgtgcagggctttaatctactcggcgacgggctgcgcgatgcgctcgatccgcgccacgactaa

SEQ ID NO: 116661 - DNA, 942 bp, Enterobacter cloacae
atgctggaactgatttgcaaacgtctgctgctggccgtcccgacgctattgctggtgagcatgatggtgttcgggctgcaaaagctgctgcccggcgacccgctgatcgccatggccggggaggagcgcgatccggcggtcattgcccagctgcgtgctgagcttaatctggatgcgccgatccccgtgcagtatttccattggctgacgcgcgcgctgcagggcgatctgggcgtctccttgcgcacgcatgaaccggtcacgcagctgattgccagcaagctgccggtcacgctggagctctctctgctggcgatgatcatcgcgctggtgtttggcatcagcatggggatccttgcggcggtgaataaaaacagctgggtcgatcacggggcgaactttgtggcgatctcggggatatcaattccgcacttctggctggggatcctgctgattctggtcttttcggtgaacttgcaatggttacctgcgtccggttatgtgccattcagtgaagatccgatccagaacctgcgcacgctgctgctgcccgcgtccgtgctcggaaccggactggcggcgacgctgatgcgccatacccgagcgtcgatgattgcggtgctgaaagcggattacatccgcaccgcgcgcgctaaggggctgctgccgaaagcagtgatcctgaagcacgcctttcgcaacgcgctggtgcctgtaatcaccctcaccacgctgctgttcggcgagctactgggcggcgcggtgctgaccgagcaggtcttcaccattccgggctttggcaaaatgatcgtcgactcggtgttcaatcgtgactatgcggtggtgcagggcgtggtgctgatcgtggcgatcggcttcctgatgctcaatctgctggccgacgtgctctacgtccttatcaacccgaaaatgcgaggttaa

SEQ ID NO: 116662 - DNA, 1515 bp, Enterobacter cloacae
atgacaatgcgtaattctcttttgaccgtactgggaagtgttatgttgcttggcgcggcgctgcccgcccattctgaaagcgtgctgcggatcggcctgggggccgacccggatatgctcgacccgcatctggcgcgcacctactatggccgtttcgtgtttgcctccctgtgcgacaggctggtggacgtcgacgagcacctgaaagtggtgccgggtctggcaaaatcctgggcctggagcgaagatggcaaaacgctgactatggatctacgcgaaggtgtgaccttccacgacggtgaaaaatttgatgccgctgcggcaaaatacaacctcgaccgcgccctgaccctcaaaggctccctgcgtaaaagcgagatctcatccgttgaatcggtcgaggtcaccggcccgatgcagattgcgctgcacctgaaaacaccggatgccgcgctgctaatgcagctcaccgaccgcgcgggcgcgatgatggcacccgatgtggcgaaaaagcctgactttgccgcccatcccgtctgctccggtccatacaaattcgacagccgcgtgtcgcaggaccgcatcgttctgacccgcttcgacaactactggaacaaagacgcctatcacttcgacaaaatcatctatctgccgatcccggatgcctccgtgcgtctcgcgaacctgcgcgcgggcgatctcgacctgaccgaaggcattgccgccagcgacgtcaaaaccgtcgaagccgacagcaagctggcgctggcgaaggtcaccggtctgggctatcaggggatcaccttcaatattaacaacggcaaggtgccggccaacgatccgttcaaagatgcccgcgtgcgcgaggcattttctcaggcaatcgatcgcgatgccttaaaccaggtggtctttgaagggctctacaccccggcaaatcaggcgttttcaccggtcagcccgtaccacgttaacctgccggtcccgccgcgcgacgtcgataaagccaaagcgctgctgaaagccgccggtgtaaccacgccgctgagcgtcaatctgctggtgccgaacaacccaacctcgcagcaggtgggacaggtattgcaggcgatggtggcagaggcgggctttaacctgaacctgcaaatgaccgagttcgccacgctgctggatcgccagcagagcggtgactaccagttgagcttctccggctggtcggggcgcccggatccggatggcagcatttacggctttatcaacagtaaaggcaccctgaacgacggccgatacagcaacgcgcaaatcgatgaatggctgactcaggcgcgtcagagcaccgaccaggccgcacgccagccgctgtacgacaaggtggtgaagcagctccagaccgacatgccgattgcctacctctacttcgagccgcgcatttttggactgaacaagaacgtgcagggctttaagccgtacccggacggcatcgtgcgtctggccggtttgacgctggcaaaataa

SEQ ID NO: 116663 - DNA, 1083 bp, Enterobacter cloacae
atgactatgcccattcttgaagcccgcgatctgagcaagcttttccccggccctaaaaaactgtttacgccggcccgctttgtcaccgctgtcgaccgagtttcgatgtcggtgatgcctggcgaaacgctggcaattgtcggcgagtcgggttccgggaaatccacccttggtcgtctgctgctgcgcctgctgggcgccagcgaagggcgggtattttatcagggtgaggagatcacccacgcctcgggcgcccgtctgaaccagctccggcgtgagctacagatcatctttcaggatcccttcgcttcgctgaacccgcgcatgacggtggagcaaattgtcggtgagccgctgtggctgcaccagaacatgaaaaaaacggatcgccagtaccgcgtctccgagctactcaggacggtcggcttgccctcagcctgggccgggcgttatccacacgaattttccggcgggcagcgccagcgtatcggcattgcgcgcgcgctggcatcaggcccaaagctgctgctgggtgatgagccggtttctgcgctggacgtttccgttcaggcacaggtggtcaatttactggaaagcctgaagcaccagttggggctaacgatggtgatcgtcgcccacgggctggcggttatccgtcatatgagcgaccgcgtggcggtaatgtatcttgggcaaatcgtcgagctggccaccgtcgacgacatcttcgacgcaccgttgcatccttatacccaggcgttgattgcctcagcgccgcaaatgcagccaggcgtagcgcgggatacgccgctgttgcagggtgatttaccgaacccggctaacccgccgtccggctgccgtttccacacccgttgcccctacgttacagatgaatgccgccagatcgagccgattaatcaggtgctcgacggcggacgtcaggttgcctgccatcgttggcaggagatcaatcgcgatcgcagcgttatccagatcgcaccgccatccgccgcttttctgcgccgccgtgcgctgtttgaacacgcggccactcactcctcccttccttcaaggaactcatga

SEQ ID NO: 116664 - DNA, 1014 bp, Enterobacter cloacae
atgacgacgataccctttaaggactccacgcccgtactgcggctgcaaaacctcaacgttaaattcgcgggctcgccggtgagcgtgctcgacgatatctcgctgacggtcagggcgggagaaacgctggcgctggtaggcgagtccggctgcggtaaaagcatcacttccctggcgctgatggggttattacctgccagcgcccggatcgtcagcggggagatgaatttccgccgccaggatctgcgcaagctctcgccgcgggagtatgccgatctgcgcggcagcgagctggcgatgatattccaggagcccatgacctcgctcaacccggccttcacgcttggcgatcagctcagtgaagcggtgatgcgccatcaaacgatctcccgggctgaggcgatgacggttgcgctacagatcctggagaaggtgcagatcccggcagcagagatgcgccttaaggcttacccgcatcagctttccggcggtatgcgccagcgcgtgatgattgcgatggcgctgataaaccatcccaaactactcattgctgacgaacccactaccgctctggacgtgaccattcaggcgcaaattctctccctgctcaatactttaaaagaagaaacgggcacggcggtgctgatgatcacccacgatttaggcgtggtggctgaagtcgcgcagcaggtggcggtgatgtatgccggacagctagtggagcaggggagtgttgaagctctgtttgccgatccgcagcacccctataccattggccttatgggttcccttccttctatgggcgcgcgtaaaggccagctatcaactattcccggatcggtcccgctgccggaatccatgcctcaaggctgccgctttgccacccgatgtcccttcgcgcagacgcgctgtcatgctgaaaaaccaccgctcactacgctcggtacgggccatcaggttgcctgcttccgcgtgccgctcgaacaccatattgccctgggagagaccgcatga

SEQ ID NO: 116665 - DNA, 720 bp, Enterobacter cloacae
atggaaaagccttcacggtttttagctaattccagtaccgcgcttgagcagctgcgcgggcttatcaaccagcacgagtcaacaccaggcattccgctgcccactgaacgtgagctgtcggacactctcggcgtaggccgacgtgaagtgcgtcgcgcgctggacgtgctggaagaggaagggcgtatctggcgcaagcagggcaagggtaccttcattggtccatctgccccggttgagccgttggcgcttcagggattggttcagcaaaccaacctgctggaagtcatggaagctcgactacagctcgaacccggcttagcccgacttgcggcactgcgtgccaccagggaaaacctcgcgctcatgcagcgtatgctggaacgcattaataaggtcagcccggatgaccgcgatctcaacgaactgtgggatagcgccttccaccgcgccattgcggaggcagcaggtaaccgcctgatgcttgggctttttgatgcgatagatgccgtccgccgggagcctggctggcagcatttacgcgaacttgcccgcacccctgaacgtgtcgatagctacaacgaccaccatcacaaaatcatgtcagcgattattcatcgccagcctaatgaagcagctgccgccatgcgcgaacacctgctcagcctgcaaaccgccctgattcaggctatccaccttgaggacgattccacgctatga

SEQ ID NO: 116666 - DNA, 741 bp, Enterobacter cloacae
atgaccgctatgagcactgcaattactcgccagattgttcttgataccgaaaccaccggtatgaaccagattggcgcccactacgaagggcacaaaatcattgagattggtgccgttgaagtggtgaaccgtcgccttacgggcaacaacttccacgtttaccttaaacccgatcggctggtggacccggaagcgttcggcgttcacggaattgccgatgagtttttgctggataagcccacctttgccgacgtcgcagatgaatttctcgactacatcagaggtgcggaacttgtcattcataacgcgtcgttcgatatcggctttatggactatgagttcagcaagctcaaccgtgatattccgaagacgaatacgttctgtaaagtcacggatagcctggcgctggcaaggaagatgttccccggcaagcgtaacagccttgatgccctgtgctctcgctatgagatagacaacaccaagcgaacgctgcacggcgcattgctcgatgcccagatcctggccgatgtctacctgaccatgaccggcgggcaaacgtcgatgaaattcagtatggaaaatgaatcccagcagacgcgggatgaagggggaattcagcgtattgtgcgtcaggcgaatcgcctgcgggttgttttagccagtgatgaagaactgatgaaccatgaatctcgtctcgatttagtgcagaagaagggcggaagctgtctgtggcgcacgtga

SEQ ID NO: 116667 - DNA, 468 bp, Enterobacter cloacae
atgcgtaaacaggtagaaattttcaccgatggatcttgtctcggtaacccagggcccggcggctatggcgccattatgcgctatcgtcagcatgaaaaaacatttagtgaaggctatttcctgaccaccaacaaccgcatggagttgatggcggccatcgtggcgctggaagcgttaaaagaacattgtgacgtggtgctgagtaccgacagccagtatgtccgccagggcattacccaatggatccacaactggaaaaagcggggctggaaaacggcagagaaaaaacccgtcaagaatgtcgatctctggaagcgtcttgatgccgccctcggtcagcacgaaatcaaatgggagtgggtaaaggggcacgccggtcatcctgaaaacgaacgctgtgacgagctggctcgcgcggcggcatccaacccgacccatgaggatgcaggttatcaacctgaatcctga

SEQ ID NO: 116668 - DNA, 717 bp, Enterobacter cloacae
atgaaaccggcaaggatacctcagactgtcgcaccaccggaacgttgggcagagttgccctggggtgaatattatcgcgaggccttagaacttcagcttaaaccctggctcgcgaaaatgtatggttttcacctgcttaagattggcaatctgagcgcagaaatcaataccgaaagctgcgctatctcgcatcaggttagcgtatcgcttaatggctccccggttcaggtgaaagcggatccgctgcatttgccgtttgcggaaaaatccattgatgcctgtctgctcgcccacacgctgccctggtgcagcgatccccatcgtctgctgcgggaagccgaccgcgttttgattgatgacggctggctgatcctgagcggttttaatccgctgagtctgatggggctacgtaaactgacgcccgttctgcgtcgcacgccgccttataacagcaggatgtttaccatgatgcgccagctggactggctttcactgttaaatttcgaagtgctaagctacgggggttttcaggtcatcccctggacgcgtaaaggcggggtcttattaagcacccatttacccgcgctgggctgcatgcaatttattgtcgcgcgtaagaggacgatcccccttacgctcaacccgatgaagcaaagcaaatcaaaaacgcggatccgccagaccgtgggggccacgcggcagtacaaaaaaccgtga

SEQ ID NO: 116669 - DNA, 759 bp, Enterobacter cloacae
atgaatcttatcagtatttccgcctttcaggacaattacatctgggttttagtcgacgacgatcgcagatgcatcattgttgatccaggcgaatccgcaccgatcctgcacgcgattaaagaaaacggctggcagccggaggcgatcctccttacccatcaccatcacgatcatgtcggcggtgttcccgatctccttgcacgctatccccatctacccgtctacggaccagcagagacacaggataagggtacgacgcaagttgttgaagaaggcgaaagtatcctcatcctcgggtgggagttttccgtatttgctacgccaggtcacacttccggtcatctctgtttctacagcaaaccttatctgttttgtggcgacacgctgttttctggcggctgtggaaggctgtttgaaggcacgccagaacagatgtatcaatctttacaaaaaattaatgcgctgccagccgacaccgtaatttgttgcgcacatgagtatacattagggaatatgaagtttgctgtaagcgtgctgcctgaggatcgggcgattcaggattattaccagaaagtgaaggagttacgtgcaaaaaaccaaaaaacactccccgtaattctgaaaaatgagcgacaaataaatttatttttaagaactgatgatgttgatttaattaataaaattaatcaagaaacaaatttgttacaacctgaagcgcgatttgcatggttaaggtcaaagaaagataacttcagataa

SEQ ID NO: 116670 - DNA, 1365 bp, Enterobacter cloacae
atgaaggcaaaagcgatattactcgcctctgtcctgcttgtaggttgccagtcacaaaacggcagcaacgtacaacagcacgcacagagcctttctgcggctggtcaaggggaagcagggaagtttacgagtcaggcgcgatggttggacgatgggacatccttcgcgcaggaacaagacttgtgggcctctattggcgacgagctaaagatgggaattccggaaaacagccggattcgcgaacagaaacagaagtatttgagaaataagagctatctccacgatgtaacattacgggcagagccgtatatgtactggatagccgggcaagttaagaaacgtaacatgcctatggaactggtactactacccatagtggagagcgcttttgacccgcacgcgacgtctggcgccaatgcagcaggcatctggcagatcattccgagcacagggcgaaattatggtttaaagcagacccgcaactacgatgcgcgtcgtgatgttgtcgcttcaacgacagccgctctcgacatgatgcaacgtctgaacaagatgtttgacggcgactggttattgaccgtcgcggcgtataacagtggtgaaggtcgtgtactgaaggcaatgaaagcgaataaagcgcgtggaaaatccacagacttctggtcgctctcactgccacaggaaacaaagatttacgtaccgaaaatgctggcactgggcgatattatcaagaacagcaaacgttacggtgtacaactgccaacaccagacgaaagtcgtgcactggcgcgtgtccgcctcagcagcccggttgatattcaacaggttgcagatatgacgggtatgtcggtaagtaagcttaaaacctttaatgcaggtgttaaaggctccacgctgggcgctagtggccctggctatgtgatggttccgcagaaacatgcggaacagttacgagagtctttagcttcgggtgaaattgcagccgttcagtccacgctgatcgctgatacgtcgcctgtaagcagccgcagctataaggtgcgttcaggtgatacgctttcaggtattgcatcacgtcttggcgtgaatgcgaaagatctccagcagtggaataatctgcgcggatctggtctgaaagtgggtcaaacgctgtccgtaggtgcaggtagcagcgcacagcgtctcgctaaaaacagcgatagcattacctatcgcgtacgtaaaggcgactcgctgtccagtattgctaagcgtcacggcgtaaacatcaaagatgtgatgcgctggaacaacgatactgacaacctgcaacctggcgaccagctgacgttgtttgtgaaaaacagcgctacgccagattcctga

SEQ ID NO: 116671 - DNA, 774 bp, Enterobacter cloacae
atgacaacaacacactcccatcatgacaacgtcgaaaaacagtttggttctcaggcaagtgcctacctgagcagcgccgtgcacgcctctggccgcgatctggtacgtctcggcgaacggctcgccgcgtttcctgacgcgcacgtgctggacttaggctgcggggcggggcacgccagttttaccgccgcacagcaggttgctcaggtgacggcatatgacttatcgagccagatgctggatgtggttgctgaagcggcgaaagcgaaagggctgaataacgtcacgacgcgccagggctacgctgaatctttaccctttgaggatgcgtcgtttgaggttgtgattagccgttactctgcacaccactggcatgatgtggggcaggcattacgggaagtgaaacgcgtgctcaaaccgggcggaatcttcatcatcatggacgtgatgtctcccggacatccagtacgaaatatctggctccagacggttgaagcgctgcgtgatacctcgcacgtgcaaaactactccagtggagagtggcttacgtttatcaccgaagccggcttgatttcacgctcattgataaccgaccgtttgccgctggagttcacatcatggattgcacggatgcgcacacccgaggcattgactcaggcgatccgattgtatcaggagagcgcctctgctgacgtgaaggcgtactttgaactgcatgatgatggttcgtttaccagcgacaccattatggctgaagcgcaaaaagcgggataa

SEQ ID NO: 116672 - DNA, 825 bp, Enterobacter cloacae
atgttacagaggtcgtttccaaaagtgcgaaaaaatacctatgccatgcgttatgttgccggaatgcccgcggagaggatcttgcctccggggtcgtttgcgagcctgggtcaggcattaccagcgggcacgccattaagcagtgacgaaaaaattcgcgtactggtgtggaacatctttaaacaacagcgtgcggagtggttatccgtacttaaaaattttggtaaagatgcgcatctggttctgttacaggaggcgcaaaccacgcctgagctggtcaggtttgcaacgacaaactatcttgcagccgatcaggtgcctgcctttgttctgccacagcatccttctggggtgatgaccctttcagccgcacatccggtctattgctgcccgctgcgtgaacgtgagccaatcctgcgtctggcaaaatcggcgctggtcacggtctatccgttgcccgacacccgtctgctgatggtggtaaacattcatgcggtgaacttcagcctgggtgttgatgtgtacagtaagcagttactacccattggcgatcagattgctcatcacagtgggccgatcattatggccggggacttcaatgcctggagccgtccacgtatgaacgcgttgtaccgcttcgcgcgtgaaatgtcgctgcgtgaagttcgttttaacgatgaccagcgcaagaaagcgtttggtcgtcctctcgattttgtcttctatcggggtttaagcgtgcacgacgcctccgttctggtgacgcgcgcctccgatcataatcctctactagttgaattcagtcccggcaaacctgataaataa

SEQ ID NO: 116673 - DNA, 1176 bp, Enterobacter cloacae
atgccactggcgcttcttgccctgacgatcagtgccttcgcaattggcacgaccgaatttgttattgtaggacttgttcccactattgctgaacaactcgccatttcgctgccttctgccgggctgctggtatctatttacgcgttaggcgtcgctgttggggcgcctgtgctgaccgcactgactggacgctttccacgtaaacaactgttagttgccctgatggtgctcttcaccgccggcaatattctggcgtggcaggctccggactacactaccctggtcattgcccgtttgctgtctggcctcgcgcacggtgtcttcttctccatcggttctacgattgcaaccagcctggtgccaaaagagaaagcggcgtcagccattgcgattatgtttggcggcttaaccgtcgcgctggtcaccggcgtaccgttaggaacgtttattgggcaacattttggctggcgagaaaccttcctcgcggtatcgctgttgggcgtgattgctctggtagccagcctgctgctggtgccctccagtattccggggcgcgcgagcgccagcctgagcgatcaggttaaggttctgacacacccgcgcctgctgctgatctatgccgttacggctctgggttatggaggtgtgttcactgcgttcactttccttgcaccgatgatgcaggagctggctggtttttctccgggcgcagtgagctggattttactgggctacggtatctccgttgcaatcggcaatatctggggcggcaagcttgcggataagcatggtgcggtaccggcgctaaaatttatcttcgccgcgctggttgtcctgctgatgattttccagttcaccgcgtcgatacaatacgcagcgctggtaactgtgttggttatgggaatattcgcgtttggtaacgtaccgggattgcaggtctatgttgtacagaaagccgaacgctatacgcccaatgcggtggatgtcgcatccggcctgaatatcgccgcattcaatatcggtatcgcactcggatcggttatcggcgggcagacggttgaacacgttggattaacccaaacgccatggattggtgcggtaattgtgcttgtcgctttcctgcttattggtctgagtggacggcttgataaacccgctcgtatcgcgcttggataa

SEQ ID NO: 116674 - DNA, 906 bp, Enterobacter cloacae
atgaaagccacatcggaagaactgactatctttgttgccgttgttgaaagcggcagcttcagccgtgcggccgaacagctcgggcaggcgaactccgccatcagccgctcggtgaaaaagctggagatgaagctcggggtaagtctgctcaacagaacaacgcggcagctcagcctgacggaagaaggtgaacgttattttcgccgcgtacaatccgttttgcaggagatggcggcagctgagacggaaataatggagtcgcgtagcactccgcgtggattgctacgcattgatgcggcgacgccggtcgtgcttcattttctgatgccgttaatcaagccattccgggaacgttatccggagatgactctgtccctggtctcttcagagacgtttattaacctgattgagcgtaaagttgatgtggcgatccgcgcgggaaccctgacggattcaagtttacgcgctcgcccactgttcaccagctaccgcaaaattatcgcgtcaccgcaatatattgcagagcatggcaaaccggagaccgttgaggagctgaagcagcacctgtgcctgggctttacggaacctgtctcgctgaacacctggcccgtggcctgtcatgacggacaacttcatgagatcacttgcggactttcgtctaatagcggagaaacgctgaaacagctttgtcttgaaggaaatgggatcgcctgtttatcagactatatgattgataaggaaatagctgcgggtcagcttgtagaactgatggctgacaaacgcttacctgtagagatgccttttagcgcagtgtattacagtgacagagcggtaagtacgcgcatacgcgcttttatcgacttccttagcgaacatataaaaacagctcccggaggagctgtgtga

SEQ ID NO: 116675 - DNA, 804 bp, Enterobacter cloacae
atgactatccctgcactgggtctgggcactttccgcctgaaagacgacgttgttatcgcatctgttaaaaccgcacttgagttgggctatcgtgctattgatacggcgcagatttatgataacgaagctgccgtaggccaggccatcgaagagagtggcgtaccgcgcgacgaacttttcatcaccactaaaatctggattgagaatctcggccaagacaagctgatcccaagcctgaaggaaagtctgaaaaagctgcgtactgactatgttgatctgacgctgatccactggccatcacctgacgatgccgtctctgtggaggagttcatgcaggcgctgctggaagcgaaagagcagggcttaacgcgtaaaattggcatctctaacttcaccatcccgttgatggaaagggccattgccgcagtgggtaaagaaaatattgccaccaaccagattgaactctctccttacctgcaaaaccacaaagtcgtggactgggcgaaacagcatggtattcacatcacctcgtacatgacgctggcatatggtaaggcgctgaaagatgaagtgattgcacgcatcgctgaaaaacacaatgcgacagccgcacaggtgatcctggcatgggcgatgggtgagggctatgccgtgatcccgtcttcaaccaaacgtgaaaacctggcaagtaacctgttagcgcgggatctccagcttgatgatgaagataaaaacgcgatcgctgcactggaatgcaacgatcgtctggtcagcccggaagggttagcaccagactgggattaa

SEQ ID NO: 116676 - DNA, 2208 bp, Enterobacter cloacae
atggatacacttaaatggaccgggagaaaacagcttcctctcacccgacagacagagtcagcggaatgtggtctggcatgcctggtcatgatggcctgctggcatggtctgcaaacagacttacccacactgcgcgaacgtttcagtatcagctcacaagggatgaccctgcagagactgactgaatgtgcggccggtatcggattatccagccgggcagttcggctggagcttgaggacctaagatccctttctctcccgtgtattctccactggaacatgaatcattttgttgtgctacataaagttcgcggaagcaggctggttattcatgatccggaaaagggaaaagtaacgctctccctacaggatgctggaaaacatttcaccggcgtcgcgctggagctgatgccagccagtgattttaccgctcgggatgaaaggaaaaaaatccatctgcgccaactgacaggtaaaacaccgggtctgttgtcggcaatgtcgcgaattatcgtttttgccgtggcactcgaaatcctgacactgggaagcccgcttctcaaccagctggtgattgatgaagtcctggtggctgccgaccagagtttgttgaccgtcattattattgcgcttctgctgatgtcactgacccagatgctgctgtcactggcccgccagtgggcgagtattacactgtccgtcaattttaacatgcagtggacagcacgggttttccatcatctggtccatcttcctctggcctggtttgatgcacgcagtaaggggagtattaatgctcgttttgaggcggtagataccatccagcaggcgctgactacgcaagtgctggaaggtattctggatgtgttgctcgtggtgactgcgctttgcatgatgctgctgtacagtcctgaaatgacattgatcgccgtacttgcagccattttctatggtgtgttgagggcactgtggtatccgtcccttcgacagtcggcagaagatgcctgggatgcaggtgccaaggagtccgggcattttcttgaaacactcaacgggatcctcagcctgagaattaacggtgtgacggcacatcgtgaggccgcctggctgaatctcaacgttgcccgcagaaatacgcagttgcgtcagagccgtctgctgatgtgctatgacattgctcacactcttaccggcagcgtggtatcagcaatcattttgtggaaaggcgccggggaggtattgaatggaaccttcaccgtcggcatgctggttgcttatttatcctatcagacgcgtttttcttccagtatcagtagcctgactgataagtttttttcctggcgtatgctcgatgtttacaacgaacgactggctgatattgtactgaccccgacagaaggccttcagcaacagccttttcgtgagcataacaacgcttcgcacattccttctgtatcccgcagggagatggatgaatatgctcatgctcctctagtacttgagcacatcatcttcagccacaagggaggggaaaatccgataatcggcggggtgtcgctgacactcaatcccggagaagtcgttgccattacaggtaaatccggatgcgggaaaacgacactggtgaagcttatccttgggatccacatccctgatgagggcaggatcagggcatttggcatattgcatacgcatccggattattttcaggttcgtcagcgtatcggtaccgtactgcaggatgaccatcttttcaaaggttctgtagcagataacattatttttttcagtgatgaccgaaattatgaacgaatgatccagtgcgcaagactggcacttatcgacagcgatgttatggcaatgccgatggggtatcagacgctgattggtgaaaccggcggagggctttccggaggacaaaaacaacgcattctgctggcaagggcgttgtacaagaaaccgggattcctgttactggatgaagcgaccagccaccttgatgttgagagtgaaatccggataagccagaccttacgtcaactggggcttcctgttctgctgatagcccatcgcccggaaaccatagcctctgcagaccgggttttgtatctggcagacggctacttaacggagctgaatctccagcatacagtcaataatggcgagtctgtttgtgaatatactaatgacgtgatggcaaaaaattaa

SEQ ID NO: 116677 - DNA, 1071 bp, Enterobacter cloacae
atgccctcatccgggctggtaaaaatcactcctcaatatgctggctacgtaaccaaattgaccgcctcagaaggtcaacacattattgccggtgagactctttatcatatcagcggtgaacatttcaacgaacagggggcaggtacactcgctgctataagactttccctacaaactcagtttacaatgctgacttctcaacagaccctggaattgcgtgacaacagtcagcagcagcatgccatacaacagcgaatagtttccctgaaacctcaggttaaaagtgcagaaaagcgtctgtcacttgccgtgcatcaggctgcgctggccgtgtctgttatggagcgctataagaaacttgctgatacgcattacgtatcagatatcgaataccagcagaagcagattgacgtttcaacgtcacagcaaaacgttgaggatcagcgtcaggggcttctgcaactgcacaccgcgatggaggctgctaaagacgaccttgaccatctcatcgttcagggtgaaagccggaaggctgaaatggacaggcagttgcaggtgatcaggcaacagcaggacgaactggcaggtaaggaaaatttcacgctgacttcaccggtatccggaaccgttgctgccgtgctggtcagacagggacagtctgtcagggcatctgaacctgtcatgaccctcattcccgacaatgcccgtttgcagatagaactctatgctaccagtcagaatgctggctttattcaggcggggcagcgtgttgccctgcggttctctgccttcccctatcagaagtttggtgtgcagtacgggactatccgtgaaataagccatacaacgctgacatcttctgatttactctccgtatctcctgtgacctggaaggagaatgaaggtcattaccgcgtcatcgttgaacctgaaaatacttttattctggcttatgggaaacaggaagccctgcgccccggcatggttcttgagggggatgtcagcctggatacccgcaatttgtgggagtggctgactgagccgctctggagcctgaaaggaaagctgtga

SEQ ID NO: 116678 - DNA, 645 bp, Enterobacter cloacae
atgataatctttaggcatgtctatccattcatttatagtaagaaaaacgtaattgttctttttattgcgtctgttatctcaataataattacgttatcgccatccataaccctccgctatcttactctcgatgtgtcatttttcttattgtttattgcggaattttcaattgcatttttcttgtatattttttacttaaggaagttggatggttttaaattacgcccaagtagagatttagcttcaataaaattttctattgttgtgttgtttgtcattttgctggttcagtataatgtttatctttacagggataatttatatcattatggaccttcccatattagttttatagcatttataatagccaccttcgtagtcccatattatgaggagattatatacaggggctgtatcttcggtgttttccactcaatttttaataaaaagtatattatcccatgtatattgacttcattgtctttttgtctgatgcatggacagtattataacattttagatcaatccattctttttttggtgtcaatattgctattaatagttagaataagaagcagagggcttttttatcctattataattcattcgtgcatgaatgcttttgttttgtcgttaaatttttga

SEQ ID NO: 116679 - DNA, 333 bp, Enterobacter cloacae
atgtcgaatataagagcattaagccttaatgagatagcattagtaagtggcggcaatggaagcggtaattatgaaggtgccggtagtcgtaacaccagctctaaacctggtaattcaaaaggaaacaatggctctatttacaagggcgttgactcatgcggcgcaggaatcatcggtggtctaatcgccggctctcctggggggccagtgggtatgaccgctggggtaattggtggagctatagctggccagtgcacaaaagatagtttttcagatcgtggtagtaaagataaaagtaataattacaacggccccggacaatgccgttggtaa

SEQ ID NO: 116680 - DNA, 228 bp, Enterobacter cloacae
atgccaagaaaagccaggcccgaagaagccgaaacactctggcacgtccgtaacgaagcgatgcgccatggctgtaaaatctgttacgacgcagaagtgattgcgcgctggacgtcagaaaagatgcctgaacattaccgtacctccaggtcgatttcgtgttataggcctgcccatgcaggagctgaactgctcccaaatggagctacggtttacgaagttcaatag

SEQ ID NO: 116681 - DNA, 549 bp, Enterobacter cloacae
atgacgatacccacgcttacgacagaacgcttattacttaaaccccttgttgccgccgatgccgtccagatccagcaacgctatccgcgctgggagattgtccgctatatggtggcttcagtcccctggccctacccggaaaacggtgcagaaaattatgtcaacaacgttgcactgccagatatggccaaagggattgcgtggttctggacgattcgccgtcgcgaagcgcctgacgaactgatggggttgatttgcctgtatgacgtggaggacaacaatcggggcttctggctcgcgccggaatttcagggccagggatatatgcgcgaggcgagtattgcggccacggattactggttcaatacgctcaataaatcggtgttgcgcgcgccgaaagcggcggccaacagccgctcccgacgtatttcagacagcagcggcatgcggctcatcaggacggagaagaaagcctatgtcagcggcctgctggattcggagctgtgggaaatcacccgcgacgagtggaatgcccgtcaggtcagctga

SEQ ID NO: 116682 - DNA, 915 bp, Enterobacter cloacae
atgattgttcgtcctcaacagcactggctgcaactgatttttgtctggcatggttcggtacttcccaaaatttatacccgactgctgcttaacttcctgctttccatcgccgtgattgtcatgctgccgtggtacacctcgctgggtatccggtttaccgtcgcgccgttcagcattctgggcgtggctatcgccatcttcctgggatttcgcaataacgcctgttattcgcgctacgttgaggcgcgtctgctttgggggcagttgatgatagcggcgcgctcgctgtttcgcgaggtaaaaaacaccttgccggatgataaacatcttggagagtttgtccgcctgcaaatcgcgtttgctaactgtctgcgtatgaccctgcgcagagaaaccaatgccgatcagctgtcccgctatctggctcctgacgatttacgcaaagtgatggacgccaactcgccggcgaaccgtatcctgctgatcatgggggagtggctggccgtacggcggcgtagcgggcacctttcagacattctgtttcacagcctcaacaaccgcctgaatgatatgtccatcgtgctggctggctgtgagcgtatcgctaatacgccagtcccgtttgcctatacgctgatcctgcaccggacggtgtatctgttctgcatcatgctgccgtttgcgctggtagttgatctgcattacatgacgccctttgtctctgcgctgatttcctacacttttatctcgctggatacgctggcggaagagctggaagatccttttgggacggaagataacgatctgccgctggacgccatctgcaacatgatggagcgcgatctgttgcagatgaacgatgaagagaacatccctgaaagactgatgccggataagcattatcagctgacctga

SEQ ID NO: 116683 - DNA, 1452 bp, Enterobacter cloacae
gtgaacacactcaaccgtcgtgatttccccggtgcgcgctatcctgaacgtatcatccagtttggcgaaggtaacttcctgcgcgcgttcgttgactggcaaatcgacctcttaaacgagcataccaatctcaatgccggtgtggtgattgtgcggccgatccagagcgattttccgccgtccctgagcacccaggatggtctgtataccacgattattcgcggtctgaatgagcagggggaagcggtaagcgatgcgcgtcttattcgttccgtgaatcgtgaaatcagcgtctacagccagtacgatgaatttctgaagctcgcccataacccggacatgcggtttgtcttctccaataccacggaggcggggatcagctatcacgcgggggataagtttgacgatgcgccagctgtcagctatccggccaaactgacgcgtctgctgttcgagcgttttacccactttaacggggcagcggataaaggctggattatcattccttgcgaactcatcgactacaacggcgatgccctgcgtgaactggtgctgcgctatgcacaggagtgggcgctgccggcggcattcattgcgtggctgaatgatgctaacactttctgttcgacgctggttgaccgcattgttaccggctatccgcgtgatgaggtggcagagctggaagccgggctgggctatcacgacagcttcctcgacacggcggaacatttctatctgtttgttattcaggggccgaaatcacttgcagctgaactgcgcctggataaatacccactcaacgtcctgattgttgacgatatcaaaccgtataaagagcgtaaggtggcgatcctcaacggcgcgcacacggcgctggttccggtcgcttttcaggccggcctggatacggtaggggaagccatgaacgacgcggaaatttgcgcgttcgtagagaaggctatttatgaggagattattccggtccaggatctgccgcgcgacgagctgcactccttcgccagtgccgtaacggggcgtttccgaaatccgtacattaagcatcagctgctgtcgattgccctgaacgggatgaccaagtaccgcacccgcattctgccgcaactgctggcagggcagaaggcgaccggcaaactgccagcacgtctgacctttgctctggcgacgctgattgcattttaccgtgccgagcgcaacggtgagcgctatccggtgcaggacgatgcgcactggcttgaacgttaccagcagttgtggacgcaacatcacgacaaacaggtcactacccgtgaactggtatcgtcagtgttaagcgtgagcgagcactgggaacaggatctcactctggtgaacggactggtagatcaggttgcgctggatctggatgcaattttaagcaaaggcatgcgcgatgcggtaaaaccgctctgctaa

SEQ ID NO: 116684 - DNA, 528 bp, Enterobacter cloacae
atgaactctcccatgctgattaaacctctctcccggcaggacatcctcacccacatcgatgccctcaacgatatcctggtcaactgtgtcaacggcggcgcctccgtcagctttatacagcctttttctgccgggaaaggccataccttctggctcggcgtcgcagagagcgtcgggcgcgacgagcgtaccgttctgggctgttttgatgcggagcaggggctggttggcacggtccagctgattaccgatcagcctgaaaaccagccgcaccgcgcagatgtcgcgaaactgctggttcatgagaaggcgcgccgtaaaggggcggcaatggcgctgatggaagccctggaggcggttgcacgtgaaaaagcgcttacggtactggtgcttgatacctcaaccggcagcggcgcggagacgttttaccagagagcaggctggcaaaaggcgggggagatcccacgctacgccctgatgccgaacggggacatgacggcgacctcggtgttctataaatttctgtga

SEQ ID NO: 116685 - DNA, 966 bp, Enterobacter cloacae
atgaaggcacctcaaattcccgtgaatgaagcggagcgcatgaatgctctgcgcgagtccggtctgcttgagatcgacaattaccccgcgtttgatcgtcttacgcggctggcaacacgctttttcagggtgccgctggcgatgattacgctggtggatgaccacgccgcgatcgtgaagtctgccgacggccaggtacctgccacccagcctcgcgatctctcgttttgtggtcatacgatcctgggtgacgcgccgctggtggtgagtgacacgctgctggacgaacgctttgcggataatccgcaggtggtgggagatccgggcgtgcgcttttatgccggtttcccgctgcgtttacgtgacggggcgtgcgtgggatcgttgtgtctcattgattacgcaccgcgtgagtttacggcggcggatgtcgccgtactggccgatctcagcgcgctggcagaggatgaatttgcggccgttagcgcggccacaaccgatgaactcacggggctgtttaaccgtcgcgggtttaaccagtttgcgcagtttgcactgtcggtttcgcagcgtcgggcagaaccgttaacccttggctggctggatctggaccatttcaaaaccattaacgatcgcttcgggcatcaggagggtgataaggccctgaaagcgatggccaccctgatgcgttcctcgttccgcgaggccgatctgctggtacgtttcgggggcgatgagttcgcggtgctgtttgcggataccgatgaacccggcgcctggatcgctatgcagtacctcgtcgaacaaacggaaaagtataatgcgcgtcagctgcatccctggtcgttacagttctcctgggggctgagcgagttcgatcatcaccgcaatgatatgcaggcatggctaaaacacgcggatgcgcaaatgtacgccatgaagcggcaacaccacggcgaaaaatga

SEQ ID NO: 116686 - DNA, 363 bp, Enterobacter cloacae
atgtccacgttagatcctctgttcgcgcgcctggctcgctccacgttccgttcacgatttcatttagggacgaaagagcggcaatactgctgggataagggcgcggagactatcgataagcatgctgctgattttgtcgccgcgcggctggcgcctgcgcacccggtgaatgacggtaagcagacgccaatgcgcggccatccggtttttatcgcccagcatgccacggcaacctgctgtcggggctgtctggctaagtggcacgctatcccgcagggcgtgccgctgagtgcgcagcaacaacagtatatcgtcaacgtaatccatcattggctggtcatagaggtaaatcgtgcctcctga

SEQ ID NO: 116687 - DNA, 927 bp, Enterobacter cloacae
gtggctgcggtcatccataatgagatgctggacgagattctggcgcaggttcgtccgttactggggcagggtaaggttgccgattacattcccgcgctggcttcggtcagcggtaataagctcggtatcgccatttgtactgtcgacggtcagcgttttcaggcgggagacgcgcttgagcgcttttcgattcagtcgatctcaaaagtgcttagcctcgttgccgccatgcgccagtatgacgagcaggagatctggcagcgggtgggcaaagatccgtccggtcagccgttcaactcccttctccagctggaaatcgaacagggtaagccgcgtaacccgtttattaacgccggggcgctggtggtgtgcgatatgctgcaaagccggctgagcgcgccgcgccagcggatgctccagattgtgcggcagctttccggcgtgcaggacatcgcctacgatccggtggtagcgcgctctgagtttgaacactctgcacgtaacgccgccattgcctggctgatgaagtccttcggcaactttcataatgacgtcgccacggtgctgcaaaactattttcattactgcgcgctgaagatgaactgcgtcgaactggcgcagacttttctgtttctggcgcatcagggccatgccccgcatctgggcgaggacgttgtctccccgatgcaggcccggcagatcaacgccttaatggcaaccagcgggatgtatcagaatgccggggagtttgcctggcgcgtggggctgccggcaaaatccggcgttggcggtggggtcgtggcgattgtccctcacgagatggcgattgccgtctggagcccggaactggacgagaccggaaattcactggcgggcgtggcggcgctggaacagctgaccaaacgccttggacggtccgtatactga

SEQ ID NO: 116688 - DNA, 1590 bp, Enterobacter cloacae
atgaacctaacgcaaatttttagtcgtcttgcgccgcgctttatccctcgtcagtttggcctgctgaccggcatcttttgtatcattggccttttctccgccctgcaactctcttcctccttcctgctgaccgcctccctgaatgaagcccagcgtaacgaacagcgcaatcagctggcctggcagcagcagagcaggctggatcaggcccgtatttctctgctggcggccagcgatctgctcaaccgctccggcgtgtactttatgcaggataaagagaccggctcggaaggaagctggcatagcctgatggacgaggcgcaaaaatccctggcggcgtcacagcaggcatggcaggcctggctcgcgcttaatccgccgaaagacaacgggctggttaacagctatcagctgtttttcgacgccatccgagagcaggcggaggggctggtgaaaaccaacagcatcgacctctttttcgccgtacccgcccaggcgtttcagaccgattttaatgacaatttcgcacgctatcagcaacggagtgagaagcagacgatacagggtcgtcagtcgctcatggaacaactctcaggtctgcaacggctgttcctgtttgcgccgctggtgctactggccattgccatagccgtctggctcggaatggcgaagtgggtgatatccccgctacgccgtctgattatccatattaaccagcttgcggcaggggatttgtcaggcacgccgcctgacgttgtgcgctttaaccgtgaaatcagccagctcagcggcagtattaccgccatgcagcgcgggctccagcaactggtgacccaggtcagcgaggccactacctccatggttgaaaatatcggatcgcttgcgcaggggaatcagaagctttatcagcagtctacgcgacaggccaaagagctggaggaggtgaccgcacacatcgccgatctcgaaacccacgttgaggggaacacgggttatgcaaaactcgcccgctcgcgcgcggatgaagcccgacaggctgccgctgggggggagcaaatgatgtcagcggtgaatggctcgatgcaaacgatcgtcgaccgatcctcagagatgcgcgggatcgtcgcgatgatcgacagcgtggcgtttcagaccaacattctggccctcaatgctgccattgaagccgcccatgcaggagagcaggggcgcggatttgcggtggttgcccgggaagtggggctgctggccagaaaaagcagtcactctacgcaaaccattcaggcgctaattaaccactcgctacagggcattgaagaaggttctcaggtggtaaaccgtctggaagagaatttgcaacaggtcaccgggctggtggcgaatctgagcagcctgctgaatgatatttcgctggctaccctgaatcagggggacagcattcatcagatgacccgtcagcttcaggcgctgaatcaggtatcgcgtcggacagatgtgctggttagcgaagcgtcaaatgcctctgagcgcctgcatcagcagtccgatcttttgttgcaggccgtctcgcgttttcgtctccctgcctga

SEQ ID NO: 116689 - DNA, 1383 bp, Enterobacter cloacae
atgacctattcatctgctacccatgcccactctgtcaacccggcttccggcgaaacgctggctgcttacccgtgggcaacgtcccatgacgttgagcgtgccattgcgcaggcggataccggttttcgtcagtggcgacgcgaaagcgtggcgcaccgggcgcaaaaacttcgcgatctgggtgcggcgctgcgtagtcgtgcggaagagatggcgcagactatctcccgggagatgggcaagcccattatgcaggcgcgtgcggaggtggctaagtccgccagcctttgcgactggtacgctgaacacggcccggcgatgctgcacccggaatctacccaggtcgaaaatgcggtgattgagtaccgtccgcttgggcccgttctggcggtgatgccgtggaacttcccgctctggcaggtgctgcgcggtgcggtgccgatcctgctggcagggaacagctatctgcttaaacatgcgcctaatgtgctcggctcggcggagctgatcgggaaggtattcgcggatgccggtttcccggagggggtctttggctgggtgaacgcgacgaatgacggcgtcagccaggcgattaatgatcgtcgtatcgcggcggtgaccgtaaccggcagcgttcgggctggtgcggcaattggcgcgcaggcgggcgcggcgctgaagaaatgcgtgctggagctgggcggttccgatccgtttatcgttctgaacgatgccgatctggatctggccgtcaacgcggcggtggccggacgttatcagaataccgggcaggtttgtgcggcggcaaaacgctttattgtggaagcgggcgtggcggacgcccttacccaacgctttgttgacgcggtcaaggcgctgaagatgggcgcaccggatgaggaagataactatattggcccgatggcgcgatttgatcttcgcgatgaactgcatcagcaggtgcaggctacgctggcggagggggcgaccctgctgctcggcggagagaagatgtccgggaccggtaactattatgccccaaccgtactcggcggcgtcaccccacagatgacggcctttcgtcaggagctgtttggtccggtggcggcaattaccatcgcgaacgatgcggcgcacgcgttgcagctggctaacgacagcgattttggcttatcggcgacggtctttaccgcgaacgatgcgctggctgaaaccttcgcgcgtgagctggagtgcggcggggtgtttatcaacggctacagcgccagcgatgcgcgcgtcgcgtttggcggggtgaagaagagcggcttcgggcgagagctttctcatttcggtctgcatgagttctgtaatgtgcagacggtgtggaaggatcgcgtctag

SEQ ID NO: 116690 - DNA, 879 bp, Enterobacter cloacae
atggacttaactcagcttgagatgtttaacgccgtcgcactgaccggtagcattacccaggcggcgcagaaggtacaccgggtgccgtcaaacctcaccacccgcatccgacagctagaagcggatctcggcgtggaactgtttattcgcgagaatcagcgcctgcggctttcccccgccgggcacaattttttgcgctacagcaagcagatcctggcgctggttgacgaagcgcgaatggtcgtcgccggggatgaaccgcagggattattctcgctcggcgcgctggaaagtaccgccgccgtacgcattccggaaagtctggcgcggtttaaccagcgctatccgcgcattcagtttgcgttgtccaccggaccttccggtacgatgattgacggcgtgcttgaggggacgctcagcgccgcctttgtcgacgggccgctctcgcacccggaactggaagggatgccggtttaccgggaagagatgatgctggtcacccctgcgggtcacgcggaagtatcaaaagccacgcaggtgagcggcagcgacgtgtatgcctttcgcgccaactgttcttaccggcgtcatctggagagctggttccatgccgaccgcgtcacgccgggaaggatccatgagatggagtcctatcacgggatgctcgcctgcgtgattgccggggcaggcattgcgctgatgccccgctccatgctggagagcatgccgggccatcatcaggtggcggcgtggccgctggcggaaaactggcgctggctcaccacctggctggtgtggcgacgcggggcgatgacccgccagcttgaggcgtttatcgcgctgctgaacgagcgtcagccaccagcgcccagttgttaa

SEQ ID NO: 116691 - DNA, 813 bp, Enterobacter cloacae
atgcaggaaattgatttttatctggtagatgccttcagcgacagggcgttcggcggcaatgcggcggcggtgtgtccgctggaagcgtggctgccggatgagacgctgctgaagatggcgaagcagcataatcagtcagagacggcgttctttgtccgaacggataacgggtttgaactgcgctggtttaccacgcaggatgaaattaacctctgcggccacgcaaccctcgcggcttctcacgttattttcgaatacctggattatccgcatacggaaatcaccttcaccacgcgctttgtcggcgatctgacggtacaacgcagcggcgactggctgacgcttaatttcccggcgtggtcaaccgaggttgttgatactccacccgcagtgctgttcagcgcgctgggcattaacgcagcagacgaggtgcgtgtggggcgtgactacatggtggtgctcgacagccagcggcaggtggaagcgctgacgccggatatcgcggctatgctcccgctggggaaaatggtctgcgttacggcgccgggggatgagtatgatttcgtcagccgcttcttctgcccgggggaaggggtgccggaagatccggtgacgggatcagctcacagcatgctgatcccgtactggagtgaaaagcttggtaaaacgcagatgtcggcccggcaggtctccttgcgcggcggggatctgcgctgcgagctgaaaggcgaccgcgtgctgattggcgggcaggccacgctgtatatgaagggaaaaattttccttcgactccaggactacgttcatcattaa

SEQ ID NO: 116692 - DNA, 789 bp, Enterobacter cloacae
atgcaggagattgatttttatctggtagatgcgttcagcgcatcctcctttggcggcaacccggcggtggtgtgcccgctcgacgcgtggctaccggatgagacgttactgcggatggcacaacagcataaccagtcagaaaccgcgttttttgtgtgtaccaaaggggggatcgagttgcgctggttcaccacgctcaccgaggttaatctctgtggtcacgcgacgcttgccgcggcgtatgtactttttcacgaactggattatccggactcacgccttcattttgacaccgcctctggtcgcctgaccgtcagtcgtgaaggtgactggatgacgctggacttcccggcctgcccgacgcaggcacagacgccgccaccggagatgctcaccgcactcggtatcagccactacgtcgaggcgcgaaaaggccgcgcctgggtgctggtactggagagccgcgagcaggttgaagcccttaatccggatttctccgccatgacgccgggcgagcataaagtggccgtcactgcccgggacgagggggaatacgactttgtcagccgtttcttctcgccaggcgtggccgtgccggaagatcctgtcaccggctccgcgcacaccatgctgatcccgtactggagtgaacggcttggcaaaacacagatgtttgcccgccaggtttctgcccgtggtggcgacgtacgctgcgaactcaagggcgaccgcgtgcggatgggcgggcaggcggcactgtatctgaagggcacagtatttctgcgctga

SEQ ID NO: 116693 - DNA, 1197 bp, Enterobacter cloacae
atgacaacacacacggtttcccgcagggtcgcgtggctacgcgtggtcacgctcgccatcgcagcgtttattttcaacaccacggaatttgttccggttgggctgctgtccgatatcgccgccagcttccatatggaaacggcacaggttggcattatgttgaccatctatgcatgggtggtggcgctgatgtcgctgccgtttatgctgctgaccagccagatggaacgtcgtaagctgctgattgggctgtttgtggtgttcattgccagccatgtgctgtcatttatggcatggaactttaccgtgctggtcatcagccgcgtcggcatcgcgtttgcccatgccgttttctggtcgatcaccgcgtccctcgccattcgtctggctccggcgggaaaacgcgcccaggcgctgagcctgattgccaccggaacggcgctggcgatggtgttaggcctgccgatcgggcgcattgtgggacaatacttcggctggcgcaccaccttctttgccatcggcatgggggcgctgatcaccctggtgtgtctgatcaaactgctgccaaaactgcccagcgaacactccggctcgctgaaaagtctgccgctgctgatgcgtcgaccggcgctgatgagcatctatctgctgaccgtgattgtggtgaccgcccattacacggcctacagctatattgagccgtttgttcaggttgtggcgggctttagcgctaactttgccaccgttctgctgctgatcctgggcggcgcggggattatcggcagcatcctgttcgggaagctgggcaataagcacgcgtctgcgctggtaagcagtgcgattggtctgctgctggcatgcctgctgttactgatgcctgcggcaggcagcgagagtcatctggcgatcctcagtctgttctggggcgtggcaatcatgattattggtctgggaatgcaggtcaaagtgctggcgctggccccggacgccacggacgtagcgatgtcgctcttctccgggatttttaatctggggattggagccggtgcgctggtgggaaatcagatcagcctgcatgtatcgatgtcggccattggttatctcggggcgattccggcgctgatcgcgctgatctggtcggtgcttatcttccgtaaatggccggtcgcgatggaagaacagtccagccacggttga

SEQ ID NO: 116694 - DNA, 843 bp, Enterobacter cloacae
atgcgagcaaaatattcatttatcgcagtgagtacactgcttttttcattaaatgcctatgctgggttgtttgattccacgccagatttcaaatgcggtcgcgatgatgccatctctgctgctcagtcaaaaataagagatgatgcagtcagtaagttacaggtagcttatctcgctaacccctcggatttctacggtaaaccgctcaaggactacattgcaaaagctaatgaaatcgcaattgtaatggcaaatgtcacaacaaaatcgtctgatgacgaagcgcaggcgcggagctgtagcgcgactgtcacgctcactgtgccttctgaaatcatgggttacattgcatcctaccctgacagactgagacgtataattaacgatggtggaaaggtgcttaacaatagcgttcaatgggacaagtttacctactcgttatcgatggcggataatgggaaagatatttcagtttcatatgaatacaataataaagattatatctctgaatcaatagcggcgatggctaccctcgccatgaataaagatgaacttcaaaaggctgaactcaataataaattaaatattgccgcgcgtaattattctgatagcgatcgccagttaaacgaactatggaagtatcttcctgattccgtcaaagcttcgatgaaaaaggagcagaacatgtggatcaatgaaaaagctaaaaaatgcggcaaaataagcgatgcgtcttctgcaaccactcctctggcaacgagaatcggtatctatgattgtcagaccaaaatgacagatgaaagattccgttatcttggcggtgatgaagaacacggatattaa

SEQ ID NO: 116695 - DNA, 666 bp, Enterobacter cloacae
atgttggatttgattaaagcagtggggcttggactggtggtgttgctgccgctggcgaacccgttaacgacggtggcgctttttctggggctggcggggaacatgaacagcgcagagcgcaatcagcagtcgatgatggcctctgtctatgtctttgccataatgatggtggcttattacgccgggcaactggtgatgaatacctttggtatttcgattcccggtctgcgtattgctggcgggctgattgtggcctttattggtttccggatgctgttcccggcgcacaaagcgcacgaatccccggaagccaaaagcaaatcggaggagcttgaaagcgaaccgagcgccaacatcgcgtttgtgccgttagccatgccgagcacggcggggccggggacgattgcgatgatcatcagttccgcctcaacggtgcgtgatgggtcgacatttccgcactgggttatcaccgttgcgccgcccatcatttttgcgcttatcgccattatcgtctggggatcattgcgcagctccggggcgattatgcgctgggtgggcaagggggggattgaggctatctcccgtctgatgggcttcctgctggtctgtatgggcgtgcagtttattattaacggcgtgctggagattgttaagacgtatcattga

SEQ ID NO: 116696 - DNA, 381 bp, Enterobacter cloacae
atgtccagacgcaatactgacgctatcaccattcatagcattttggactggatcgaagataacctggaatctccactctctcttgagaaagtgtctgagcgttcaggttactcaaaatggcacctgcaacggatgtttaaaaaagagaccggccattcattaggacaatatattcgcagccgcaagctgacggagattgcccaaaaactgaaagaaagcaatgagccgatcctctatctggcggaacgctacggatttgaatcgcaacagaccctgacgcgtacgttcaagaactactttgacgtgccgcctcataagtaccgtattaccagtatgccgggtgaatcccgttatctatatccgctaaaacattgcagttaa

SEQ ID NO: 116697 - DNA, 216 bp, Enterobacter cloacae
atgaaatttatcgcctccgccgccctcaccttgctggtgctggtttccggccagagcttcgcggagcaaacccccaatgcggggcagcaaaataatcgtgacaccatgattatgccgtccacgcaaaaccagtcgccctgggacttcaatcacatgggcgctggcagcgacaaatccgacgaattaggcgtgccgtattacaaccacgacctgtaa

SEQ ID NO: 116698 - DNA, 900 bp, Enterobacter cloacae
atgacgcggaaagacgggctgttagcgttgctggttgtcgtggtgtggggactcaattttgtggtcatcaaaatggggttgcacaacatgcctccactgatgctggcggggctgcgcttcctgctggtggccttcccggcgctgctgttcgttgcccgcccgaaaattccccttaagctgctgctgggctacggccttaccatcagctttggtcagtttgcgtttcttttttgcgccatcaaattcggtatgcctgcgggcctggcttcgctggtgcttcaggtgcaggcgttctttaccatcattctcggcgcatttgtcttcggcgaacgcttgcagggcaagcagctggcgggcattagccttgcggtctttggcgtgctggtgctgattgaaggcagcctcaacggtcagcatgtcgcgctgctaggctttatgctcaccctggcggcggggctgagctgggcgtgcggcaatatctttaacaaactgataatgcagcacgagacgcgtccgccggtcttatcgctggtggtctggagcgcattgatcccaatcgtgccgtttatggccgcgtcgtttattctggatggtccgcaggcgatgttgaaaagcctggtggagatcgacctgacgaccattttgtcgctgatctacctggcgttagtcgcctcaatcattggctatggtatctggggatcgctgctcggacgctatgaaacctggcgtgtggcgccgttatcgctgctggtaccggtggtcgggcttgccagcgccgcactgttgctggatgaaacgctcagcgtgctgcaactgtgtggcgcagggctgattatggccgggctgtatatcaacgtctttggcttgcgggtgcgtcgggcaacgcaggtgcggggttaa

SEQ ID NO: 116699 - DNA, 1218 bp, Enterobacter cloacae
atgaaaccatcaatcaggcgctcaaccgcagcgctgctggcatcgtcattgttattaacaattggccgcggggcaacgctgccctttatgaccatatatctcacacgcgtgtacgatatgagcgtggagaatattggctatgcccttaccgtggcgttgaccatcggcgtggtgtttagcctggggtttggcatcctggcggataagttcgacaaaaaacgctatatgctgatcgccatcgtggcctttatcgccgggtttgtggcgattccgctggtgaataacgtgacgctggtggtgctgttctttgccctgattaactgcgcctattccgtcttctcaacggtgctgaaagcatggtttgccgacgtgctgacctccagcgaaaaggcgcgcgttttctcactcaactacagtttcctgaacattggctggacgatcgggccgccgatcggcaccctgctggtgatgtacagcctgcaactgccgttctggctggccgccttctgcgccgcactgccgctcgggtttatccatttctttgtgcagaaaagcatagcctcagacagccctgaggagaaaatgccgtggcagccctcggtgctgctgaaagaccgggcgctgttctggtacacgctctccggcctgctggcgtcgtatgtgggtggatcgttcgccacctgcatttcccagtatgtcctcgccgcacatgcggacagtgatttcgcagaaaaggtggtggccgttgtgctgcccgtcaacgcggcggtggtcgtcaccctgcaatacgcgcttggacgtaagatcaccgccagcaatatccgtccgctaatgaccgccgcgacgctttttttcatcctcgggctgggcgggtttatgctttccggcgagaacctgatttactgggggatcgcggcggcgattttcaccctgggtgaaattatttatgcaccgggtgaatacatgctgatcgacaatatcgccccgccgggcatgaaggcgagctatttctccgcccaggcgctgggctggctcggcgcggcggcgaacccgatgatcaccgggctcatcctgacccatctgccgcactggtcattatttatcattatgatggccgccatcattgcggcctggctgatgatattgcgcgggatgcgcgtgaaaagtgaagatagcgtgtcgggtggcgctgcgcttacccgaccgacaaaaccctaa

SEQ ID NO: 116700 - DNA, 639 bp, Enterobacter cloacae
gtggctgcacaacttgcaaaaattgcgcttactctgggaacgctgctggtaagcggctcgctttttgcccattcgcacggtcatcagatgacggaggcggaacagaaggcggctaacggcgtctttgaggataaagacgtcagggacaggaagctgtctgactgggacgggacctggcagtccgtttatccgttcctgcttgatggttcgctggatccggttttcgaaaagaaagcgcagaagggagaaaaatccgctgccgaggtgaaggcctactaccgtaaggggtacgcgacggacgtggacgccatcggcattgaaaacaacgtgatggaattccaccgcggcaaaacggtgagcagctgccgctacgactacagcggctacaaaattctgacctatgcgtcggggaaaaaaggcgtgcgctacctgtttgagtgcaaggataacgcgagccaggcgcctaagtttgtgcagttcagcgaccatatcatcgggccgaaagcctcttcacacttccatatctttatgggcaacacctcccacgaggcgctgctgaaagagatggataactggccgacctactacccgaatgagatgtacaaagagcaggtggtggaggagatgttgcaccactag

SEQ ID NO: 116701 - DNA, 699 bp, Enterobacter cloacae
atgttacaggttagcgaactgaatcagtactacggcggaagtcatattctgcgcggggtgagctttgaggcggtcgtcggggaagttacctgcctactggggcgcaacggggtgggcaaaaccacgctgctgaggtgcctgatggggctgatcccggtgaaaggcggggaggtggtctggcagggaaagagcatcactctcagtaaaccgcaccagcgggtgcagtccggcgtggcctatgttccgcaggggcgggagatttttccgcgtctgaccgtagaagaaaacctgctgatggggctgtcacgcttctccgcgggaaacgcaaggagcgtaccggaggagatttggcagcttttcccggtgctgaaggagatgaagcaccgacgcggaggcgatctttccggtggtcagcagcagcagctggcgataggtcgcgcgctggcgagccgtccacggttactgattctggatgaacccacggaaggtattcagccgtcggtgattaaagagattgggcaggtgatccgcagcctggcgaaccggggggatatggccatcctgctggtggagcagttttatgattttgcggcagagctggccgacaggtatctggtgatgtcgcgcggcagcatcgtccagcaggggcgcggggagaacatggagcaggagggcgttcgcgggctggttgcgatctga

SEQ ID NO: 116702 - DNA, 798 bp, Enterobacter cloacae
atgcagccctctgaaggactctttacccgccagctaccgggcgaccgttaccgcgaacagaccgatccggtgttgcagctcgaggccattaacgtcagtttcgacggttttcaggcgttgaccgatctctcgctgaacatcggcgtcggagaattgcgctgcatcattggccctaatggcgccggtaaaaccacgctgatggacgtgattaccggcaaaacccggccaaaaagcgggaaagctatttacgatcagtccatcgatctgactgccctggaaccggcggccatcgcccgtcagggcattggccgtaagttccagaagccgaccgtgtttgaagcgctgaccgtaggggaaaacctcgaaatcgccatgaaagccgacaggtccgtctgggcgagcctgcgggccacgctcagcggcgagcagcgcgaccgcattgatgagatgctggttttgctgcggcttggcagcgagcgcgatcgccgtgccgggctgctttcccacggacagaagcagtttctggagatcggcatgctgctggtgcaggacccgcatctgttactgctggacgaacccgctgccggtatgaccgacgcagagacggaatacactgccgagctattccgaaccctggcaggcaagcattcgctgatggtggttgagcacgatatgggtttcgtcgagaccatcgccgaccacgtcacggtgctgcatcaggggcgggtactggcggaaggttcgcttcgcgaggtacaggccaatgaacaggtaattgacgtctatctgggacgttaa

SEQ ID NO: 116703 - DNA, 1074 bp, Enterobacter cloacae
atgagccagccattgaccttaacactggcgcgcagggcaccgcgctccacgcaaatcttcggcagtctgctggttgcggcgctgctggtgctgccttttctcgcgctgttgcccgcaacgcatccgctggccgtttctacgtggatgttgacgctcatcggcaagatcctctgctacgcagttgtcgccgtggccctcgatctggtctggggctatgccggtatgctctcactggggcacggcatattcttcgccctgggcggctatgcgatgggcatgtacctgatgcgccaggcggccggggacgggctgcccgcgtttatgtcgtttctctcgtggagcgagctgccctggttctggtggggaacgcagcattttgcctgggctctggtgttaattgtgacgatccccggcctgctggcgctggtcttcggctggtttgcttttcgctcgaagatcaaaggggtctatttctccatcatgacccaggcgctgacctacgcgggcatgctgctgttctttcgcaacgaaaccggctttggcggcaataacggctttaccggttttaccacgctgctcgggttttccgtcacggcgaccaccacgcggatcgcgctgtttctcgcaacggtcgtgctgctgcttctggccctgggcacaggctacgcgctggcgaagagtaaatttggccgcattttaacggcggtgcgcgatgcggaaaaccgtctcacgttctgcggctacgatccgcgcggtttcaagctgctggtctggacgctttccgccgtgctgtgtggcctggcgggagcgctgtacgttccgcaggtgggcattatcaacccgggtgaaatgtcgccgaccaactcgattgaagcggccatctgggtagcgctgggtggacgcggcactctggtgggcccggtgattggcgcggcgctggtcaacggtgcgaagagctttttcaccgtggcgatgccggagtactggcagctgtttctggggctgattttcatcgccgtgacgctgtttttaccgcgcggcgtgttcggtctgtttcgtaagggagagaattaa

SEQ ID NO: 116704 - DNA, 1575 bp, Enterobacter cloacae
atgaacgccatgcgcataattattgcgattgtgtggcttaccggactgctgccagggatggtgcaggcatcggatgccgatgatttcgttgccgctagccgcagccagcagaccgccatgctgacccgctgggcagccacgccggaacctgcacgtttgccgctgcttaaagcgctgcaacaggagaacctctacaccgacagccagaagaaggcttttacccgcatcgacggcgaaatggttgccctgggcgcggcaaagagcgccgaaggaacgaccaaagccgtgcggctgaccaaccggctgcgcgtgttaaccgtcacggcgctggcgacgcatcagcttgtcagtgacagtgtcaccgaaaggcgtcatgccgcgcggcaacttcagcgtgacgtccagccggatatgctcgggtttctgcaacagcgggctaaccgcgaaacggatgacgtcacccgacagtcgctgaggctggcgctggcaaatcttcagctggcgagtccgcaggcggaaacgcgcctcaacgcggttgaactgttgggacagtctgacgatccggacgttcaggccacgctgacgccgttcacccgggcgcaaaccgagccggacgcacgggtacgtgccgccgccgctgagagcctggaccgtattcagcaccggctgatgtggggcgaactgctggggcaggccttcatgggcctgtcgttggggtcggtactcttgctggccgcgctcgggctggctatcacctatggtctgctgggggtgattaacatggcccacggcgaaatgctgatgctcggggcgtatgccacctggatggtgcagcaggtgatggcgcagtggatgcctcagtggctggcgctttatccggtggtggcgctgccggtggcgttttgcctgacggcaggtatcgggatggtgctggagcgcacggtgatccgccatctgtatggccgcccgctggaaaccctgctcgctacctgggggatcagcctgatgcttatccagctggtgcgcatgacctttggcgcccagaaccttgaggtcgcaaacccggcctggctgtccggcggggtgcaggttttcgccaacctgacgctaccgtggaaccgcattgtggtgctcgggtttgtgctgatggtgctgttcttcacctggctcattctgaataaaacgcgtctggggctgaacgtgcgggcggtgacgcaaaaccgcagcatggcggcctgctgcggcgtccccaccggacgggtagatatgctggcgtttggcctcgggtccggcattgccgggctgggcggcgtggcattgtcccaactggggaacgtgggaccggagctgggccagggatacatcattgattcgttcctggtggtggtgctcggcggcgtcggccagctggccggtagcgtcgcggcggcctttggtctggggatcttcaataaaattcttgaaccgcagatgggcgccgtgctgggcaaaatcctgattctggtggcgatcattctgtttattcagaaacgtccgcaggggttattcgcacttaaagggagggtgacagactga

SEQ ID NO: 116705 - DNA, 1272 bp, Enterobacter cloacae
atgcaccgtcgtacctttataaaagcgttcgccttgtccgcctccgtggtcgccatgggcgtcagttttggcgtccaggccgcagagactattaaagtcgggatcatgcactcactctccggcacgatggccatttcagaaacgcccctgaaagatgtcgccctgatgaccatcgatgaaattaacgccaaaggcggcgtgctcgggaaaaagctggagccggtggtggttgacccggcctccaactggccgctgtttgccgaaaaggcccgccagcttctgagccaggataaggtcgccgtagtgtttggctgctggacctccgtatcgcgtaaatcagttctgcccgtttttgaagagctgaacggtttgctgttctatccggtgcagtacgaaggtgaagagatgtcaccaaacgtcttttataccggtgcggcgcctaaccagcaggcgatcccggcggtggagtacctgatgagcgaggacggcggcagcgcgaaacgcttcttcctgctgggaacggactacgtttacccgcgtaccacgaacaagatcctgcgcgccttcctgcactcgaaaggcgtggaagataaagatattgaagaggtctacaccccgtttggtcatagcgattaccagaccatcgtcgccagtatcaagaaattctctgcggggggtaaaacggcggtggtctccaccatcaacggtgattccaacgtgcctttctataaagagctggcgaaccaggggctgaaagccacggacgtgccggtggtggcgttctcggtgggcgaggaagaactgcgcggcattgataccaaaccgctggtgggtaacctggcggcgtggaactactttgaatccgtcgataacccgaccaaccagacttttgtcgcggcctacaaagcctacgcgaaagcccataagctgccgaatgccgataccgtcgtcaccaacgatccgatggaagcgacctatgtcggcctgcatatgtgggcgcaggcggttgaaaaagcggggacaaccgacgtggacaaagtgcgcgcggcaatggcgggccagtcgttcaacgcgccatccggctttacgctgaccatggatgccaccaaccaccacctgcataagcccgtcatgattggtgaaatcgaaggcaacggccagttcaacgtcgtctggcaaaccgaacagccggtacgcgctcagccgtggagcccgtttatcgccgggaatgacaaaaaacctgaccagccgatgaaaaccgccagcaactaa

SEQ ID NO: 116706 - DNA, 1104 bp, Enterobacter cloacae
atgcagcgacaccatgccccgtaccgcgccgatgtagtcggcagttttttacgcccggattctgttaaacaggcccgtctgcaatttgccagcggtgagatcgatgccggtcagcttcgcgcggttgaggacgaggccattcgccatgttgtcgagcagcagtgcgcctgcggtctgcatgtggtaacggacggtgaattccgccgcgcctggtggcactttgacttctttgacgggctacagggcgtagagcgttatgattcgcagcagggcattcagttcaacggggtgcagaccaaagcccatggcgtgcgcgtaacgggcaaactgggcttcggcgatcatcctatgctggaagatttccgctacctcaaaagcatcagcggtaacgcacagccgaagatgaccattccgagcccgagcgtgctgcacttccgcggtggccgcaaggatattgatgccacggtatacccggatctgaaagattactttgacgatctggcgaccacctggcgcgatgccattcgggccttttacgatgcaggctgccgctatctgcaactggatgataccgtctgggcctacctttgttcagaagaccagcgccggcagatccgcgagcgcggtgatgatgcagacgaacttgcccgaacctatgcccgggtgctgaataaggcgctggagggcaaaccggacgatctgaccatcgggctacacgtctgccgcggcaacttccgctcaacctggatttccgaaggcggctatgagccggtggcggaggtgctgttcggtacggtgaacgtcgacgcgttcttcctggagtacgacaacgaccgtagcggcgactttgcgccactgcgttttgtgcgcccgggtaaacagcaggtggttctggggctaatcaccaccaagcacggtgaactggagaacccggaaggggtgaaagcgcgtctggaagaggccgcgcgctacgtggcgaaagagcagatttgcctcagcccacagtgcggatttgcctccacggaagagggtaacagcctgagcgaagcccagcagtgggataaagttcgcctggtgacgcaaatcgccagcgacgtctggtaa

SEQ ID NO: 116707 - DNA, 411 bp, Enterobacter cloacae
atgagctatgttactgaatttccggctgctgagccgcaggaagccgtggggcattttctgcgtcgtctgagcgtcgagacggactgcgccgatgtccatcacgcggtatccagcggtgagcaggactttgttctgctgcacgttgtcggaaaacctgaacattttgcccggcggcatctgcccggcgcgctgcatttaccctggagccagatcaccgccgagcggatgaaagcgtggccagagggcacgctgtttgtcgtctattgtgcaggcccgcactgcaacggggcggacagggcggcgctgaagctggcgcgtctgggtctgccggtcaaggttatgctcggaggcatgaccggctgggaagatgagcggttcgcgtttgcaggatcttcatcacccgccctgtga

SEQ ID NO: 116708 - DNA, 999 bp, Enterobacter cloacae
atgccagaaaacagcaaaaagatgacaaacttaagacatccctcgccgcgcgcggtcgtgctggcatatgacggtttatgtacctttgagtttggcgtggcggtagagatctttggcttgccgcgcccggagatgggcgaggactggtatcagttcgccgtggcgagcgtggatgacggcgagctccgggcaacgggcgggatccgtattctggccgatggcgatctgggtctgctggaaacggcggatctggttgtcgtacccggctggcgagggctggacgaacccgtacccgacgcgctctgtcaggtgctccgtgcggcgcatgcccggggttgtcagctactctcaatctgctctggcgttttcgttctggcagcctcaggcctgcttgacgggcggaaggcaaccacccactggcgctacacgcaagctctgaaagcacgctatcccgctatcaccgtggttgaggatgtgctgtaccaggacgaaggcgatattctcacttccgcaggcagcgccgcggggattgatctgtgcctgcacgtggtgcgccggaattacggtattgaagcggcaaactgcgtggcgtgtcggctggtgatcccgccccatcgggacggctcgcaaacccagcagcttagccgaccggtggctcagttgcgggagagccagcgcctgggccagctgtttgattatcttcaccagcatctggccgtttcccataccgtcgaatcgctggccctgcgggtgggtatgagtcagcgcacttttctgcgccgtttccaggacgcaaccggaacaacgcccgcgcgctggttattaactgcgcgattgcagcgggcaaaagattatctcgaaaacagtcgactcagcatcgacaatattgcggaacaaaccggatttggacaaagcgccacgctgcgccaccatttccggcagcaatttgcgctttcgcccgcgcaatatcgcaaacaatttttacagccggtacgataa

SEQ ID NO: 116709 - DNA, 363 bp, Enterobacter cloacae
atgaaaaaaataatcgtgctatcacttctgggcgtagtggttgcggtgggtgctgcggccagcatctattcaaatgaagaaccagaatatattcagtcagcaaaaagccgtgtcggatcgtatttaaccagcgattacggacgtgtcgaatgtaatagcacccaggtaagtgaagatcgctgggagctgggctgtaccaataaggcgaggggcaaaaccttccagttcgccgtttacccatccgagcaggcgccgtatggggtctctcgtgcgttttatctcgaagcgattaatgatgatgcccgccagagtgcagagcaggggctgatgcgttatctgcaaattaataccaaagcgggttaa

SEQ ID NO: 116710 - DNA, 234 bp, Enterobacter cloacae
atgttcagaaaagaattttcgctactgctggtgattagcgccctgttctcagggcagattatggcggagcacaaagggcatgaatttgtgtatgtgaaaaacgccgaccatcagcttcgtcatgaagctgacagcgacgagttacgcagcgcggctgaggagtctgcggaggggttgcgcgagcaccatgcctggcagaaatcgcgcaaaccggatacccactctgcgggttag

SEQ ID NO: 116711 - DNA, 1965 bp, Enterobacter cloacae
atgcgcctgcactcccatcatcttgaactgctaagcccggcccgcgacgccgccattgcccgtgaagccattcttcacggagcagatgccgtctacattggcggccctggcttcggtgcccgtcataacgccagcaacagcctgcgcgacattgccgagctggtcccgttcgcccaccgtttcggggcgaaggtgttcgtgaccctgaacaccattcttcatgatgatgagcttgagcccgcgcagcgtcttattaccgatctctaccagaccggcgttgacgccctgatcgttcaggatatgggcgttctggaactggatatcccgccgattgagctgcatgccagcacccagtgcgatatccgcaccgttgagaaggcgaagtttctttcggacgtcgggtttacgcagattgttctggcgcgcgagctgaacctgaaccagatccgcgatatccaccaggcgaccgacgcgaccattgaattctttatccacggtgcgctgtgtgtggcgtattccgggcagtgtaatatctctcacgcccagacggggcgcagcgctaaccggggcgactgctctcaggcctgccgtctgccttataccctgaaagacgatcagggccgcgtggtggcattcgaaaaacacctgctgtcgatgaaagataacgatcagacggccaacctcggcgcgctgatcgatgccggtgtacgctccttcaaaattgaagggcgctacaaggacatgagctacgtgaaaaatatcaccgcccattatcgtcagatgctggatgccatcatcgacgatcgcggtgacctggcgcgcgcgtccgccggtcgtacagagcatttctttattccgtcgacggacaagaccttccaccgcggcagcacggactatttcgtgaatgcccgtaaaggggatattggcgcgttcgattcaccgaagtttatcggtttaccggtgggtgaagtgctgaaagtggcgaaagatcatcttgacgttcaggttacagagccgctggcgaacggcgatggtctcaacgtgatgatcaaacgtgaagtagtgggtttccgcgccaatacggtggagaaaaccggcgaaaatcgctatcgcgtctggccgaacgaaatgcctgccgatctctacaaagcccgtcctaatgcagcgcttaaccgtaacctggatcacaactggcagcaggccttactcaagacctccagcgagcgccgcattgcggtggatatagcgctggggggctgggaagagcagctgatcctgaccatgacctgcgaagacggtatcagcgtgacgcatacgctcgacggcctgttcgaggtggcgaacaatgcggagaaagcgcttagcaacctcaaggatggcgtggcgaagctggggcagaccatttattacgcgcgcaatattgaggtgaatctgccggacgcgctgttcgtgccgaacagcctgctgaaccagttccgccgtgaaacggcagagatgctggatgaagcacggctggcaaactatccgcgcggcagccgtaaggccgaaacggtgcctgcgccggtctacccggacacgcatctctcgttcctcgcgaacgtttacaaccacaaagcgcgtgcgttttaccatcgtcacggcgtgcagctgattgacgccgcgtatgaagcgcatgaagagaagggcgatgtgccggtgatgatcaccaaacactgcctgcggtttgcctttaacctttgtccgaaacaggcgaaaggcaatattaaaagctggaaagcgacgccgatgcagctggtgaatggcgatgaagtgctgacgctgaagtttgactgccgtccgtgtgaaatgcacgttatcggcaagatgaagaatcacatcttcaaaatgccgcctccgggaagcattgtggcctccgtcagccctgacgatttgatgaagaccctgccgaagcgtaaaggcagctaa

SEQ ID NO: 116712 - DNA, 528 bp, Enterobacter cloacae
atggatatcactcaacacctggcaaccacactgaaagcgctgcgtcaggcgcggggctggagcctgtcgaaactggcggaagagacgggcgtgtcgaaagcgatgcttgggcaaatcgaacgcaatgagtccagcccgacggtctctactttgtggaaaatcgccaccgggctgaacgtacctttttcggcgtttatcactccagaaagcgaaccgcaggcggtgttcgatccgcagcagcaggcgatggtggtgaaaccgcttttcccctgggatgaacagcttaagttcgaccatttctccatcaccctgtcgcccggcgcgctgagtgagtccacgccgcacgaagccggggtgatcgagcacgtggtggtgataagcggtgagctggacatgcagattgacggtgtctggcgcacgctatacgctgattccggcgtgcgttttgccggcgataaaccgcacgcgtaccgcaacagcagcgcccggacggtgcattttcactctctgatccattatccccgctaa

SEQ ID NO: 116713 - DNA, 1167 bp, Enterobacter cloacae
atgcgatcgactgcctctctctttcctgccgtgctggccggttttgttgccgttctggtgggctatgccagctctgccgccattatctggcaggcggctgctgcggctggcgccagtacacagcaaattgccggatggatgaccgcgctggggctcgggatggggatcagcacgctggcattgtcgtggtggtataaagcccccgtgctgaccgcctggtcgactcccggcgcggcgctgctcgccaccagcctgcaaggcgtgacgctggcggaaaccatcggggtatttatattcgcgaatgcgctgattctgctgtgcggcgtcaccggcctgtttgcccggttgatgaaactaatcccgcactcgcttgccgccgctatgctgacgggcgtgctgttacagtttggcctgaaggcattcagcaatcttgagggacacatttttctttgcggcagtatgctggccgcctggctggtgaccaaagccgtagcgccccggtacgccattgtcgccacgctgctggtgggcgtgttcgtggcatgggccggaggtgacgttgtcacgaacaggatgacgttatcagtcatcatgccggaattcattgcccctgcgttcaccttcaccagcctgctcagtatcggcttacccttcttcctggtgaccatggcgtcgcagaatgcgcccggcttcgccaccatgcaggcatcgggctatccgctggcggtctcaccgctgatcgttgccaccggcgggctggcgctgctgttatcccccttcggcgtttattctatatgcatcgccgccatcactgccgccatctgccagagcccggacgcccatccggatgccagtaaacgctggctggccgcggcggcggcaggcgggttttatctgctggcgggggtgttcggcgggtcgatttccgggctgatggccgccctgccgctgagcggcatccagacgctggccgggctggccctgctcggcactatcagcgggagtttgtatcaggcactgaaccatgaagcagaacgcgacgcggcgatcgttaccttcctgatgaccgccagcggcgtcacgctcctgggaattggctccgccttctgggggctggtgctgggagggatctgttacgccgtcttctcacgccttcgccgcgcgtag

SEQ ID NO: 116714 - DNA, 873 bp, Enterobacter cloacae
atgtctctcgtttacgacacctttgaaacgttacgccaacaaaatgcagtgctgcgggaaaccgtcgcgctcaatactggcattcaactggcggcgtggtacaacaagcacgacacgatcacggtgaaaagcaaccatcacacccttagcctgtacgtggcggatggctatgaaagctatcaaaaaacgccgggtggctggaaaaatggcggcgggccggaccgtttttgtctgatgccggaagagagcgaatccacgtgggatattcgtgacgacctgtcgtttgtgcacctctactgcaccgatgaacacctgcgggacgtgggggagaaaatctgggataaacgaccgctatcgctgacgctggaggaaaaaatcttcggcagcgatccgaaaatcaccgccctttatcgccagtttttgctcggctgcgactggcagcaaaacgccaatcagctcaccctgagcaccgcgtcgaccttattgctgacgcatttggtccagcactattccagcgtacagtggaagctgccggtagtgaccggcgggttatcaccgtttgtactgcgcaacgtgctggcctttatcgaggaaaaccttgcacaacccttaaccctggcggaactggcgggccaggccgcactcagtgagtatcactttgcgcggatgttccgccagtcgatggggctggcgccacatcagtacgttatgcagcgccgcatggagaaggccaaagcgctggtacagcacacgaccacgccgctcaccgacatcgcgctggcctgtggatttaactccgccagccatttcagtaaccgttttcgcagcatgaccggcattacgccgtcacagctacgcgcggcgaaggcgtga

SEQ ID NO: 116715 - DNA, 897 bp, Enterobacter cloacae
atgaacgcattactctatgggctggtcgttgttatctggggcacgacctggatcgccatttttttacaacaggggccggttgcagcgccggtctccattttctggcgcttcgccgtggccagcgccacgatgatgatcgtcctggtcgcccttcgccgtctgcgcaggctggcgctgcgggatcatctctactgcatgcttcagggctgctgcgttttctgtttcaacttctggtgcttttacaccgccgccgcccatatcaataccggccttgagtcggtgattttctcgatggccgtgctgtataacgccatcaacagctttatcttcttcggccagcgcccacccgcacgcttctggacggcggcagcgctggggcttatcgggatcattacccttttctggaacgatctgctcgccagcggctggagcgcgtcgttgcttacgggcatcgggctttccgccctcggcacctacggcttctcgctggggaatatgatcagcatgcgtcatcagcgaaacgggctggaaactatgaccaccaacgcctgggcgatgctgtacggcaccgtcgtgatgggccttatcgcgctcttcaggggcgatagctttatgccggaatggacggtgagctatatgggggcgctgctctatcttgcgctgtttggctcggtgattgccttcggcgcctactttacgctggtaggccgcattggtcccggtaaagccgcgtacagcaccctgctgttcccgctggtggcgctctcgatttcaacggtgtacgagggttacgtgtggcatctcaacgggatcgtcggcctgctgttgatactgggcgggaatatggtgatgtttacgaagccagaaacctggttccgccgcctgcggacggcataa

SEQ ID NO: 116716 - DNA, 675 bp, Enterobacter cloacae
atgcgtactcacactttttttaaagttgcagtgctttctggtctgttggccctttccggctgtgcgtcaaaagtcgcagcccccgatcaatattcaggctttttaaaagattactccggcttgcaggagatgaaatctgcaaccgggaagccaaccctgcgttgggttgacccgtcctataatgaggcgaattacgacagcattatctggacgccgataacctattatccgacgccaaaaccgaccactcagcttgggcaaaaaacgcttgatgagctgttgaattataccaataccaaactgaaaaccgcgattggccagcgtaagccgattgtgacgacgccgggcaaacatagcctgatcttccgcggcgccatcacgggtgtgagctcagacaaagaaggtttgcagttctatgaagtggtgcctgtggcgctgctggttgcgggtacgcagatggcaacgggccatcgtaccatggatacgcatctgttcttcgaaggtgagttaatcgatgcggccacgaacaaaccagtgattaaggttgttcgtaagggtgaagggaaagagctggcgaacgagaatacgccaatgggcttcggcaccctgaagcaggttgtggatgatatggcgacggatgccaccatgtttgatgttcatcagacagcaaattaa

SEQ ID NO: 116717 - DNA, 1596 bp, Enterobacter cloacae
atgaaaagcacattcacaatgataacgctggcgcttgctgcgctgacggtcagttccaccgtcgcggcaaaaacgctggtgtattgctccgaaggatcgccggaaaatttcaatcctcagctctatacgtcggggaccagcgtggacgccagcgccgtaccggtttataaccgtctggtcgatttcaaaccgggcactaccgaactggtgccgagcctggcggaaagctgggaggtaagcgacgatggcaaggtctacacattccaactgcgcaaaggggtgaaattccacagtaataagctgttcacgccgacgcgcgacttcaacgcggacgacgtgattttctcgtttatgcgccagaaagatgtgaatcatccctaccataacgtctccaacggcagttattccaacttcgaaagtctggagttcggcagcctgattaccgccattgataaagttgacgatcgcaccgtgcgcttcaccctggcgcatccggaagcgccgtttgtcgctgatctggcgtggtactttgcctctattctgtcggcggagtatgccgatgccatgctgaaagcgggcacgccagaaaaggtcgatatgcagccgattggcaccgggccgtttaagctggcgcaatatcagaaggattcccgcatcctcttcaccgctttccctgactactggcagggaaaatcgaagctggatcgtctggtgttcaccatcacgccggacgcctcggtgcgttttgccaaagtcgagaagaatgagtgccaggtgatgccgttcccgaacccggcggacctgccgcgtatgaaggctaacaaagacatcaacctgatgagcaaggccggtctgaataccggtttcctggcgtttaacacgcaaaagccaccgctggataacgtaaaagtgcgccaggcgctggcgatggcgattaacaaacccgccatcattgaggcggtgttccacggcaccggcacggcggcgaaaaacctgctgccgcctggcgtctggagtgccgacagcgagctgaaagactacgattacgatccagaaaaagcgaaagcgctgctaaaggaggcgggatttgccaacggcgtaaacatcgatctgtgggccatgcctgtgcagcggccgtataacccgaacgcgaagcgtatggcggagatgatccaggcggactgggcgaaagtgggcgtgcagaccaaaatcgtgacctacgaatggggcgaatacctgaagcgcgtgaagggcggggagcatcaggccgcactgatgggctggacaacggcgacgggcgatccggataacttcttcggcccgctgtttacctgtacgtccgccaacggcgggtcgaactcggccaaatggtgctataagtcgtttgataacctgattgccgaagctaaatcgataaccgatcgcgaaaaacgcgtggcgctgtacaagcaggcgcagcagatgatgcacgatcaaatgccggcggtaatgattgcccactcgacgatttttgagccagtccgtaaagaggtcacgggctatgaaatcgatcccttcggcaagcacctgttctggcaagtggaccttaaggagtaa

SEQ ID NO: 116718 - DNA, 1230 bp, Enterobacter cloacae
atgggctcagaactctccagacaattaacccaacgctttttccgctatctcgccatcaccagccagagcgacccgaaagtcaaaaccctgccctccaccccgggccagcacgacatggcgcgggagctggcgaaggagctggaaacgctggggttagacgatattgtgatagatgagttcgccaccgttaccgccgtgaaaaaaggcaatgttcccggcgcgccgcggattggttttattacccatatcgacaccgtcgacgtcggtttatccccggatattcatccacaaatattaacgtttacgggggatgatctctgcctgaataaagagaaagatatttggttgcgcgtaaaagagcacccggaaattctggcttatcctgatgaggagattattttcagcgacggaaccagcgtattaggcgcagataataaagcggccgtcaccgtggtcatgacggtgctggaaaacctcaccgctgaacataagcatggcgatattgtggtggcgtttgtacccgatgaagagattggcctgtgcggcgcgaaagcgctggatttaaagcgcttcgacgtcgattttgcctggaccatcgactgctgcgagctgggggagattgtttacgagaactttaacgcggcggcggctgaaattcgctttaccggcgtcacggctcacccgatgtccgccaaaggggtgctggtcaatccgctgctgatggcaacggatttcatcagccatttcgatcgccggcaaaccccggaatgcaccgaggggcgcgaaggttatatctggtttaacggcatccaggccgggcagaacgaagcgatactgaaagccaatattcgtgattttgacaaagatggtttcgccgcccgcaagcagcacattgccgatgtggcggcgcaaatagccgcgcagcatcccacggcaaacgtggaataccgcattgaggatacctacagcaatatcagcaatgcgattggcgaagaccgccgcgcgatcgacctgatgttcgaggcgatggaatcgctcggcatcaccccaaaaccgatccccatgcgcggtggcacggacggagcggccctgtcagccaaaggcctgctcaccccgaacttcttcaccggcgcccataacttccactcgaagtttgagtttttaccgctgtcgtcgttcgaggcctcctgtcgcactgccctgcaactctgtctgctggcggcgcgttaa

SEQ ID NO: 116719 - DNA, 594 bp, Enterobacter cloacae
atgactgtcgatgaaaactactttactgagaaatatgggctgacccgcacgcactcagaggtgctgctcagcgcggacattgttaagcccggtaaaacgctcgatctgggttgcggaaatggccgcaacagcctctacctcgcggccaacggctatgaggtgacggcgtgggataaaaacccgatgagcatcgataacatcgagcgcattaaggcggcggaagggatcgcgaatctggaaacggcgattaaggatctgaacaacctgacctttgacggcgaatacgactttattctttccaccgtcgtgttgatgttcctcgaagcgaataccatccctggtcttatcgccaatatgcagcgttgcaccagaccaggcggctataacctgatcgttgctgccatggatacggaggattatccgtgcacagtcggcttcccgtttgccttcaaaaccggtgaactgagcaactactacgaaagctgggagctgatcaagtacaacgaagaggtaggggaactccaccgtaccgatgccaacgggaaccgtatcaagctgcgcttcgccaccatgctcgcacgcaagcccgcttaa

SEQ ID NO: 116720 - DNA, 996 bp, Enterobacter cloacae
atgcataaccaaaaccaacgcgttcttaacttgcccgccgggtatttcggtatggtcctcgggaccataggcatggggttcgcctggcgttacgccggcaccatctggccggtgacgcgctggccgggcgagatcttggtggcgctggcggtggcgatctggttccttctgagcgtggcgtttcttacccgtgcggtacggtttccacatagcgtgctggccgagatgcggcatccggtaatgagcagttttgtcagcctgtttcctgccacaacgctgctggtggccattggctttgtgccgtggtatcgcccgctggcgctggggttgtttagcgtgggcgtggtgatccagcttgcgtatgccgcctggcaaagcgccgggctgtggcgcggcaagcatccggaagaagccacgacgccgggactgtatctgccgacggtagcgaacaattttatcagcgcgatggcctgcggtgcgctaggcttccacgacgcggggctggtgttccttggtgccggggtcttttcctggctgagcctggagccggtcattttgcaacgcctgcgcagcgcgggcgaactgcccgctgcccttcgtacctcgctcggtatccagcttgcgcctgccctggtggcctgtagcgcctggtttagcgtcaacggcggcgaagcggacaccttcgccaaaatgcttttcggctatggcctgttgcaactcctgtttatgctgcgtctgatgccgtggtatctgtcgcagccgttcaacgcgtcgttctggagcttctcgttcggggtgtcggcgctggcgaccaccggtttacatctggggcagagcagtccgtcagggttctttcatgccctcgcggttcccctgtttattttcaccaacgtcatcatcgcgatgctgctggtccgtacttttatcttgctgatgcagggcaaacttctggtgcgcgctgataaggcactgcttatgcaatctgaggaaaaataa

SEQ ID NO: 116721 - DNA, 981 bp, Enterobacter cloacae
atgacaaaatatcggcttagcaatgaaacgcgtctctggcgctggcaggacggctcaacgccgtgcacaacgcctctcagacaaattattgccgtgaaggattttaacgatgtgaccagcgggactaaaggcggttgggttgaggatgaacacgcgctcgcccaggatggggattgctgggtttacgatgaaaacagcgtggtgtttgccggggccaggatatccggtaacgctcgcctcacccaaccctgcatcgtaagccaccgcgcacacgttggcggcaacggctggcttgacgcggcagaggtgagtcacggggcggtaataagtgacaacgtcaccattcagcactccaccgtacgcggggaatgccgtatcgcgggtgacgcgcgggtgctgcataacagcctggtgattgcagccaaagggctgacacccgaccgtgagcagatcctgcaaatctatgacagagccacggtcagccagtcgcgtattgtgcatcaggcgcaaatctacggcgatgccatggtgacctgggcctttgttgagcaccgcgccgaggtgttcgatcgcgccattattgagggcaacgcgctgaataacgtctgggtgtgcgactgcgccaaagtgtacggcaacgcccgtctgctggccggtctggaggatgatgccatcccgaccgtgcggtacagttcacaggtcgcggaaaacgccctcgtcgaaggcaactgcgtcattaaacaccacgtattaataggcggcgaggcgtggttacgcggcgggccgatcctgattgatgacaaagtggtcattcaggggcgggcgcgtatcagcggcgatgtcctgattgagcatcaggtggaaataacggacgatgcggttatcgaggcgctggagggtgaaagcattcacgtccggggagccaaagtgatcaacggcgacacgcggatcacccggacgccgctgctgggggcgctatag

SEQ ID NO: 116722 - DNA, 540 bp, Enterobacter cloacae
atgtcttcagaaatcatccccgttaaccaggaaatcgagcttcgcgccgtcgaagagcgctataccaccgatctgcataacctcgtaatcaaaaacaaaacctggctgcaaaccgcctttgactgggcgcagcatgtcggcagcgaagaggacacgcgccgcaacgtgcagagcaaccagatgttgcaccagcgcggttacgccaaaatgttcctgatttttatgaatgacgagctgataggcgtgctctccttcaacgcgatcgagcctgcgaataaggccgggtatatcggctactggcttgacgaagcgcatcaggggcagggtattctttctcaggcgctccaggcgtttatgcgctattacgttgagcgcggcgagatccgccgttttgtgatcaagtgtcgcgtggataaccagagcagtaaccgggtggcgcagcgcaacggtttcacgctggaaggttgtttgcgggaagcggaaatgctcaacggtcgctacgatgacgtgaacctgtacgccagaatcttcccgctatag

SEQ ID NO: 116723 - DNA, 1620 bp, Enterobacter cloacae
atggctgccctgagcggcacttctggccttgcttctctgttttcccaggcggcatatgctgctgactccgacattgccgacggtcagagccgtcgctttgacttctctgttctgcaatccatggcgcacgatctggcgaaaaccccgtggggcggtgcgccgcgtccactgccggaaacgctggccaccatgacgccgcaggcgtacaacgccatccgttacgatgagaagcagtcgctgtggaataacattgaaggccgtcagctggacgcccagttcttccatatggggatgggattccgccgccgcgtgcgcatgttctcgctggatcaaaccacctctcaggcgcgtgagatccacttccggcctgagctgttcagctacggcgatacgggcgtggatacccgccagcttgaagggcagagcgacctcggcttcgccggattccgcgtctttaaagcgccggagctggcgcgacgcgatatcgtttcgttcctgggcgcaagctacttccgggcggtggatgatacctaccagtacggcctctccgcgcgcggtctggcggtggatacctttaccgataccccggaagagttcccggatttcacctccttctggtttgaaaccgtgaagccaggtgataccacctttaccgtctatgcgctgctggacagcccgagcattaccggtgcctataagtttgtgatccactgtgagaagagccaggtgatcatggacgtcgaaaaccatctctatgcgcgtaaagacatcaagcagctcggcatcgcgccaatgaccagcatgtttagctgcggcaacaacgaacgccgcatgtgcgacaccattcatccgcagatccacgattcagaccgcctggcgatgtggcgcggtaacggggagtggatctgccggccgctgaacaacccgcaaaagctgcaatttaacgcctacctggataaaaacccgaaaggctttggtttgttgcagcttgaccgtgacttctctcattaccaggacgtcatgggctggtataacaagcgaccaagcctgtgggtcgagccgcgcaacaactgggggaaaggttccattgccctgatggagatcccgacaaccggcgagacgctcgataacgtggtctgcttctggcagccagagaaaccggtgcaggcgggtgatgagctggacttcaaataccgtctctactggagcgcgcagccgccggtgcgttccccgctggcaaacgtctacgccacccgtaccggtatgggcggcttcccggagggctgggcgccgggtgaaaattacccgaaagtgtgggcccgtcgctttgccattgacttcgtcgggggcgatctgaaggccgccgcaccgaagggcattgagccggtgatcaccctgtccagcggtgaagcgaagcaggtggagatactctatgtcgaaccgttcgacgggtatcgcattctgtttgactggtatccaacctctgactccaccgagccggtggatatgcgcctgttcctgcgctgtcagggcgatgccatcagcgagacctggctgtatcagtacttcccgcccgcgccggacaaacgtaactacgttgacgaccggatcatgcgctag

SEQ ID NO: 116724 - DNA, 774 bp, Enterobacter cloacae
atgaaattacgcgcgttagttgtcggcatgggactgttgtgttcattctcgtcgtttgccgctaccgagttgcgatacgggctggaagcggaatatccgccgtttgaaagccgcaatgcgtcaggggagctggaagggtttgacgtagagctgggaaatgccatctgtaaagccgccgcgctgaagtgcagctgggttgaaacctcgtttgatgcgttgatccccggtctggtggcgaaaaagttcgacgccataaactcggcgatgaacatcaccgaacagcgtcgcaaaagcattgatttcacccagcccatctatcgcattccctcccagctggtgggcaaagccggttctgcggtagaggctacccccgaagggctgaagggcaaaaccatcggcgttcttcagggttcaattcaggaaacttacgccaaagagcactgggaaaagcaccgtgtcaccgtggtgtcttataaagatcagaatatggcctggggagatctgctgaatggtcgcatcgatgcctcgctggtcatgtcagcggccgggcaggcaggtttcctcagtaagccgcagggtaaagggtttggctttatcggcaaaccggtgtcggacgacaccatcctcggcagtgggatcggctttgggctgcgtaagggggatgaggccaccaaaaagcagcttgatgccgcaattgataaagtacgtgccgatggcacgatcgctaaactggctgataagtacttcccgggtatcgatgtcagcgtaaaataa

SEQ ID NO: 116725 - DNA, 1170 bp, Enterobacter cloacae
atgactttgaaaacgccggtgcagacacgatccaaattgcccgatgtgggaaccaccatttttaccgttatcggccagctttcagcccggcataacgccatcaacctttctcagggtgcgccgaatttttcctgcgactcaaaacttatcaccggcgtgacccgcgccatggaggcagggcataaccagtacgcctccatgaccgggctgcaaccgctcagggagcgcattgcggacaaaattgccacgctctatggcacacgctatgacccggcgagtgaggtgctggtgaccgccagcgccagcgaagggctttactcagccatcagcgggctggttcatcctggggatgaggtgatctatttcgagccctcctttgacagctatgcgccgattgtgcgtctgcaaggggcgacgccgatcgccattaagctgacggtaccggattttgccgtgaactgggatgaagtacgggcggctattaccccgcgcacgcggatgatcatcgtcaatacgccgcacaacccgagcggacaggtgttttcagccgccgatctgcaccagctggcagcgctgacgcgccacaccgacatcatcattttgtctgacgaagtgtacgagcacgtcgtttttgatggcgaaccgcaccacggaatggcgacgcacccgcagctggcggagcgcagcgtgattatttcttctttcggaaaaacctatcacgtcaccggctggcgcgtgggttattgtgtggcacccgcggagctgatggatgagatatgtaaagtccatcaatttttaatgttctcggccgatacgccgatgcagtacgcgtttgccgaacacatgaccgatccgcaaacctggctgtcgctggcggcgttttatcagcgcaagcgcgatctgctgcaaagtttgctcgccgactcaccgttcaggctgctaccaagtgccggttcgttcttcctgctggcggattacagcggctttagcgacgagcgcgacagcgagatggtgaaaaggctgattgtcgagtacggggttgccaccattccgctgtcggcgttttatgccgatggcacggacaataagttaatccgtctctcttttgcgaaagatgaggcgacgttacgggcaggtgcccaggccctttgtcgggttacaccacgttaa

SEQ ID NO: 116726 - DNA, 843 bp, Enterobacter cloacae
atgtcgcgtcgttcatttccgctcaatgccgtagagacgttcatcgtgaccgcgcgtcacctgaatcttacccatgctgccagggagctttgtctgacgcagggggcggtaagccgcaaaatcgcttcgctggaaagctggttcggcttcccgctgttcgagcgccatgcgcgcggcctgcgtctctcctctcagggaagcgccctgctgccggagctgcaatctgcgtttgagcacctgctgaacgttgctgaacaggcgcgaacgcaccagaccgttattcgtctgaaagcgcctacctgcgcgatgcgctggctggtgccgcggctgctacaggtggagcgcgaacagccggaactccagattgcgctgaccaccaccaccgatcataacgtcaatttcaaaaccgaatcctgtgacgcggcgattgtgtttgggacacacatgagcgccggcgatctgctgttcgaagaggccttaaccccggtgatgagcccggtacgggccggttctgcgctggaaactctcaccttccttcaccccacgcgggacaaaacggactggacgctgtggctggcgaaacagccgggtccgccgccagctatgctcaaaaatcaacacttcgaaaccatggatctggccattaccgccgccattcaggggctgggcatcgccatcgcggatgaaacgctggtggaggaggacgtgcgcgccggacggctgatgcggccttttgacacaagcataaagacgggggcgagctaccggctggtattacgcgacgcacccggcccggaaaacgggctggatgcgtttcgcgcctgtctgctcagtcgaggctga

SEQ ID NO: 116727 - DNA, 1506 bp, Enterobacter cloacae
atggaaaatccctccgcccctgtggttgaaacgcgccagggcgcactgattggttttactgaaggcgatactcacgtgtggtgcggcattccctatgcggcaccgcccgtaggccagtggcggtggcgctccccgcgtcctcccgcgcgctgggatggcgtacgtccggcgacggcgttctccgcctccagctggcagagcagcgaaagctgtcaggagctgggtggcggcgatcccggccagttctctgaagactgcctgtaccttaacgtctggtcgccagtcgcacgcgccgatccgcttccggtgatggtctggctgcacggcggaggatttaccctcggcgctggcgggctgcctccgtataacggcagggcgctggcgaagcgcggcacggtggtggtgacgatcaattaccgtctcggacacctcggcttttttgcccatccggcgctggagggggaagaagagcgcgtggtgcataactttgcgctgctcgatcagatccaggccctggaatgggtgcgcgataacatcgccgcgttcggcggcgatcctgagaacatcaccgtatttggcgagtcggccggcgcgcgcagcgtgctgtcgctgatggcctccccgcttgcgcgaggactgttccataaagccattgtgcaaagcgggtacacgctgccggacacgccacgcgagcaggccatgcataaaggcgaagcgattgccgcccatttcggcctgcaaaatgccaccgcggaacagcttcgcgcgatcccgcctgaggcgttctggccgctgacctcgccgctgaatatcgcccctgcgcccatcgtgggggattgcgttttgcctgaggccatgctcgacgttttcttcgcggcccgccagcatcctgtaccggtgatgattgggtcaaacagcgacgaagccagcgtgatgtcggtgttcggggtcgatctggccgggcagatccagaagcttcgccgcgagcggcgctttggcctggggctgattaagctgctttatcctggcgtgaagggcgatgaggaacttggcaggcaggtatgccgcgacatggccttcaccactatgggatacgtggtgatgcaggcgcagcagcgggcgggcggcctgtgctggcgatactggtttgattatgtggccgaagcggagcacgcgacgtacatcaacggcgcctggcacggcaacgaagtgccctacgtgttcgatacccttggacaggtggaaccctcgcggcagtatgtaaatgaacgcgatctggccttcgccgctcaggtggcggactactgggtgagcttcgcccgggatgcgggggcacgcgatagtctggcagggcccacgcgctggcccgcctgccggaaagggcgggacgtgctgttacgtatcggtgtgaataaacatgcaggttttcggcttgaaaaccgcttcatgcgtgcccgtatgagcctcttcaaacgggtgatgaaacaccacgtcagcctcgactga

SEQ ID NO: 116728 - DNA, 1344 bp, Enterobacter cloacae
atggcgaacaccatcacggctgatgatattcgggaacacttttcgcaggctatgtcggcgatgtaccagcaggaagttccgcagtacggcaccttgctggaactggtggcggacgttaacctggtggttctggaaaataacccacttttacatgaacaactggcaaacgcagacgaactggcgcgcctgaatgttgaacgtcacggtgcgatccgcgttggcaccgcgcaggagctttccaccctgcgccggatcttcgccattatgggcatgtatccggtcagctattacgatctctcccaggcgggcgtgcccgtccactcgacggcgtttcgtccgacagacgatgcagcgctctgccgtaatccgtttcgcatttttacctcgttgctgcgcctggagctgattgaaaacgttgcgctgcgcgaaagggcggcggagatcctctcccggcgcaacatctttacgccgcgctgcctggaactgatcgacctgcatgatgcgcagggacactttactgaggcacaggcgcgcgaatttgtgcaggaagccctggaaaccttccgctggcatcgccatgcgacggtcgatcaggaaacctatctggcgctgagcaacgaacatcgcctgattgccgacgtggtctgtttcccggggtgtcatataaaccatctcacgccgcgcacgctggatatcgaccgggtgcaggagctaatgccgaagtacggcattgagccgaaaattctgattgaaggcccgccgcgccgcgaggtgccgatcctcctgcgccagaccagctttaaggcgctggaggagccggtgcttttcgcgggagaacacaagggcacccataccgcgcgtttcggtgagattgagcagcgcggcgtggcccttacgccgaaagggcgcgagctgtacgacagtctgttaaatcaggccgggaccggcaaagacaacctgacccaccagcttcaactgcgcgagatcttcagcgccttcccggacagcgaaatgttcctgcgccgtcagcggctggcttatttccgctaccgtctgaccccgacaggtgaggcgcatcgccacgcatttcgtcccggcgacgatccgcagccgctgatcgaacggggctgggttgtggcacagcccatcacctacgaggattttctgcccgtcagtgcggcggggatcttccagtcgaatcttggcaatgaaacgcaggcgcgcagccacggcaatgccagccgcaatgccttcgaagccgcgctcggctgtgcggtgtacgacgagttttcgctttacgaggaggcggaagcgcgcagcaaacagcgttgcggtttgctctga

SEQ ID NO: 116729 - DNA, 924 bp, Enterobacter cloacae
atggaaaaaaatggtctgttcagtcagcgcatacgcttgcgccatttgcatacttttgtggccgtcgctcaacagggaacgctggggcgagcggctgaaacccttaacctcagtcagcctgcactatccaaaacgctgaacgaactggaacagcttaccggaacccgcctgttcgatcgcggccgtctgggcgctcagcttactctcgtgggtgaacagttcctgacgcatgccgttaaagttctcgatgccctcaataccgccggtcaggcgctcaaccgcaaagaggagtcggccagcgacatcgtgcgcgtgggcgcgctgccaacggcggcgctgggtatactgcctgcggcgatcggccagttccaccgtcagcaaaagcacgccacgcttcaggtcgcgaccatgaataataccatgctgctggcgggcctgaagtcaggcgagctggatctgggcattgggcggatgtccgatccggaactgatgagcggcctgaattacgagctgctgttcctggaatcgctgaagctggtcgtgcgtccgaatcatcccctgttgcaggacaccgtgaccctgagccgcgtgatggagtggccggtggtagtctcaccaaaaggaaccgttccgcgtcagaatgcggaggcgttgctgcaaatgcagggctgcacgctgccttccgggtgtattgaaacgctttcggcgtcgctgtcgcgccagcttacggtggattacgactacgtgtggtttgtgccgtccggcgcggtgaaggacgatctgcgacgcggcgtgcttacggcgctgccggtaacatcgcccggcgcgggagaaccgattgggatcctgacgcgggtagatgccccgctctctgaaggcgcgcaaacgctgttaagcgccattcgtaaatcaatgcctctctga

SEQ ID NO: 116730 - DNA, 1692 bp, Enterobacter cloacae
atggacaacacaacatcgatgcaggcgcagcctaagctgagtttcttgcatcacatccggctggttccgctgttttcctccattctcggtggcattattctcctgtttgcattgagctcgggtctggcaggctatttcctgctccaggccgataacgatcagcaggatgtcacggcagaaatccaggtgcgcaccggtctgtcaaacagttccaaccatttacgtaccgcccgtatcaacatgatccacgcgggggcggcgagccgtatcgcggagatggaagcgatgaaacaaaacatcgctgaggctgagacccgcatcaggcagtcgcaggatggatttgccgcctatatgaagcgcaccgttcgcaccccggctgatgaagcgctggatggcgatctgaaagcccgctatgacgcctacatcgccggtatgcagccgatgctgaaatatgccaaaaatggcatgtttgaagccattattaaccacgaaaatgagaccgcgcgtccgctggacgatgcctataacgcggtgctgctgaaggcgataaaaatccgcaccgaacgcgccaacgcgctgacggcacaggctcacacccgcacccggctggggctgatgtttatgttcggcgcgtttggcctggcgctggcgctggcggtgatcacctttgtggtgctgcgccgtacggtgataaacccgctccagcgagccgctacgcgtatcgaaaatatcgcaaaaggcgatttgaccatgccggacgaaccgaccggacgcagcgaaattggccgcctgacgcgcgatctgcaaacgatgcagcacgcgctggtgacaaccgtgggcaccgtgcggcaaggggcggaggagatctatcgtggaaccagcgagatctccgcgggtaacaccgatctctcttcccgtaccgagcagcaggcggcggcgattgaacagacggcggccagcatggagcagctcaccgcgacggtgaaacagaacgccgataacgcgcatcatgcgagtaaactggcagaagatgcctccggtaaggccagccgcggggggcagatggtctccggcgtggtgaaaaccatgggtaatatttccaccagctcgaagaagatctctgaaattaccgccgtgattaacagtatcgcgttccagaccaatattctggcgctcaacgcggcggtcgaggcggcgcgtgcgggtgaacagggacgcggctttgcggtcgtggcgagtgaagtccgcaccctggcaagccgcagcgcgaatgcggcgaaagagattgaaagcctgattaatgaatctgtgtcgcttatcgatcagggttccggggaagtggttgcggcgggcaataccatgaatgagatcgtcgaggcggttaaacgcgtcaccgatattatgctggagattgcagcggcgtccgatgagcagagccgcggcattgttcaggtgagccaggcgatttccgagatggacaaggtgacgcagcagaatgcctcgctggtggaagaagcttctgcggcggcggcctcgctggaagagcagggcgcacgtctgacggaggctgttggcgcgtttcgtctcatcggggcaggggctggacggactacagcccctgcaaccgcagcgaaatccgcgcctttaaccccggcggcggccgtctcaggtgataactgggaaacgttctga

SEQ ID NO: 116731 - DNA, 1119 bp, Enterobacter cloacae
atgaaatctcgcgcagctgtcgcgttcggcccaggccagccgctgaaaatcgttgaaattgatgttgctccgccgaagaaaggcgaagtgctgatcaaaattacccacaccggcgtttgccataccgatgcgtttaccctgtctggtgacgatccggaaggcgtattcccggcggtgctcggccacgaagggggcggtgtggtggtggaagtgggtgaaggcgtcaccagcctgaagcccggcgaccatgtgatcccgctctacaccgcagagtgcggcgagtgtaagttctgcaaatccggcaaaactaacctctgccaggccgtgcgcgccacgcagggcaaaggacttatgccggacggcaccacccgtttctcctataacggcgagcccatttatcactacatgggtaccagcaccttcagcgaatacacggtgtgcgccgagatctcactggcgaaagtgaatccgcaggccccgctggataaagtctgtctgctcggctgcggtgtcaccaccggtatcggcgcggtgcataacacggcgaaagtgaaagagggggacaccgtggcggtgttcggcctgggcgggatcggtctggcggttatccagggcgcggtacaggcgaaagctgggcgtatcattgctgtggataccaacccggagaaatttaagctcgcaggtgagatgggggcgaccgactttatcaacccgaaagactacgacaaaccggttcaggacgtgatcgttgagctgaccgacggcggcgtggactttagcttcgaatgtatcggcaacgtcaacgtaatgcgctcagcgctggagtgctgccacaaaggctggggcgagagcatcattatcggtgtggccggcgcgggtcaggagatcaaaacccgtcccttccagctggtgacagggcgcgtatggcgcgggtcagcatttggcggcgtgaaaggccgtactcagctgccgggcatggttgaagatgcgatggtcggtaaaattcagcttgatccgttcattacgcaccgcctgccgctggagcagatcaacgaagccttcgatctgatgcacgaaggaaaatccattcgcactgttatccatttcggcgacaactga

SEQ ID NO: 116732 - DNA, 276 bp, Enterobacter cloacae
atgccgcattcacccgaagataaaaaacgtattctgacccgcgtccgccgcattcggggccaggttgatgcccttgaacgcgccctggaatcgggcgatccctgtctcgccattttgcagcaaattgccgccgtgcgcggcgctgccaatggtctgatgggggaaatggtcgaaattcacctcaaagatgagctggtgacgggggagaccaccccggatcagcgggcagtgcggatggcggaagtcggccatttactgcgctcttatctaaaataa

SEQ ID NO: 116733 - DNA, 312 bp, Enterobacter cloacae
atgaaaagaattgttctcgcctctttggttgtagctttttcgttatctgctaacgcaaatcaattaagcattgatgaccaaattaataatgcttgcgctaaggccttaagcggtgacaaagaacctttgggtgacttcccgccagatagttatgctgcaacagtcagtccgaaagttaaagatgcttacaacgaagttttaaaatctcggtcctctattgtaaacgatcagagtttacagaatgcaaccagttgcgccaaccttgttagagataaactgaaatcaaaaggtgagtacacagaagaaaaataa

SEQ ID NO: 116734 - DNA, 624 bp, Enterobacter cloacae
atgattgtactaaagagctttttattcttcgttggcgcagcagccgcttgcgcacttattgtactgtgtctttgggttgatatgcggtttgtcggccatgatattccggaattatcactgaccgaaattatgcaggaaacggtattagcgactattgtctttctccattttcgtctggcgaaaatgaacgaatccatgcgttactgtaatattctggtgggcggatttttcctgacaatgctaattcgtgaactggacgcgctttttgatctcatttctcatgggagttgggtgtggttcgcgctgattaccgctctgctggcgttaattcgccccgttatgcattttcgcgctaccctggaacagctggcaaaatatacccaatccccctggtacggcattctgttgagcggcctgctggctgtactggtcttctcccgcctctttggaatgcaggtgctgtggcacgacatcctggagcatggctatatgcgtgtcgtgaaaaacgccgtggaggaaggttcggaatcattcggctatatgctgtgcctggccgcatcccttggctattacgttacctttcacactcacgcacggcagaaacagtctcttcgcgctgcgtag

SEQ ID NO: 116735 - DNA, 273 bp, Enterobacter cloacae
atgtctgatttcgacactgataaaaatgcacagtacgctggcgataaagccaaaaacaaacttgatgaattatccggctctgcgcagcagcagtttggtgaattcgttgattcccctaaacaccaggtgaaaggtgcagcgaaaaaatatgctgcccaggccagtgatgccgtctcggatgtcactgaagccgtcagaaacaatcccttaacgggcttaatcgctgcgggtgcggtaggtatcgttctgggacttctgctgggacgtaaataa

SEQ ID NO: 116736 - DNA, 240 bp, Enterobacter cloacae
atgcgtcgcaaccatgctccctctacagcagaaagcgctatcaccttgtattttaacaaggataacgtccctacacagcaggaaacccttggtgccatcgtcagtgagatcatcaaagaaaatgtacaactgagcagaatgacaatctgtacaaagctgttgcgcagaattgaagagtcaacgtctgacgttgagaaagcgcactataacggtctgatagccctcttcttcgagcgttaa

SEQ ID NO: 116737 - DNA, 300 bp, Enterobacter cloacae
atgcatagaactaaatttgaacgacttaaggatgaccttatcggtgaggccgtattatccatactgaaagagaacggacctattacctttgtgtctcttgctaatcgcctgcgggcgatggctaacgttgaatcaaatgatgaacgtaaaaatgcattgattgccgctgaagatgaagtgcgccagcgtgtaaccggcgtctcgcacgaccggggaagagtgatgggcgattatgaaattgggcgcatgcgctctctctttactcacaacacgcttctgaccccagacaagaaacactaa

SEQ ID NO: 116738 - DNA, 264 bp, Enterobacter cloacae
atgcagcagacgtataattttgaagccctgcacgataaagaactggcggaacattttcttaatgctggaaagcatctcagtggtgaggttgaagtgttgggctcggcaatacgctgtattatgctgaccggtgacaatctctcaaataaagagattatcctgcaactgattcacgccctcgaaattaccgaggagcccgaagcctgcgatgtcattcgaaacacgcttgaaattgttgtcggttttacgcgcgatgatatctga

SEQ ID NO: 116739 - DNA, 1458 bp, Enterobacter cloacae
atgtctcaaaacttaccttttatgcaaggtacttgctacaagcaacgattcgttatttcagcctgcggtttcaccttcgaggggtatagcctgcttctgaagtctcgtggcgtaaacgccacgcggctccattttgaagaggatgaagtttgctcaggtgatgtgcaaaaaatgatgcaaaatcaacagcctgaagtttctgtttttcctggtcgcgacgtcgctgcctttcttgaaagcctgaaacggttggtctcggttctgaatgcactgccggttatttgtagcgtgaccctgtatggtgcaataccagagagatggctttatgccacgctgaaaagtctcgttaataataccaaatcgttgtcgaggatcagggtggcgaatattttagaggtaatgaattgtgtagagagtatttctgatgtgcatgccgattcgtcacgtttattgcgtgaaggacctgagaaggaaggtaaggaaagcctgcatggtttaacaaaacgtgagttaaccgtattgctgaatttttatcgaggtatttcgataaaagagcagtcagcgaggttaggtttgtcagataaaaccatttatactcatcgtaaagtggggttgggtaaattatatcttatcagagtgtggtttagcgatgcacgtgtcttaagggatgaggtctgtgcagtaaagaacaaaacgcaggggttttcggaagcagaaataaatatattgcaggcgttacataagcgggaaatctttgcggcttatcaaattattaccgatggcgataaaaaaggagtgggctttgaaattctgctgcgctggcataaaaacggtcaggtcctgaaaccaggccaatttctggatgggataaaaaatggcgaaatttggctcaagctgacggcgttagtcattcacgcggccgtatcaggtatcaacagatacaatggaaaatattatttttcggttaatattcctcctcaactggctgccgggaacgcgctgccgggaatggcgaaaaaagccgttgaaatgttactgaaaccgcagtgggccgggaaacttgtcttcgaattagctgaaaccattgatgtaacaaaggatccaaatattcctgtcactctccagcgtttacgcgccgagggatgccggctgtttctggatgattgcttttccagaaattacgctatgttacccatccgacagattaatgttgatggactgaagcttgaccgtgatatagttgagcactttgttgctaacgacaatgacaatagcattattaaagcgatacagatatacagcgacatgacgggaagggaatgcgttgcggaaggcgtcgatagcgaagaaaaatttgaaaaacttgtcgcattaggggttaagcgcttccagggatattatctttcccgggcggttaaagaagatgagctggatcgaatggtacggctatttagttaa

SEQ ID NO: 116740 - DNA, 885 bp, Enterobacter cloacae
atggataatcacatttcatccagggctttgctacatcgaagggatgttattaaaaacaacccgcgatttggtgaagctataacagagcactacagaattaatgatgccatttataaaaaacaacccttgttctacaaaacgatgcttcaggaatcacgcttcaacataatactgtcaatgtgttgttttgtttttggtaatcaggctgagtcagtttcagagataaaggcactgtgtacccgctataatatcgccagtcctaacagtgttatcgcgatcatcaccatacttaagaccaccgggcgaattaagacctggcgctgtaccgaagatcgccgaaaaacaaaaatcgcgccaacggaaaaaggactggatgagctgaaacgctatatgtccggggcgtttacgcctgttagcattctttttccgacattcaatataaatgctaaccttctggacaatgatattctgaggcacaattttttccggcgcgccgcagagtaccttttccgcggattaacattcaggaaagtgcttccggaggtgggtttatttattgataaggatggtggccgaatgattatgctctatctctatttgcaggccatcaaaaacaaaacaacacatggtgccataatagcgtattcagccagcacgctggcaaaagaatttttcgtttcgcgtattcatgttaaacggattatcaaatcggcgcaggaggcaggttatcttaaagatcgcggcgatggccggatgtcaatttacccggcctttatcgagctggtcgaaaattatgccggattatattttgcgtatgtcacacattacatcaacgtggtaccaaaagaacgacgccatgctgtcaacatgacgcctacactctga

SEQ ID NO: 116741 - DNA, 1176 bp, Enterobacter cloacae
atgaatgatttctcccgctttaacagccggctgaaggagccccgcctgccgcgttcgtcgctggtggcatggtcgctgtttgccctgctggtggtctttattacctgggccagcctgttccagctggatgaggtcacgacgggcagcggcaaggtgatcccgtcctcccacgagcaggtgatccagtccctggaaggggggattatccacagtctgatggtgcgcgaaggcgatatcgtcgagcgtggtcaacagcttgcccaactggaccggacgaaaaccgagtccagcgtgctggagagcgagtctcgattaaacgctgcgatggcgacggccgcgcgtctgaatgctgaggtgaacgacaccgcgctgacattcccggcagagctggatgacgacgttgagttggtcaaacaggaaacggcgctttatcagtcacgtcgcgaaagcatggaaaaagggctggcgggtttacgccagggagcggatctcgtgcagcgtgaactggcattaacgcgcccgctggtgacgcagggggcagccagtaaggtcgaagtcttacgccttgaacgtcaaaaaaatgagctggagagcaaaatcaccgagatgaaaaaccagtactacgttcgcgcccgcgaagaactggcgaaagcgaacgcagaaatggaagcgcagcgttcggtcatgaaagggcgcgaagattcactcacccgcttaacgtttaatgcaccggtgcgtggcatcgtgaaggacattgacgtgacgacggtgggcggggtgatcccgccgaacggcaaactgatgagcctggtaccgcttgatgaccagatggtgatagaagcgaaaatctcgccgcgcgatgtcgcgtttatccatcccgggcaaaaagcgctggtgaaaatcaccgcctatgactactcgatctacggcgggctggaaggggaggtgacgatgatttccccggatacccttcaggacgaggtgaaacgggatgtttattattatcgcgtttatattcgtactgacagtaaccatctgaccaacaggcagggcaaggaattcccggtgttcccgggcatgatagccacggttgatatcaaaaccggcagtaaatccgtcattgattatctgctgaaaccattgaataaggcaaaagaggcgctgcgcgagcgataa

SEQ ID NO: 116742 - DNA, 2166 bp, Enterobacter cloacae
atgaagacacatccgcagtacgaaccctggttgcagggcatgctcatcatcgcgaaatattatcggctggatttttcggcggagcatgttcgggtcacgattaaccatgaaagccagtctccacgccagctggtgctggaggagatggcgcgccagcttgggctggggatgcgttgggtggcggcgggagccgtagcgctcgatccgtggcgtttaccgctgctggcggagttcaccggcgggcaaattgcggtcatcaaccgtatggacaacgaagggaacgtcagcgtgcagtttagcggcgacgggggcctggagacgacgctgacgcgcgacgaactcggttcgcggttaaaggggctgatggtgctgcgtcccctggagtccacgccggatgcgcgcgtggatgattacatcaaaccctatgagaaaaactggttctggcagctggcgctgaaagactggcgtcgttacagcgacataatgctggtggcgctggtcgccaacgtgctggcgctctccggcatggtcttttccatgcaggtatatgacagggtggtgccgtcccagtcggaggccacgctgtgggtgctgtttggcggtgtgatgatcgccatcgtgtttgaattcatcatgcgcatgctgcgggtgcatatttcggacgtggtagggaaacgcgccgacctgcgtatttccgagcgcgtgtttgcccacgccctgaggattaaaaacggcgcacggtcgaaatcgaccgggtcgtttatcgcccagatccgcgagctggagtcggtgcgggagctgatcacttccaccaccattgccgctatctccgatctgccgttcttcctgctgttcgtcttcattctgtggatgattggcggcccgctggtgctggtggtgctgctggccgtaccgctgctgctcattcccggcctgctggtgcagcgcccgctgggaaaactctccagcgaagggatgcgtgaatcggcgattcgtaacgccacgctggtggaagcggtgcaggggcttgaggacatcaagctaatgcgcgccgagcagaggttccagaaccagtggaataacaccaatgacgttgccgcgagcgtcggcatgaagcagcgctggctgacggggctgctgctgacctggacccaggaggtgcagtctatcgtctacgccgtggtgctgctggtggggtgttatctggttatcagcggcgacatgaccaccggtgcgctggtggggacctcgattctggcgtcccgcaccatcgcgcccctgtcgcagatttccggcgtgctctcccgctggcagtcggcaaaggtggcccgcaagggactggatgacctgatgcagcgcccgattgacgatccccagcacggcaaaaaagtgcataaagcccatctgcgcggtgattatcggctggacgacgtcgggttttattacgatgaagaagagaagcttaccgtgctgaatatcagcaaactgcgcattcgcgcaggggagcgcgtggcggtgctcgggcggaatggttcggggaaaagcaccttgctgcatctgctggcgggaatgcaggagccacagcagggcagcattttgctggacgatattgctctcaatcatcttgacccggccgacgtgcgccgcgacatgcagttgctcagccagcaggcgcggctgttcttcggctccgtacgcgacaacatcctgatgggtaatccgctggcgacagacgaggaaatccatcaggcgctggtcaacagcggcgcgctggagtttgtgcgcaagcagaaaatggggctgaacaccatcatcaatgagggcggaacggggctttccggcgggcaacgtcaggcgctgctgctggcgcgcgcgctgatcacctcgccgaatattctgctgctggatgaacccaccgcctggctggataaggtcagcgagaagcagtttatccagcatctgcaccagtggctcggtaagcgccggacgctggtggtggcgacgcatcgtctgccgattctggacctggttgaccgcatcatcgtcctggaaaacggcaaagtggtgatggatggccctcgtgatgccattttacgccagcacggaatggccccgcagcaggcgccgcagcgcacggttaaactgaaaacggagggcgtggcatga

SEQ ID NO: 116743 - DNA, 4029 bp, Enterobacter cloacae
gtggtaatcgatctgacgaagcctgcggcggcgactattaccgtggattccgtctcgcaggataccggcctgtccgacagcgactttattaccagcgacaaccagatcagcctgaaagggacgctcggcgcggccctgggcagcggtgaccacgctcagatcagcctcgacggtggcgcaacctggactgacgtgagcgtcagcggcctgagctggacctacgttgacggccgcacgctggccgacggagactacaactatcagctgcgggtgattgacgacgcggggaatatcagcgccactaccagccaggtggtgaccattgataccgtcgcgccggacgccagcaaaacgatcgctatcgacagcatcagcgacgataccggcctgagcagcagcgactttatcaccaatgacacctccctgacgctgcacggctcgctcggcgcaacgctggccgacggcgaatatgcccagatcagcatcgacggcggggtcacctggcagaacgtgatcgtcactggcaacagctggtactacgtggacggccgcacgctgggtaaccagacctatgactactacgttcgcgtagtggatgcggcgggcaacgtgggtgccagcgctcatcagcaggtgacggtcgatacggtcgcgccggatgcggcgattacggtgaccgtggataacatcaccgtcgataccggcttcgacaataacgacttcctgaccagttcgacctcgtacacgctcaacgggacgctcggggccgaactcggggcgggtgagtatgtgcaggtgagcatggatggcggcaccacctgggtttacgccacggtaagcggcacccggtggagttataacgacacccgcaccctggccgacggcgactaccgctatcaggtgcgggttgtcgatcaggcgggcaacgttggggccaccaccacgcaggacgtgacggtggatacccaggcgccgcagtacggcatcaccattgacagcatcagcgaagataccgggcagtccgggagtgatttcatcaccatggacacctcgctgacgatcaacggctcgttgggcagcgcgctggccagcgacgagcgcgtacagatcagcctcgacggcggtaatacctggattgacactaccgtcactaaccagcgctggagctatacggatacccgcgatctggcagatggggattacacctaccaggtgcggatcatcgaccaggcgggcaacgtcggctcaacctcttcgcaggtggtaacggttgataccacgccgcctgacacggtgggaacggtggtcagctataccgacggggaaggtgaacgtacaggcacgtacggcgcatcagtcgcgacggacgatacctcgccgctgatcaacggtacgcttaaccgcgctccggaagatggcgaaatcgtgcagctttaccgggacgggatcttgctgggtcaggtcacgatgaacggcagcgcaagctggtcctatcaggacaacggcctgctcgacgggaatcacacctacattctgcgcgtcaccgacaaagccggtaactacacggaatcggatggctttgtgctgaacgtcgataccagcatcccgaccaccaccgcggcgattactgcccagaccacctcggataccacgccgattgtcagcggtacggtctccgcagacctggtgaacggtgaatatctggtggtgacggtgaacgggaaaacctacacctcccagaccggcggtgcggtggtcgtcgacccggatcacaatacctggtatctacagatcccggacagcgatgccctgagtgtggcgagttacgacgtaaccgcgcaggtgaagagtagcgcgggcaacggtaacaccaccggtacggcaaccggtagcctggtgatcgataccacctcggtgaataccgactgggcgaccactgcggggaacagcaacaactcaaccatgactctcggcatgaacagcagcgggctgtggaatatcatcgctaatggacagtcttattccagcagcgatgattcaacctatgccgggaatacgttaactaacacccgtagctactatgtggtgagccagacggcagctgactttgaccgtaacggcacgcaggatatctttgcgacggagaacacctacgcgggctctacgcaggtgatgtggacctacgatggcagcagctacaccgccagccagctggcgatgggaaccaccatctggtacggcggcgtaattgcctacgacaaaaccggcgatggctatcttgatctggcgtacggcgatgccggtatggactccctgacctacctggtgaataccaacggcgttctgtcgccggacggcaccggcggggaaggtggattctacggccagttcgattccgggcgtgaaatctccggcgtcgacctgaacaacgacggtaccgtggacatcgtgcagcacaccaaccgcagcggggcgtactcgctcaccgtgattaacaacaacgggaacggtacgctttccattggccagaacctgaccaacgtgtttgtggccaacgcctcgaataccaccacggcggcctccatgacgtgggcggactttaacggcgatggctacatggatctgtacctcggcagcagctacaacaacaacggcggggtgatttactacaacgacggtaccgggcagctttccacgaccaaaagcgcggtggaagcctctaacgccacggcgggctatctgtcggtggcggtagactggaacggtgacgggcagatggacatcatcaagctcagcacctacggcagctcacagacggcgaccctgttcaccaacaacggctacggctcaacctggacttcaagccagctggcttctgggctggccaacgtcaccggtgtcgccgcggtggactacaactgggacggtgcgcaggatctgctggtgtctcagcagaacggtaaggtggtgctggtgcagaacaatgcggagatcgctgacggtaccgcgatgcatctgcacattgtcgatagcgaaggcatcaacgcgtactacggcaatacggtcaatctgtataacgctgcgggcgtgctggtggcctcgcagatcatcaacgctcagtccggcattggctcgaacgatacctctgcgctggtgagtttctacgggctggatccgaacgaaacctactcggcggagatcgtgaagatcaccaacggcgtctcggataacgtcacctggaccggcctggacgcgggcaacggcaaagagggttatgttctcaccgccgaagcggccaccggcggccacagcggaaccatcaccggtaccgggtataacgacacctttatcgcagaggatgggacctatacctataacggctccggcggctggaatacccattccgactacgacacctggagcaataccggcggcatggacgtggtggattatcgtaatgccacctctgggataaccgttgatttgcgcctctcaacggcgcaggacaccggattcggtaccacgcggttgttgaatattgaagggattaacggctccgactatgacgacgtgatcaccggcaacagcggtgataaccagttcgaaggccggggcgggaacgacaccttcaacatcggcagcggcggtcacgatacgttgctctataagctgatcaacgcgtctgacgcgacgggcggcaacggtagcgatgtggtgaacggctttaccgtcggcacctgggaagggacggcggatacggaccgtatcgatctgcgcgacctgctttccgacagcggctataccggcaccggctcggcgagctacgtgaacggcgtggcgacgctggacagcagcgcgggcaacatcgccgactacatccgcgttgtgcaaaacggcagcaacaccgagatccaggttgacctggacgggacgggcggtcagttcacgcccaccacgctggtgacgctgaacggcgtgcagacggatctggcgacgctgttggccaatcatcaactgttaattgcgtaa

SEQ ID NO: 116744 - DNA, 13974 bp, Enterobacter cloacae
atgagtaccgcaaaagttgttgatgtcatcattcgcaaaacggcagagaagacgaaattaaccggtgaagggaatctctcggtctctatttcatcgccgagcgtgattgaaattcagggttcagctcaggacgtggtgcgttatgtccgccaggggaatgacctcctcatttatatgaaagatggcagcgtgatccgctgcaataattattttgtcgaagacacggaaacccataatcattccgaactggtatttaacgataaccaggagctgacgcatatttcatttgccgatgccggggaagcatcaggcgttgccgccaccgaattaaccgcccaggctgcacccattagcagcattgaacctttcctggagcagggaagcgtcttaagcgatgcgccgtggggctggattgccggtgcggcgttagggggcggtgcgatcggcgcactgctggctcacggcggcgatggcgaaaccaaaaccaaagttattgataatacaaaagaagtcgaaagcgccacgccgacatttttgctgacggacaacgcgggtgacaagcagggcgtgctgagtgcaaaagcggtcacggatgacaacacccccaccttcagcggtaccgggcagccgggcgcgaccattcaggttaaagacggcagcggcagcactatcgccagcaccatggtcgcgaaggacggcacctggacggtaacactcccgacccaggccgacggggagcatacctggtctgtcgtacagatcgacggcagtaaaacgacctctgcgggcagtatcaccgtaaccgtttctacagcggatgccagcgtgacgctcgccaccacggcgggcgataacgtgatcaacgccagcgagcagtccgctggctttacgctgtccggcaccagcaaaaacctggcgcagggaacggcgcttaccgtcacgctcaacggcaaaacctattccgcagaagtgggggcaaacggcgcatggagcgtgaaggtgcctgctgccgacgcgcaggcgctgggcgatggcacctggacggtcaacgtcagcggtaaagacgcggcgggcaacaccgtgtccggcagccagacgattggcgtcgataccgcctcgccagtgatctctgtcgacacgatcgcccaggacaacatcatcaacgcggctgaacataatcagccgctgacgctgaccgggaaaaccgatgcggaagcgggccagattgtgacggtcacgctgaacggcaaaaatcacacggcgaccgtgggcagcgacggcacctggtccgttacgcttccggccagtgaagtacaggcgctggctaacggcgagcacaccctgacggtaaacgtcagcgacaaagcgggtaacgggtcctccgtcaccgccgatttcacggtcgataccgcagcgccggtggtcaccatcaacaccgtcgcgggcgacgacattctgaacaccagcgagcaggggcaggcgcagattatttccggccaggcgaacggcgcggcagcgggcgacgttgtcaccgtgaccgttggcggcaagacctttaccggtgtcgtccaggcggacggcagctggagcgtcggcgtgcctgcctccgtcattggcgcgctgggggaaggtagccacagcatttcggtcgccgtgaccgatgcggcgggcaacaccggcagcgcgacgcacggcattacgctcagcggcaacccgccggaatttacctttgaccccatcagtcaggataacgtcctgaatgcgcaggaggccatgcagcccctgagcctgagcgggaccagtaatctgccgaacggcagcaccgtcaccgtgacgctgaacaacgttaactatcaggccacccttgagaacggtcgctggtccgttcaggtgccggtttccgacgtgctggatctggcgaataccctgtacaccgtcagcgtcagcggcaccgacagcgtgggtaacagcggctccgccgaggcgaatctgctggtcgataccgcgctgccgcaggtgatcgtcaacacctttgccggggataacctggtcaataacgccgaagcggcggttgaccaaaccctcagcggacgcgtcaccggcgcggcggcgggcgataccgtctctgtcaccgtgggcggcaagagctacaccgcgacggttggcagcgacctgaaatggagcgtgacgatcccatcggccgacctccaggcgtttggcgacggcgatttaaccttcagcgcctctgtcaccaatgcgcacggcaataccggcaccggcgaacgtgatatcaacatcaacgccgaactgccgggcctgcgcgtgaacacgatctctggcgatgacgtgattaacgccatcgagcagcagcaggatctggccgtcaccggctccagcactcatctggctgaaggcacacagatcaccgttaccatcaataatgtcgaatacgtcaccacggttaacgccagcggcagctggcagattggcgtgcctgcggcggaccttcaggcatggacggcgggaggcatgaccgtcagcgtcagcgcggaagatgcctggggcaacaccgtggcggctgaacacccgatcgagcttgacctgaacgcggtggccgtcaccatcgataccgtaaccactgacgatatgctgaacgcggcggaaaaaggcgcggatgtcacgctttccggtcagacgcagggcgtggaggccgggcagaccgtggtggtgaaattcgcggatcaaacctttaccgcacaggtgcagcaggacggctcctggcgcctgaccgttccggcgagcgcgatggaaacgctgatcgacgggcgggcgcaggtgagcgtcagcgtgactaacgtcaacggcaacagcgcggacgcttcacgcgtggtgatcgtcgatacgcagccgccagccattacgcttgataacctgaccgacgacaacatcattaatgcggcagaagcgcagcaggatctgatgctcagcggcagcacaaccgctgaagcgggccagacggtcaccgtgacgctgaatggtaaatcttaccagaccacggtccaggcggacggtcgctggcagctgaacgtgcctgccgccgacgttagcgcgctgagcgatggcaatgtcaccgtgacggccaccgtcagcgacgtggcgggcaacagcagcagcgcggaccgcgttgggctggtggatgccaccgtgccgcaggtgaccatcaacgatttcgtcaccgacaccaacaccgttaaccagctggcccatgctcaggcgcagatcctgagcggctccgtcaccggcgcggcggcgggtgatttggtcatcatcaccatcaataacgtggactacaccaccgtggtggatgcggcaggcaactggagcctcggcctgcctgcgtccgtcgttcaggggctgacggacggcacctggaccattaacgtctccgtgaccgaccaatccggcaacaccggcagcagttcagtggatgtggtggtcaatactgtgacgcccgttatcggtattaacacgctggccgcggatgacgtgatcaatgcggcagagaagggcgaagatctgctgctttccggcaccagcaaccagccggaaggaaccaccatcaccgttaatctgaacggtatcaactacaccgccaccaccgacgccagcggcaactggagcgttaccgtccccgcctctgcggtgagcgcgctgggtgaagccaattacaccgtgacggcgagcgtcaccgataatgtgggcaacagcgccgctgccacgcacgatgtactggtggacagctcgctgccggttgttaccctcaacaacttcgcgggcgacaatatcgtcaacgcggcggaagtggccgcagggcaaaccctgaccggaaaggtttctaacgcggcatcgggcgataccgtcacgattatcctcggcgggcagacatacacggccaccgtacaggacgatctcacctggagcctgccgttaacccagagtcagttaaccgcgctcggtaacggcgacctgaccgtatcggccagcgtgacgaacgcgcacggcaataccggatcgtcttccctggatgtcaccattgacgcccagctgcccggcctgcgcattgataccgtcgccggtgacgacgtcattaacgttattgaacacgcgcagaacctggttatcgccggcaccagcaccgacctggcggcgggtagcaccgtcaccgtgaccatcaacggcaagagttattccgcctcggtactggcggatggcagctggcaggctgcggttccggccgccgacgtctcccggtgggcggacgggtcgctcaccatcagcgccagcgcgcaggatacctccggcaacccggtgaatatcggtaccgttgtggatgtcgatctcgccccggtggcgataagcatcaacagcgtgacggacgacaacgtgcttaacgcggcagaaaaaggccaggatctggtgctgtccggctcctcctcgaacgttgaagcgggccagaccgttaccattatctttgcgggtaaaacctggaccacgacggtcgatgccaacggcgactggacctgcaccgtaccggctgccgatctgagcggcctgaaggacggcgacgccagcgtacaggtcagcgtcaccaacgtgaacggcaacgcagcctcttcctcgcaggcattcagcgtcgataccgccgcgccagcggtcaccatcaacaccatcagcggcgacaatatgctgaatgcggcagaggcggcgcaggatctgaccctgagcggaacatctactgccgaagcaggccagacggtcaccgtgaccttcaacggcaatcagtacaccgcccaggtgcaggcgaacggcagctggacgctggacgttccggcggcggatctggcggggatcgccgacggcagcgcggcggtcacggtgaccgtgtccgataaagcgggcaacccggccagcgcgggggcgtccgtgctggtcgacactaccgtgccgcagattaccttcaacattgtggcgggcgacgacattgttaatattgccgagcacggccaggcgctgattgtcaccggcaaggtgacgggcgcgcaggcgggcgatgtgattaccctgaccctgaacggcaaagactacaccgcgatgctggatgcgtccggcaactggagcgtgggcgttccggcgacggacgtgggcgcgctggctaacggcgatcagacgatctccgcgacactcaccgataaagcgggcaacagcaccagcgcgacgcacgcgtttgacgtctccctgaccgcgccggtgattaccatcaataccctggcggttgacgacgtgatcaacgcgaccgaaaaaggccaggacctgttgatctccggcaccagcaaccagccggacgggacccgcatcaccgtaaccctgaacggtatcagttacgccgccaccaccgatgccagcggtaactggagcgtcacccttccggcggcaaacgtctcggtactgggcgaagcgagctacagcgtgacggccagcgtgaccgataccgcgggtaatagcgcgaataccagccatagcgtgctggtcgacagcgcgctgccgcaggtcaccattaatgcggttgccaccgacgacgtgattaacgcggcggaagtggcttccggacaaaccctgagcgggaaagtgagcggcgcggcgagcggtgacactgtcacgatcggtatcgggggcaacacctataccgcgacggttcaggacgacctgagctggtcggttaacgtggcgtctgacgtcttaaccgctatcggtaacggcgatctcaccgtaactgcgagcgtgaccaatggccacggcaacaccggcaccggcgaacgcgacatcacgattgatgccagcctgccgggcctgcgcgtggataccgtagcaggcgacgatgtgatcaacagcatcgaacatggtcaaaacctgattatcaccggctccagcgacgggctggcgagcggatcggcgctgacggtcaccgtcaacggcaaaatctacgcggcaaccgtgctggcggacggcacctggacggcggctattccggcggcggacgtcggcgcgctgagcgcaggcacgatcaccgtgaccgttgacggccagagcgcggcgggtaacccggtttccatcagccacgacgtgaaagtggatctggcggcagtcgccatcagcattaatccgattgcttctgacgacgtaatcaacgcggctgagaaaggcgcggacctggtgctgtctggctcgaccaccaacgtggaagaaaaccagaccgttaccatcaccttcggcggcaagttgtacaccgcgacggtggatgccagcggcaactggacggcgaccgtaccgtctgccgatttgggcggactgaaagacggcgacgccagcgtgcaggtaagcgtcaccaacgtgaacggcaacagcgcctcggcgggccgcgaatacagcgtggacgccaccgcgccgacggtgtccatcgagatcgtcagcgacaacaacatcatcaacgcggccgaagcgcagcaggatctggtcgttaacggtgtctccaacgccgaagcgggccagaccgtgaccgtgacgctgaacggcgtggactacaccaccaccgtacaggcgaacggcagctggagcgtcaccgtaccctctgcggatatcggcgcgattaccgacggcgattacaccatcacggcagccgtcgcggataaggcgggtaacccggcctcggcggaccgcgatgtgctggtggataccacggtgccacagctgaccattaacaccgtttccgacgacgacgtgatcaacagcgccgagcatgcgcaggcgctgattgtcaccggttccgtgaccggtgcggcggcgggcgacgtggtgaccgtcaccatcaataacaaagattacaccgcgaccctggacacttccggcaggtggagcgtgggcgtgcctgcggcggacgtgagtgccctggccgccggggattacaccatcaccgcggcgctgaccgataaagccggaaacagcaacagcacaacgcacgaggttgaagtcaacctcaccgcgccggtgctgaccattgacaccgtgtccggtgacgatgtgatcaacagcagcgagaaaacgcaggatctgaccatcacaggtacggcttccgggctggcagcgggcgcggtggtcaccgtgatgctcaacggcaaagcgtacagcgccacggtggacaccaatggccaatggaccacaaccgttccggcgagcgaggtggggcaactgggtgaagcgctttacaccgtgtcggcctccgcgacggacagcgtcggcaacagctccagcacctcgcacaccgtgaacgtggaatccgtgctgcctggcgtcatcatcaacaccgtggcgggcgacgacgtgatcaacgcagcggagctggcaaccggccagaccattagcggcacagtggtgaatgccgaagcgggcaacaccgtgactgtgtctgttggcggccacagctacaccgcaacggtacaggacaatctcacctggtccgtcagcgtaccggaatctgtgctcaccgcgctgggcaatggcgatctgactgtgaccgccagcgtcacgaacggcgtgggcaacagcggcagcggcgagcgcgatatcaatatcgacgcgaatctgccgggcctgcgcgtggacaccgtagcgggcgatgacgtgattaacagcatcgaacacgggcagaatctgattatcacgggttcaagcgacggcctgacggcgggtacggcgctgaccgtcaccgtaaacggtaaaacctatccggccaccgtgctggcagacggcacctggagcgcggcgatcccttctgcggacgtgagtgcccttgccgcaggcacggtcaccgtgaacgttgaaggccagagcagcgcgggcaatccggtgactatcaaccatgatgtgacggtggatctggcaaacgtcgccatcagcattgacgccatcgcttccgatgacgtgatcaacgccgccgagaggggtgcggatctggtgctctccggcaccacctcgaacgtcgaagaaaaccagatcgtcaccatcaccttcggcggcaagaactacaccgccacggtggacgctgagggtaaatggaccgccacggtgccgtctgcggatctgaccggtctgaaagacggcgacgccagcgtgcaggtcagcgtcaccaacgtgaacggcaacagcgcgtctgcgggacgcgagtacagcgtggatgctaccgcgccgtccgtgaccatcaacatgattgccaccgacgatatcctgaacgcctcagaagcgcagtccgacctggcaatctctggcaccagcaccgccgaagcaggccagacggtgaccgtatcgctgaacggcaaagattacaccacaaccgtcagcgcgaacggcagctggacgctgaacgtgccggcagctgaccttgcaggattaaccgacggcagcgtcaccgtgaccgcggccgtcagcgacaaggcgggtaacccggcgtcggtggaccacaacctgacggtggacgtcaccgttccggcagtgaccatccacaccgtggcaggcgacgacgtgattaacgtggctgaacacaatcaggcgcagattatcagcggctccgccaccggcgcggcggcgggcgataaggtcaccgttaccatcggcggccagtcgtacaccaccgtgctggatgcggcgggtaactggagcgtgggcgttccggccagcgtcatttccggcctcagcgacggcagcgtgaccgtcactgcgtcagtcaccgacgcggcgggcaataccggcagcggcacgcataatgtgaccgtcgataccggtctgccgtcggtcagcttcaacgccatcagcgatgacaacgtcctgaacgccgttgaaaaaggccaggatctgagcgtcagcggcaccagcgccaacctggcggaaggcaccgtggtcaccgtgaccctgaacggtaaaaactacacggcgacaactgcggcagacggcacctggagcctgacggttccggctgcggatctggccggtctcggtcaggccagttacaccctgaacgcgacggccaccaacggcgttggcaacagcgtgagcagttctgcgaacctgcttgtcgacaccgcgctgccaaccgttaccatcaacaccgtggcgggggacaacgtcatcaacgcggcggaagtggcggcaggccagacactgagcggcaccgtggcgaatgccgaagcgggcaacaccgtgaccgtgactatcggcggccacagctacaccgcaacggtgcagaataatctgtcctggtccgtcaacgtgccgtctgacgtgctgaccgcactcggcaacggcagcctgagcgtgacggcgaccgtcaccaacggccacggcaacaccggcaccggcgaacgcgagatcgctatcgacgctaacctgccgggcctgcgcgtgaataccgtggcgggtgacgacgtggtcaacaccatcgagcacgcgcagaacctgattgtttcaggctccagcgacgggctggcgccgggcacggcgctgacggttaccgtcaacggtaaagattacgcggcaacggtactggcagacggcacctggagcgcggcgatcccgtccgccgacgtgagcgcgtggccggaaggcaccgtgaaaatcagcgttaccggtgacagcgcggcgggtaatccgatcaccatcagccacgacgtgaccgtggatctgactaccgttgccatcagcatcaatgcgcttgccaccgacgacgtgattaacgcggcggagaagggcgcggatctggtgctgtccggtgtgaccaccaacgtggaagccgggcagaccgtgaccatcagtctgaacggcaggatctacaccaccaccgtggacgacagcggcaactggacttacaccgtgccgtcagcggatctggctggcctgaaggatggcgacgccagcgtgcaggtgagcgtcaccaacgtgaacggcaacagcgcctcggcgggccgtgagtacagcgtggatgctaccgcgccgtccgtgaccatcaacacgattgccaccgacgatatcctgaacgccacggaagctcagtcagacctggcaatctccggcaccagtaccgccgaagcaggccagacgctgaccgtatcgctgaacggcaaagattacaccacaaccgtcagcgcgaacggcagctggacgctgaacgttccggcggcggatctggcaggattaaccgacggcagcgtgacggtcaccgcctcagtcagcgacaaggcgggtaacccggcgtcggttgaccacaccctgacggtggacgtcaccgtacctgcggtgaccatccacaccgttgcaggtgacgatgtgattaacgtggctgaacacaatcaggcgcagattatcagcggctccgccaccggcgcggcggcgggcgacaccgtcaccgtcaccatcggcggccagtcgtacaccaccgtgctggatgcggcgggtaactggagcgtgggcgttccggcgaatgtgatttcaggcctcagcgacggcagcgtgaccgtcactgcgtcagtcaccgacgcggcgggcaataccggcagcggcacgcataatgtgaccgtcgataccggtctgccgtcggtcagcttcaacgccatcagcgatgacaacgtcctgaacgccgttgaaaaaggccaggatctgagcgtcagcggcaccagcgccaacctggcggaaggcaccgtggtcaccgtgaccctgaacggtaaaaactacacggcgacgactgcggcagacggcacctggagcctgacggttccggctgcggatctgtcaggcctcggtgaagccagctacaccctgagcgcgacggccaccaacggcgtgggcaacagcatcagcactacggcgaacctgcttgtcgataccgcgctgccaaccgtcaccatcaacaccgtggcgggggacaacgtcatcaacgcggcggaagtggccgcaggccagaccattaccggtaaggtggcgaacgcggacatcggtaacaccgtgacggtgaacatcggcggcaacacctataccgcgacggtgcagagcgatctgacctggtccgttaacgtgccggaatccgtcctgaccgcgctgggcaatggcgatttaacggtgtcagcaaccgtcactaatgaccatggcaatacgggaacgggcgagcgcgatatcactatcgacgccagcctgccgggcctgcgcgtggataccgtcgcgggcgacgatgtgattaacagcatcgagcatggacagaacctgattgtcaccggctccagcgacggactggcggcaggcactacgctcaccgtgaccgtcaatggcaaaacctatgcggcctccgtgctggcagacggtacctggagcgcggcgatcccggcagcagacgtcggggccctggctgcgggcacggttaccgtgaccgttgcaggccagagcgcggcgggcaatccggtctctatcagccacgacgtcaccgtcgatctggcagccgtggcgatcagcattgatgccatcgccaccgacgacgtgattaacgcggcggagaaaggcgcggatctggtgctttccggcagcacctccaatgtggaagagaaccagaccgtgaccatcacctttggcggcaagtcttacaccgccaaagtcgatgccgacggcaactggacggccaccgtgccttcctcggatcttgcgggtctgaaagacggcgacgccagcgtgcaggtgagcgttaccaatgtgaacggcaacagcgcgtctgcgggccgggagtacagcgtcgatgccacggcgccaaccgtgaccattgacacggtagccggcgacaacgtgatcaacggcagcgaagcggctgcgggcgtggccatttccggcaccaccacggctgaagtcggtcagacggtaaccgttaacctcggtggaaacagctataccgcacaggttcagcagggcggcgtctggagcattaacgtgccggccgccgatctgtccactctggcggataacggctacaccgtgcaggtgagcgtgagtgacgccgcgggtaacccgggcagcgcgggcaaagcgattacgctcgatactacgccgccgaccgtcagctttaacgtcgtggcgggcgatgacgtcatcaacagcgttgagcacgggcaggcgcaggtcatcagcggcaccgcaaccggcgccagcgtcggcgataagctggtcatcacgataggttcgaaccagtacaccaccaccgttgacgccagtggcaaatggagcgtgggcgttcctgccagcgacatttctgccctgaccgacggcaccgtgaccctcagcgcgacaatcaccgacagcgcgggcaacagcagcacccagacccatgacgtggtggtaaataccgcatcggtcgcgctgaccgtcaacaccctcagcggtgatgacgtgatcaatgcggcagaagcgggggcgtcgctggtcatcaacggctccagcgcgcagtttgctaacggcacgcaggtcactatcaccctgaatggtaagagctatacggccactatccagagcgatggctcctggacaaccaccgtaccggccgccgacgtgggcaccctggccgacggcgcgagctaccaggtttctgtttcggcgcaggacagcgccgggaacagcgcctcggcgacgcacaccatcagcgtggacaccaccgcgccggtgattagcgtgaacacgttgtcgggcgacgatgtgctgaatgcggcggaagcccaacagccgctcaccgtacacggctcttccagcgcggaagcaggccagacggtgaccgtcacgctgggcgggaaaacctacactgcgcttgtggcaaacgacggcacctggacgctcgacgtcccggccgccgatcttgccaacctgagcgaaggcgcgctgacggtcaccgcgtcggtgaacgacaaggcgggtaataacggccagacgacgcataccttaacggtcgataccgtcgcgccagccgtgaccatcagcaccgtggccgatgacgatatcgtcaacaacgccgagcagctggcgggacagaccatcagcgggaccaccaccgcggagcagggccagacggtgaccgtctccttcaacggccacagctatcaggcgaccgtggcggcgaatggctcctggtccgtcttcgtgccgggacgcgacttcctcggactgagcgacggggattacaccattacggctacggtgagcgataaggcaggtaacccgggcagcgcaacgcacgacgtgacgctgaacggcgacgtgccgaccatcgccattaacacctttgcgcaggatgatatcgtcaacgccgccgagcacggcacgccgctggttatcagcggcaccaccgatgcgccaacgggccagacggtgaccattacgcttaacggtaaaacctacacggctaccgttcaaaatgacggcacctggagctatacggtcggcagcgcagacgtgaccgcgctggcggacggcggttcgtacgtgattaacgcgcaggtgagcaacgccatcggcaacagcgccagcgataaccataccgttaccgtggatctcaccgcaccgtcgatggggatcagcattgattccctgcaaaacgataccggcctcagcgcgaatgacttcatcaccaacgacagccaggtggtggtgaatggttccctgaccgcgcagctcggcaataacgagaaagcgcagatcagccttgacggcggtactacctggattgacctgaccgtcaccggcaccacctggcgctacaccgatggccgtaccctgaccgacggtacgtaccagtaccaggtgcgcgtgatcgacaatgcaggcaacgttggggcaacggacagctag

SEQ ID NO: 116745 - DNA, 1338 bp, Enterobacter cloacae
atgaagatgaaatgcaataacaggttgctcagattatctgtctccctgaccttaatttcgctggtggtgactgcggctaatgcaaataacggccagacggggatatctcccgttgcggcaatgacgatgaaagaaagtattcttttcgctctcgatcgcgacccctcggtgagccagcaggcagcgcaactggggatcggccaggcacaaatagacgaagcgcgcagtggctggatgccacaaatagccctgaacgggagtacgggtcacagccagaccaccgattcaagcggctcgttgcgaaattccgcagcctggggcctgagcctgacgcagctggtgtacgattttggcaagaccaataacagcatcagccagtcttcagctcagcgtgacagctatcgctaccagctgatgagcacgatgtctgccgtcgcggaaaaaacggccctcagctatgtggaagtaaaacgctacagcgatctgttgcaggcggcaaaagagaacgtgcaggcgcttaaaaacgttgagcaactggcaaaactccgcgccgatgctggcgtaagctccacctctgatgagcttcagacccgcacccgtatcgccgggatgcaggcgacggtagagcagtataatgcgtctctgaacagcgcccgcgcgcggctggcggtattaactggcatacaggctgaacgctattcaccggttccgggaggtctggccgtggagccggattctctcaatcgaattgattattcactgatcccaacggtgatggccgcgcagaacatggagcgttcagcccaatacggcgtagaaaccgccaggtctcagcactggccgaccttaagcctgaaagggggccgcacccgctatgagtctgataatcgcgcgtactgggatgatcagatccagctcaatattgacgcaccgctttatcagggcggcgcggtctcggcgcgcgtccgtcaggccgagggcgcaagggcaatggcatcgtcccaggtcgatcaggcccgttttgatgtcctgcaaaaagcctccgtcgcacaggccgactggaccggggcgcgtggacgaatggaagccgggaagcgtcagctggaaaatgcgttgcgcgcccgcgatgtctacaaaaatgaatataccctgagcaagcgcagcattaacgatctgctcagcgtggagcaggatgtctggtctgccacctcagcgaaaataatggctgaatacgatggctggagtgcggcgattaattacgcctctgcggtggataatctcttgccgcttatcggaatagagaaaaacgctgccgcgaaattacctgatttaagttaa

SEQ ID NO: 116746 - DNA, 744 bp, Enterobacter cloacae
atgcataaaaccgccagacagaaatatgtgcttgatatcattactgaacaaggccaggccagcattaccgagctggcagagcgattgcaggtttcggcggacaccatccgtcgcgatctgaccgacctggaaaaacagggactggcacaaaaaaaccatggcggcgccatcgcgctgaatctctcgacgatgacccgagtaagcaggaatagcttgctccctgaaattaagcagcggctgggtaaacaggttgcgcaatgcgtgcctgcgggctcgacgctttttctggacgccggaagcacactgctggccgttgcctctttccttcaggggccgctgaccatcatcaccccttctcttgatatcgcccagcaggttagcgatcgggaagatattgacctgatcctgctcggtggaaagtgggatcagaaacaacgcctgtttgccggaagcgccaccctttccctgctctctcgctaccgggcggatattgccatccttggcgcatgcgccatccatgccgaactcggattgagcgccagtcaggaggcggatgccgaagtgaagcgtgccatgctggccgcaagccaggcgcactgggtagtcgccgaccatctaaaactcaaccagtgcgaaccgtatctggtgtcagggttatccgagattcatcaactgtttttagatcgtccctgggcagagctcggggaccatagcgccttgcaggttaccgttggcgcgcattaa

SEQ ID NO: 116747 - DNA, 1068 bp, Enterobacter cloacae
atgaataaagtgaagacaatgaatattgcgctgatcgggtatggttttgtaggtaagacgttccatgccccgctgatccagtccgtcgaaggcctgaagctggcggtggtctcatcccgggatgaagagaaagtgaaacgcgacctgccggacgtcctcgttgtcgccacgccggaagaggccattcagcacccggatatcgacctggtggttatcgcctcccctaacgcgacccatgcgccgctggccaccctggcgctcaatgccggcaagcatgtggtagtggataagccgtttacgctggatatgcaggaagcgcgagatctgattgcgcttgcgcaagaaaaacagcgcctgctctcggtcttccataaccgccgctgggatagcgattttctcggcattaagcaggtgattgagcaaggccgtatcggtaaggtgaaacattttgagtcgcatatcgatcgtttccgtccggaggttcgcgtgcgctggagagagcaaaacgtgcccggcagcggcctgtggttcgacttaggcccgcatatgattgaccagacgctacagctttttggtctgccgcagtcggtacagggcaacatcgccaccctgcgtgacggcgcggagattaacgactgggcgcacgtggtgctgaattatccggaacacaaagtggtcctccattgcagcatgctggtggcgggtggcgttgcccgctttaccgtccacggcgataaggccagcgtggtgaaagcgcacatcgatcagcaggaagcccagctgctggcaggcgtcgttccgggtagcgaaagctggggtgaagacagcgacgctatggtgctgtttaatgcccagggtgaagccagcgctatccctgcgccaaaaggcgaccagcggcagtactatataaacgtgcgcgatgccctgaacggcaagattgacaacccggtccatccggtggaagccctggcggtgatggcggtgctggaagcggcggtaaaatcttcggaaacgggttcaactctggaacttgacttaacggcgcaggagcgcgcgcaactgcaataa

SEQ ID NO: 116748 - DNA, 603 bp, Enterobacter cloacae
atgcgagggggttcacattttcaggaaaggtggttatgttggcgcgataatgattctttatcgggaaacaacatgcgcacaaaatatacgggtctgcaaatcagcattcactggttggtttttctgttagtcattatggcctattgcgccatggagttcagagggtggttcccaagaaccgatcgtccgcttattaatatgatccacgtttcctgcgggatcagcatcctggtgctgatggtggcgcgcctgcttatccgcctcaaattcccggctccgcctattcaaccgaaaccaaaagcgatgatcaccgggctgtcccatctcgggcatctggtaatctacctgctgttcattgcgctgccgctgatcggtatggtgatgatgtataaccggggaaatgactggtttgcgtttggcctgacgatgccgcatgcggcggaggggaattttgacctggtggataccctaaaggagtggcacgtaacgctggcgaatctggggtatttcgtgattggtttgcacgcctttgccgcgctgatgcatcactacttctggaaggacaacacgctgctgcgcatgatgccgaaaaagcgtcagtaa

SEQ ID NO: 116749 - DNA, 1440 bp, Enterobacter cloacae
atgacagtacccgtacaacatcctatgtatattgatggacagtttgttgcctggcagggtgatgcatggattgacgtgatcaatccggccaccgaagaggtcatttcccgtatccccgacggcagcgccgaggacacccgcaaggccattgacgcggcagatcgcgcgcaggctggctgggaggcgctgcctgctattgaacgcgccagctggctacgcaaaatttccgccgggatccgcgagcgcgtcagtgaaatcagcgcgctgattgtggccgaaggcggcaagatccagcagctggcggaagtggaagtgaactttaccgctgactatatcgactatatggccgagtgggcgcgccgctatgaaggggaaatcattcagagtgaccgtccgggcgaaaatattctggtgtttaagcgtgccctgggcgtcaccaccggcattctgccgtggaacttccccttcttcctgattgcccgtaagctcgctcccgcgctgctcaccggtaacaccatcgttatcaagccgagcgaatttaccccaaacaacgccattgcgtttgccaaaatcgtcgatgagattggcctgccgaaaggcgtctttaaccttgtgctgggccggggtgaaaccgtcggacaggagctggccgggaacccgaaagtggcgatggtcagcatgaccggcagcgtcggggcaggcgagaagatcatggctgcggcggcgaaaaacatcaccaaagtggggctggagctgggcggtaaagccccggccatcgtgatggacgatgccgacctcgagctggccgtgaagtccattgtggattcacgcgtcatcaataccgggcaggtgtgtaactgtgcggaacgtgtctatgtccagaaggggatctacgaccgctttgttaatcgtctgggcgaggcaatgaaagccgtccagtttggcaatccggctgagcgaacggatattgccatggggccgctgatcaacgccgccgcgctggagcgcgtggagcagaaggtggcgcgcgcggtgcaggagggggctaaagtggtccttggcggtaaagcggcagaaggcaaagggtatttttatcccccaacgctgctgctggacgtacgtcaggatatggccatcatgcacgaagagacctttggcccggtgctgccagtggtggcattcgacaccctggaagaggcgctgaacatggccaacgacagcgactacggtttaacctcgtctgtttatacgcaggacctgaacgtcgcgatgaaagccattaaggggcttaagttcggcgagacctacattaaccgtgaaaactttgaagcgatgcagggcttccatgcaggctggcgtaaatccggtatcggcggggcggatggcaaacacggtctgaatgagtatttgcagacgcaggtggtctatttgcagtcgtaa

SEQ ID NO: 116750 - DNA, 795 bp, Enterobacter cloacae
atgacaatggcacttttcccctgtctgcctggcacaaccctcgacgccgtgaataccgttggggcgtggcttgctcaggacgactatcaggacaaccagcccgttgatctggtgattctggcgggtaacgcggtgatccccgcgattgatgctgcctgtaaaatcgcggctgaacagggtatacctctgatcatcagcggcgggatcggtcactcgacgaccttcctctacgccgcgattgcgaaacacccccgctataacaggatacccaccaccgggcgggctgaggcggctattctggccgacatcgcccgtgaattctggaacattccggccgagcatcttcacgttgaggatcagtcgaccaactgtggcgaaaacgcccgcttcagccgggcgttgatgaaacaatccggactgaacgccgcccgggtgctggtggtgcaggacccgacaatgcagcgtcgcacaatggctacgtttgcccgcgtttgccgcgacgaggccgcatcgcccgcatgggtgagtcatcccggcctgacgcccgtgctgcaaaacagcgacgacggtctggtgtttagcggcccggtcgaggggttatggccggtagagcgctacttgtcgctggtgctgggtgaatttccgcgactcagggatgacatcaacggctacggtccggcgggacgtgatttcattgcccatgtcgatatccctgccgacgtggacgccgcgtggcagatcttgcgaaacgacgtcattctcaccgacgcgctggtgagccgttctctgctgtaa

SEQ ID NO: 116751 - DNA, 1653 bp, Enterobacter cloacae
atgcgcctgccccaacgcgacccttatgctcctcgcgagtggcagccacacgagaaacccgccctcctgggttccccttccaccccggagcatccgacgtcgaaacgaatcgcctatggcgtggtcggcctgctggtgtgtctgaccggggcgctgggtaacgcggtcgtcaccgccaatctgcaaaacctgcaaggcacctttggcgcctggtcgactgaaatcgcctggttgcctgccgtctatgtcatgaccaacgtctccatcaacctgctgctggtaaagtttcgccagcagtacggtttgcgcgcctttacggaaggcttcctggtgttgtatgtgctggtcacctttttccacctgtttgtgaacgatctcagctcggcgctgatggtacgggcggctcacgggatggtcgccgccgcgctcagctcgctcggcatttattaccagatacaggcctggcccgcgaagcaccgactgaaggcgctgaccatcggcataaccgggtcgtcgctggcgatcccgctggcgcggctgttctccaccgagctgttacagcttgatgagtggcgcgggctgtacttcttcgagctgggtctggccctgatctccctggcctgcgtgatggcgctcaagctgccgccgggcgatcgacgcaaggtcttcgagaagaaagatttcatcaccttctttttgcttgcgcccggcatggcgctgctgtgcgcggttctgtcgttagggcgtctggactggtggtttgaagcgccgtggatcggctgggcgctggctctctcgctggtgctgattgtctccgcgatcgtgtttgaacataaccgcaacaacccgctgctcaatacccgttggctctccagcggcagcatcgtacgcctggggctgatcatgctgctgatccgcatcgtactggcggagcagaacacgggcgtcatcggctggctgcaatatgtaggcttacagaatgaacagatgacccatctggcgtgggctattttcgccgggatcgtctgcggtatcgtcaccagctgtctgacgattaagcccactaaactggcctggccgattatcacctcgctggcgctgatgatcgttgcctcgctgctggacagccagtccaacaacctgacccggccggatcagcttatattcagccagttcctgctgggcttcggcagcgcgttcttcctggcgcctgcgatgctggccgccattggcggggtgatcgccgatccgcgcaatctggtcagcttttccgtgatgtttggtatgagtcagaaccttgggggcctgctggggtccgccatcctcggcaccttccagacctggcgcgagaagtaccattccagcctgctggctgaccagctcaccacccttaacccgctggtgaacgaacgcattcagctttacacccagatgtacaaaagcctgattggcgatagttccctgctgggaacccaggccattacccagcttcagacggtgacggcgcttgaggcaaacattctggcttacaacgatacttatctcctgacggcgagcattgccactgccacgctggtctggattttatggcgcttgctacgcctgcgcatcaccgcccgtatggcccttaagaacgccactggcaacaagtaa

SEQ ID NO: 116752 - DNA, 1083 bp, Enterobacter cloacae
atgagtcagcaggatgccgccaaagagcaggccaacacccgcaaaaatgtgcgcgtcgtttccattttcaccgccgcggctatcggcattgtcggggtactggtgatcctttatgcctggcagctgcccccgttcacgcgtcatgcccagtttaccgataacgcctacgtgcgcggccagaccacgttcatcagtccccaggtaaacggctacattaccgaggtccatgttcaggatttcgcgcaggttaaaaaaggcgagctgctgttgcagatagatgaccgcatctatcgccagcgcgtccatcaggccgaggcgcagctggcaatgaaaattgcagccctgaataacaacctgcaacagcgcaaaagcgcggaagcggtgattgccaaaaacgaggcggcgctgaaaaacgcccgtgcccaaagtctgaaaacccaggcggatttgaaacgcgtgaaagagctgaccgcggacggctccctctccattcgcgagcgcgattcggcgctggccagtgccgcccaggggagcgccgatatcgaccaggcgaaagcaacgcttgagatgtcgcgtcaggatttacaaacggtcatcgtcaatcgcggttcgctggaagcggacgttgagaatgcgaaagccgcgctggagctggcgcagatcgatctgcaaaacacccggattgtcgcgccgcgtgacggtcagctcgggcagattgcggtgcgtctgggggcgtacgtcaccgccgggacgcaccttaccacgctggtcccgccgcagcactgggtgatcgccaatatcaaagagacgcagctggcgaatttacgcgtcggacagccagtgaaattcaccgtcgatgccttaaacgataaagcctatcaggggcgcgtggagagcatatccccggccacaggggtcgagttcagcgctatcacgccggataacgccacgggcaactttgttaaaatcgcccagcgcatcccggtacgtattgaggtactcggtgagccggaggcgtaccggctgctgcgtcctggcatgtcggtgcaggtgaccatcgacacgcgggaggcgaaacaatga

SEQ ID NO: 116753 - DNA, 1380 bp, Enterobacter cloacae
atgacccttcgcccgatagccggcctgctgataatggctttcctggcgggatgccagtcggtagacgttgagcccgccaaatcgtccctgcacataccggcccagtggcgcgcgacgtcggggccagccagcccgacagagcagctctggtggcgaaattttcacgacagcaatctgaatcgctatgtggatcaggcgctgaagaataacagcgacgtgctgattgcccgcgagcggattaacgagtaccaggcccgggtgtacgccgccgatggcagcctgttcccgtcgcttgacgcgggcgtgaccgggacgcgcgcgcgctcgcagtccgccgccacggggcttccggtatacggtacgttgtacaaaggcagcctgaccgccagctacgacgtggatatctggggcgtaaaccgcagcacctcccgtgccgctgaagcgtcgctggaagcacaaaaggcggcggctgcggcggctgatcttaccgtcgcatcctcggtggcctccgggtacgtcaccctgctgtcgctggacgaacagcttcgcgttacccggtccacgctgaagtcgcgtgaagaggcgttcaacctcgccaagcgacagtttgagacgggatacagctctcgccttgagctgatgcaatcggattctgagctgcgcgccacccgcgcccaggttccactgcttcagcaccagattgcgcagcaggaaaatgcgcttagcctgctgctgggcagcaacccgggtgacgttgcgcgcggtgaaagctttgatgccctgacgccgctgaaactgccctcccagctgccgtcgacgctactgaaccgacgcccggatatcgtccaggctgaacgtcagctgattgcggcggacgcgacgctggcggcatcgcgcgccagcctgctgccgtcgatcaacctcacggccacgggatcggtgcaggatcgcacgctgtcgggattgctggataacccgctacagctctggagcgtgggcggcagtattcttgcgccgctgctgaaccgtcaggcgctgaatgcgcaggtagatatctctcagtcccagcggaatcaggcgctgtatagctacgaaaaaaccgtgcgtaacgcgtttgctgaggtgaatgacagccttgatgccatcacccgctatcaggaacagcttaccgagctgctggcacagcagacggtcgcgcaggagacgctgaggattgcgcaaaaccgctaccgcaacggatactcttcttatctggatgagctcgatgcgcagcgcacgctgttctcggtgcagaccagcgtggtacaggtgaaaaacaacctgctgctggcgcaaattgatttgtataaagcgctgggcggcggctggagcagtgcctga

SEQ ID NO: 116754 - DNA, 3903 bp, Enterobacter cloacae
atgacagaacaccaaaaattgaccttcccgatgctgatgcaaaagcttgattcgctgatgctgcgcgataaacagcggtttgcgcgccgtctgcacggcgttaagaaggttaaaaatcctgatgcacaacaggccatttaccaggagatggccaacgagattgaacaggcggcagggaaagttgtgctgcgtgaagccgcacgtccggagattacctatccggaaaatctgcccgtcagccagaagaaacaggacattcttgaggccgtacgcgaccaccaggtggtgatcgtcgcgggggaaaccggttcaggtaaaaccactcagctgccgaaaatctgcatggagctgggccgcggggtgaaagggctgatcggtcacacccagccgcgtcgtctggcggcgcgcaccgtggcgaaccgtattgcggaagagctgcaaacggagccgggcggctgcatcggctacaaggtgcgattcagcgaccacgtcagcgataacaccatggttaagctgatgaccgacggtatcctgctggcggaaatccagcaggatcgtctgctgatgcagtacgacaccatcatcatcgatgaagcgcacgagcgcagcctgaacatcgacttcctgctcggctacctgaaagagctgctgccccggcgtccggatctgaaaatcatcatcacctccgcgaccatcgacccggagcgcttctcaaaacatttcaacaatgcgccgattattgaggtgtcaggacgcacgtatccggtggaagtgcgctatcgcccgattgtggaagaggcggacgataccgagcgcgaccagcttcaggccatctttgatgccgtcgacgagctgggcaacgagagttctggcgacattctgatcttcatgagcggcgagcgcgagatccgcgataccgccgatgcgctcagcaagcgcgatctgcgccatactgagatcctgccgctgtacgcgcgcctgtcgaacagcgagcagaaccgcgtgttccagccgcacagcgggcgccgcatcgtgctggcgaccaacgtggccgaaacttcgctgaccgtaccgggcattaaatacgtgatcgacccgggtacggcgcgcatcagccgctacagctaccgcaccaaagttcagcgcctgccgattgagccggtttcgcaggcgtcggctaatcagcgtaagggccgctgcggccgcgtgtcggaagggatctgtattcgtctctattcggaagacgatttcctgtcgcgcccggagtttaccgatccggagatcctgcggaccaacctggcatccgttatcctgcaaatgaccgcgctggggctgggcgatatcgccgccttcccgtttgtggaagcgccggataagcgcaatattcaggacggggtgcggctgctggaagagctgggggccatcaccaccgacgaacaggcgacggcctacaagctaacgccattgggccgccagcttagccagttgccggtcgacccgcgtctggcgcgcatggtgctggaggcgcaaaaacacggctgcgtgcgcgaggcgatgatcattacctcggcgctctccattcaggatccgcgcgagcgtccgatggacaagcagcaggcgtcggacgaaaaacaccgtcgcttccacgataaagagtccgatttcctcgcctttgtgaacctgtggaactaccttggcgagcagcaaaaagcgctctcctcgaaccagttccgccgtcagtgccgggtggatttcctcaattatctgcgcgtacgcgagtggcaggatatctacacccagctgcgccaggtggtgaaagagctgggtataccggtgaacagtgaaccggcggagtaccgcgaaatccatatcgccctgttgaccggcctgctgtctcatatcgggatgaaggatgcggataagcaggaatataccggcgcacgcaacgcgcgtttctccatcttcccgggctccggtttgtttaagaagccgccgaagtggaccatggtcgccgagctggtggaaaccagccgtctgtgggggcgtatcgccgcgcgtatcgatccggagtgggttgagccggtggcgcagcacctgctgaaacgctcatacagcgagccgcactgggagcgtgggcagggcgcggtgatggcgacggaaaaagtcaccgtctacggcctgccggtggtggccgcgcgtaaggttaactacagccagatcgatccggcgttgagtcgcgagctgtttatccgccacgcgctggtggaaggcgactggcagacgcgtcatgcgttcttccgcgaaaacctgaagctgcgcaccgaggtggaagagcttgagcacaagtcccgccgtcgcgacattctggtggacgacgagacgctgtttgagttttacgatcagcgcatcagtcacgatgtgatctcggcgcgccatttcgacagctggtggaagaaagccagcaaagaggccccggacctgctcaacttcgaaaagagcatgctgatcaaagagggcgcggagtcggtcagcaagctcgattatccgaacttctggcataagggcaacctcaagctgcgtctgacctatcagtttgagccgggcgcggatgccgatggtgtgacggtgcacattccgctgccgctgttaaaccaggtggaagagagcgggtttgagtggcagatccccggcctgcgccgcgagctggtcattgcgttaatcaaatccctgcctaaaccggttcggcgtaactttgtgccggcgccgaactacgccgaagcgtttttagaccgcgtcacaccgctggagctgccgctgctggacgccctggagcgtgagttccgccgcatgaccggaaccaccatcgaccgcgacgactggaactgggatcaggtgcccgatcacctgaaaatcacattccgcgtggtggacgataaaaacaaaaagctgctcgaaggccgttctctgacggagctgaaagaggcgctgaaaggtaaagtccaggagacgctctctgcggtggccgatgacggcattgagcagagcgggctgcacatctggagctttggtcagctcccggaaagctacgagcagaagcgcgggaactacaaggtgaaagcctggcccgcgctggtggatgagcgcgacagcgtggcgattaagctctttgacaatccgcaggagcaacagcagatgatgtggcgcgggctgcgtcgactgcttctgcttaacatcccgtcgccgattaagtatctgcacgagaagctgccgaacaaagccaagctgggactctactttaacccgtacggtaaggtgctggacctgatcgacgactgcatctcctgcggtgtggataagctgatccacgaggccggcggtccggtctggacggaagagggctttgctcagcttcatgaaaaggtgcgcgcggagctgaacgacaccgtggtggagattgccaaacaggttgagcagatccttaccgccgtgttcaatatcaacaagcgcctgaaggggcgggtggatatgaccatggccctggggctgtcggacgtcaaggcgcagatggcggggctggtgtatcgcggctttgtcaccggcaatggctttaagcgtctgggcgatacgctgcgttatttgcaggcgatagagaagcgtctggagaaaatggcggtcgatccgcatcgcgatcgtgcgcagatgctgaaagtcgaaaacgtgcagcaggcgtggcagcagtggctcaacaaactgccgccggcgcgtcgcgatgacgacgacgtgcgggagatccgctggatgatcgaggagctgcgcgtcagcttcttcgctcagcagctgggaacgccgtatcccatttcggataagcgtatcttgcaggcgatggagcagatttccggctaa

SEQ ID NO: 116755 - DNA, 606 bp, Enterobacter cloacae
atgagcaaagtattagtgttgaaatccagtattctggcagggtattcacagtctggtcagctgtctgactatttcgttgaacagtggcgtgaacagcacagcgcggatgaaatcaccgtgcgtgacctggcggcaaacccaattcctgtgctggacggcgagctggttggcgcgctgcgtccgagcgatgcgcctcttaccccgcgtcagcaggaagccctggcgctctccgacgagctgattgctgagttgcaggcgcacgacgttatcgtgatcaacgccccaatgtacaacttcaacattcctacccagctgaagaactacttcgacctggtggcgcgcgctggcgtaaccttccgttacaccgagaacggcccggaaggtctggtgaaaggcaagcgtgcggttgtactgaccagccgcggcggtattcacaaagatacccctaccgacctggtcgcaccgtacctgacgctgttcctgggcttcatcggcattaccgacgtgaacttcgtgttcgctgaaggtatcgcttacggcccggaagtggccaccaaagcgcagaccgacgcgaaagccgctatcgacagcctggtcgctgcctaa

SEQ ID NO: 116756 - DNA, 687 bp, Enterobacter cloacae
atgtctgtcattatcgatacgtttattgcaccaccctgtcacgacaacattgagatcctctggcaggacgagcatctgctgctgatcaataaaccttccggtctgctcagcctgtcggggaaaaatccgcaaaacctcgattccgtccaccaccgtcttgttcaaacttttcccggctgcacgctggtgcatcgtcttgattttggcacttcgggtctgatggtcattgcgcgtaacaaagcgatcaacgccgcgctttgccaccagttcagtcagcgcgccgtgaacaaggtttacaccgccctgctgtgcggacatgtggaacaggacgaagggaccgtggatgcgccgattgccaaagatccggcgctgtttccgctgatgacgatctgtgcccgcaccggtaagcccgctcgctcccgctatcgggtggtggaacgtatttaccaggatacgacaatgccgctgacgcgggttgagcttaccccggagaccgggcgcacccaccagctgcgcattcactgccagcagttaggccaccctattctggggtgcgatctgtatggtggtctggaatggccgggggcggaagaaacgccccggctgatgctgcatgcaagcgctctgaattttattcatccgctgagcggcgagacgatgaacgcccgtcacgccgcgccgttctga

SEQ ID NO: 116757 - DNA, 540 bp, Enterobacter cloacae
atgacaaaactcaccctacaagagcagatgctgaaagcgggcttagtcagcagtaaaaagatggcgaaggtccagcgcacggcgaaaaaatcccgcgtccaggctcgcgaggcgagagaggctgttgaagagaacaagaaagcccagctggagcgtgataaacagctgagcgaacagcaaaaacaggcggtgctggcaaaagagttcagggcgcaggtgaagcagctgattgagatgaaccgcatcaccgtggcgaagggcaacattacctttaactttaccgacggcaaccttatcaaaaaaatcgaggtcgataagcagacgcaaacccagctgatcaacggccgtctggcgattgcccgactggtgattaacgcgaatggcgactgtgattacgcgattatccctgcggtagtggcggataaaattgcccagcgcgatgcggacagcattgtgctaaacagcgccctgagtcaggaagagcaggacgaagacgatccgtacgcagacttcaaaatccctgacgatttaatgtggtaa

SEQ ID NO: 116758 - DNA, 975 bp, Enterobacter cloacae
atgagtcaggctttcacatttacccttaagcgcagttgctttgatgaaaattataacccgtcagaaaacacgcgtaccaccaccaacttcgccaacctggcgcgtggcgagaagcgtcaggagaacctgcgcaatacgctggtgatgatcaacaaccgctttaacgcgctggcgagctgggataacccgaaagctgaccgctatgccgtcgagctggagattatttctgtcgatatgaatatcggcggcgattttactttcccggccatcgaaattctgcaaacgacgatcgtggataaaaaaacccacgagcgcatcgaaggcatcgtcggaaataacttctcatcgtatgttcgtgactatgatttcagcgtcctgctgctggagcataataaagaccgggcccgtttctctctccccgagaattttggcgagctgcacggcaatatctttaaaagcttcgttcattctgcggaatatcaggcgaactttaaaaaagcgccggtgatctgcctgagcgtctccagcaaagacacctatcgtcgtaccggtaaccaccacccggtgctgggctatgagtaccagccggacggcgagtcgctaacggaacagtacttcgcgaagatgggcctgaaggttcgctatttcatgccggaaaacagcgtcgcgccattcgccttcttcttcaccggcgatttactgcgtgattacaccaatctggaactgatcggcaccatcagcaccatggagacgttccagaagatctatcgaccagaaatttacaatgccaattccgctgcgggacagtgctatcagcccgacctgaatcagcaggatcactcattaaccaaaatcgtctatgaccgtgaagagcgcagccggctggccattgaacagggtaaatataccgaagagcggtttatcaaaccctataaaacccttcttgagcagtggtctcaacacttcacgctttaa

SEQ ID NO: 116759 - DNA, 1029 bp, Enterobacter cloacae
atgaaaacattgctcccgacatcaacggctggcagcctgccgaaacccacctggcttgcgcagccggaaacgctctggtcgccgtggaaactccaggacgaggaattactggcagggaaacaggatgcgctgcgtttgtctctggatgaacagattcgcgccgggattgatatcgtcagcgacggggaacaaacccgccagcattttgtcaccacctttattgaacatctcagcggcgtggattttgagaaccgtcagacggtacgcatccgtaaccgttacgatgcgagcgtgccgaccgtggtagacgcggtggcgcgccagaagccggtgtttgttgacgacgcgaaatacctgcgccagctgactgacaagccgatcaagtgggcgctgcccggcccgatgaccatgatcgacacgctatacgatgcccactataaaagccgcgaaaagctggcctgggagttcgctaaaattctcaatcaggaggcccgcgagctggaagcggccggcgtcgacattattcagttcgacgaacctgcctttaacgtctttttcgacgaggtgaatgactggggtatcgccgcgctggagcgcgccattgaagggctgaaatgcgaaaccgcggtacatatctgttacgggtacggcatcaaagccaatacggactggaaaaagacgctcggctccgagtggcgccagtatgaagaggcatttccaaagttacagacctcgaagatcgatatcatctcgctggagtgccacaactcgcgcgtgccgatggatctgctggagcttatccgcggtaaaaaagtgatggtcggggcaattgacgtcgccacccagaccatcgaaacgccggaagaggtggccgatacgctgcgcaaggcgttgcagtttgttgatgcagacaagctctatccgtccaccaactgcggtatggcccccctttcccgccaggtcgccaacggtaagctgaaggcgttaagcgccggggctgacattatccgtcgcgagcttgcccgctaa

SEQ ID NO: 116760 - DNA, 933 bp, Enterobacter cloacae
atgatggatgccggacatatcagcattcgcgcgctgctgatcttcatcgacgtttatgaaacgcagaatttttccgtggtggcgaggcgggaagggatttctgcgtcgcaggtctcacgcgtgatccaccagcttgaggacgccctcgggcaacagcttttctaccgcaacacgcgggcgattatgcccacagagagcgggcatctttttgtgcgctatgcccgggcgatggccgggaatatggaggacgcgcgacgcgagctggatgaacgcgcccgcgagccgtcgggcacgctgcgtatcaatggcccggtctttttcggacagaggcacatcgcgccgggcctgccggggcttctggcgcgttaccctcgtctctccattgaactgaccctcaccgacgattttatcgatccgcaccgtgacgccgcggacgttatcttccgcatcggcgcgctgacggactcctcgtttcacgcccgggtgttcgggcagcagttctaccatctggcggcctcgccggactatctgcaaaaacatggcgcgcccgaggggccggacgatctcagccgtcaccactgtctggtttaccgcggttcgtccgggcctaaccgctggctgatccggcagccgggcgaggcgtgggttcactatcccattgtaccgctgatgacttccaataacgcggaaacgctcctgattgcggcgctgggcggcatgggcgttgtgcttttcccggactggatggtgagcgaacggctcaaaagcggtgagctggtggcgctgctgccggaaatggagtgttcaattaatacggagccactgacgattgcggcgatttacccgaacgcgcgtcatccgcccctgaacgtcagggcggtgattgattactatattgagcgattcggtacgccactgtactggcaaacctga

SEQ ID NO: 116761 - DNA, 435 bp, Enterobacter cloacae
atgcacattattttaattttactggtgattgccggcggcatggggctgtccgtggaagccgggctgctggggccgctgggcgcagaggtgggcgacctgtgggcggcgttcagcatattcagcgtgggaacggggctgacgtttctgctgatgctgtttttcagcccccgcaacagtccctcattttttgcgcagccttcatggcacctgttgggcggcgtgctcggcccggtttacgtcatcattctcaccattgccacgcctgcgatcggcattgccatgacgatgatcggcattctggcaggccaggtttttaaaagcctgattatcgaccactatggcctgctgggtacgccgcaccgcaggatcgatacaaaacgcattattgcgctgggatttatcatcgccgcgctcattctcgtggcgcaggggtaa

SEQ ID NO: 116762 - DNA, 459 bp, Enterobacter cloacae
atgacagtgattatgattattctggcggtgattggcggcgcaacgctgagcattcaggctgctattaacgggcaattaggcagcagcgtgggggtatttaaaagcgcgtttctgacgttttccgtcggcgcgctggtgaccgccctgctgatcttcttttttgagccgaaacaggcggtcagcctgatggatgtgcccaaatggcagcttctgggggccctgtgcggcgtgccctatatcgtgattatggtgctcgccgtgcagcgcatcgggaccgccgttgccacggtagcggttatcctgggccagctggccatgagcatgctgattgataactttggctggctgaacaatgaagccattccgttttcagtgagccgtttcggggccgtcgtctgcctgagtattgcgctcttcttcatctactcaagcagtaaacctcagcccgaagaggattaa

SEQ ID NO: 116763 - DNA, 534 bp, Enterobacter cloacae
atgaaacgtttcctgttaatggcgcttgccctgacgatgctggtggccggatgtagcaccgaggtgacagagtatcgtcagcagcagccacggcttgatatttttacttacttccaggggaaaaccgaggcgtgggggatggtgcaggatcgcagcggtaagcagatccgtcgttttcacgtcgagatcgccggggatgttatcggcgatacgctgaccctgaatgaacattttgtctacgatgacggcgagaagcagcagcgcgtctggcatatccgccgcgttgggcagaatcgctatgaaggcacggcgggtgacatagaaggtggcgcgacaggccaggcggcgggcaatgcccttaactggcgctacagcatgaacgtgaaggcggacggcaaaacctggctgctgcactttgatgactggatgtatttgcaggacagcacccgtctgtttaataaaaccgagatgaagaaatttggcgtcaccgtcgccacggtgacgctgttctttacccgcaaagagggcggttaa

SEQ ID NO: 116764 - DNA, 1221 bp, Enterobacter cloacae
atgaccaatcccgtctttgcgcttgaacccgatatcccgcgcaacgtccgcgtcgcgcgatggttgctcttccgcctgctgaatggcctgcacggtggctcgctgacgctgcgtgaaggtgcgcagacgttccagttcggcgacgcttccgccgcgcttcacgctgaggtgcaggtacttgctccgggcgtctactggcgcattttaaccgggggcagcctcgccgcggcacaggcgtggatggatggcgactgggagacgccccacctgacgccgctgctggagctgattgcgcgcaatagccaaatcctcggaaagctggaaaaagggtttcgcctgctcgggaaaccggtggagcggctgcggcactggatgcggcgcaactcccgcgcgcaggcgcgggaaaatattgccgcccattacgatctgggcaacgccttttatgcccatttccttgatgaacatctcctgtactccagcgcgctgtttagcggggacgagcaggatctgaccgcggctcagcaggcgaaaatggcgaggctgtgtgaccagctggcgctcacggcaaacgatcatctgctggagattggcaccggctggggggcgatggcggaatatgccgcccgtcattacggctgccgggtgaccaccaccacgctgtcgcaggagcagtaccactgggccaccgcgcgcatcgcccgggcagggttgcaggatcgtgttgaggtgctgctctgcgactaccgcgatctgtccggggtctacgacaagctggtgtcggttgagatgattgaggccgtcggtcaacgctacctgccaacatttttccgcacctgccaggcgcgtctgcgtccaggcgggcggatggcgattcaggccatcaccattcaggatcaacgctatcgcgactacagcaaaagcgtcgattttattcagcgctacatcttccccggcggctttttgcccagcatcaccgccatgaatgaactcatgacccgccataccgattttgtggtgcgtaacctcttcgatatggggccggactacgcccgcacgctggcgcactggcgtcagcggttcgttcacgcctggcaggagattgaaaagctcgggtttgatgaccgtttccgccggatgtggctgtactacctcggctactgtgaagccgggtttaatgcccgcaccatcagcgtggtgcagctgactgcggaacgcgtatga

SEQ ID NO: 116765 - DNA, 723 bp, Enterobacter cloacae
atgaacagctgcctttaccacggtacattgcgccatcgtcggcttgcgccgaaagcgcaccactttacctacagcgtgtttatggcctggctcgatctggatgagctggacgcgctgccctctgtcggcgtgcgtcgtaaccgcgttgcgcccgcggcattttatgatgcggattacccgctgggcacgccgctcaaagcgcgtgtccttgagcgtctggaaaatctgaccggcgaacgtccggcggggcgggtcatgcttctgactcagctgcgctatttcggttttcatttcaacccggtcaatttttactactgctatgacggggaagacaccctgcgctgggttctcgccgaagtccgtaacacgccgtggaatgaacgacattactacgcggtagcggggcgggacgccccgccgacggagaaagcgtttcacgtctcgccctttaatccgatggatatgatctaccactggcgcttcaacagcccggacagcacgctgcgcatgcatatcgaaaaccatcaggagacgaaggtgtttgatgccaccctgacgctgcgccgggtcccgctgacgcgcacggcgctgcgttcgctgctggcgcggatcccgttgatgaccctcaaaaccgttttcgccatttactggcaggcgctcaggctgtggctgaagcgcgtaccgctgcataaccatcccctcagcaggagtgaacgctcatga

SEQ ID NO: 116766 - DNA, 1260 bp, Enterobacter cloacae
atgaaaatcgcaattatcggcagcggtatcgccgggttaacctgtgcctggcggctcgccggacatcaccaggtcacgctgtttgaggcgcaggccacgccgggcggccataccgcaacggtggatgtcgacacgccgcagggcagctttgccatcgataccggttttatcgtctacaacgaccgcacctatccgcgcttcatggggttgctcagcgaactgggcatctgcgggcaaaaaacgcagatgagcttttcggtgcacaacccgcagagcgggctggagtacaacgggcacacgctgacgtcgttgttcgcccagcgacgtaatctgctcaacccggctttctggacgctgctgaaggagatcgtgcgctttaaccggctggcgaaacagacgctccggggcgaagtcgatggttccgccacgctggaaacgttcctgcgccagcaccgttttacgcccttttttgcgcgccactacatcctgccaatgggggcggctatctggtcgtcgtcgctacaggagatgaaacgctttccgctgccgctctttttacgcttttttgaaaaccacggtctgctggacattacccatcgtccacagtggtacgtggtgccaggcggctccagggagtatatccgcgcgatgctggatacgctcggcgatcgcctgacgctgcaccttaacgcgccggtgcagcaggttattcgccacgatcgtggggttgatattgcgcgtgagggcgtaacagatacttttgatcaggtgatcttcgcctgccactccgctcaggcgctggcgatgctcgccagcccaacgcaggctgaacgcgaggtgctgggggatatcggctggcagcgtaacgaggtggtgcttcaccgcgatccgcgctggctgccggtgcgcgaacgcgcgtgggcgagctggaactaccgcctcagcgagcaggatcaggccagcgcctgcgtcacctacaacatgaatatcttgcagggactgccgccgggtagcccgctgttttgcgtcaccctcaacccggaaacgccggtggaggaacggtttgtgctgcgccgctttgtctatgagcatccgctttttaacccgcaaagctggcaagctcaggcccggcgaggcgaaataaacggtcgccagcggagctggttctgcggcgcgtactggtacaacggcttccacgaagatggcgtgcgcagtgcgctggacgtggtcaacgctatcgcgaccggggagggcaactga

SEQ ID NO: 116767 - DNA, 720 bp, Enterobacter cloacae
atgaaaacggttctgatcaccggcgcaagctcgggcatcggggcggggctggcgaaatcttttgccgacgatggttaccgggtgattgcctgcgggcgcgatgcgcaacgtctggcagccgtgcatcagtacagccccaacattacggtgcgcctgttcgatatgacagacagggacgcctgtcgccaggtgctggcggactgtactgccgacacggtgattctctgcgccggaacctgcgagtatctcgaccgcggcgaggtggatgccgagctggtggcgcgggtcatgaccaccaatttcatcgggccggtaaactgccttgcggcgttgcagccgcagctggtatccggcaaccgcgtggtgctggtcagttcgatggcgcactggcttcacttcccgcgagccgaagcgtatggcgcctctaaagcggcgttaacctggtttgccgacacactgcgcctcgactgggaaccgaaagggattgccgtcacggtcgtttcacccggttttgtcgacacgccgctgacccgcaaaaacgatttcccgatgccgggccgggtcagcgtgggggacgccgtccacgccattcgtagcggtctggcaaaagggaaggatcacatcgcgtttcccgccgggttcagcctggcgttgcgcctgctttccggcctgcccgatgtacttcagcgcgcactgctgcgcaggatggtgcgaccatga

SEQ ID NO: 116768 - DNA, 435 bp, Enterobacter cloacae
atgagcacgttgccgtccgtcatcagtcggttcgttgattactacgccacgctggatacccagccaccttcggcgctggcggggatttatcgcgccgatgccacgcttatcgatccctttggcgaacacagcggggtgttcgcgattcagcgctatttcacccatctgctggctaacgttcaacactgtcgctttaccgtcgatgcaccgttgcagcagagcgatcgctttgttgtcacctggatgatgcactggtcgcacccgcgtatcgccgggggggcaatgcgccaactgccgggctgctccgtggtagacatgcgcgacgatcgcattgttcgccagcgggattactacgatgccggagagatgatttacgaacatctcccgatactcggttgggccgtgcgcggcgtgaagcgaagagtgaaatcatga

SEQ ID NO: 116769 - DNA, 198 bp, Enterobacter cloacae
atgaaacatttactgatgacgctcttttccagcccggaatccttgttgcaggtcatgagtcaccaggaaattatcgaagccgtagaggatggcgaccgcatcatcatcgatcaggatggaaacgcctcggttaactacaaaagccacgaagtacggcaggactttctgcgccatgtcaacgcgctgaagagggcctga

SEQ ID NO: 116770 - DNA, 753 bp, Enterobacter cloacae
atgggaacggcaatattcatggtattgatggtatgcgggtactggtacaccagccgcgacctctcaacacggtttaaaatcaagcgatcctttggctgggacgtctattttcttgttgcactgtatggctgtatttttgttcttcagggggtgatcgccaccggcctgctgtggctgctgttgttcgccctctccgccgccgataacacgttccatttcacgtcagcaaaatatgccgactggcaaattgattttatgaactggagcttcctggggattcaggccccggtggtggtgatgctgaccttcgcgatcctgttttgtctctaccgatcgaactgggccggaagcgcgcggctggacggtgagggccggaaaaaattgtacaagcggctggcgcagtcgagcgggattgaacaactgctctatcagtgcatggaggaaggtgaactggcgcacgtcacgctgaaatcgcggcggatctatattggcatgatccataccgccacgctggagtatgaaaaaacggccaatatcgtgcttattccgatgctgagcggctaccgtgacgggaagaacatgcagctctgtatcgaacataactacagcaaatggtatgccgagcatgacattacgctcgattcggagcccaaaagtgccatggattttcgcaaagtgatcatgctggatcagatcgagagtatttcgctgttcgatccggcaagcgccagcgcgctggcgatgcgtgaataa

SEQ ID NO: 116771 - DNA, 1977 bp, Enterobacter cloacae
atgaaattaaccctaattgctaaacatctggcgcttgccggtgtgttgacgtcgctgtcgctttccgcgtttgcggaagtgcagccgcaggatgccactgccacaacccggcaggcaaataacgccctgtataaaaaattaccgtttgccgataaaaccgactttgagaacgcccataaaggttttatcgccccgctgccacaaaacatgattaaaggcgagcaggggaacgttatctggaacccggcgaaatatgatttcgtgaaagagggtgaaaaagccccggatacggtaaacccgagcctgtggcgtcagtcacagctgatcaacattggcgggctgtttaaggtcaccgacggcgtgtatcagatccgcaatctcgatctctccaacatgaccatcattgaaggcgagaagggcatcaccgttatcgacccgctgttaagcgctgaaccggcgaaagaagcgctggatctctactatgcaaaccgcggcaagaaaccggtcgtcgctgtggtgatcacccacagtcacgtcgaccactacggcggcctgcgcggtgtggttgacgaagccgacgtgaagtccggcaaagtgaagatctacgccccggaaggctttatgaaagaagcggtttccgaaaacattatggccgggaatgcgatgagccgccgtgcgagctatatgtacggcaacctgctgaagccggatgcaaaaggccaggtgggggcgggtcttggcaccaccacctctgcgggtacggtgaccctgatcccgccgaccaactacattacccataccggtcagcaagaggtgattgacgggctgacctacgactttatgatggcgccgggctcagaagccccgtctgaaatgctgtggtatgtcaaagagaagaaaatgatcgaagccgcagaggacgtgactcataccctgcacaacacctactccctgcgcggcgcgaaaatccgcgatccgctggcctggtctaagtacatcaacgccgccattgagcgctggggcgcggacgcggaagtgattattgcgcagcaccactggccgacctggggcaacgagaatatcgtcaagctgatgaaaggccagcgcgatatgtatcgctacatcaacgaccagaccctgcgtatggcaaacaaggggctgacccgcgacgagatcgccgccgaatttacactgccggaatcgctggaaaaacagtgggcgagccgcggctattacggttccgtcagccacgacgtcaaagccacctacgtgttttatctcggatggttcgacggcaacccggctaccctcgacgaactgccgcctgaacaggctgcgaagaagtttgtggaatacatgggaggggccgatgccatcatgcagaaagccaaagctgactatcagcagggcaactaccgctgggtggcgcaggtgaccagcaaaattgtcttcgccgatccgcagaacgctacggcacgtaatctggaagccgacgcgctggagcagttaggttaccaggcggaagcgggcacctggcgtaacttctacctgaccggcgcgcaggaactgcgtaatggcgtgaagaagctgccgacgccgaacaccgccagcccggataccgtgcgggcgatgaccccggaaatgttcttcgactacctgggcgtgcacatcaacggggtgcgggccggtaatgcgaaagcggtctttaacatcgatctcggtaaggatggcggcaaatacaagctggagctggaaaacggcgtgctgaaccataccgccaacgcgcaggcgaaggatgctgacgcaaccatcaccctggaccgcaccacgctgaacgacatcatccttaagaaagagacgctcaagcaggcgatggacaagggtgacgtcaaggtgagcggagacagagcgaagctggaagagatgctgagctacatggacacatttgacttctggttcaatattgtcacgccataa

SEQ ID NO: 116772 - DNA, 636 bp, Enterobacter cloacae
gtgaattttcaggatatccatacctataatcagcaactcaatattgggcaattctttccgcacatgctttgtaaaggcgaggccttaaccgttgccgcaaataaaaaattcaccgtcgagcctggctatatctatttttgcactgaagggtcgctgacaatattaatgcctgatgatggcctaaatattggcaatactatcgagtatatgccgatagggttaatggaaaggtattgtccactggcgaagtatgaatatcgcagcagtgcgaaggtgaagctggtgagaatagcctgggccgacttcgaccagctatttttcggaggcgggtgtgagcgcatgcaggcgctggccaccatactgacctacatgtccattttcaccatcgacctgcacaatgaacgcaggcaggtcaccagctaccagaccatcaaaccgatgctgtaccgctatctctatcggcaggagacccacacgggagagaatgagggcctggcgctgtttatcattaagcgcactaacctgtcacgcacgcatgtctttcgcgtgctggcagatctcaaagccgggggctatatcaccatgaagcgcggaaagctggtgtcgattgaccggcccctgccggaagcgtattaa

SEQ ID NO: 116773 - DNA, 606 bp, Enterobacter cloacae
atgcctgtttatcaaattgatggtctgacgccggtcgtgcctgaagagagctatgttcacccgaccgcggtgctgattggcgacgtgatcctcggaaaaggtgtttacgtgggccctaacgccagcctgcgcggtgattttggccggatcgtggtgaaagacggcgcgaacatccaggataactgcgtgatgcacggttttccggagcaggacacggtggtggaagaggacgggcatatcggccacagcgcgatcctgcacggctgcattatccgccgtaatgcgctggtggggatgaatgcggtcgtgatggacggggcgacgatcggcgaaaacagcatcgtcggggcggcggcgtttgtgaaggccaaagcggagatgcctgcgaatcacttaattcttggcagtccggcgaaagcgattcgtgagttaagcgcgcaggaaatagagtggaaaaagcagggcacgcgggagtatcaggtactggtggatcgctgtaagcaaacgctgcatcaggtggagccgctgcgggaagaagagcccggccgcaaacggctggtcttcgatgagaatttacggcccaagtcggctggccgggataaataa

SEQ ID NO: 116774 - DNA, 927 bp, Enterobacter cloacae
atgaataaacttgatgcctttatccagcacgcagtcagctctgttcccgtcagcggaacgtcgcttatctcctcgctgtatggcgatgcgctttcccatcgcggcggagagatctggctcggcagcctggcggccctgctggaagggatgggtttcggggagcgctttgtgcgcaccgcgctgtttcgcctcaacaaagagggctggctggacgtgtcccgcattggccgccgcagcttttaccgtctcagcgacaaggggctgcgtttgacccgccgcgcggaaaataaaatctaccgtgcggaactgccggcgtgggatggtaaatggctgctgctgctttccgaggggctggataaaaccacgctcgcggacgtgaaaaaacagctcatctggcaagggttcggcacgctggcgccgagcctgatggcctcgccgtcgcagaacctggcggacgtgcagtctctgctgcatgacgcgggcgtggcggaaaacgtcattttctttgaagcccattcgccgctggccttgtcacgcgcggcgctacgatcccgcgtggaagagtgctggcagctgaccgaacaaaatgcgatgtacgaaacgtttatcaactcgttccgtccgctgctgccgctgctgaaagaggcgccgcctgaggatttgactccggaacgctgcttccagatccagctgttactcattcatttttatcgtcgcgtggtgctgaaagatccgctgttgccggaggagttacttcctgcgcactgggcgggacagagcgcgcgacagctgtgtattaacatctaccagcgcgtggcggcgggagccctggcgtttgtcagtgagaagggggaaacctccgtgggcgagctgcccgctcccggcacgctttatcaccagcgttttggtggtctgaatatcacataa

SEQ ID NO: 116775 - DNA, 1317 bp, Enterobacter cloacae
atgataaatacaacaaagcttgatccgatcgaaaccgcgtccattgatgaattgcaggcgttgcagaccgcgcgcctgaagtggacgctgcaccacgcctacaacaacgttccgatgtacaaacgcaagtttgatgccgcgggcgttcaccctgacgatttcaccgagctagcggacctgcaaaaattcccgtgcaccaccaagcaggatctgcgcgacaactacccgtttgatacctttgcggtgccgatggagcaagttgtgcgcatccacgcttcgtcgggcaccaccggaaagccgaccgtggtggggtatacccagaatgatatcgacaactgggccaatatcgtcgcccgttccctgcgcgccgccgggggcagcgcgaaggataaaattcacgtcgcctacggttacgggctcttcaccggcgggctgggggcgcactacggtgccgagcgtctgggagcgacggtgatcccgatgtccggcggccagacggagaagcaggcgcagctgatccgcgatttccagccggatatgatcatggtgacgccgtcttactgcctgaacctcattgaagagctggagcgtcagatgggcggcgatgccagcgcctgttccctgcgcgtcggcgtgtttggcgccgagccgtggacgcaggcgatgcgccgcgaaattgaaaaacggctgggcattaccgcgctggatatctatggtctctccgaggtgatggggccgggcgtggcgatggagtgtcttgaaaccgccgacggcccgaccatctgggaagatcacttcttcccggagatcgtcaacccgaatgacggcacgccgctggccgacggcgagcagggcgagctgctgttcaccacgctgaccaaagaggcgctgccggtgatccgctaccgcacccgcgacctgacgcgcctgctgccgggcaccgcacgcaccatgcgccggatggatcgcatcagcgggcgcagcgacgacatgctcatcattcgcggggttaacgtcttcccgtcacagctggaagaggagatcgttaagttcgaacacctttcgccgcactatcagctggaggtgaaccgccgcgggcatcttgattcactttcggtgaaggtcgagctgaaacagagcagcttaacgctgacccatgaacagcgctgtcaggtctgccatcagctgcgtcatcggattaaatcgatggtggggatctcgaccgacgtgatgatcgtgaactgcggcagtataccgcgctccgagggtaaagccagccgggtgtttgatttgcgtaaagtggcagccaacggttga

SEQ ID NO: 116776 - DNA, 468 bp, Enterobacter cloacae
gtggtgacggcggggaacgcctctggcgtcaacgacggggcggcggcgctgattatcgccagcgagccgatggcgcttgcccaggggttaaccccgcgcacccgcattgtggccatggcgacagcgggcgtcgagccgcgcctgatgggattaggcccggtgcctgccacccgcaaggtgctggagcgtgccggactcagtatcaccgatatggacgtcattgagcttaatgaagccttcgccgcacaggcgctgggcgtgctgcgtcagctgggcttgccggatgacgccgagcatgtcaacccgaacggcggggcgatcgcgttaggtcatccgctgggaatgagcggtgccagactggcgctggccgcaagcaatgaattgcaccgacgcggcgggcgctacgcgctgtgtacgatgtgcatcggtgtgggtcagggcattgccatgatccttgagcgtgtttga

SEQ ID NO: 116777 - DNA, 729 bp, Enterobacter cloacae
atgcgtgacgcatttatttgtgagggggtgcgtaccccggttggtcgctacggcggaggattatccagcgtgcgcgccgatgacttaggggccgtgccgctgcgtgcgctgctggcgcgttacccgcagctcgatctggagcgcatagatgacgtgatcttcggctgcgcgaatcaggccggagaggataaccgcaacgtggcgcgcatgtcggcgctgctggccgggctgccgcagacggtatccggcaccaccattaaccgcctgtgcggctccggtctggatgcccttggctttgcggcgcgcgccatcagggccggggatggcgatctgctgatcgcaggtggcgtcgaatccatgtcccgtgcgccgttcgtgatgggcaaagccacggcggcgtttcagcgtcaggcggagatcttcgacaccaccatcggctggcgatttgtgaatccgctcatgcatcagcaatacggaactgacagcatgccggaaacggcagagaatgtagcggaattgttaaatataagccgtgccgatcaggacgcatttgccctgcgcagccagcagcgcaccgcgcgggcgcagcagaatggcgttctggcgcaggagattatcccggtacaggtggcgggcaaaaaagtctgtaacggaagtgagcgtggacgagcatccgcgcgccgaaaccaccctggaacagcttgccgcgctgaaagccccgttccgtaa

SEQ ID NO: 116778 - DNA, 423 bp, Enterobacter cloacae
atgagtcataacgcctggcataacgcccgcgcgatgtacgaacgggacgcctgcgcgcaggcgatggggatggacattatcgacatgggcgagggctacgcggtggtgaccatgaccatcaccccgcagatgctcaacgggcataaaacctgccacggcggacagctgttctcgctggccgataccgcctttgcctacgcctgcaacagtcaggggctggcggcggtggcctcaggctgcgccatcgattttctgcgtccgggctttgccggagataagctcaccgccaccgcgcgggtgaagcatcagggcaaactgaccggcgtctacgacattgaaattcagaaccaacaccagaaaaccgtcgctctttttcgcgggaaatcgcaccgcaccggcggcagtgtgacaggagaagcctga

SEQ ID NO: 116779 - DNA, 1425 bp, Enterobacter cloacae
atggtgaatatccatacggtcgccgtcattggcagcggcaccatgggcgccgggattgccgaagtggcagccagccacggtcatccggttctggtgtacgacattgatgcagcggcgatttcccgcgccatcgacggcattcgtcagcggctctcctctcgcgttgcgcgcggaaaactctctgccgacgccggggaacagatcctcgcccgcctgacgccggtgacgactatcagtgctctggcgaaagccgatctggtgatcgaggcggcctccgagcggcttgaggtaaaaaaagcgctgtttacccagctggcagagatctgcccgccgcagacgctgcttgccagcaatacctcgtccatttccgttaccgcgattgcagcggagataaaccaccctgaacgcgtcgccgggctgcacttcttcaatcctgccccggtgatgaagctggtggaagtggtcagcgggctggcgacctctcccgaagtggccgatgcactgtgcgaactggcgctgagctggggaaagcagccggtacgctgccagtccacgccggggtttatcgtcaaccgcgtggcgcgcccgttctactcggaagcctggcgcgcgctggaagagcaggtggcaacgcccgaggtgatcgacgccgccctgcgagacggcggaggcttcccgatggggccgcttgagctgacggacatgataggtcaggacgtcaactttgccgtgacctgctccgtgtttaacgccttctggcaggagcgtcgttttctgccgtcgctggtgcagcaggagctggtgctggcggggcgtctgggtaagaaaagcgggcagggcgtttaccgctggctggaggagaaacccgccgtcagctggctcgccccggtcagcgacagcttcagcccgatgcgcgcacagcgaagaagtgacggtgtcacggaaattgacgatctgttgctgatcgaaacgcagggtgaaaccgcgcaatcgctggcgctgcgccacggctgcccggtggtggtggtcgaccgcatcgagcgggatgtggccgtgatagccaccgcaccgggcaacccgcacgccgccacgcagaaagccatttactggttgcagcaccaggagaaacgggtggtacagattgccgattaccccggcctgctggtctggcgcacggtagcgatgattgccaacgaagcgctggacgccctgcaaaaaggggtcgccagcgagcaagacatcgataccgccatgcgcttaggggttaactatccctgcgggcccatcgcctggggcgaacgccttggctggcagcgtctgttaacgctgctggaaaacctgcaacgtcactacggcgaggaacgctatcgcccctgttcactgctgcgccagcgtgcgcttctggagagtagctatgagtcataa

SEQ ID NO: 116780 - DNA, 786 bp, Enterobacter cloacae
gtggaatctattctgagccatgttgagcagggcgtaatgaccattacgctgaaccgcccggagcgcctgaacagctttaacgacgtcatgcaccagcagctttccgaatgcctgaagcaggccgagcgcgatgacgccatccgctgcctgctgatcaccggggcaggacgcggtttctgcgccgggcaggatcttaacgaccgtaacgtcgacccgaacggccccgcgcccgatctgggcatgtccgttgagactttttacaacccgctggtgcgccgcctggcaaaactgccgaagccggtgatttgcgcggttaacggcgtggcggcgggggcgggtgccacgctggccctcggctgtgacatggtgattgcggcccgttcagccagctttgtgatggccttcagcaagctcgggctggtaccggactgcggcggaacctggctgctgccgcgcgtgaccggacgcgcccgcgccatggggctggcattgctgggcgataagctcagcgccgagcaggcacaggcctggggaatgatctggcaggtggtggacgacgaccagctctccgccaccgcacagcagatggcgctgcattttgcctcgcagccgacctttggcctgggcttgatcaagcaggcgattaacgccgccgaaaccaataccctcgacgcccagcttgatatggagcgcgactatcaacgtctggccggacgcagcgacgactaccgggaaggcgtcagcgcgttcctggcaaaacgcgcgccgaactttacggggaaataa

SEQ ID NO: 116781 - DNA, 768 bp, Enterobacter cloacae
atgagcgaactgattgtcacccgtcatggccgcgtgttgcagctgacgcttaaccgtccggcggcgcgcaacgcgctcaacaatgcgctgctcctgcaaatcgcggagcagcttgaggccgccgccgcggatgctgagatcgccgtctgcgtggtgtacggcaacgaacgctgctttgccgccggggccgatctcaacgaaatggcggagaaagacctgcccgccaccctgaacgatatccgtccgcagctgtgggcgcggatcaacgccttcaccaaaccgctgattgccgccgtgaacggctttgcgctgggggcaggctgtgagctggcgctgctctgcgatgtggtgattgccggtgataacgcccgttttggcctgccggaaatcaccctcgggatcatgccgggcgcagggggcacccagcggctgatccgcagcgtgggcaaatcgttggccagcaaaatggtgctgacgggcgaaagcatcacggcggttcaggcgcacagcgccgggctggccagcgacgtctacccggcctcgctgacgctggagtacgccctgaagcaggcggcgctgatggcgcgccactcgccgctggcgctacaggcggcgaagcaggcgcttcgccagtcgcaggaagtcccgcttcaggccgggctggcgcaggagcgtcagctgtttgcgctgctcgcggccaccgacgatcgccgggaaggtatcaacgcctttttacaaaaacgcaccccagactttaaaggacgctaa

SEQ ID NO: 116782 - DNA, 1071 bp, Enterobacter cloacae
atgacaacgtttcattcattaacagtggcaaaagtagaacccgaaacccgcgacgcggtgaccattaccttcgcggtgccgcaggcgttacaggaggcgtaccgcttccgtcccggtcagcatctgaccctgaaagccagtcctggcggggatgaactgcgccgctgctactccatctgccggagcaccgcgtgcggtgagatcagcgtggcggtcaaagccatcgagggcggacgtttttcccgctatgcccgggacgagatcaaaccgggcatggcgctggaggtaatggtgccccaggggcattttggctaccagccgcaggccgaacgcgaaggccactatctggcgattgccgccgggtccgggatcaccccgatgctggcgattttgtccgctacgctggccactgaagcccacagccacttcaccctgatttacggcaaccgcagcagccagagcatgatgttccgccgggcgctggcggacctgaaagataaatacccgcagcgtttgcagctgatcgccatcttcagccaggagacgctcgacagcgatctgctccatggccgcattgacggggaaaagctccaggcgctggcaaaaacgctggtgaatttccgtcagtacgatgaagccttcatctgcggcccgtcggcgatgatggatgaggccgaagcggcgctgcaagcgctgggtatgccggaaacagcgatccatcttgagcgctttaacacgccgggtaccgccgttaaacggacagccagcgtgcaggccgacgggcagaaggtcaccgtccgtcaggacgggcgcgacagggagatcaccctgacggcgtacgacgagagcattcttgacgcggccctgcgtcagggggcggatctgccttacgcctgcaagggcggcgtatgcgccacctgcaaatgcaaagtgctgcgcggaaaagtcgatatggcgaccaactacagcctggagccggacgagctggccgcaggctatgtgctgagctgtcaggcgctgccgttaaccgccgatgttatcgtcgattttgatgcgaaggggatggcatga

SEQ ID NO: 116783 - DNA, 498 bp, Enterobacter cloacae
atgcaacgcctcgtcgacatcgcgcctgcacaaatcccgcagatttgggcgctgttaagccagatccccgacccggaagtgccggtgctgaacatcaccgacttaggcatggtgcgcagcgtgaaggcgcagggggaaggctgggtcatcggcttcacgccaacctattcgggctgtccggcaacggagcatctgctgggggcgatccgcgaaaccctgaccggaaacggctttagtccggtacatattgtgctgcaactggaacccgcctggaccaccgactggatgaccgacgatgcccgcaggcgcctgcgtgaatatggcatcagcccgcctgtcggccatagctgccatgcccacgttcccgcggaggtgagttgcccgcgctgtgcgagcaccgatacctcgcttatcagtgaatttggttctacggcctgcaaagcgctctaccgctgcaatacctgccgtgagcccttcgactatttcaaatgtatttga

SEQ ID NO: 116784 - DNA, 747 bp, Enterobacter cloacae
atgaacaacgtatctgcttatgccctgcgtctgggcgacaacggtctggtgctctcacagcgtctgggcgcctggtgcggccacgcgccggagctggaaattgacctggcgctcgccaatatcggccttgatctgctcgggcaggcgcgcaattttctgacctacgccgctgaacgggagggtaagggcgatgaagacaccctggcctatggccgcgatgagcgtcagttccgcaatttactgctggtggaacagccaaacggcagcttcgccgacaccattgcccgtcagtatctgatggatgcgtggaacgtggcgctctacgagcggctgatccacagcagcgacagtcagcttgccgccatcgcggcaaaagccattaaggaggcgcgctatcacctgcgctttagccgcggctggctggtgcggctgggggacggaacagaaacctctgcacaaaaaatgcagcaggcggtggatagcctgtggcgctttacggctgaactgttcgacgccgacgacgtcgagctggcgctaattgatgacggcgtggcggttgatccgcgcgacctgcgggacccgtgggagcgcgaagtgtttgctggcctggcggaagccaccctccgcgtgcccgaagaggtggcgtatcgcacgggcggcaagaaggggctacatactgaacacctcgggccgatgctggcagagatgcagtatctccagcgcgtttaccccggccagcagtggtaa

SEQ ID NO: 116785 - DNA, 288 bp, Enterobacter cloacae
atgagcaatgtttactggccgttatacgaagtttttgtccgttcgaagcaggggctgtcgcaccggcatgtgggcagccttcacgctgccgacgaccgcatggcgctggaaaacgcgcgcgatgcctatacccgccgcagcgaaggctgttccatctgggtggtgaaggcgagtgaaatcgtcgcttcccagccggaagagagcggggagtttttcgatccggcggaaagcaaggtctaccgccatccgacgttttacaccatccctgatggcatcgagcatatgtga

SEQ ID NO: 116786 - DNA, 984 bp, Enterobacter cloacae
atgattcaccattttgctatttgtggtgatttaacgaatcacaagggtggttatgtgacgcaagaacaacgctttgagcaacgcatcgcacaggagacggccatcgagccgcaggactggatgccggatgcctaccgcaagacgctgatccgccagattggacagcacgcccattctgagattgtcggcatgctgccggaagggaactggatcacccgcgcgccgacgctgctccggaaagccattctgctggcgaaggtgcaggacgaagccggacacggcctgtacctctacagcgcggcggaaacgctgggctgcgcccgggaggacatctatcaaaagatgctcgacggcaagatgaaatactcctccatcttcaactatccgaccctgagctgggccgatatcggcgtcattggctggctggtggacggggcggccattgtgaaccaggtggcgctgtgccgtacgtcttacggtccgtatgcccgggcgatggtgaaaatctgtaaagaagaaagcttccaccagcgtcagggttttgaggcctgtatggcgctggcgcagggcagcgaagcccagcggcagatgttgcaggacgccatcaaccgtttctggtggcccgcgctgatgatgtttggacccaacgacgacaactccccaaacagcgcccgcagtctggcctggaagatcaaacgttttggcaacgatgagcttcgccagcgcttcgtggacaacacggtgcctcaggtggagatgctcggtatgaccgtgccggaccccgacctgcgtttcgatgaagcgagcggccactaccgcttcggcgaaatcgactggcaggaatttgacgaggtgatcaacgggcgcgggatctgcaaccacgaacgtctggccgcaaaacgtaaagcctgggacgacggcgcatgggtgcgtgaagccgctctggcccacgcggaaaaacaacgcgcccgccaggccgcataa

SEQ ID NO: 116787 - DNA, 2040 bp, Enterobacter cloacae
atgcagcagttagccagcttcttgtccggcacctggcaatcaggccggggccgcgagcgcaccatcacccacgccatcagcggggaaacgctatttgaagtcaccagcgaagggctggatatggcggccgcgcgccgttacgccattgaacacggcggggaagcgctccgcgcaatgagctttatcgagcgcgccgccatgctgaagacggtggccaaacatctgctgagccagaaggatcggttttatgccctgtcagcccagaccggcgcgacgaaggccgacagctgggtggatattgaaggcggtatcggcaccctcttcacctacgcaagcctcggcagccgtgagctgccggacgataccctgtggccggaggatgaactgatcccgctgtcgaaggaaggcggctttgcggcacgtcacgtgttaacgtcgaaatccggcgtggcggtgcatatcaacgcgttcaacttcccgtgctgggggatgctggaaaagctcgcgcccacctggcttgccgggatgcccgccatcatcaagcccgccaccgccaccgcgcaggtgactcaggcgatggtgaaagcgatcgtcgagagcggactggtgccggacggcgccatcagcctaatctgtggtggcgcgggcgatctgcttaaccagcttgacagccaggacgtggtgacgtttaccgggtcggccagcaccgggcagagcctgcgcgtccacccgaatatcgtcgcgcattccattccgtttaccatggaagcagattctcttaactgctgcgtgctgggtgaggacgtgacgccggaacacccggagtttgcactgtttattcgcgaagtggtgcgcgagatgactgccaaagccgggcaaaaatgtaccgccatccgccgcatcatcgtgccggaagcgcagattgacgccgtcagccaggcgctgattgcgcggctggagaaagtagtcgtcggcgatccggcccaggaaggggtgaagatgggggccctcgtcaacggtgagcaacgtgctgacgtgcaggaaaaagtcgatcatctgcttgccgcgggctgccagatccgtctgggtggtaaagctgatttgcaggcggctggcgcattcttcccgcccaccctgctgttctgcccgcagccggacgaaaccccggccgttcacgccaccgaagcctttggccccgtcgcaaccctgatgccctgccgtaacaccgaacacgccatgcagctggcgcgggcgggcggcggcagcctggcgggaacgctggttacggcagatacccgcgtggcgcggcagtttattgccggggcagcgcgcgcccacggacgtattcagatcctcaaccaggaatcctcgaaagaatccaccggccacggttcaccgctgccacaactggtgcacggtggtccgggacgtgcgggcggcggcgaagagctgggcggcctgcgcgcggtgaagcactatcttcagcgcacggccattcagggcagcccgtccatgctcgccgcgatcggtaaacagtgggtccgtggcgcggaggtgcaggaagatcgcgttcatcccttccgtaaatacttcgaggagttacagccgggcgacagcctgctgaccccgcgtcgtaccctgacggaagcggatatcgtgaattttgcctgcctgagcggggatcatttctacgcccatatggacaaaattggcgcggcggagtcgatttttggtgagcgcgtggtacacggttatttcctgatttccgccgcagcggggctgtttgtcgatgccggggttgggccggttattgccaactacggtatggaaaacctgcgctttatcgagccggtcaagccgggcgataccattcaggtgcgcctgacctgtaaacgtaaaacgctgaagaaacagcgcactgccgaggaaaaacccaccggcgtggtggaatgggcggtggagatcttcaaccagcaccagcaggccgtggcgctctactccatcctgacgctggtggcgcgccagcagggtgacttttaa

SEQ ID NO: 116788 - DNA, 483 bp, Enterobacter cloacae
atggcaattcctgtttaccttttcttaactgacgatggtgggtcaaaaattacaggctcggtggatgttcgttaccgtgagggaagcattgaagtcactggctttacacacaatcttcgcctcccaaccgatccattgaccgggaaaattaccagtaaacgtaaccatgccccagtcgtatttcaaaaagaaatcgattcctcctccccttacctgatgaaagccgttgcgactggccaaacccttaaaacggctgagttcaggtggtatcgcattaatgacgccggacaggaagtagaatattacaatatgcgtctcgataatattcgcgtcgtttccgtcacgccattgatgcatgacattaaagacccgatgaaagaaaaacataatcatcttgaagtcgtggagctacgctatgataaaataacatggacatattgcgatggtaatatacagtttgcagactgttgggctgagcgttaa

SEQ ID NO: 116789 - DNA, 396 bp, Enterobacter cloacae
atgcgcgacgttcgggtttttaactggcgaactggagtcattatctttatttttcttatattcattgcataccctttccgcgatctgtttaccgtgtatgaaaacttgcaggaaaaaatcaaggttaacgatcgtttaactctttacatcacccaggttgagacgggctcactatctaaaaacaggtatcatatttatctcgttgatgcgaaaaaaagcccggaagacttcatgtctaacattaaagatatcaatcccgtcatgatcaccgatgacgataaagcttctgtggcaattaaaaatggagacatttatcttcgcgttcgcggtacggtttattcgttcacgacggcaggttttgatgtccgcatgcatctcgatagctcgccttactga

SEQ ID NO: 116790 - DNA, 2274 bp, Enterobacter cloacae
atgggaagcaattcttctttttctgcccgtagaacggcactggccatggccgttgcgctctgttgcgcctggcaatcccctgtttacgctcacggcagcgaggcgcatatggtcccgatggacaaaacgcttcaggcgtttggcgcggacgtgcagtgggatgattacgcccagatgttcaccatcgtcaaagacggtgcctttgtgaaggtcaaacccggcgcaaataccgccatcgttaacggcaaaccgctgacgctccaggtgcccgtggtgatgaagaacaataaggcgtttatcccggagacctttatcaacgatgtctttcagtccggtcttgatcagacattccaggttgaaaaaagcccccacccgttaaacgcgctgacggctgatgaaatcaaccaggccgtagccattgtgaaagcctctgcggattttaaacccaatacccgctttacccagattgcgctggcggagccagaaaaggccaaagtctgggactttgtgcttaacggcacggcggtggatgcgccccgccaggccaatatcatcatgcttgatggtaaacacatcatcgaaagccgggtggatctgaaggacaaaaagatcctccgctgggagccgatcaaagacgcgcacggcatggtgctgctggatgacttcaataccgtgcagcagatcatcaatgaaagcccggagtttgccgccgtgctgaaaaagcgcggcattaccgacccgaagaaagtgatcaccactccgcttaccgtcggcttttttgacggcaaggatgggctgaaacaggaagaccgcctgctgaaagtgatcagctatctcgacgtgggcgacggtaactactgggcgcacccgatcgaaaacctggttgcggtggtggatctcgagcagaagaaaatccagaagattgaggaaggcccggtcgtgccggttccgctcacgccgcgcccttatgatggccgcgaccgcgttgaaacggtgaaaaaaccgctggaaattatcgagccggaaggcaagaactacaccatcaccggggatagggtgcactggcagaactgggattttcatctgagcctggactcacgcgtcggcccgataatctccaccgtgacctataacgacaacggcaaaaagcgacaggtgatgtatcagggatcgctcggcggcatgattgtgccgtacggcgacccggatatcggctggtactttaaagcctatctggactccggcgattacggcatgggtaccctgacctccccgctggtgcgcggcaaggatgttccgtctaacgccgtgatgctcaacgaaaccatcccggattacaccggcgcgccaatggagatccccagggcgatcgccattttcgagcgttacgccgggccggaatataagcatcaggaattaggtaaacccaacgtcagcaccgaacgccgcgagctggtggtgcgctgggtcagcaccgtgggtaactacgattacatcttcgactgggtattccacgaaaacggcactatcggcattgatgcaggggctacgggcattgaagcggtgaaaggcgtgcagacgaaaaccatgcatgatgccaccgcgaaggatgacacccgatacggaacgctgatcgaccataatattgtcggtaccacccaccagcacatctacaacttccgtctggatatggacgtggacggcatcaacaataagctggtggccatggatccggacgtcaaaccgaacaccgctggcggaccgcgcaccagcaccatgcaggttaatcagtatgatattgataccgaacagcaggcggcgcagaagtttgacccgggcaccatccgcctgctgagcaataccagcaaagagaaccgcatgggcaacccggtctcgtatcagatcatcccttacgcgggcggcacacacccggtagcgtccggcgcgaagtttgccccggacgagtggatttatcaccgcctgagctttatggataaacagctgtgggtgacgcgttaccatcccgacgagatgtacccggagggaaaatacccgaaccgttccacgcacgataccggcctcggccagtacagcaaagataacgaatcgctgaacgaccaggataacgtcatctggatgaccaccggcaccacccatgtcgcccgcgccgaggagtggccgataatgccgacggaatgggtgcacacgttactcaagccgtggaatttctttgacgagacgccaacgctcggcaagaaaaaagagcagaaataa

SEQ ID NO: 116791 - DNA, 1974 bp, Enterobacter cloacae
atgagaatcaatgagatcgtcaggagtctcgcgctggcgggatgttttatttctgccagttccgcctgggccgcagaagcacctaaggatgccaccgcagcaacgcaacaggccaacaacgcactcttcaaccagcttcctttctccgataacaccgattttaccaacgcccacaaagggtttattgccccgctgcctcaggacattatcaaaggtgagcaaggcaacaccgtctgggatccgcagcagtacgcttttatcaaagaaggcgataaggcgcccgactcggttaacccgagcttatggcgtcagtcccagctgattaacatcagcggtctgtttgaagtgaccgaaggcgtctaccagatccgtaacctcgacctgtcaaacatgaccattattgaaggtaaagaaggcattaccgtggtcgacccgctggtgtcggcggaaacggccaaagtcgggatggatctttactataaaaatcgcggtaataagcctgtggtcgccgttatttacacccacagccacgttgaccactatggcggcgtgcgcggcgtggtggatgaagcagatgtgaagtccggtaaggtgaaaatctacgcgcccgccggatttatggaggccgccgtcgcggagaatatcatggcgggtaacgtcatgagccgccgcgccagctatatgtacggcaacctgctgaagccggatgcgaagggccaggtcggcgcgggtctcggcaccaccacctccgccgggacggtgaccctgatcgccccgaccaatatcatcgagaaagatggtcagaaagaggtgatcgacggcctgacctatgattttatgctcgcgccgggatcggaagcgccttctgagatgctctggtatatcgaagagaaaaagctgatcgagtcagcggaagatgtcacccataccctgcacaacacctactccctgcgcggcgcgaaaattcgtgagccgttgccatggtcgaaatacatcaaccaggcgattgtacgctggggtgataaagccgaaatcattatggcgcagcaccactggccgacatggggcaacgacaacgtggttaacctgctgaaaagccagcgcgacctgtatcgctacatcaacgaccagaccctgcgcatggcgaacgaagggctgacccgtgacgagattgccgccaacttcaaactgccaaactccctggccaatacctgggcaaaccgtggctattacggttctgtcagccatgacgttaaagcgacctacgtgctctatttaggctggtttgacggcaacccggcgaccctggacgaactgccgcctgaagaagccgcgaagaaatttgtggactacatgggcggtgcggatgccatcctgagcaaagcgaaaaccgactttgaccaggggaactaccgctgggtggctcaggtggtcagtaaagtggtctttgccgatccaaataatcaggccgcgcgaaacctggaagcggatgcgctggagcagctgggttatcaggctgaatcaggcccgtggcgtaacttctacctgaccggcgcccaggagctgcgtaacggcgtggtgaaaggaccgaccccgaacaccgccagcccggataccgtgcgcgcgatgacgccagaaatgttctttgactatctggcggtgcacattaacggtgaaaaagcggcggatgcaaaatcggtgtttaacatcgacctcggcagcgacggcggtaaatacaagctggagctggaaaatggcgtgctgaaccacacggcgaacgccgaagcgaaagacgctgacgcgaccgtgaccctcaaccgcgatacgctgaataaaatcatcctgaaagaagtgacgcttaaacaggcgcaggataacggcgatatcaaagtgaccggcgatgccgcaaaacttgatgccatgctcggttacatggataaatttgaattctggtttaacattgtgaccccgtaa

SEQ ID NO: 116792 - DNA, 1107 bp, Enterobacter cloacae
atggaaaaaagacatccagccacacccgaacccgcgatatggcctacccgtaaatcaatggttgttcacgggctggccgtgaacctgccgtggctcgcctttgtgaatgccagctttgcccttatggtcctgctgcgcaattcgctgttcggccatatcgatgccctcctgcacatcagcccccctctgcggcagatgattgacgcctccatgctgggcgtggtgatcctttccgtagcgctggtgatcatggcctggcgccacatccgcggcgtcagcgccgttttgtttatgtgcagcctgctgtggtcgataagttgttactggtttatcaacgtgttacagcttcctcatccctggcctatattcgttaccctgctgatggccggtatgaccgcgctctattttcacccggttgcactgctctgcttcaccgttccgctatgggtaagcctgcccgttgccagcatgctgctgaatcaggaaattaattatcgctttgccgggctgtgggtggtgttcacgttcattctcgtgtgcgggcgctatatcctgttgagctggtttgaagaggcgtggcgtcgcaaccagcagaatcagcgtttaatttcacggctggatgcgctggcccatcaggatccgctgacgaaaacggccaaccgccgggcgatggagctggtgctggaaaatgccgtagagcaaggcaaacgcttcgcggtgctgatgctggatgtcgattacttcaaactgtataacgacacctacggtcaccaggccggagatgcgtgtctcgcgcgggtggcagaggtgctgaacacctcggtgcgcacgccagaggatgtggtttcgcgctacggtggcgaggagtttgtggtgatcctctttgactgcgaagaaagcgttgctgagaaagtcgccgcgcggatccaggctggcctgcgcaacgcagccattccgcacagcgcgtcgaaggttagtgaatgtgtgacggcgagtatgggcattgcaggctataccgcagggctggccggcccggaaatcatcgcccgcgccgatgcggcgctgtacagggcgaaggaggtcgggcgggatcggtggtcgctgtaa

SEQ ID NO: 116793 - DNA, 1500 bp, Enterobacter cloacae
atgtccgaatcacatgtcgccatcctgccgggcgtgcagcagtttttagatcgccagcacggcctgtggatcgaagggcgtcaggcggcatccgatagcgaaaagcgtctgaacgtctacaacccggcgaccggagaggttattgcctctaccgccgatgccagcgtcgatgatgtcgatcgtgcggtgatgtctggctggcgcgcctttgtcgcccgaagctgggccggacggctgccggcagagcgggaacgtatcctgctgcggtttgcggatctggtggaacagcatggcgaagagctggcacagctcgaaaccctggagcaggggaaatcgattaacatttcccgcgccttcgaggtgggctgcaccctgaactggatgcgctacacggcagggctgaccaccaaaattgccggtaaaactctcgatctctcgattccactgccgcagggcgcgcgttatcaggcgtggacgcgtaaagagccggtgggagtcgtggcggggattgtgccgtggaacttcccgctgatgattggcatgtggaaagtgatgcccgcgctggcggcaggttgctccatcgtgatcaaaccgtcggaaaccacgccgctcaccctgttacgggtggcggaactggcgagcgaggcggggatcccggagggtgtgttcaacgtggtgaccggcagtggcgccgtctgtggcgcggcgctgacctcgcacccgcgcattgccaaagtgagctttaccggttcgacggcgacgggcaagcagattgcccgcgcggcggcggacacgctaacgggcgtgacgctggagctgggcggcaaaaacccggccatcgtgctgaaagatgccgacccggcgtgggtgattgaagggctgatgaccggcagcttcctgaaccaggggcaggtctgcgcggccagctcgcgcatttatattgaggctccgctgttcgacacgctggtcagcgggtttgaacaggccgtgaaatccctcagcgtcgggccgggcatgtcgccggaggcgtttatcaacccgctggtgtcgcgcgcccactgcgataaggttcaggcgttcctggatgaggcgaaggcgcacaatgcggagctgatcgccgggaaccgggggccagacggcaaaggctattacgtttcgccaacgctggtggtcaacccggataatcatctgcgactgacgcgtgaagaggtcttcgggccggtggtgaacctggttcgtgtggccgatggggaagaggcgcttcagctggcgaacgacactgaatatggcttaacggccagcgtctggacgcagaacatcagtaaagcgctggcgtataccgacaggttacaggccggaacagtgtgggtgaacagccacacgctgatagacgccaacctgccgttcggcggcatgaagcagtccggcaccgggcgcgatttcggccccgactggctggacggctggtgtgaaaccaagtcggtgtgtgtgcggtattaa

SEQ ID NO: 116794 - DNA, 909 bp, Enterobacter cloacae
atggcgtgtgcaagcgaacaggacaattttcagcagtggctggcgcaaattaaccaggtttgtgggcgctttgcggcacgtccgttagagggggcgtttctcggcgagctggaaaccagctacacccaaagtctgaagctgagcacggtgaccgccgcaggcgttaacctgtttcgcacccgtcaggagatcagaaacggcaacgacgcctggttctacaccgtgtttcagctggaaggcagcgccggaatcgaacaggacgaccagcgcgcgatgctgaaagccggggatatcacgctgattgacgcctcccgcccgtgctccatttactggcaggagcgttcccgccagatttcgctcctgctcccgcgacaaatcattgagcaacacgcgcgttttcaggaagtgaggtgcgcgctgcccctttcccgcagtctgcctaccgtacagctgagctaccgtctgctacaggagagcatgggcaatgccgatctcagcgccagtgaaagcgaagcggcgcttgaggcgatggtgtgtctgctgcgtccggccttccagcagcgtgacgaggtgctgccgcgcaaggagcgtcagttccgccacgttctgtccctgattgatgatcatattcagtcggaggcgttaagaccggagtggatagcctcagagagcggcatgtccgtgcgtagcttgtaccgcatgtttgccgggaaagggctggtggtagcgcagtatattaagaaccgtcgcctcgatttatgcgctcaggcgctgcgttccatcagcgatgacgaaaagctggcggggattggctacagctggggtttcaccgaccatagccatttttccaccgcctttaagcagcgtttcggggtttcgccgggcgaataccgcaggcgttatcgctag

SEQ ID NO: 116795 - DNA, 318 bp, Enterobacter cloacae
atgaaacgatttgctctgatgttactggcgctggggatgaaagttcacgccgccacgcttacgctcaacgatgcgcgtgcccaggggcgcgtaggggaaaccctgagcggctatcttgcgcccgttcagcacgacgctgaaaccctggcgctggtgaaccgtatcaacgccgcacgcacggaaagttaccagcagctggctgacagtaataatttgcccgtcgacgaggtggcgaaaatggcgggacaaaagctggtggcccgcgcgcagccgggtgagtacgtgaagggaattaacggcaagtggctgaaaaaatag

SEQ ID NO: 116796 - DNA, 192 bp, Enterobacter cloacae
atgaaaaagagggctggtgtactcaccgtggccgtcgtcgcgctgctgtcaggctgcacgccgcgcattgaagtggcggcgcccaaagagccgatcaccatcaacatgaacgtgaaaatcgagcatgaaatccatatcaaggtggataaagacgttgaagccctgctgaaatcccgcagcgatctgttctga

SEQ ID NO: 116797 - DNA, 2640 bp, Enterobacter cloacae
atgaagggtaaatacaaagccgcaatcgcgctattactgctgctatttcttgtgccgctgacgctgctgatgacgctcgcccagtgggtacccacgcttgccgggatctggcttcccgttggaacgcgcatcgcatttgaaaaaagcccacggctcacgcgccacgccctgatcatccccgatctccgctatctggtagaagagtgtgaaattgcccgcgtggaaaacgtgaccctgtcacatcccagccgctgggatctggatattggcgcacttacacttaactctgtctgcctgagcaaattaccgcaatcggcgccctcaacggtggcgccgaaaacgctggcgcagtggcaggccatcctgcccaacacctggctgaccatccaccgctttaccctttctccctggcagcagtgggagggtgagctgcaagcctcactcacgccagcccgccaggacatcacctataacggcaagcaggtgagcattaaggggcagttgcgcggccagaccctctccatcagccagttcgatgtgcaactgccggatcagccgcagcccgtgaagctggttggtgaatttaccctgccgctggtgccggacggcgtgccggtgaaagggcatacggtcgcgacctttaacgtgccacagttatcctcgctggtcgatgccgatctggactgggaggacaatcagggccagctggtggtcatggcgcgggacaaccccgagccgctgctcgatttaccgtggcagatcaccgctcagcagctgaccatcagcgacggacgctggaactggttagcctccggcgtgccaatgagcggacgcgtcgggctgaaagtggataactggcagcaggggctggagaaagccaccttcacggggcggctcaacgtgctgacccagggggatgcgggtaagggcaacgcggtgctgaatatcggtcccggctcgctcagtatggataacagcgctatgccgctgcacctgagcggggaagccaagcaaaacgatctgatcctgtatgccaggctcccggcgatgctgaccggcagcctttacgatccgcagcttacgtttgaacccggcgctttattgcgctcgcgcgggcgcatcatcgactcgctggatatcgatgagatccgctggccgctggcgggcgtgaagctcacgcagaagggcgtggacggccgcctgcaagccattctgcgggcgcatgaaaacgagatgggcgattttgagctgcatctggacggccaggctaacgactttttaccggacaacggtttgtggcagtggcgctactggggtaaagggaatttcacgccaatgaacgcgcgctgggatgtccggggaaccggggagtggcgcgacaacgttatcgaactgaccgatctttccacggggttcgacaaattgcagtacggtacgatgctggtcagcaagccgcgcctggtgctggatcacccggtgcgctggtcgcgggacccggataaccccacctttagcggcgcgctcgcgcttaacgccgggcaaacaagcttttcaggcggaagcgtgctgccgccgtccgttttgaccttcagtgttgacgggacagacccgacggtgttccagtttaaagggaacctgcatgcggacgacatcggcccggtccaggtgaatggacgctgggacggcgaacgccttcgcggtcaggcctggtggccaaaacagtctcttacggtgtttcagccgctgatcccgccagactggaaaatgaccctgcgcggcggcgaaatgtacgcgcaggtggctttctccgcggcccccgatcaggggtttgaggccggggggcacggggtgctgaaagcgggcagcgcgtggatgccggataacgagatcaacggcgtggattttgttcttccgttccgcttaagccagggtacctggtcgctgggcacgcgcgggccggtaacgttacgaatcgacgaggtgaaaaacctggtcacagcccgaaatatcaccgcggatctccagggcgattatccctggaccgaagcgaacccgctcctgctcaccaacgtgaaggtggaagcgctcggcgggaaaatcaccatgcagcagttgagaatgccgcagcacgatccggctttactgcgcgtggataatatatcctccagcgaactcataagcgcggtgaatccgaagcagtttgccatgtccggcccggtgagcggcgcgctgccgttctggctggacaatgaaaaatggatcattaaagatggctggctgaccaacccggggccgatgacgctgcgcatcgaccaggacacggcggatgccattgtgaaagacaatatggttgcaggggcggcgatcaactggctccgctatatggaaatttcgcagtcgtggacaaaactcaatgtggataatctgggtgtgttaaccatgcaggcggccattaaaggcaccagccgcgtcgaaggtaaaagcagtttcgtaaatctgaattacacccatgaagagaacatttttaccctctggcgcagcctgcgctttggggacaatctgcaaacatggtttgagcaacatgcggcgataccccttctccgcggttcgacaggcaaggaaagtgaggaacaacaatga

SEQ ID NO: 116798 - DNA, 990 bp, Enterobacter cloacae
atgaaactcgcggtatatagcacaaagcagtacgacaaaaagtatctgcaacatgttaacgagacgtacggtttcgatcttgaatttttcgactttctgctgactgaaaagacggctaaaaccgcccacggctgcgaaggcgtgtgtatcttcgttaacgacgacggtagccgaccggtgctggaagagttaaaaaaacagggcgtgaaatacattgccctgcgctgcgcgggctttaacaacgtcgatctcgatgccgccaaagagctgggtctgaaggtcgttcgcgtcccggcctattctccggaagccgtggcagaacatgcggtcgggatgatgatgtcgctcaaccgtcgtattcaccgtgcctatcagcgaacccgtgatgctaacttctctctggaagggctgaccggctttaccatgtacggtaaaaccgcaggcgtgatcggtaccggcaaaattggcgtggccgcccttcgcatcctgaaaggatttggcatgcgcctgctggcgtttgatccgtacccaagcgccgctgcgctggagctgggcgtggagtatgtcgatttgaaaacgctcttctcgcagtctgacgttatctccctgcactgtccgctgaccccggagaactatcatctgcttaaccagtcggcgttcgaccagatgaaagacggcgtgatgatcatcaataccagccgcggcgggctgatcgactctcaggcggctatcgaagcgttgaaaacgcaaaaaatcggcgcgttgggtatggatgtgtatgagaacgaacgcgatctgttctttgaggataaatctaatgacgtgatccaggacgacgtgttccgtcgcctgtctgcctgtcacaacgtgttgttcaccggacaccaggcgttcctgaccgccgaagcgctgatcagcatttcggaaaccacgctggggaatttgcgtcaactcgaaaagggagaagcgtgcccgaacgcgatagtgtaa

SEQ ID NO: 116799 - DNA, 174 bp, Enterobacter cloacae
atgaacgttgacgcactgacgcaaaaggcagaagaagaaatttcagcgcttataaccaaaaaaatttcagagttacgtaaaaaaacagggcaggaagtgtctgaaattgagtttatcgctcgtgaagccatgacaggcctcgaggggtatgaggtaaaaatcaaacttgtttaa

SEQ ID NO: 116800 - DNA, 279 bp, Enterobacter cloacae
atgaaaaaagcactattagggagtgtattggctttaacagtagcaagcttcggcgcgtctgcggcagatatgatttccaaggatgaagcgcaccacttcaagcttgaataccttggtaatgtatctgtaggggcttcaggtggacaaatttcttcaccttcagatcttcatcaaaaactctcaaaactggcagacgagaagggcgggaaatactacgtcattatcgctgcccgcgagcatggacctaacttccaggccgtcgcagaagtctttaaataa

SEQ ID NO: 116801 - DNA, 591 bp, Enterobacter cloacae
atgcacacgagtaaaaccctgaaaaggctgctagccgtatcagcagttgcagcaatgttcagcaccgttggcgtacaagcccagacaaccagcgccgcgcaaactcaaactgcggaccaggctcaaccggacgccagactcagctccggcgacgagaaagcattgaaggacatggcgcaggccaatatcaacgaagttgccgccgccaggctcgccctcgacaaggcccaaaccagtgaagtgaaaacattcgcccagaaaatggtcgacgatcacggcgccgcgctgaccaaagtccagaccgttgcccagaaaaagggcgtggagctgccgaccgaaccagacgccgcgcataaagccctgaactcaaggctggaaaaccagcgcggtgacgcttttgacaaaatgtatatggaatatgctggcgtgaaggaccacgagaaggtgctgtcgaagcttaagagcgacgccagtaaaatcgacgatccggatgtgaaggctctggccaacgagcacactccggtcgttgagcagcatctgaagtccgccgagcagatgtcaacgcgtgctggcgcatcagccgataaataa

SEQ ID NO: 116802 - DNA, 2097 bp, Enterobacter cloacae
gtgcacaacgataagcattatcccttcataaaagtcagcatgacggcgctggcgctgctggtcgctccgctcgcgctacaggcgcaggataaggccgctgaagcctcgcaggggacacaggaatcactgaacattgatgcggccgatcagcaggcgcccggaaccacaaaaaccaccgacgatgcctcaaccggcagcggtgatggaaagagagtcgcctcggccagccagccagcgacgccgctggtgcccggcaccgccacctgggacagcttccacggccagcttaacgcgcagaaatacagtcccctgacccaaattacggcggataacgtcgggaaattaacgaaagtctgggagttccataccggcgacgtctcggatggtaaaggcgatacgccagctaccgtctggtccgcaacgcccattttcgccaacgatacgctctatatcggcacgccattcgatcgcctgattgcgctggatccggggacgggtaaagagaagtggcactatgacaccaaatcgtcgcgcaaggcgctgacccagccggtgctgaaaaaccgcggcgtttcctactggcaggccaaaaatccggtgacgggtgaggcatgccagaagatggtctatatgggcaccgttgacggcaagctttttgcgctggacgccgattcaggcaaaccgtgcagcggctttgcggacaacggcgtgctggatctgaaccagtggaacaccgttaacgcgaagtatccgctctctgtcctgcaaccgccaaccgttgtcggcaaccatctgctggtgggctgggccgggaaagactgggcctatgccgaagcccctccgggcaccgtcttttcagtcaacgcccagaccggtaagcttgagtggacctttgaggcgatcccggcagagatccgcaagcgtaccggtaccgccaacgtctggacgcacatgtccgccgatgaggccaacgggctggtctatctcccggtctcatcgccgtctcccaactattggggcggcaaccgcgtggacgctattccgcttggcacctcgaccaccgccctggacatcaacaccggtaaagtggtctggtcccgtcagtgggtacaccacgacgtctgggattacgatatcaactccgccccgacgctgatggacatcaccgtagacggcaagcagatcccggcgctggtgcaggccaccaagcagggtttcctgtttgtggttaaccgcctgacgggggaggacgtatggccaatcgaagaacgtccggttccgcagggtgatgggtcggttcagggtgaagttctctcgcccacgcagccattcccgaccaaacccgcgccgctgctcgaccagtcgaaaaaaccggaaatctggaagctggcggatatcgtcggtggcggccagtgctcccgcctgtgggataacctgacctatgaaggaatgtataccccgccgaccaccaaaggcgaaggcacgctcacctatcccgatagcgccggcggcgtccagtggggcggggtggcgttcgatccgcaaaaacagatcgccatcgtcaacacctcgcatatcgtccagtacgtgaagctgtacagccgtgaggattacgataacgcagacaaagactccggcaacgaaagcggctttgccccacaggaaggcgccccgtacggtatgcgtctgctggtggcgagcaactggcttggcatgccgtgctggcaaccgccgtttggtgaaatcgtggcgctggacatgcacacgggcgatgtgaaatggcgtcgtccggttggctcctcccagcagtatggcttcttcatgccggaaagctggggttcgcctaccattggtggtccggcagtgacggcgggcggcgtgatcttcatcggtgcttcaatggatgccaaagtgcgtgcctactcggtagagagcggtgaagagctgtggtccgatcaggccgaagctccggcggtagcgaacccgtccgtctatgaatataaaggtcgccagtatgtggccttcgtggcaggcgggaatacgatcctgaaggatcaggtgggcgatcaggtggtggtctacgccttgccggaataa

SEQ ID NO: 116803 - DNA, 366 bp, Enterobacter cloacae
atgttgcattctcaatcctcgcgggtcggcagcattttgctgctgctgaccgcgataatagccttcgcggtagcgctatacgcctggtggacgccgcttaccggcgtcactggcaccattggcgcactgggcgtgatcattgccaacgtagtgctggcgatcctgacctttatgttacgtgcggcatcgcgtcgcgtggcgcgcgtttttctgattattgtcaccctggtggtgttggcgggtattgctttcgccgccgcgctgctgcaccagtacatcataacggcagtcatggtggtcggcctgattggtctgattatgctgagcagccattccgctcgttacaaccatcccgtcagaagctga

SEQ ID NO: 116804 - DNA, 1308 bp, Enterobacter cloacae
atgatgaataaagccacaactctctcagctaatattacaacacgctctaactggcactggcactggcactggcactggcactggcactggcactggcactggcaggataatatctggacgctgggcctttatggtacagccgtcggagcgggaacactgttccttcccgtggaaatcggcacccgtggtccggttatttttctggttatgctcctgctggggctgccgttatccctgatcccccatttactcctttgtcgtgtgtatatgcgtgaagagaagactgaaaacggcacgttgccgatcttcggctctttcttcagcggaaggggtgaaaagctgatcaccctgttctattgtgtgaccttcttcccggtaaccctggtttacggggtggcgctgattaatgcgctgagtaatttactggtggagcatctgcatattaccgccatcagccgtgggccattgtcgtttatcgtggttgctgcgctgtatgtggtgcttagcaagggccgggacagagtcgtggccattatgagcgcgctggcgctgccgttcgcggcatctgtactgctgatcgccgtatcacttatcccgggatggcatctgtctaacctgaccgatacggccgctgaaatgaacgccacgccgctgccggtaacgctgaaaaatatctggctgacgctgccgcttattaccttctcgttttgctgtgcgcctatggtctccccgctgagctcttactaccgggagaggaaagcggagggtgagaaaaaggcactgttcgtgatccgtatcgcctacttagctatcttcgccagtatcctctttttcgtgctgagctgcgtgctggggatcccccatgacaactttgtgcgagcgaaggcggaaaacctgaatgtgctgtcggtgatgaaaggaaacggtgatttcagcctgatttaccacattgccccgctcatcgctatcatcggtatgacgaaatccttcctcggcgtaggtctgtcggtcgcacaaacgtttggtcagctggctgccagcgtatccggcaaaaaggccaacgccagcaagcggctggcctctctggcgctgttcctgctgacctatggcattgtttatgccaatccggatgtgctcagcctgattgaaatgttctgcggaccactgatcgcggtgatcctgttccttatcccggcgtacctcatatacacccgcccctcgctggcagagcttcgcggcgtgacggtgtttttggttgttctgggcgggctggcaacgctgtctgcattgctctggacaatgctttag

SEQ ID NO: 116805 - DNA, 240 bp, Enterobacter cloacae
atgtttgtggaactggtttatgacaagcgaaacgtacaggggctggagggagccagggaaatcattctggccgaactgacaaaacgcgtgcaccggatttttcctgatgccagcgtgacggttaagccaatgcaagcgaacggcctgaacagcgacgccagcaaaagcgaccgtgaaaagctcaaccgcatgcttgaggagatgttcgaagagtcggacatgtggttaatacaagagtaa

SEQ ID NO: 116806 - DNA, 747 bp, Enterobacter cloacae
gtggcggggtggttatccctgcccgctatcctgctgttaagtatcccctttatcacgctgattagcgtcacgccctggcatcatctgaagctggcctggcgcgacgacagcgccattgccgtctctatgggactgggtgtgctggcactcggaattatcattcttatcggcatgccggtggcatggtggctgtcacaagccacgggtcgaaaacgattgatcggtgaactgctggtgatgatccctctgctgacgccaccgctggcaatggggatcttgctggtttcggctttcgggccttatggcgtgattggccgctggctttcactgttgggagctacgctggtaaataatccggcggcgtttgtgctggctcaggtttacggcgctttgccttattttatcgtggtgtcgcgttcggcgtttgccactgttcccaaaaatattcttgaagcgggacaaacgttgggagcttctccctggaaccgctttcgttttcttacattacccctggcattgcctggtctggcttctgccgtaacactcgcctgggttcgcgcggtaggcgagttcgggatcgtgatgatctttgcttatttcccgcagggtataccggtaaagctgtataccaatctgcaaaatgacggggtggacacagtatatactttgctatggatgctgctggtagtgacgcttcccctgccaatagtctgctttgctcttggcaaacgaatggccaggaaatga

SEQ ID NO: 116807 - DNA, 915 bp, Enterobacter cloacae
atgcaggttgtgctggtggcggttgcgctgctgcaaatgccatccatggcgctggcaaaggatatcagggtgacttatgccggttccatgggcaaagtaatggaccaggggttaggtccggctttttccagagcaaataacgacggctatcaggggcagggccagggtgcatacgggatggcacgcctgcttgcaagccacaaaattgaggccgatgtgtttgtctccatcaccccggggccgatgcaaattctcaaagacgccgggctgatagatgaggcggtccctgtcgccagtaccagcatggtggtcgcttacagtcctgagggtaaacatgcagcgcagtttgaacaggccaacagaaagaaagacggctcgtggctgactctgctgacgcagaaagatgtcttatttggccgcaccgatccttatgtcgacccaaaaggccagaatattgtgtttagcctgatgctggcggaaaagtattacaacatgccgggcatcaccgataaaattttaggctcgctgcaaaacccacagcagactcatcaggaaggagggctgctggcgcgtctggaaagcggtcaggtggatgcagcagcgggatacgagagtgaagttcgctcagcgcatttgccgtatgtcgcgctgccggatgaaataaacctcagcaacccggcgatgacgaaacagtggtatgacaccgtcagttttaccattaaagacagcaaaggccaggatcaaattctgcacactcaaccaatggtgttctatgcggcggtgctgaaaaacgcgccgaatggtgtagaacagggacaaaagttcgtatcgttcatgcaaagcgccgaggggcagaaattgttcaaagcgtttggctacgccgaacctaaaggagacagcttatacgcccgctaa

SEQ ID NO: 116808 - DNA, 2169 bp, Enterobacter cloacae
atgatttttaaaggcagggctaatcgcgcgaaagcgcccgcaggattaattcctgcttccttctcactttcactgcttgcgctggcaatgtccgccgtcatgcacccggcacaggcggatgaaaatacgcaagaacaagagatggttgtctacggtgacgggaacgggagcgccgactcgcagcaggattatgcggtaaaaaccacgcgttcaggcaccaaaatgctgctgaccccgcgcgatatcccccagtcagtcagcgtcgtgacgcgccagcgtatgcaggatcaagacctgcaaaccattgaccaggtacttaccaatgccaccggcgtttcgtcgcagcaggttgatagcgagcgttccagctacttttcccgcggctttgaaatcaccaatttcgcctacgatgagatccccacatcaatgggcgacgcgtggaactttggcgatgcgcaggaagatactgccatttatgatcgtatagagattgtgcgtggcgcaaacggcctgatgaccggcgctggcgatccgggagcaacggtgaacatggtgcgtaaacgtgccgacagtaaaaccttcaggggcaacgtcagcgcaagttacggaagctggaacaaacagcgttatgtgggcgacatctccgcgcccctcaattccgacggcagcctgcgtgggcgcgtcgtggcaggttatcaggatcaggacagctggcttgacagatatggcaagcgcaagaaatttctctatggcgtcattgaaggcgatgtaacggaacacacgacggcctcgctgggctgggactatcagcaaacaaacacagccaacccgacctggggcggattacccagcctgtacagtaacggcagccgtacccattacgatcgcaacgtcaatacctcggcagactggacgggatactccgttgagtcgcgtaaagtttttgctaacctcacccacaactgggataacggctggtcggtgcgtttcaatggaacccacggcgagcaaacgttcaatgataccctgctttatgtgatgggcaatccggacgtcaccaccggagaaggcgcatcaggctggggtagtaaggatcgcggcaagcgcactctggacgcctttgatgcctacgccagcgggccttttgaacttctcgggcgtcaacatcagctgatggccggagccaactatagccgacagcacaatgctaccttcagcaaagacgggccaatggacagtgctcagattggcatcttcaacaacagctgggacggcagcgtggtcgagccggagtggggcgactggtatcaaaatgcggatgatatcgtgcggcaaaaatcggcgtatacggcggcacgcctgtcgctggcggatccgttgtcgctaatcgttggcgcacgttatacccagtacagctcagatggcagcagcggcgatatgcgtaaatacaacaccaccccttacggcgggctggtgtatgacatcaacgacagcctttccgcttacgccagctatacctcaatttttgccccgcaaaccaaacgcacgaaagagggtgcatggctctctcccgtcaccggtaaaaattatgaaaccggcctgaaggcagactggatggacggtcgactgaccaccaacgttgccgtattccgcatagaacaggagaacgcgggggaggaaatcagcggggtattcgttaatggatccagcgaacaagcttatcgggcaaccaaaggcgcagtgagcaaaggggcggaatttgaggtgaacggtgccgttaccgacaatctacagcttaccttcagcgcgacccgctatgttgcccgtgattcagatggccgcttcaacagctttgcgccgcagacgcagcttaagctgttcagccgttaccgcgtcccgacgcttccggatctgaccgtaggcggcggcgtgaactggcagaatcaggtgtacaaagatgtcaccggtccggacggcgagacgcagcgcctctatcagggcagctatccgctcgtcgacttgttcgcgcagtatcagctgacgaaacagctggcggtgcaggcaaacgttcgtaacctgttcgaccgcgaatactactcataccttgatgactctgccgtctatggcgaaccgcgtagcgtctcggtaagcatgagttacacattctga

SEQ ID NO: 116809 - DNA, 1059 bp, Enterobacter cloacae
atgaacacattccattggctaaaaggaaagacatggggcttaagcattcttaccgcggcgttaaccctgagcgcaacggcgtcagcagccctcccggattcggctgaactcaagcagcgcgaactcgcggacggtctgtatgagatggtttactccccaacggcaaacgcgttgtacgttgcgagcgcgcagagtttcaaaaacgtcaacggcggggtgctctataaactggatcccacaacgcttgccacgcaaggtgaaacccacaccgacctgaaaaacttcggcatggcagcggacgataatggcaaggtctactacaccaccaacacccttgatggcggggtatcgaaagtggacgtgcaaagcggcaaggtgctacagcgcctgatgtttgaaggcaaagacaaggatggcgacccggttggtgcgcgtgaaatcctcttccacaagggacaactgtttatcggcggcgttgccgaccctgggtttatctccgtggttgatgccaacactatgacgctaaaagcccgaatcgaaaatgccgggaaatgggtgacggggattatttattcgccgctgacagaccgcctttatgccgccaatggcggcggtgaaattctggtgattaacccggagacgtataaaatcgaacagcgctggacgccgggagataaaaaagcgtatttgttcctgaatatggcagaagatccggccaccgggcgcctgttcgtgactgatgattcaaaagccaaaaccacactggtatttgatgagcgcagcgggaaagttatcaagcgtcttaaaggcgatgcgctgggaataaagtttaacgctgagcgcaacgaaattttcatcactcagcgcgaatccaggaaggtgttgcagcttgacgccgggagctatgctgtgaaaaacagctggacgttcaccagccatcccaacagtcttctggtaacaccggacggtaaaacgttatacgtaaccgtgaagcaggacttcaatgacgacaacacgacgaaaggcccggatagtgtggttcgtatttcattaaattaa

SEQ ID NO: 116810 - DNA, 2034 bp, Enterobacter cloacae
atgtcggtcaacaatcctttttttgaaattagcctgttgccttatcaggcgccacgttttgatgcgattaacgacagccattatcgtccggcatttgatgaagcaatgcgcctgaagcgtgcagacattgacgcgattatcgcgcagcgcgccgcgccggacttcgacaataccgtgctggcgctggaaaagagcggggccatgctgtcgcgcgtgagcagcgtgttcttcgccatgacgtccgcacacaccaacgatgatcttcaggcactggacgagcagttctccaccgaactggccgggctggcgaacgatatctggctaaacgatacgcttttcgcccgcgtggaagccgtctggcaggatcgcgaggcgctggatgccgaatcccgacgactgacggaggagatgtatcagcactttgttcttgctggcgcgcgtctgaatgccgatgaaaaagccgagctgaaagccctgaataccgaagccgccaccctgaccagccagttcaaccagcgcctgctggcggcgaacaaggcgggagggctggtggtggacaatgttcaccagcttgacgggctcagtgcggaggaggtggctgccgcggctcacgctgccgcagaaaaagggctgacggatcgctggctgatcccgcttttgaataccacgcaacagcccgcgctggcggcgctgtcgttgcgcgagacccgtaaaaagttgttcagcgcgggctgggaacgcactcagaaaggcgacgaaaacgatacgcgcgagctgatccgtcggcttaccgcgttgcgggcaagacaggcgcagctgctcggctttgacaactatgcgagctggagcattgccgatcagatggcgaaaacgccggaagccgcgctcgaattcatgcgcgggatagttcctgcggcacgcggcagggccgcgctggagcaggcggatattcagaaggtcatcgacgacgagcagggtggttttacggtacaggcctgggactgggcgttttatgccgaacgcgtgcgctcagcgaaatacgcgctggatgagtcgcagatcaaaccctatttcgcactcaataccgtgctggaagatggcgtattctggaccgccacgcagctgttcggtatccgctttgtcgagcgttttgatattccggtttaccacccggatgttcgcgtgtgggagattttcgaccacacgggtgaaggcatggcgctgttctacggcgactttttcgcgcgtgattccaaagcgggcggcgcgtggatggggaattttgttgagcagtcttatgagtttgccgcgcgtccggtgatttataacgtctgcaactatcacaaaccggcgaacgggcagaccgcgctgatctcctgggatgatgtgattaccctgttccacgagtttggccataccctgcatggcctgtttgccagccagcgctatgccacgctttcaggcaccaacacgccacgtgatttcgttgaatttccttcgcaaatcaatgaacactgggccagccatccgcaggtgtttgcgcactttgctcgtcactatcaaaccggcgaaccgatgccggatgcgctgcgggaaaaaatgctcaatgcgacccagtttaataagggttatgacatgacggagctattgagcgccgcgctgctggatatgaactggcacggcattcaggagcccgttgaagacgtggaagcctttgaagccgccgcgttgaaaaaagaggggttggatcttccagccgtaccgccgcgctatcgcagcagctatttcgcccatatcttcggcggcggctacgcggcagggtattacgcctatctctggacgcagatgctggcggacgatggatatcagtggtttgtcgagcagggcggtttgacgcgcgaaaacggacagaaattccgcgaggcgattttgtcccgcggcaacagcactgatttagctgaactttaccggaactggcgcgggcacgatccgaagattgaaccgatgctggagaatcgcggattgagtgcgtaa

SEQ ID NO: 116811 - DNA, 747 bp, Enterobacter cloacae
atgattattttagttaccggggcgacagcgggttttggtgaaagcatcacgcgtcgcttcgtcgccaacggacacaaagtgattgcaacagggcgtcgtcaggagcgtttgcaggagctaaaagacgagctgggtgacagcattctgaccgcgcagctggacgtccgcaaccgcgccgccatcgaagagatgattgccaacctgcctgccgaatggcgtgaaattgacgtgctggtcaataacgccggcctggcgctgggcatggagcctgcccacaaagccagcgtggaagactgggaaaacatgatcgacaccaacaacaaagggctggtgtacatgacccgcgccgtgctgccgggcatggttgaacgtaaccgtggccatatcattaacatcggttccaccgccggaagctggccttacgcgggcggcaacgtctatggcgcgaccaaagcctttgtccgccagttcagcctgaacctgcgcaccgacctgcacggaaccgcgatccgcgtgaccgatgttgaaccgggtctggtaggcggaaccgaattctccaacgtgcgtttcaaaggcgacgacgcgaaagcggataaaacctatgaaaacgcgaatgcgctgacgccggaagatatcaccgaaaccgtctggtgggtcgcgaatctgccgaagcatgtcaacatcaatacggttgagatgatgcccgtcagccagacctatgccggactaagcgtgcatcgcggttaa

SEQ ID NO: 116812 - DNA, 687 bp, Enterobacter cloacae
atggccgctgaatcgcaacttaatcctacccagcccgttaatcagcaaatatatcgcatcttacgccgtgatattgttcgctgcctgatcccaccgggaacgccactctcagaaaaagaggtttcggtacgttttgacgtttcccgtcagcccgtacgtgaggcgtttattaagctcgcagaaaacggccttattcagatccgccctcagcgcggcagctatgtaaataaaatttcgctttcgcaggtacggaatggctgttttgttcgccaggccatcgagtgcgccgtggtgcgtcgcgccgcgtcgctcatcaacgataaccagtgctacctgctggagcaaaacctgcatcagcaacgaatcgccatcgaccgcaaacagttaaacgactttttccagctggacgacgagttccaccagaaactggcgcagatcgccgagtgccagctcgcgtgggataccgtcgaaaacatcaaagctaccatcgaccgcgtgcgctacatgagcctcgaccatgtttctccgccagagatgttgctgcgccagcatcatgatattttcagcgcgctggaaaaacgcgacgtggaagccgtagataaagcgatgacgcttcaccttcaggaaattagtgagtcagttcagttaattcgccaggaaaaccgcgagtggttcagcgaagaataa

SEQ ID NO: 116813 - DNA, 384 bp, Enterobacter cloacae
atgtataagaaaattttgatgcctgttgacgtgtttgaaatggatttgagcgataaagcggtacgccacgcggtcaacctcgcgaaggcggaaggcgcgacgatcaccctggtcaacattctccctaacagcagccgttcgttactgcgggggttcaatgccgatattaagaagttcgaagagtatatgaccgccgagtctgataagaagatgaaggcgctgaaacggctctttgatatgtccccggacaatattgactgtgaagttcgcttcggcaacgtacgcgatgaaatcatcaagctcagcaaagaggggaaatatgatgtcattgttatcggatcaaaaaatccgagcattacaacccatgctgggttcaaatgctga

SEQ ID NO: 116814 - DNA, 204 bp, Enterobacter cloacae
atgatgacatacgaccgtaaccgaaatgcaatcaccactggcagccgcgtcatgattagcggcacaggccagttcggcgtgattaaagcgatccacagcgacggccttaatgccgagcaggtgcgccgtggtaaaacggttgaagtcgaaggatgcgaaggtaagttcgaaccgattgagctgattcgcctggggatgcactaa

SEQ ID NO: 116815 - DNA, 1464 bp, Enterobacter cloacae
atggaaaaccgtttattacaggcgaaggcaacgcgtcctcagtacgatcgcgacagcctcaaggcacgcattgttcatttagggtttggcgcgtttcaccgtgcgcaccaggcggtgtacaccgatatactcgccgcagaacagggcagcgactggggttactgcgaagttaacctgattggcggcgaacagcagatcgccgatctgaaggcacaggataatctttataccgtagcagagatgtctgccgatgcgtggacggcgcgcgtggtcggcgtcgtcaaaaatgcgctgcatgcgcaggtcgacggccttgaaaccgtgctggcggcgctgtgcgatccgcaggtcgccattgtttccctgaccatcaccgagaaagggtattgccactccccggcaaccggacaactgatgttcgatcatccgttaatcgttgccgacctgcaaaacccccatcagccgaaatctgcgccaggcgtagtggttgaagcgctggcgcggcgtaaggcggcggggctgccagcattcagcgtgatgtcatgcgataacatgccggaaaacggccacgtgatgcgcaatgtcacctgcgcctacgcgcgcgctgttgacggcgaactggccgactggattgaagcgaacgtcaccttcccgtcaaccatggtggaccgtattgtgcccgccgtcacggctgaaacgctggataaaattgaacagctgaccggcgtacgcgatccggcaggtgtcgcctgcgagccgttccgccagtgggtggtagaagataatttcgtcgccggacgtccacagtgggaaaaggccggtgcggaactggtttctgatgtcattccgtttgaagagatgaagctgcgtatgcttaacggcagccactcgttcctggcctatctcggctacctggccggttatcagcacattaacgactgcatggaagatgaacattatcgcgcagccgcgcatgcgctaatgctgaaagagcaggcgccgacgctgaaagtgaagggggtggatttagctcactatgccgacctgctgatcgcacgttacagcaatccggccctgcgccaccgcacctggcaaatcgccatggacggtagccagaaattgccgcagcggatgctcgattccgttcgctggcaccttgtccaccagaaacccttcccgctgctggccctcggtgttgcgggctggatgcgttatgtcggcggtgtggatgagcagggtaacgcgattgaggtgagcgatccgcagctggcggtgattcaggcggcggtaaacggtagcgctgaaggcgaaagccgcgttagcgcgctgttgggcattgaggctattttcggtaacgagctgccgaaggacgcggtgtttgtggctgcggtcatgcaggcctatcaaacgttgctgcaaaaaggcgcgaaggccacggttgctgagtacgcctcccggctttaa

SEQ ID NO: 116816 - DNA, 1539 bp, Enterobacter cloacae
atgtctcgtactgcaaaaaaaattactattccggttagtatcggctacggactaacggatattatgggcggcggtgcctttaccgttatcggcgcctggttattattcttctatacgacatttgttgggttgtcaccggttgaagcggcgtctattgttgctatagcgcgcattgtcgatgctatcgttagtttgtttatgggaagtttcactgaccatttttacaaaaactattttggtaaaaaatttggtcgccgacgtttctttttgctgatcggtgcaccgttgatgctggtctatgcattgctgtggcttgatggcatgacatacggtttttatctcgccgtctatctagcatttgaaattattgctgcaatggtactgatcccgtgggaaacgttaccgtcagaaatgacaaaagactttaaccagcggaccaaactctctacctgtcgcatgtttctttcagcgtccgggacgtttctggcgacatttattcccggattactgatcggctatttcggggaaaacagcgcccatgcctacctcataaacggcgttatttttgctgtactgtttatggtatgtgtattcatctcgtggaaagtgacctgggaacgcgagttgacgccggaaatgctctccgggttggaaaaaaacacacgcccacaaacagcaggagagaagctggctgcctttggacgactttttaaggagtatggttccaccctgaaaatccgggccttcaggaaacatctcgccatctatctgctgtcgtttaccggcaaagatgtctacaacacggtatttgtatttttctgcgtctactgtctgaatgtctcttcctcactggcaggcacgctgctgtcgatgagtattgtggggctgcccgtcacgttaattgcgggtatagggatcatcagatatgggccatcaaagctatatgtatttgcctattcactgatgttgctctgtttggggggcttctttgccgtgtaccagatccctgcgctgaataccgtcgcgacgctggtcattctggccggggtgtatcaggtggggcgctgcgtccttgagtttacaccgtggaacgtgttcacgttcattccagatatcgatgaaatggtcagccgtcagcgtcgtgagggactgtttgccgcggtaatgacattctcccgaaaaaccacggtcgctattgccacctttattgtgggtctcctgttacaaagcggcggatttgtaaaagggagccagacgcagccaaccgaagccatccacaccatcgcaatgctgatgttcatcggcactgctgccttgcttatcctggccctgtggcaggctctgacatttaacctgaacaagcgtacgcacaaaatctttgtggatgagctggatcgcctgaaagccaacggctctccccaacgcgtatccgccgaagctcgccgggtcgtggaagatttaacaggctattcctacgacaggttgtggcgtgagccgacggtccggtccggcgagcagacggtgcgcacccctgtatga

SEQ ID NO: 116817 - DNA, 1407 bp, Enterobacter cloacae
atgagttttattaacgataactttatgattggcaatgcgagaggtgttgaactttatcgtaacgtcgcgaaagcgctgccaattattgattatcactgtcacctggacgcgaaagatatcttcgagaataaaaatctcgataatattaccgaactctggctggctggcgatcattataaatggcgcgccatgcgcgccaacggtattgacgaaaaatacattatgggcgatgccccggcggaggataaatttgcggcatgggctgaaacggtcgaagcgagctatggaaatccgctctatcactggactcatttagaacttcaccactattttaactgtgacgaaccgctgggcaggcataactggcgtgaaataatggagcgctgcaatctgctattgcagcagcctgattttacgccgagggaactcattaaacgctccagggtagaagttatttgtacgacagatgctccgcttgatgatttacgctaccatcaattattgcgtgatgacgcgacgttcaacgttaaggtattaccgacctttcgtccggacgatgtttttgcgcaaaacgcggaacagtttgccgactttatcgatcgattaggtgagacgacaggatctaaaatccagacattcagcgattttgttaagggaatgagccagcgtattgcctggttccacgaaatcgggtgccgaatttccgatcacggacccgtggagatccattttcagtcagcagatgaaagtcaggttgaatccgtgtttgcccgaaagcgccggggtgaaaatctggacgcccgtaataatgcgattcttgacagtgccatttttattatgctggcgcataattacaggcagcataactgggcaatgcagatacacttcggtgcgattcgcaataataattcccgcatgtaccgttctttgggtagtaatactggttttgactcgctgaccgatcagtcgaatcttgcggccaatctcaaccaactcctggatgcaatggcgcaggctgaagctttgcccaaaaccattctatataacctcaacgccagctataacgatattgtcgcgacgactatcgctaattttcagactgcggaattgggcgttaaatcgccgatacagtttggctccggatggtggtttaacgacactcaacgcggaatggaaaaccagctacatagccttgcggatcaggggctattaatgaattttgtcggtatgttaaccgattcccgtagtctggtttcgtatactcgccacgattatttccgtcgtattttgtgcaatatcattggtggctgggtggagcgtggtgaagttccggataataacaccatcctaacgaagatggttaaaaatatttgccatgataatgctgaaaactatttcagattctaa

SEQ ID NO: 116818 - DNA, 1386 bp, Enterobacter cloacae
atgactcaagcacaacctcaaagaagtacgtcagatctggtgaaagccgccgtatctggctggctgggcaccgccctggagtttatggatttccagctctactcccttggcgccgcgctggtgtttcatgaaattttcttccctgagcagtccgcggccatggcgctgatcctggcgatgggcacctacggcgcaggctacatcgcgcgtattgtcggggcatttatcttcggcagaatgggcgacagaattggccgtaaaaaagtgctgtttatcaccatcaccatgatggggatctgcaccaccttaatcggcgtcctgccaacctacgcgcagatcgggattttcgcaccggtgctgctggtgacgctgcgtattattcaggggctgggcgcgggggctgaaatctccggcgcaggcaccatgctggccgaatacgccccgaagggtaaacgcggcatcatctcctcgctggtggccatgggcaccaactgcgggacgctgagcgccacggcgatctgggccgtgatgttctttgccctcgatcgtgaagaacttattgcctggggctggcgcgtgccgttcctcgccagcgtggtggtgatgatcttcgccatctggctgcgtatgaaccttaaagagagcccggtgtttgagaaggtaaacgatgccgaagccgttgcgccggttgctgcgcaggatacctcggtcggcgcgatgtttaagagcaaatcgttctggctggcgacggggctgcgctttggtcaggccggtaactctgggcttatccagaccttccttgccgggtacttggtacagacgctgttatttgataaggcgatcccaaccgatgcgctgatgatcagctcgattcttggcttcgtctccatcccgctgctgggctggctgtccgataaagtggggcgccgtctgccatatatcatccttaacatttcagccattattctggcttacccgatgctgtcgattatcgtcgataagagttacgcgccgggcgtgattatgctctctatcatcgttattcataactttgcggtgctcgggctgtttgcgctggaaaatatcaccatggcggagatgtttggttcgcgaaaccgctttacccgcatggcgatctccaaagaggcgggcggtctcgtggcggtaggctttggtccggtgctggcggggatcttctgcaatatgaccgggtcctggtggccgattgtggcgatgctggtggcgtactcgctgattgggctggtctccgctttgctgatgccagaagtgcgcgaccgcgatttgagcctggtggaagatgcagctgaacccctgcgccagagcgataccgcagcgaagcagcggaaatatggagccctgtcatga

SEQ ID NO: 116819 - DNA, 1020 bp, Enterobacter cloacae
atgaaaagcgtagtgatccaacagccggatgtgctggtgattgaagagcgtcctctcccgttgccgggcgcaggcgacgtccgcgtcaaaattaagctcgccggtatttgcggttcagacagccatatctatcgcgggcataacccgtttgcgaaatacccgcgggtaatcggtcacgagttctttggcgaaatagacgcggttggcgaaggcgtggagggcacccgactgggccagcgcgtttcggttgatccggtgatcagctgcgggcactgctacccgtgttccgttggaaaaccgaacgtttgtacttcgctggtggtgctgggcgtccaccgtgacggcggcttcagcgaatacgccgtggtgccggcgaaaaatgcctggcgcattccggatgcgatccctgaccaccacgcggtgatggttgagccattcaccattgccgccaacgtgacggggcaggcgaaacccaccgaacaggatgtggcgctgatttacggcgcaggcccgatggggctggtcaccgtgcaggcgctgaagggcgtttacaaggtgaagcaggtcatcgtggtggatcgcattgatgagcggctggagatggcgcaacgcagcggcgcagactgggtcttcaacaacggcgagcattctttacaggccgcgctggatgaaaaaggcatcaagccgacgttaatcatcgatgctgcctgtcatccgtccattttacaggaagcgattacgctggcgtctccggcggcgcgcatcgtgctgatgggcttctccagcgacccgagccagattgtacagcaggggatcaccggcaaagagctgtcgatcttctcttcgcgcctgaatgccaacaaattcccggtggtcattgactggctggaaaaagggctgatcgaccctgaaaaactggtcacccatacatttgactatcaccacgttacagacgccatcgaactgtttgaaaaagaccagcggcagtgctgcaaagtcttgctcacgttcgaccaataa

SEQ ID NO: 116820 - DNA, 1215 bp, Enterobacter cloacae
atgaagattgtcggggctgaagtatttgtcacctgcccggggcgtaactttgtcacccttaaaatcaccaccgatgagggcattgtcggcctgggtgatgccacgctgaacggacgtgaactttccgttgcctcctacctgaaagatcacctgtgccctcagttgattggccgcgatgcgcaccgcatcgaagatatctggcagttcttctataaaggcgcttactggcgtcgtggtccggtcaccatgtcagcgatttctgccgtggatatggcgctgtgggacattaaggcgaaagccgcgaacatgccgctctatcagcttctgggcggagcctcccgggaaggggtgatggtttattgtcacaccaccgggcacaccattgacgacgtgctggaagattatgcccgtcataaagagatgggcttcaaggcaattcgcgtgcagtgcggcgtgccgggaatgaaaaccacctacggcatggcaaaaggaaaagggctggcgtatgagccagcgaccaagggcgcctggccggaagagcagctatggtccactgaaaaatacctcgacttcacgccgaaactgttcgacgcagtgcgcagtcagttcggcttcaatgaacatctccttcacgacatgcaccaccgtctgacgcccatcgaagcggcgcgattcggcaaaagcattgaagagtaccgtctgttctggatggaagatccgactcccgctgaaaaccaggagtgtttccgcctgatccgccagcacaccgtcacgccaattgcggtgggggaagtgttcaacagcatctgggactgcaagcagctgattgaagagcagctcattgactatatccgcgccaccataacccatgcgggcggcatcaccgggatgcgtcgcattgcggactttgcctcactttatcaggtgcgtaccggctcacacggcccgtcggatctgtcgccgatttgccacgccgcggcgctgcattttgacctgtgggtaccgaactttggcgtgcaagagtatatggggtattcggagcagatgctggaagtgttcccgcacagctggcgcttcgataacggctatatgcacccgggcgacaagccagggctgggcattgagtttgatgagaagctggcggcgaaatacccgtacgatccggcttatctgccggtggctcgtctggaagacggcaccctctggaactggtaa

SEQ ID NO: 116821 - DNA, 327 bp, Enterobacter cloacae
atgttcaaaacgacgctgctttttttcgcgaccgcgctgtgcgaaatcatcggatgctttttgccgtggctctggctaaagcggggcgcttccgcgctgctgctgatcccggcgggtgtgtccctggccctttttgtctggctgctcaccctgcatccggccgccagcgggagggtatatgcggcctacggcggagtgtacgtctgtaccgcgctgctgtggctgcgcgttgtcgatggcgtcaggctaagcctgtatgactgggcaggcgcgctgattgccctgtgcggcatgttgatcatcgtggccggttggggacgcgcataa

SEQ ID NO: 116822 - DNA, 339 bp, Enterobacter cloacae
atgactacattaagcaaacgcctttgtctgacagccgtactggcgctgtcatcgttcgccttcgccgcaacggcatcagccgaaaccagcaaactcatcattgagtctggtgacagcgcgcaaagccgtcagaacgccgccatggacaaagaacaatggaatgacacccgcagcctgcgtcagaaagtgaataagcgcgtggaaaaagagtgggataaagaagacgtcgcgtttgatgcccgcgacaaatgccagcaaagtgccaacgtcaacgcctattgggagcctaacaccctgcgctgtctggatcgtcgcactggccgcacggtagcaccgtaa

SEQ ID NO: 116823 - DNA, 561 bp, Enterobacter cloacae
atgtcgacgccgtgtgacgttaagctccgtccgctggagcgcgaagatttacgctttgttcaccagctcgacaacaatgccagcgtgatgcgctactggtttgaagagccttatgaggcgtttgtcgagctgtccgatctctacgacaagcatatccacgatcagagtgaacgccggtttgtggtggagtgcgaaggtgagaaagccgggctggttgaactggttgagatcaaccacgttcaccgtcgagcggaatttcagatcattatttcaccggagcaccaggggaaaggtcttgcgtcgcgggcggcaaagctggcgatggattacgggtttaacgtcctgaatctctacaagctttaccttatcgtcgacaaagagaacgaaaaagcgattcatatctaccgtaagctgggctttatggtggaaggtgaactgatccatgagttctttattaacggcgaataccgtaacaccatccgcatgtgcattttccagcatcagcatctggccgggcataagtcctcctccgccagcctgcttaaacccaccgcgcagtaa

SEQ ID NO: 116824 - DNA, 711 bp, Enterobacter cloacae
gtgaacaaatacgcagcgataacgctactggcaacggtactggtgggatgcgacaacaacaccgcgccgctgtcatttacgccggagatggcgagtttttcgaacgagtttgactttgatcctctgcgcgggccggtgaaggattttacccagacgctgttcaacgataagggtgaagtctctaaacgtgtgaccggcacgatgtcaacggaagggtgtttcgatacgcttgaactgcacgatctcgacgctaatacgggcgttgcgctggtgctggatgctaactactacgtcgatgcggaaacccagcagcagaaggtaaagttgcagggaaaatgtcagctggcggaactgccgtctgccggcctgacgtgggacaccgacgataacgggtttgtggttgccgcgcacagcaaagagatggaagtgaagtaccagtatgacgccgacggctacccgctgggtaaaactacagtttccggcgacaagcgtttatcggtcaagtcggtgccgtcgaaagatctgcgcaagcgcatggattatacggcggtaagcctgttgaacgataaaccgatgggcaatgtaaagcagagctgtgattacgatcgccacaataacccggtgagctgtgagctggtgatcaccgatgacagcgtcaaacctgccgttgagcacaagtacaccatcaaaaacagcattgaatattattga

SEQ ID NO: 116825 - DNA, 855 bp, Enterobacter cloacae
atgatttacgactgttttttatactatgacgaagatatgttgctcgacatcagattacatactctcgctgatgtcgttgaccgttttgtcattgtagaagcaacacactcttttacgggcataccgagagaattgcatttcgatattacaaagtttgccaaattcaaagacaaaatcatttacgtgccttttgacgcgcagcctattttaaaccgtgcggataataaccaggttgatgcctgggcaaatgaagcagcgcttcgcaactccattatgaacgggttaaaagacgcggcagacgacgatctgattctggtgtcagacgttgacgaaatcttctctcccgacacggtcagggccattaatccgcgcgcgctctgcacgactattcatcaaaacgtgttcaactatcagtttaatctccaggttcacaacacggatggtacgccgagaaaatgtaccttgccccgcgcgacgtcctattacaaccttaagcatttcttccacggtgagcctgaatctttcagaaactggaagcgtgcgcgcaaagataaaaactggtcatggtttaaatggaactggctaaaaatcaataataaaattgtgaaagatggcggctggcatttctcatgggtaatgactccagaaagaatttccgaaaaaatgtctaccatttctcataccgaatacgatctgccggaatttaataacccggaacatattatgaaggttattaccaacgccgaagatatctggggacgagaccgaaaactggtcaggcaagaggtatcaaaacgcaccctgccttcttatctggtagacaatcagcaccattactcgcaatttattttatga

SEQ ID NO: 116826 - DNA, 306 bp, Enterobacter cloacae
atgaaacggttaccctggattaccgccctgctgttaatgagtgcttcacccgctcttcttgcggccccggactcctgcgagcgcgtgaaaagcgacattcagcagaagattatcaacaacggcgtaccggagtctggctttaccctgaacatcgtcccgaacgatcaggccgatcagccggatgcgcaggtcgttgggcattgtgccaacgatactttcaaaattttgtacacccgcaccagtagcggcaactacccggtgagcggcgcaggtacgcaagagaatgcgcccgctgagccgcaatga

SEQ ID NO: 116827 - DNA, 540 bp, Enterobacter cloacae
atgtccgaagttgaacatcacggcggtataagccgtcgaactctggttaaatctactgccataggatctctggcgcttgccgccggtgggatcgcattaccttttggtctgaaaagcgccgccgccgctgtgcagtccgctattcagcccgcagaagacaaagttgtctggggcgcctgctcggtaaactgcggtagccgctgcgcgctacgtctgcacgttcgcgatgacgaagtctactgggttgaaacggataataccggcgaggatatttacggcaaccatcaggttcgcgcctgcctgcgaggccgttcaattcgccgtcgcattaatcacccagaccgtctgaactatccgatgaaacgcgtgggcaaacgcggagaaggcaagtttgagcgtatcacctgggaagaagcgctggacaccatcgccgcgagcctgaaaagcgtggtcgaaaaatacggcaacgaagcggtctacattaactactcctccggaattgtaggcggcaacatcacccgctcctccccttatgcctag

SEQ ID NO: 116828 - DNA, 1020 bp, Enterobacter cloacae
atgactttaccagaatcatttctgttatctcatgctgaatatcacattgagaataacactccctatgtcaccatatccgatgacaatcaattcagattcagattagaacaactggacagttgtcttaaaacaatcagcagaggacgtaagttacctttcgctattctgcataaccgttcaggatacaaagagagtgctgagtcagtcaccattcttgatgccatccgttatctcaatatgttgccacaagatgcaatgaaagtacgaatagctaatccacgtatagctaccttccagcgtttatttactagcgccgatttatactcgcgtgtccataacgggaaaatagctggggcagacactgttaccacagcagaaatgctgaataagctgatacaggattaccgatttactgtgagccaggcaggatttaaaaaagcatgcagaaagtaccagagggcttcggttaaaaatctgaaaggagtgatgaattacatcagacatctgcaggagcgtcattcccggctgctggtcttgcgggttgatttatcatgggcaaatgagcacaaagctgatatcactgctgatgatgcccgtaagcaccgtcagcagctgtttcgcaatatgcaaaagaatccaatctttcgccatgtcctcgggacggtatggaaactggaatatggctcacaacgtaaatttcattaccacatgctatttatcttaaatggtaataaggcacaacaggatggcgtgattgctcatgctttcgggagatactggaatgaaactattactaaaggtaaaggcatgttctacaactgcaacgcttacaaagagcgttatgaggactgctgcctcggcaaactgaaacgcggtgacagtagtaaggacaaagggttacttaaggcgctaagttacatcaccaaaatcgatgcctgtgcacgtctggttcttccgggtaatgccagaacctttggtcgcggagaagtacgttcattgaaaaaaaggaagagagcataa

SEQ ID NO: 116829 - DNA, 204 bp, Enterobacter cloacae
atgaaagagattgatatttataaagaccggttcgttgatatggttttcattaccgagctgaccaatctgtctgataagtggttttataaaatggcacagcaagggaaatttccaaaacctgtaaaatttggccgcagttcccgctggattgaacgtgaagtaaaagaatggttagaagcccgcattaatgactcgagattataa

SEQ ID NO: 116830 - DNA, 1227 bp, Enterobacter cloacae
atgaatttaagcaaaggaaagaatgaggattacaggctaaaaataaaaacgaaaagagaattatccgttttttattggtttgtaatggaaaataaatctatgatcgatcgctaccgttcctcacctctaaaaaacatgaaaagaataaattcaatttaccgaatgaatatacgggatgcctctttactattatctgaaattgtcagcgactattattcaggtgtccttgacgcgatacttcattatgaaagaaaaatagaaatttttcttgactcacttcttccagaatcagagtttgaatggttcaggaaaaatgagcatgcttgttattttgtttggctaagtattaaaaaaaactaccctcaactatcttctgaaatgctcaatattcaacaggaggttgcgccacaaaaatttagcaatgtccattctctggttggcctgtcaggtcttgataattttagccaaaatattcagcatgcaattgcatcagaaccttttctttcagaaataaactcgctgcatatacatcccgcatcacacaaagaacgttataactctatcctgtatttcatggatctggttccatcatacttcattgataaattatcatttataaaaaacataaggtctcaatgggatgttaagtttaaagcaaaacgtaagttaaatatccccgtggaaaatacaggtctatgccagtgggcctgggactatatgaaaaataaaccatccatgaggaagcgtgtttacattcaaggcacagaagcgccagaggggggcattaaattatctggtgaagattattcactctcaatactttctgctgatgacaaagatggcatctgcaataagaatatgtcagaaagtacggcacaggaggattacaataaatcagctaacaatgacgccgataatgacaagagttcagagcatgaaagtggcataaaaaaggtgagttacaaaaccatagacctttctccggaaaacggcagttctctatccagtattaacagaattggctggcatgatgcatttgagatcattcagccatcgacaccaagagaaacatatttagctatccatgcagtctggattttctatgttggaggaactttcttggaacccgaactatataaccagtttaagcgtgccagggatacataccttacccgtaaaagaaaaaaaataaaaataatcagaaataaattacaggagatgaattag

SEQ ID NO: 116831 - DNA, 435 bp, Enterobacter cloacae
atgtttaaggtcacttctgcactctttctcagtgcaactttgttcaccaccgctgcgcacgcgaccattcaggaacagcagtggggtaactggtttggtaataccagcggaatggaatttggtattaatgccgacaatgatgttggtgagcgcattaccttcacttgcatcggaggccacctgggcatcacctacagcgtcccagcaaagaactattccatttcttctggcgcaggtctgaaaaagccagggttgatcatcaactcaacccactatcaattaggcgaagctgcatttatggcgctcaaaaacaccagtgatgaaggagtgctggaagtcactgaagacaagaaactattgtccaaaccgttcaaaaccgaaggtcttcaggaagcgctgaaagaggtaacctggcaggattgcatcagccgttaa

SEQ ID NO: 116832 - DNA, 708 bp, Enterobacter cloacae
atgcttcgcgaaatgaacgatgcggcagtcagcgtaaaactcaacaataaagttggttttagcgctgaggcacagagcaaggctgctgctgcgaacatatctcctttgctgtacgcatcatcaccccttgaacagaactttatccgctacgacagtaaaccagttaaggctctgacttgtctcgtaacggcccgcactatgccgggccagaataaaaattactcatgggaggaaacctactgccttgatgaaaccggtgctgcctacatcggcacaaaaggctggccgtcacgtgctatcgtcgaaaagagctgcgaggtgggtgcctccaattgtcctgtatatcttggtctgaacaatgatccaccgaccatgcggaatgatgctgcgcaatatattccttatagcagcgatcgggcaagcgggcagaaagaacgtaactctgagccaaaatcaacgaccgctgaaaccgtcgcagagcaggacggttatgtggtgagtttttttaaagccagcaactgtgcagacaacaaactgattgtcaaaaacacaagctctgggaaaaccgccgcaattgcaggattaagtggttgctcttttgatccgaagaaaaatgcagtaattatcttccctcaaaatgaatatgtcggcgtttacaatggtcctacaaacgcttctgaggaaatagcctcagtcgatctcccctaa

SEQ ID NO: 116833 - DNA, 192 bp, Enterobacter cloacae; identical to SEQ ID NO: 81268

SEQ ID NO: 116834 - DNA, 486 bp, Enterobacter cloacae
atgacccgtttagtcagccgctttggtgcagtcaaccttgttcgtcgtgaccgcccgttaactcgcgacgaattggcccattatgttcccagtgtcttcagcgaagaaaagcatgaatcccgtagcgatcgctatacctacatcccgacaattacccttctcgataacttgcaacgcgaaggcttccagccattcttcgcgtgtcaaaccagagtccgcgaccagagcaaacgagagcatacgaagcacatgctgcgcctgcgtcgtgaaggccagattactggcaaacaggttcccgaaattattctgctgaacagccacgacggttccagctcatatcagatgctaccggggttatttagagcagtttgccaaaatgggctgatttgcggtgagagttttggcgaagtacgcgtgccgcataaaggcaacgtagtagagaaagtcatcgaaggggcctacgaacgaagtactgggaatatttga

SEQ ID NO: 116835 - DNA, 315 bp, Enterobacter cloacae
atgcagtcgcttttgttgccgccgcccgctcagcaggctatggcgaaagcggcgctgacatatcgcttcggtgaggagcaccaaccggtgacagagacgcagatactttccccacgccgctggcaggatgagagtaacgacctgtggaccacttatcagcgcattcaggaaaacctgattaaaggcgggctatcggggagaacaaccaaaggaaagtgcgcccatacccgagcagtgaaaggtattgacggtgatgtgaagctcaaccgtgccctctgggtgatggctgagaatatgctgcagcttgcttcatga

SEQ ID NO: 116836 - DNA, 471 bp, Enterobacter cloacae
atgtctacgatcaatttatccccggtatttcctgcaaacgagcagcgagtcatccagcaagcattacgtctgctggataaataccagcgtcaaccgagtgagtcatttacctcaaccagcctcacaaaaacatggctgaaactgcagatggctcatctggagcgggaagtcttcatcgtgatgtatctcgacaatcagcattgcctgctggagcgagaaacactgtttaacggcacgctcagccataccgaagtgcatccccgcgaagtggttaaatcagccctgaaacataacgccgctgcggtcattctggcacacaaccatccgtccggcacgacagaaatcagccagcaggataaacatgtcactcagcggattgctaaagccttggctctggtggaagtgcgtgtgctggatcatcttgtggtcgggaatgaagtggtttcttttgctgaatgtggcttgttgtga

SEQ ID NO: 116837 - DNA, 222 bp, Enterobacter cloacae
atgaaaattatcagtaagcgccaggcgatgcatatttatcgtcagcatgccgaatccaggctatctgccttctgtacaggtcactaccagtggcatggcagtgtatgccattactatggacgtgaagttcaggatatcagcggcgtactcgctgtttttgttgaacgtcgtcaggaccgggcaggcccgtacgctattcttcgctgcgtgacggcgaactaa

SEQ ID NO: 116838 - DNA, 366 bp, Enterobacter cloacae
atgcagtcgaccaccatatccggcacatcggcggagaacacatcctgccttcagtgggaattaaaacgtaatatcacgccgtgcttcggcgctcgcctggtacaggaaagcaaccgcctatactttctggctgaccgggcaggatttaatggctcattcagtgacgatgaagctttgcgtctggaccaggcatttccactgatgatgaaacagcttgagcggatgctgacggctggcgagcttgatcctcgcagccagcactgcgtcacacggcatcacaacggacttacttgtgaagctgacactctcggctctcatggctacgtttacattgccatatatccccagtcagctctaaccagataa

SEQ ID NO: 116839 - DNA, 321 bp, Enterobacter cloacae
atgcatatttcaactgtaccggcaacggtgacggtttcgtcacgcctgtctcctgtccaagtttggcaaaaactattaacgtatattttagagcatcattacggcctcacgatcaacgacacaccgttcagtaacgatacgacgattcaggaacatatagaggctggagtgaatcttactgatgctgttaatttccttgtggaacgattcgagcttgtgcgcattgaccagaagggtttctcctggcaggatcaagaaccttggataacatctttggatgttcatcgggcacagttcaaccttggcttgaaacgctcataa

SEQ ID NO: 116840 - DNA, 411 bp, Enterobacter cloacae
atgaactgggcactagctattgctaccatttttgctacgctaataagtcccttactcgctgtaagagttcagaagatcatagaaaaaagctcagaaaaaagaaatattaaaataaatatatttacagaactaatggctacaagatctgcagaagctcgcctttctaatgagcacgttagagcacttaacatgatcgatttagcattctatggtgatataaaaagaagtataaacaagagaacaaaatctgagaaaaaagttcttgatgcatggaaagaatatttcacccacctatgtacacattgccccgaaaatgaaagtggcagtgctatatggaatcagaatagcgatagactgtttgtaagtttactttctgtaatggctgaagatataggttacgagtttgattga

SEQ ID NO: 116841 - DNA, 342 bp, Enterobacter cloacae
atggctgattcgcattctaccccagacaccgaccaatccggaaccgagcgttcgttaattgtgggttaccgcccgaatgtttacgacaaatctaccccaaaaatcatcctttccggcaagtggctgcgcgtggcggggtttgataccggacagcaggtcacggtaaaggtcatgaaaggatgcatcgttctggtggcgtataacgagcaggagcagcgtttgcaggatgattataaacggacgaaagcaaagcctattgagatagaggacgcgcttgcagcgatccaaattccgcatgctggaaagcgactcgcaaaatcaaatacaaaccacctggcttag

SEQ ID NO: 116842 - DNA, 1029 bp, Enterobacter cloacae
atgacatatgaggaattaataaattctccagccggtgagttcgtcatgtttgccagcaaggatggaaaagttcgcattgaatgccgcttcgaaagcgatacgttgtggctctcacaggccacgatctgtgagttatacggcaaagccaaagctacgatcagcgggcatatcaagaatatttttgatgagggtgaactggtcgaaaattcagttgttcggttttaccgaacaactgccagcgatggtaaagtatataacgttcaatactttagcctgcccgtcattatcgccatcggctatcgcgtccgatccacgcgaggtacacagttccgccagtgggccacccaaacgctccaggaatacctggttaaaggcttcgttatggacgacgagcgcctgaaaaatccgcctgtgggatcttccgccgtccctgactatttcgatgaaatgctggaacgcattcgcgatatacgtgtcagcgaacgccgggtctatcttcgcgtgagggagattttcgcattagctgctgactatcagccgtcgctcaaagaaaccacgcaattctttcagaccatccagaataaactgcattttgcctgcactgggcacaccgctgctgagttgattcaccaacgtgcggacgccactcaatcgcatatggggctgaccagctataaaggcgaagaagtccgtaaaagcgatgtcaccaccgcaaaaaattatctgtctcaggatgaggtgagcgagcttaatcgcgtcgttaatatgtggctcgattttgccgaagatcaggccaaacgccgcaagcaggtatttttacgagactggcaaaccaagctcgatcagttcctgcaattcaacgaccgggacgttttagaaggcgcaggaaaaatcagcaagaaagcggctgatgaaaaggcgtgctcagaatacatcgaatatgaaaaaaaccagcgcctgctgaaagaggccgaaggtgagaaagatattgtcggcttattaaaatgggataagcgggctaagcgctaa

SEQ ID NO: 116843 - DNA, 486 bp, Enterobacter cloacae
atggctatacctgtttacttatggctcgaggatgattcaggccggaggattaatggatctgtcgatataaaagatcgcgaaggttcaatagaagtgattgaatttatgcattctatagaacaacctatagataaattctccggtaaaatcactgcaaaacgcatttgtagtacctatgcattcatgaaagagattgattcatcatcctcttatctatacaaagccttatgcactgggcaaacacttaaaaaagcagagttcatattttacagaatcaactataacggacttgaagaggcttactttaagacaactttagaaaatgcaagagtagttcaaattgaaccactcatgtttgacattaaactaccgcgaaacgaacgctatacacattgtgaatatgtagatctaacatatgaaaaaataacatggcattacatagatggaaacatcattcattctgatacctggaaggaacgcgcttaa

SEQ ID NO: 116844 - DNA, 366 bp, Enterobacter cloacae
atgtcctgggaatatgatgtaaaagagcacaaattttatcttgatggtgtttatcagttcgatgcagattatgcaggagcaagtggttacaaaaacgatccatctcaagaatgtgtaaaaaacagtgggcctctacctcgagggaaatacacaattggttcccctcataattcagcccacaccgggaaatatactctcagcctcacgccctactcgacaaatgagatgtgtggtagagactcatttaaaatacatggtaaaagcagtttgcaccctgacgactcttcagagggctgcatcattgctcctctgagtgccagaaggagtatctggaaaagcaacgatacggtgttgattgtcaaatga

SEQ ID NO: 116845 - DNA, 588 bp, Enterobacter cloacae
atgaagcgtttaatttgttcattgccattactcgttgcagtcagttcgcatgtctcagcatctgaaatgaccggcttcgcaacacagtattacgatgaagacggctcgctgacggaaatttcaaccatagtgcccctttccccgaccatcacgatctgcaagaaaacggttcagatggaagttactcatctgtctcagattttcagtacatacgtggagaaagacagctccgcgcactggatctgccttcatgacgacgatggcaccaattattggttcatttcagataacgaaatgggtgcagggctgttaactgcgctagccatatccagggatggcatccataaagaatgtgtgaatacaacggaacgagtcagtgtctcagtctctggcgttccattgttaaatgccactcacggggatttagttgaattgttcggcaaaaaagcaatcggcaacagaaaaaagatcctgctttatcaggagacacctgtacaggatggatttgttcagaacaatacagtctcttattactttgatggcgaaaaattgcgcggcgtaattatcgggcaaataaccagtaactag

SEQ ID NO: 116846 - DNA, 444 bp, Enterobacter cloacae
atgaaaatagaagccgcacacccctcacaatttgaacgtctcgtcgcagtctgggagtcgtccgttcgcgccacgcaccgctttttgcaggaaagcgatatcgcggcgctgcgtccgttattgctcaacgcatatttgcctaatctcagggttgtgattgcccgggatgacgtgggtattattcacggctttttgggcgtggataaaaatcgcattgaaatgctgtttgtggatgatgcgagccgggggaagggtatcgggaaaatgctgctgcaatatgccattgcagaattcggcgtaaatgaagtggatgtgaacgagcagaatccgcagggggtggcgttttatcgccatatggggtttgagcaggtcgggcgttcagaactggatgggcaggggaatccgtttccgctgttgcatatgcggttgagtggacaggcttaa

SEQ ID NO: 116847 - DNA, 990 bp, Enterobacter cloacae
atgaaaagtgtatttgactcctccgatggggggaaatcagtaccggaaaagtgtctgcatattgggttgatattatggccccgttattcactcctggccgtctccgggttgctggaggcgctgcgttatgcagcgaaagctcaggataaattagcatttaaaatcagcctgataagtgaatttcctgatatcccgattatcagcaatgcggggattgtcatgagaccggattctccccatgcgccgccggacagttttaactaccttgctgttatcggcggtgaattgcagtatctggacttagggtatcagggggataaagcgtatctggcacatgcccaccatgccggggttccgctcattggcattggcaccggcagttttgtcctcgcacaggaaggattgctgaatgaacgacgagcgtccatccatcctttccaccttgatgcatttcggcaggctttcccgctggtttatgctgagcaagggtatgatttcatcgacgatggcgatgtgctgacctgcccgggcggtatttccaccctgacgctggcaactgagcttatccgcgcccatgccggggatgatatcgccagcaccacctgtcagcgtttgtcgctcgttccgcatgaaattgccaccccgcgtccggcgaattttgcgcttatccctgactcgcggttgcgccgcgccgtcatgctgatagaacagttcctgacccggccgctcaccaccgccgggcttgcgcgagaagtggcattgagtgaacgccagctcaaccgtctgttccacgcagaattcggcaaaacggcccgcgaatttatccgcagtgccagactgcgctatgcttgctggctgctgaagaactcacagcaaagcgtgacggatattgcgcagcggatggggttcagcgactgcgcgcactttattcgtcattttcagacggagtatggttgttcgcctgacgtgtggcgcacgtcgcagagctga

SEQ ID NO: 116848 - DNA, 480 bp, Enterobacter cloacae
atgactcgttttcggcagatgctgtatatcatcgtgacgggcctcgtcacggcaggcgtgctgacgggctattacctgtggcaccgaacttacgttcagcctttttcatgccaggctaatctggtccagcaccatccggatgagacgctgacggtctggctgaattacaccttcgacgggaaattcggcaccctgagcatgaatggccgggcaaagagcgatccgggtaaaaccatcgacaggaaaatttcctttcgggtggatagacaggatcatctctatttgctgacgtcagaaaaaaatatgacgttcccggacgataatgtcgacgacagctggctggaaaaatatgaaccgcaattctttgtctatccgggcaagagtatttatatgcggatcaatgaacaacataatggtaactatatctttaccttaggaacattaccgacatatgtgtgtcgtggctcaaaaaaagaatga

SEQ ID NO: 116849 - DNA, 789 bp, Enterobacter cloacae
atgcataagcattacattataaataatatcgtcgaatttcatcctgcggccagcacgttacgtgatatcaacaatcctgaccgtgtggttgtgttaaattcgccagcaggccgatgcctgttgttattaatcgacagagcggggtcgattgtcactcagcaagagttccttgatattgtctggcaaagccgcggcatgcttgtctcctccaatacctattaccagaacatctccatcctgcgcaaagggctcaaaaagattggttttgaaactgaccctatcgttaccattccgcggattgggttgacgctggcaagcgacacgcaaataaccgtcagagagtcttcacccgtcgcgcctcaacccgcagagggacaatgtgtagaggcgccagcgatcgaggaggtctctgcaccctccgagccagcaacgcccgttgccaggaagcccacgcgctggctggctgttgtcatggggctgttgatcatcctggccggggcaggcgtgacgggatatatgaacgcctcagaaaaccgttttgttgaggattaccgttttgcggcatccgtcggagcctgtcgcgtttatcttgcgaacgacattcagacccacgctgaacgcgcttccgcgctgacctatgtggaacaattcaaggctgaatgcgcgcaatatccctgggtttacatcagctggtacgctctgcttcctcgtgcgtcggttattcgctgcgaccggccaatgaaagaaccgaaccgctgcatatctgattatttcctgaaggatagctag

SEQ ID NO: 116850 - DNA, 603 bp, Enterobacter cloacae
atgacgaacaatagccaaataacacagcatataactgttgcactgatgggcggcgatcattatgcaagaaacggcattaaaacgttattaagcagcatccgcgacgaccttcacatcattatcatcgaaggaggttatcaggaactggataaggcgctgtcgtcgattcgtatcgatatcttatttatatccggcgcagagaaataccatacagggtatgactcactgaaatatttaaaaaaaatcaaagtcacgcagcctgaagtgattatctgcctgtactcaacctctgcccattccctgttatgggtccgggaagatattgatgcctatatctcgctacagaacacggtttatcagtggcggataaagctagcaaaaatggtcgatagccattatcggccccaaaagcagccagcggcgttatcgctgacgcctggagaaaggagggtattaaaggaactcaggaacggactggatatacgttacatcgcagaactggagaaactttcttatcgccgcgtgagcgccttaaaaagctcagcgataaggaaactcgggctcaggaataagacagatttgctggtctttttaaccagttag

SEQ ID NO: 116851 - DNA, 585 bp, Enterobacter cloacae
atgaaagcacgccttacttgccattctctgctggcattaagcattgccgccctgctgccagcgggctcagcactggccgccaccaccagcggcggcacggttaacttcagcggtaaagtggtgacctccgcctgtgccatcagcgccggtagcgccaatatcgacgtcgacatgggtgaagtgcgtaccgccacgctggctgccgcaggcagtgaagccagtaccgcaaaagccttctccatcaccctggaagattgcgaaatcgccgatacttccgcgtccacggaagataaccctattgccgcaacgaccgtggctatcaccttcaccggtacaccggacagtaccgatgtgaatagcctggccgcgggagtaaacggcggcgcgggctcggcgcagcatgtcgctatccgtctttatgacgaacagggcaacgtcgtcaggctgggtgagccggcagcagcgatccccctgcgtgcgggggcgaacatcctgaacttcagcgcgaaatattactccccactgggcaacgccacggcgggtgatgccagcgcggtcgccacctacaccgtgacctattcgtaa

SEQ ID NO: 116852 - DNA, 678 bp, Enterobacter cloacae
atgcgcgtaaacacatggatttgtctggctggcacgttatgttcatccgccgtgtacgcaggcggcgtggggttaggcgcaacgcggctgatctacaccggcgcggctacgcagacgatgatgcaggtaagaaatacccaccctgatgccacgtttctgatccagtcctggatggaagacgagaaagggagccgtaccaacgacttcgtcatcacgccgccgctgtacgtcatgaagcccgccagcgaaagcgcggtgaaaatcatgttcagcggcgacgccctgccagccgatcgcgagacgctgtactggatgacggtcaaagctatcccacagcaggttaaaaacggttccggcaattcgctgcaattcgcctctgccaaccgcatcaaggtcttttatcgcccggagcggctcagggaaggtgcaggggaggcatggaaaaaccttgccggcgcctaccgcgcgggcaaggtcacgctgaccaacccaacgccgtattacctcaccaccattaacgtgaaaattgatggcaggccggtgtcgcccgtcatggtaccgccgaaatccagcgtgacgctggcagacaccttcagccatgcgagcagcttaagctaccagacgattaacgattatggcgcctggacgcccgttacccgcacgtcattgtcccaataa

SEQ ID NO: 116853 - DNA, 2526 bp, Enterobacter cloacae
atgaaaattaaaatcctgtgcgccacggcgatcgccctggtgattcggcaagccgtggctgccgaaagcgagctgcaatttaatcctgcgtttctcaacggcgagcgcgccaacagcgccgatctcgcctgggtcaacgccgggagcgcgttgccgccgggcgagtacaatcttaacgtgtatatcaacacccagttcgcgttcacaggtaacgtcacgtttcgcgtcgctgaaaacaccgccggtgaagccctgccgtgccttacgcctgcgcaattcgccgcacttggcatcgacagccgtcaggctaaagggggtgagctgccgcctgcgcagcgctgcatttttttaacccggtcattcgccgatacccggtttgattttgaccagaggacgcttaccctcaacttcaccgtaccgcaaagcgcgatgcgtgctctgccgcgcgggtacgtcagcccggagagctgggagtccggcatccctgccgcgtggctgaactatgtggtcaatggcgcgaataatgactaccggggcgagacgcgcacgcgggaacaacagctgtttgtgagcctcaacagcggcgccaacctgggcgcatggcggctgcgtgatttcaccacgtggaccaaagagagtaacgagctcacccacgtccagacctggctacagcgggatatccgcgccctgcgtgcccaggtttatgccggtgaaacgttcacctcatcgcaggtgtttgacgccgttggcctgcgtggggttgccctgaagaccgatgacaatatgttgcccgccagcctgagcggttacgcgcccgaagtgcgtggcatcgcgcgcagcaatgccacggtgacggttcgccagaacggtaacgtcatctatcaaacctccgttccgccgggggcgtttgtgctgaaagatctctatccgacctcttccggcggcgatctcgcggtcaccattcaggagagcgacggtagccagacgcaatacaccctgccctttgccagcgtgccgaatctggtgcgtaacggtcaggtcaaatatgctctgggggcggggaaataccgccctgcgggcaatcagatctcgccctccttcgcgcagggcgagctgttcctgggctggagatacggcctcacgttttatggcggggcgcagttttccgatcgctacaacggcctggccttcggtatcgggcagaatctcggccgctttggcgcctactccctcgacctcacccatgcccgcagccagctggctgataaccagcactacaccggtgattcggtgcgcctgcggtacagcaagctgctgaacgatatcggtacgcgagtcaatttcttctcgctgcgttactcaacggcagggttttataccctcagcgataccacttacaaaggcatggcgggcggagcgccaaaacagaccgtggaagacgatggcaccgtcaccactcactacgacacggtttacaacctgcatatgtcgcgtaaggcaaaaaatcagctgctgttgtcgcagccgatgggcgaatacggcgcgctgtcgctgtcctgggatcaacaaacctactggaatacgtcaaaaaccacgcaaagtttgcagttcgcgtggaacgcgacgtttcgtaacctgtcgcttggcatcagcgcccagcgtagctctggcctgtacgacaacaagaaagacaatatcctcgcgttgtccctgtcggtgccgctgggtaacccggcgctgtcgacccgtctccgttttaccgctacccatgcggatcccgctggcaccaccgccagtaccggtgtcagtggttatctgccggggcaggagaatcttttctatagcgtcaaccagcgctacagcgcgcagcagcactacggcggcgatgccgcgctgcaatacgagggcgcgtggggagactataacctgggctacagctacgccggtgactcccgcaacctcagttacgggatgagcggcggtgcggtgctgcatgaggatggtctgacgctgagccagccgctcgggaacaccaatattctggtgaaagccccgggcgccagtcatgtcgccgtgctcaaccacaagggcatcaaaaccgacagccggggctatgcggtgatcccgtacgccacgccgtatcgcgttaatcaggttgcgctggatgtcaccaccgtgggcaatgacgtggaacttgagaacgccatcgccaataaaatccccaccgacggggcactggttcgcgccaccctcaccacgcgtcagggggcaaaagcgatgtttatcgtacgtcacgctaaagacgtgctccccttcggtacgctggtctcgtcagaggatgacaaagccagcggtatcgtcggcgacggcggcagcgtgtatctgaccggcctgtcagcggagggaacattgcatgccgtatgggggcgcaacagcgcccagcgctgcacgatccgctatgcgctgaacccgcagaattatcacgcccgcaccgggctttattcccaggaggtcatatgtcagtaa

SEQ ID NO: 116854 - DNA, 519 bp, Enterobacter cloacae
atgtcagtaaccatccggttcctccccctgatcctgctgatgttcatcaccgttcccgcgcgcggctatgacgtgctggtttccgtgaccggcaacgtgatcggcaatacctgcattgtctcggaagattcgaaggagcaaaacgtgccgctgggcaccctcggcgtgaagcaatttagcgaggcgggcgcggtcagcaatatcaaaacgcccttcacgctcacccttgaagcatgcggccccacctttgctggcgtgaaaatccgcttcagcggtacgccggatgacgagaacccgcagcttctcaaagtcgctgacggcggcgcgaccggcgtggcggtgcagattctggataaagacagcgtacttatcccgctggacacccaaaccgctgcttacggcgcggcgggggatgacagcgtaaaaatgaccttctatgcgcgactggccgccacgggtgcgccggtcaatgccggagacgtttcggcagtggcgacctggacgacggagtatcaataa

SEQ ID NO: 116855 - DNA, 1008 bp, Enterobacter cloacae
atgcgtttactgtttttagccctgtttttcatgtcctctcaggcgcttgccctctcctggacatcggatatcaccctttcgccaacgcccatgtcgtggtccggcccggcagactccatcgtgcctggaaagacgatcggctctgaatggagcgcctctgcgagcgtctcggaagtgttctggtgcggcctggtatttacctgctccaaagggacgctggagccgagcagcagtataaccgccaccggcatcacggttattcttgatggcgcaaattacatggtatttgaaacgggcgtgcccggcatcggcttcattcttgggcttaaagattataacggcaccacctatgtcccgatgcagacgggcattacgcagagctatccggccgatgggactaacggttacgccaccgcactgggctggtcggcaaaagtgacgtttatcaagaccggcgttccgctgaaatccggcgtataccagaccccgaccattaacgcggcgatcctgacggcctataacaacgaagtgaaaaccgcgcaggttatcatcaaccccaccaccatcacggtgacggcaagcggctgcacggtaggcacgaaaagcgccaacgtcgacctgggcaccattgatattcacacgctgcccagcgtaggcagcacctcgccgtcgggggagtttaacgtcagcctgacctgcgatgagaacgtggcggttaacgcagtgatgaccgatcagaccacaccgtcaaatacctcgtcggtcgtgacgctgaccggggactccacggcctccggcattggcgtacagtttttctataacggtaccgggccgcttatgatggggccggacagctcgtccgcaggtacgacgggacagtttttcatccagaccaccagctcggcacaaacgctgtccctgccgttccaggcgcagtacatccgaaccggtgaactggtccccggctcggccaacgccctggcaagcatcaccttttcgtatcagtag

SEQ ID NO: 116856 - DNA, 525 bp, Enterobacter cloacae
atgaggctatggcctgtcgttaccggtgtcgccattgcgctgacgctggttgcctgtaaatctcccacgccgccgaaaggcgtgcagcccattaccggctttgatgccagccgctatctcggcaaatggtatgaagtcgcccgactggaaaatcgcttcgagcgcggtctggaacaggtcaccgcgacgtacggcaagcgtagcgatggcggtatcagcgtactgaaccgcggctacgatccggtgaagaaaaaatggaatgagagcgaaggaaaggcgtactttaccggcgaaccgaccacggctgcgctgaaggtatcgttcttcggcccgttctacggcggctataacgtgatcaagctggatgataagtaccagtacgcgctggtcagcggcccgaaccgcgactatctgtggattttatcgcgcaccccgaccattccggatgcggtaaaacaggactacctgaacaccgcacgcgagctgggcttccgggtcgatcagctggtgtgggtgaagcactaa

SEQ ID NO: 116857 - DNA, 726 bp, Enterobacter cloacae
atggcttactccatcggcgaattcgccagactcagcggcatcaccgccaccacgctgcgggcgtggcagcgacgctatggcttgctcaaacccgagcgtacggacggcggtcaccgcctgtacagcgatgaggacgttcagcaggcgctgaaaatcctcgactgggtaaaaaaaggcgtacccatcggtcaggtaaaatcactgctggaacgccctgcgccgcgccgcgccaataactggcaaaccctgcaacaggccatgctgcaaaagttgcaggaggggaaaattgagtccctgcgtcagataatttacgacgccggacgcgaatacccaaggccagagctggtcactaacgtgctgcgtccgttgcgcagccagatatcggccaacgtcgccgccgccatgacgctgcgtgagatcctcgacggcatcctcatcgcctatacctcgttttgccttgagggcgataaaaaagcgccgggcgataacatcctcatcagcggctggcatctgaacgacccctgtgagatctggcttgaagctctgacgcgcaccggccagggccaccgcatcgacatactgccggttccccctgccgcgctggccccggaaattttcccggaccgcaaatggctgctggtcaccagcggtaaacttaccgccgcgcggaaaaagcaggttgcgcagtggcagcagcaggtttcccttgaggtgattatcctctga

SEQ ID NO: 116858 - DNA, 411 bp, Enterobacter cloacae
atgaaaaagacactccctctgatgatgctcgctgcaatggctttcgcgcctgccgcgttcagcgccccggcaggcaccctgagcgttcacgttctggaccagcaaaccggtatgccgccagcggatgtggccgtcacgctggagaagcaggagcaggacaagtggaccccgattgccagcggtaaaaccgaccacgacgggcgcatcaaatcgctctatccgcaggatcaggatatggcgcctggcgtgtataaagtgaccttcaaaaccgccgattacttccacggtaaaaagctggactccttcttcccggaagtgccggtgctgttcaccgtcacccgcaccaatgaaaaactgcacatcccgcttctgctcagccagtacggttactcaacctacaagggcagctga

SEQ ID NO: 116859 - DNA, 960 bp, Enterobacter cloacae
atgacaacaaaacctgtgctgggtattagcggatgtttgaccggttccgccgttcgctttgacggcgggcataagcgtatgggctttgtgatggatgagctggcgcagtgggtcgctttccgtccggtatgccctgaaatggctatcggcctgcccacgcctcgtccggcgctgcgtctggtgatgaccaccggcggcgagacagaaatgcggttcagcaaagcgccgcacgatgacgtcacgcagaagatggccgcatttacggcagattatctgccgaaaatcggcgatctggcgggttttatcgtctgtgcaaaatcgcccagctgcggcatggagcgcgtgcggctgtacgacgaaaacggcaaccggggccgcaaggagggtgtcgggctgttcaccgccgccctccttgaaactttcccctggctgcccgtcgaagaagacggtcgcctgcacgatccggtactgcgggaaaactttgttgagcgcgttttcgctctccacgaactgaacataatgcgtaaaaatggcctgacgcgccgtgccctgctggactttcacagccgctataagcttcagcttctggcgcaccatcaggcaggctaccgtgaaattggtccgttcgtggcatcactgcacgagtgggacgatctggacgcgtttttcgtgacctatcgcgacaagctgatgaccatcctgaaaaaacccgcttcgcggaagaatcacactaacgtgctgatgcacattcagggctatttccgtaaccagctgaacagccgccagcgtggagaactgcgggatgtgatcctgcattaccgggacgggctgctgccgatcctcgcgccgctgacgctgctgaagcattatctggctgaataccctgaccggtatctgatgacgcaaaactactttgatccctatcctgatgatttgggtctgcgtctggccgttacctga

SEQ ID NO: 116860 - DNA, 1089 bp, Enterobacter cloacae
atgatcaaaaatttgcatattcagaactaccgctcaattcgcgatatgtcgcttgagctggaacagctcaatatcgtgttcggccccaacggcaccggaaaatccaatatttataaagcgatttatctgatgcacagcgcggcgcaggggcaattctcccaggcgctggcgaacgaggggggaattttgaaagtgttctgggcgggcaaaacccgcagcgaccagctgcgacgcatgaacctggcggtggaaacggaaacctatgaatatgagcttcaggtcgggttcgtggaaaagctgccctacccctcacagtttcagctcgatccggtgatcaaagaggaatctatctggctcggcggacagcaccgtcgcccgtcgtcacagctgatgaagcgtaagaatcaggcggtattcctgaacaacgtgcatcacgaaaaagtgacccacagcggtacgctgtatgagaacgagtcggtgttcggtcagctcggtgaaccgcacctctaccccgaagtgtcgcagatgcgcgagtccctgcgtaactggcgattttatcacgagttttccgtctcatccggctcggcgatccgtgccccgcaggtgggctttcgttccccggtgctggccagcgacggcgcgaacctgaccgccgcgtttcagaccattgtcgaaattggcgacgagctgctgctgatgcgcattctcgaccaggccttccccggctgcgtgttttacagcgacaacaccggcgggcgcttccgcatgatgatgcagcgcgaggggctgagcagaccgctggaaccggcagagttctccgacggcacgctgcgttttttgtgcctggcggtggcgctgttaagcccgcgccctcccgcattcatcgccctcaacgaaccggaaaacagcctgcatccgcagatgctgcccgccctggcaagcctcattgccgaggccagccgctattcgcagatctggctcaccagccactcgccggagctggcgcatttgattgagaagcaccgatcgttttcgctgtatcagctgtcgatggcggagggggagacgaggatggagaggctggggtaa

SEQ ID NO: 116861 - DNA, 954 bp, Enterobacter cloacae
atgccgcttattaacgttgccattgtcgcggtggacgggtttagcccgttccactactccgtcccctgcatcctgtttggcgacacggtatccggggaaaagcgctttaacgtcacgatctgcgctgaaaaaccgggattcctgaactcgaaagacggttttgccctgcatgcgacgcaggatttttccgcgatcgcatcggctgaaattgtggttgtaccctactggcagcacgttctggagcgcccgcctcagacgctgctcgacagcctggttcaggccagagacaacggggcggaaattgttgggctgtgtctgggatcatttgtgctgggctatgcgggcatactcagcggcaaacgggccgccacacactgggagtttgaacgccagttccagtcgctatttccggacgtccgactggatatcaacgccctctacgtggatgacggcaatatgattacctcggcgggtaccgccgccgcgctcgactgctgtttgtacatcatccgtcagcgctttggcagcgtcgtcgccaatcagattgcccgccggatgatcgtcccgccgcaccgagagggcgggcaggcgcagtttattgcgcaacctgtgccgaaagatacccgtgatgggcggattaactgtctgattgactaccttcagcagcatatttccgaaccgcataacctggactctcttgcggaagtggtgtcgatgagccggcgcacgctgacccgccattttatcaaggcgacgggcatgagcgttgccgactggcttaccgccgagcgcctgcggcgcagccagatcctgctggagtccggcaacctgccaatcgaaaatgtcgccgggcaggtggggtttttatcagcggtgacgtatcggcagcaatttaaggcgcgctttggcgtcagcccggcggagtggcgcaagacgtttcgtactcgccagtag

SEQ ID NO: 116862 - DNA, 780 bp, Enterobacter cloacae
atgaacattacgcaaattcgcaatgccacccagctgatcacttacgcgggaaaacgctttttaatcgacccaatgctggcgccaaaaggcacttatccgggttttcccggcacggcgcgggctgatattcgcaacccgatggtcgatcttcccgttgacgttcaaacgcttctggatgctgacgcggtgatcgtcacccatacccatgccgatcactgggatcagtacgccgttgagctgatcgccaaaggcaagccgatctacgtgcaaaatgatagcgatgccgcgctgctgcgcagccagggatttaccaacctgacgatcatgaccggggaaacaacgtacggcgatatccggatagtgaaaacccacggcggccagcacggtactgaccgcgcttacgccgtgccggagctggcagagtttctgggggaagcctgcggcgtggtgttccgtcatcccgatgagaagacgctttatatcgcaggggataccatctggcgcgatgcggtggcggccgatctgcaaaagcaccagccggatatcgtcgtgctcaacgccggttacgctcatgtcattgggtttgggccgattatcatgggggaagaagatctgcttaacgtgcatttcctgctgccgcaggcgaaaatcgtggcgacccatatggaagctctcaaccactgcctgctgacccgccgcgcgctgcgcgagtatgttgatgccaacgaggcaggtgacgcggtgagcattccccaggacggcgaaaccgttatattctga

SEQ ID NO: 116863 - DNA, 1251 bp, Enterobacter cloacae
gtgaaattaaaaaaccgaagccgacagcggcgggcgctgatcccgcatcatttctcaaaaagctatcacatcaacgcgccacggctgaaagccgtgctgaccttgttcatcaccttttttctctgcctgctggtctttgcgattgtctttaacttttcggaaaccacgctggcacgcggggtgctgatcccggcgcagggcgatgtcgaagtgcgcgcccgggagtccggtacgcttgtggattttgccgtacggccgggccagtacgtgaaggaaaacgatccgctgttcaccgtgtcacaggactatggcggcaagcagggctcggtggtgcagtttgaccgccagcagatggaagcggagaagaagcgcagcgagcagcgcatccaggccattgaggactcgattgcgtcgtatcgcaaaaatctggcgcagcagctggctctcaccgacaagcagatcgccgtttcccgcgataaggtgaagaagctgcgcgcgctgttaaaaaacagcaccgacacctacgaggcgtggaaatccgtctccgggaagggctatgtctccaaagtggatctcgataaaagccacaacgatgtgctcaatgcgcagctcaacctgacgctggaggagagcactattcttgagcttgaggcacgaaaaaccagcctgaccgacagcacccagtcgcaaattgactctctgagcgaagagcagctgtatgtgaaaaaccgtatcagcgaaattgaccgcaacctgtccagccggggaagttccaccatggcgatgctggccccttccgacggttacgtggtggcgattaacttcccgcctggccgggccattacgcaaaatagcgaggtggtggtggtgatccgtaaaaataccgcggcgacgatggaggggtacctgtatgttccggcaacgggggtggggcgcgtggcgaaaggcgataaggtcaagctgcgcttcgactcctggcccgtagacaaatacggttccgtggaggcgacgctgtccgatttctatgaggtaaacattgatgcccattcggcgctgatcccgctccaggaagggcagaactactacctggctaaagtgcgcgtcccctcctggtttaccgacccggacaagaaaaagcgcatgctgatgggcggaatgacggtgaacgccgatatcgttatcgatcgtaagccgcttatcaatctgctgattgcgccgctggaaagggtgcgcaagcggtttatcgattga

SEQ ID NO: 116864 - DNA, 750 bp, Enterobacter cloacae
atgatgtttctgccgcgtctctatgcgcgactctgcgcgcgccaggccgggcgcacgctgctggcaaaccggatcacgcaaaactacagccagtttatgcgctgcccggagaccgatgtcccggctgattttctgcatcagaacgcccatgagctgagcgggtttaacttcgtggagcagatcttcccgcccgcgctttgggcgcgcaacgtccgcttcgatctgcacgcgtacgtggcgcagtggacgcaggagcaggcgttttacagttcatctcgcaccctgcttctgggaatgcgctgggcgggctttggtctgatcgtggatgcgctgcttgccaccgcgccagccgatgtgcgctttcagtttattacccgtcaccctgcgctgcataagctgatggccgcgcacgaaggccgacgcgccagctcgttttttgcccctcaccgcctggtgacggtgctgctgatggacgaacgcctgccggatgcgccgctgttctccacccaggcaggggatcaaaaggcgtggttaacggatgtctcaacgcggtttttatcgcgctatggctacagcgtccgaacgctgctgccgatctgttcgctgcacgcggcagagtttgggctggagagtcaggcgtatgcgccagaggattaccgtcaggccgccgccgacacgctgaacgcgctgcgtaaaacccccacgctctggagtgcatgggacgatctttcagtgatttatcatggatga

SEQ ID NO: 116865 - DNA, 2097 bp, Enterobacter cloacae
atgttttcgctctttcagtataaaaaacagggtaagacccctgttattcgccagcatgaatttaccgaatgtggactggcctgcctggcgatggtgttggggcactacgaccatcatgtctctgtcagccagctgcgccgggagatttccgtttccgccgatgcgggaacctcaatggcggaattgatgacccttgccagcgataaaaatatgtctggccgggtgcttaaaggcgaaatcactgaaatagaaacgtctgagctgccgctcatcgccttctggcgcggcaaccatttcgtggtcatcgtgaagatcgacagccgcagcgtgaccgttcacgacccggccagcggcgtgcgtcgttaccgtctgaaagaggcggaaaaactcttttccggctatgttcttgagcttaagcccacgccgtgcttcgaaaagaaatccccggatgaaaagctcacgcttggccggttagccaataaatccccgagcctgttccagcgccagctgctgctgtttgtgctctgtatttttaccctcatcaccatgctggcaagccccacctacgtgcagctgattatggatgaggccatttcccgcagcgacagcgatctggtgatcctgctcaccgcgatcttcgctattgtctttatctttgaagtcatcggtaaattcctcaagcagctgcttgagatcctgatgcgtaacattgcctatgacgatttaagccagtccgtgcgccactacatgctgcgcacccagaccagctggttccgctcgcgcccgccgggcatcgtgctggccattgaaaaatcgctccacgcctgcgcggagttcatcagcaatggttacgtgcaaattctcttttccagcctgatcgccgtcaccagcctgctgtttatgctgctgtataacgtcaaaattgcgctgctgacgatgctgctgatgggcgtgtttttcctgatccgcttttcgctgatcggcccctatcaacgcgcggtggatgactccatcgagcgcaccgcccagtatgaatccctgctggtggagacgcagaaagggatcattacgctcaaagcgaacaatatggagcaggcccgggatgcggtgatggataaatcccagcgcgaacacatcgccgggctgatgcgtaaagagcggctgctggcccgctttgacgtggcttcgctgctggtgatcaatgccgagcagctgctggtggtctgctttggcgcgtggttgatcctggaagggcagatgagcatcgggatgctttacgcctatatcagctataagcgctatttttccgatgccatggtgcaggtggcgcagaagctgctggacaaaaatgccctcaaggggccgctggatcgcgtgggcgacctgctgtttgccccctctgaaaccagccagtttgggaagcggattgtcacctcgccggtctgtctgcaatttgaggatgtctcatttgcctatcctggccgggaggccacgctacagcatatcaatatgaccctgaagcagggcgaagaagcggtgattgtgggccagagcgggtcgggaaaaaccacgctgctgcgtctgatctccggcatgctgctggcatcgtctggcacgctgcggatcaataagatccccattgaggagtgcgatctttcctcgctgcgtcagcacatccgcatcgtccatgcggacgatattctctttaccggctcgattctggacaacatcgcctgctttgacagcgcaccggataaagagcaggtcattgccgcgtgtcggctggcggaggtggaccacgtcgtcgccaggctgccgcacggctacgaaacggagatgctgccggggaacacctttttctctgccggggagatgcagcgtctggttctggcgcgcgccctgtacagccagcctaagcttctgctctgtgacgaagtgacggcgaacctggataaaacgaccgcgcagaaagtgctggcgaacctgcgtagcctggggattggcctggtgtttgtcacccactcgccggacgtggtgggctgccaggggcgtctctataccatggaaaacggcaccctgcgggagagtgagcaatga

SEQ ID NO: 116866 - DNA, 186 bp, Enterobacter cloacae
atgcaagttattgatttcaaaaaagcacaggccatcatcggtggttgggatccgtttgctgccgctattcagggcgcaagcgcgggctataacgcgggcagccagatgttaggcgcgctgggcggcaccatcggcggcgtgttcggcctggtgggcggcttcatcggcggtttcttcagcgcctaa

SEQ ID NO: 116867 - DNA, 195 bp, Enterobacter cloacae
atgaaagcgatttcattcgtagaagcgaaagacattatcggtggcgcgttaaacccgttcgctggtctggttaaaggtgcacagctgggttacgacaccggcgcaagcatcatgggcatggttggcggtgtggttggcggaattctgggtggcgcaatgggcttcctgggtgcgctggttggtagctacaactaa

SEQ ID NO: 116868 - DNA, 654 bp, Enterobacter cloacae
atgactggaaaattcctggctatttttgcaataaattgcttcatttccacaggggcaaatgctttaattatcgaaagtctgaatattgattttcttcccgaaagagaagttgtttttcagccgataaaaaacgataccagcgagcgtcagaattataccgtttcgcttattcaggtagacgttcctaaagagaagggaaaagaaaccgaaataaaagacggcgaagtcatgtattcgcctaagcaattaacgctggggagcggtgaacgcgcgggttttaaattttattataccggcccgcatgacaacaaagagcgatactatcgcgtaaaattcaccgagacgccgctccaggcaaaggttatcacgcgcaaaggccagcgcatccagtcggatgtggtggtctcgcttgaggctattttgattgtccgtccatggacacgacattttgattatgcgtttagcaacggggtggtgagtaataccgggaatacctattttaaatatgtttcctcggtcgggtgcagtacgcaatacaacaattcaaaatatattccgccggggcaacggctggaaatagataatgccgggcaggctgcaaggcggatgattatttatggcaataaaatcattccgcttaccacctgcccgtag

SEQ ID NO: 116869 - DNA, 1599 bp, Enterobacter cloacae
atgaaaaagatattcgctcttaatttactgctgatgagcgcggcggcccaggcgcaggagctgccctatttcgccattaataacccggacaataacggtacgggaaacagcgcggggctgtttagtctgaacagcacgtcgaccgcgtttttacacggttcgcgcgagtggccgaccctgagtgcgaaaacgaataacggtatcgccacttacatcccggacaacagctacagcggtccggcaggcagcgcgctgaccatcgacttttcggtgaccggttccagcgcctctccgttcttcaaagggacggcgtgttcctcgtcctgcggcaacacggggtacaccccgacgaccagctataccgacacgtcgatggtggttaagccgccggtgatggagcccggcacgtcatacgggcgctgggtactgggcgatccgttctttaactatctgctcaacgccgcgccaggggatgaagtgaccatcacctccacgccgcaaatcagctccatcaacaaagtgaccaccaccaatacgcttcacaaggtgggcacgctgaccatgaccaacgccagggcgcttaacctggggattgacccgatcagcggtgaggtgacgattgtcgatggatcaacgggggccacctgcaccaaatacacccgcaacacggtctctggcgtcctgtgcgacctgctcgaatacacgtttgttggggaggatatctccggttacaacggggggctggcgctcacctcttcccgcgtcaacagcgtgctgcaatcgcacatgagcggcggcaccgggcttgccgccgagctgaccttcgatgaaaacacctggtacagtatctccggcggtatcctgagcgatacgcgtgtcctggcgaacaccttccttgcagcgccgcagaaaaacggcggcaaagcgtcccttaaaatctttttgccgaaagcgttaattctgagcgtggcgcaggcgggggacggcagcaacattggcaatatcgtcagcctgtgtctgacgcccggcaacagctcgctggcggcggatttctgcttccagccggggggcggcctggtgattaaccctatcgagcccgggctggagattgtgccagacaacccggattacaccctcgatcctgacggtctgggcggctccgggaaaggcattatcggcgaagcgcccattgagatcccctacaccatcacctacagcggggcgcaaaaagatgcggcgattgcggtcacggtaaaagtcaccgggcctacccaaagccttaatggggtggactactgcgcctttagcggcaacggcttcacggttcccattccgggcaacgtgctggtggggaaaagccagacgctgatggcgcacaactgtaaaggcgaagtactgtcgatcccggcgccggccacccatgcggaagagtgggacaaaatgagttccggcgtgaccgatatgtggctctggaaaacaccgctgatcctccagttcgttatggataatccggtatcgaaaaccacctatgacggaaatagctggtttggcgaagtgaccgcgcagggaagaatagatgttagcgcatcctggaattaa

SEQ ID NO: 116870 - DNA, 2598 bp, Enterobacter cloacae
gtgaaaaataaattagtgttgccggtgatgatggcttgcgcatccggcacgctgcccgcgcttgcgcttgcgcatgcagcctcaagctccgtggttatcgctaattaccgttttcccgactcgctttatgcactgctggagcaggggatcaaaattcccgtctatctggtgaatacgcgtccacactcagcacaacaagggaaccacgaaggcacggcgagcgaatatgttcgtatcggtgacgtgacgctctttgcaaaagatctgaagctggggctgagggatgttcaggtccaggagtctgataacggcattcgtctgtcaaaagagatgcgggcgttactgcaaagcattaacgataagcagtttgatggccagatgcgtattccggttagcgcgggttcggcgttcgaactggatcagaaaaaaatgcgcctgttgctgaatctgtcgcagagcgactacggggtgaatattcgcccgcgtgaggtggatattgatgcgccggagtctgacgacctgagcggcacgttctcctacaacctcggggcgtatcacaccgagagcggctacggtgacagctggtcgtcgggctatctgaacgcgagaaactggatctcaatgggcgtcgatcatgtgctgatcgatggctctggctacgtcaacgagagcagcagcgatacccagatgaacgcggttatgtgggagcgcgactatcaggggatgcgctacgccgcgggcatgctgaacggctgggcgatgcagtctctggcgagcgtcagcgggatttccggcggtgaagtctacggcgtttccatgggcaaccaggccaactcccgcaagcgcgataacacgctctctctgacgccggtggtggtctattttcccacggcgggcgaggcccgtattcgtcgtgacgggcagcttatcggcattcagcgctttgacgtcggcaaccatgaaattgacaccagcagcctgccctacgggatctacagcgtcgaagttgaagtggtgagcggaagccgcaccgtgtcgcgcagcatgtacaccgtaaataaaccgttctccagcaacgtgtcggaaacgctgcgctggcagatgtggggcgggatgtatagccgcgataaatccgtcgtcaattataaaaaatacgcgaaacgcaaaaacgagcaggataacacctactactacgattacgacaccaaacataaagacaccatgtcgctggtgggagcctcgttcagcaagcgcagcgggatggtcgactggaacgcctctacctacatgatgcgggaacacatcgtcagcgagctgtgggcctccctgaacctgacgggctatttctcggtgaatacccagaccatggccgcctccgacggaacgtatcgcgccaactatggggcgaatctcagcctgccgtggcagatcggctcggtgtggtactcccatgaacagctctccagcggcaagttcctggatatctatgagagcaagggcaacacttggggcgcttcctttagcctgccgtcattcggcctgccctcggcaggcaacctgagcctgatgcgtcaggaagacgacctctatcgctataaacgctatcagctggactactcccaggggttatacgccggtcgctacggtacggcgcgcctgcgggtgggaatgtcgcgcaacaaatacgacgggtattacgaagagaaagatcgttacgtgatgctcgatttcgccataccgctcggcaataccgtgtcggttggcgtttcccacaatcgcgataccggcacggcgctgaacgtcagcgccagccgccagtttgagggcgattacctgaaatcggctaccgccaacgtctcgaaagcctttaacagccgccaggatcgcagcgtaagcggcggcggcagcgtgaacttcgacacgccgtggaacagcaacatcctcagcgtccagagcggcatgagtaaaggctggaactccacgctgaccagtgacggcagcgtgggctggtccaaagaggccatcgccgccgggaaaggtaccgaaagcgcaggggtgattgtcagtaccggtctcaaatctgatgaagcactgaccctgaagcttaacggccgggcggaacgcatcaaaggggataagacctggctgtcgctgccggcataccaggcttatgacctggaagtgatgaacagtgaaaccggtacggaaagctatgagattggcgcgaatgcgcgtcgccatatcacggtttatccgggcaataccgtggtgatgaagccgcaggtgaagaaaatcgtcaccctgtttggtcgtcttgtggatgcaaacggggccccggttggcgccatgcagatcaaaaaccatgtcgggctgacccggacggaaaacgacggacgcttcgtgatcgacgttgataagaacaaccctgtcctgagtatcgccacgccggacgacagcgtctgcgaagtgcgcctggacatcgagtctaaccgcggtgcgctgtggctcggggacatctcctgcgacaaaggcgattttgtctggcaggaagcaaaaggaacgcaggaacgtgacgatgaaaaagatattcgctcttaa

SEQ ID NO: 116871 - DNA, 678 bp, Enterobacter cloacae
atgtttaacctcaaatccaccttcttatttttattatttatctcttcctccgcgctggccattaatgtgggaaaagtcaccaccattatttctgcggatgctgactccaccgccaaggaaataaaaaacgaagcagacagcgtgcgtattgtttctgttcgcgcacagcggatcagcagcccaatggatgaagggatcgtcattaatccggagaaagtggacgaactgttgctgacgcccacgcgcatggtaatgcccgccggtaccagcaatatcgtcaaattttactatcacgggaacgccgataacaaagagcgttactaccgcattaccttcacggatgaaggggtaagcgaagaggtggacagcggttcgccaaaaaacggcaccgggatgacgcgtgcggtggtgagcaccattctggtggttcagccccgggataagaagatcgacttcgtctatgtggcgggaaaaataaccaataaagggaacacctcgtttcgcgtcaatgcgaccgggacctgcctgaagccgaatccggaatcccccggcacgccgtgtagcaaaaacttctacctgatgccagagacctcgcgcgctatcgaggatatcaacgttacggataaccattttcatctcggaatatgggacctgaaacagttcattcctgttaagtaa

SEQ ID NO: 116872 - DNA, 624 bp, Enterobacter cloacae
atgaacaaactgaacgctatcgttctgggctccctgctgtctgtttctgccctgagcgcagttaatgcagctgaaacgacggcttctgccacctggcaggcaaccgcgaccaaagacagcgaatccgatctggttgttacgccaacgcgtgctttgaacttcgtttacagcgccaataccaaatctttcaacaccgataccggtctgtttgatgtggctatccgtggcgatcactctacggcgaccagcttcaaactcgaagctatcctcgacgattcaaacaacacgctgttcagcgtgggtggtgaagcgaccaagctgaaagtgggtgcgcgttggggcggtaacgacctgggctctatcggtggcaccgtgggggcgaaatcgaccgcatggaccacgctggttgattcttcttctaacaccggcgtctcttctggcctgtggaacctgaccaccagcgcaggcgcggcggcagataccgaaattaccggccaggacaaattcgtcttctacgttgactccgctcaggacaacgcgggtactgcgaaagagttcaaagacctgaccaacagcctgtgggaagggaccgtgtctgttgcgttccgcgcaacctggggctaa

SEQ ID NO: 116873 - DNA, 486 bp, Enterobacter cloacae
atgtcacggactaaaatgagtgtactgttcagtatcgtactggcgctgtctgtcatcgcgttgttatgggtctattttaccagaacgcaggatgaggggtttggctgccagtcagataccatttcctggaaaacctattccacgggtgagtcaaccgatatgtcgctaaccacgcttttcctgtttaacaacaaagatgttgtgacggttattcataaaggcgtactcaagaaagagggcaaaagctacctgattgacagaaattacacgctcagcgtggaaaaagtcgacggcagcaatatcttttatattaaggataaaaagctgaataaatctgaagatgatgcggcgccggatggcgttgtaaacgaaatgttacttgataatatcaacttcttctatattaccagcgtaaaaaaacatgcgtggttaattaaggggctggtgttgcctgtaatgatgtgtgtggctgtcccgacgtcctga

SEQ ID NO: 116874 - DNA, 813 bp, Enterobacter cloacae
atgaagtatctcattgatcttacaatgctttatgaagtcgacaccggtatgatcatgattaatggagaggaagagtcatccattaagttatctaaccaggcgggtcgtctgctttatgaacttatcatcaataatggtaaaacactcgacagagacgacctgataaagaaggtctgggaggatcatggtttctctggttcttcggtgagtctgaatgttgccataagtgaaatcagaaaagcatttcgtacattaggatgcgaccctttactgataaaaacgatacgtggcaagggatttagccttgccgcgcatattgaacaccacacggtcaggccgccggttatttcaacgcttagcgaagaatctgcctctgaagcattcgatacgctagcgcataagaaagatgccgatccgcctaaacaaataatatcgctgcacagactctttatttctctctgcacgttattactaattattgttaccggcaccgctgttttactattgcaccagcgggattcctatgccgagagcctgaaagattctgatatgcatctgctcggtaaagtggacaggtgtacgatatacctgatcgataagaatatgtatcagccgcgacagcactactttaatcacgtaaaagaggtcatcgccagtcaacatatcgactgtcaacatcaggttgcagatgcttactattccaggtttaaaaagtcgcagatagaaaattatttcctggccatctgttatcagcaggacagtatcgacgattataagaactgcatttcttacagaagcctgaccgggagttaa

SEQ ID NO: 116875 - DNA, 585 bp, Enterobacter cloacae
atgttcaaatcgatcatgaccgtatcactgctggccgccgctattgcctctaccagcgcagtggccgcagacaattcggcgggtggtatcattaactttaccggcgctattaccgatacaacctgtaccattaacggcggtaaaagcgcggactttaccgttgcgctttcccctatttcggtaaaagatgcgggcaccacggttggcctgatcacccgaaataaaaaatctattgcgctgacattctctggttgctcaccagcagccggaacgaccggtaccccgctgaaagtttatttctccagcgcggataatatttccactgacggtaaatacctgctgaataacagcgtgaacgaaagcgatgccagcgtggcacgtaatgtcggctttgcgttagtggagccaggttcgtctacgcctattaccctgaaccagccttacacgacaaatattatgggtacagcgaccgcgccagattccgaaacgctgacgctggacgtttattactataaaacaaacgccgctgccgccaccgtgggcgagttaagctccaacgtaacgtataccatttcctacctgtaa

SEQ ID NO: 116876 - DNA, 693 bp, Enterobacter cloacae
atgcgcaaggcaattttgctggcaggcttactgctaagcacgggtcactcatgggccaatattgtcattaatggcacccgtgtcctttatcctgaaaataacaaagaggtgatcgtccagttaatgaatacgggcgatgcgccggctctggtacaatcctggatagatgacggtgatattaattccacgccggaaacagccaatgtgccgtttctgttgtcgccgccggtgataaaggttaacgaacataatggtcaacagcttcgtattaaaaagctgccgtccagcttgcctgcggatcgcgaatccgtctttttcctgaatgtcctcgacattccgcccagacctgaaaatctgcaaaaccagaataccgttcagctggcgattaaatcccgtatcaaacttttttatcggcccgctgcgctgaaaggcacgctggatgacgcggtggcgaaactgacgctcgccgccgacggcgatcgctttcgcattacaaataacagtccgttccatattacggtcgccaatatttcgctgggtaaaacgaaattgctccaggagtccccgatggtttccccgtttgggcagctgacggtcgccgccaaaaatacggttaagcgcggacagaccttccagctgatgtatgtggacgatcttggcgcgtataaaacccgcactttcaccagtcagtga

SEQ ID NO: 116877 - DNA, 2493 bp, Enterobacter cloacae
atgaaaatgaaacaaaacagactctgtctgctggcagtctgcacgcttctgctttcgcataaatcaggggccgtctcgtttgatccctccctgcttgctggcgcatccggtgagtccgatctgtctcgcttttccgaaaacaacgccatgcctgccggcagtcaggagatggatatctacgtaaacggctgctggaagggacgttataccgtcatctacggcgagcagcgtgacgacatccgccttgcctggaaagatgcccggtcgctgggcatcaacaccacgtccgtgcctgcgcccgccattgcgcacgggcaggtccagctgcgcgatctggttcagggcggtgaagtcaaaaccgataccagcaccctgagtctggcgcttaccgttccgcaggcggccgtgcagcgtactgaagaaggttacattgccccccagttctgggacgaggggatcccggcgctgatgctctcgtggaacacgacctggtacaacacccgcgcgaaaggcactgcgaaagacacaaatgatgatttttatgccgggctggattccggcgccaacctgttcggctggcagtttcgcgacagcagcgcctggcggaaaaccgccagcggagagagtagctggcagaataatacccgctacctgcgccgtcccctggcctcgctgaaatccaacctgacgctgggtgacttttatattcctggcgatctgtttgattccctgcgcgtgcgcggcgtgtcgctggcgtcggatatgaagatgcgcccaaattcacagcagggtttttcaccggtggttcacggcgtggcacggacgaacgccctggtgaaagttatccagaatggcaacgtgatctatcaggagaacgtgccgccgggccagtttaccctcgacagcattcagcctaccggctccgcgggcgatttgctggtggtggtgcgtgaagcggacggttcacagcagtccttcacggtgccgttttccgccgtgcccgggatgctaaaagaaggggtgagtcagtacagcgtagtggcgggtaaagtgcatcagaacacgctcgatgccgaacccgcattcatgcaggccacgctgcgctacgggtttaataacctcatcaccgggtataccgggacgattattagcgataactaccaggccgggcttatcggtaccgggtggaaccttccctttggcgcggtctcgtttgatgtcacccacgccaaaaccaccctacaggatcgcaccagcagcggtcagagttatcgcgtgtcgtacagcaaatttatcgataccaccgccaccaacttcaccctggcggcctatcgctattccactaaaggctattacagcttcagcgacgcgctctattcgcgcgaagggtatcagcgcctgagagcgcagtacgacgactatgaagatcggtttggcgttgcgcccgacatgtcgctaagcacctgggacgccctgcgcgcggcgcagcccaagaatacctttacgcttaaccttaatcagcgcctgctcaataactggggcacggtgtttgtctccggcacacagcgcgattactggaactcacagcaaaccacgcgcgaatatcagatgggctattccaacgccatcggccgcgccagctataccctgtcggccagccgggtacggaacagggacagtgaagaagagacgcgcctttacctctccctcagcctgccgttctcgctgtttgataataatgcgtggatcacctccagcctgacggccagcgattcgcattacgaacagagcaatatcagcatgagcgggaacgcgctgacgtcgaaccgcctgagctataccctctccggcagtaatgcgcgggggggtaaaaatgcggcaagcgttaacgccgcgtaccgttcgaacttcgcgacactcggtggctcttacagcgaatcctccgactaccgccagaccgggctcagcggacgcggaagcctggtggcctacccgtggcacgttctcgcctcaaacgaaaccggcacaaccatgactatcgtcgatgcgccaaaggcggagggactgatggtgaacggcgatgaaagcattatgacgaaccgcgatggcgtggcgctggtcccttacgccaccccgtatcgcaaaaacgccattacgttaaccgaaacggaaaacagcgctggcgcggaggtgatcggcaatatggctaacgtggcgccttatgacggggcggtgagttatatccgcttcgaaaccgataagcgccagtcatgggtacttcatgcgacgcgcaccgacggcaaaccgctgccgtttggcactgaagtgctggatgaacacggtggatctgtcgggtatgtcggccaggccagcgtactgtatatccgtgctgaacagccgccacgcgcgctcaacgtgcatctccgcagcggaaagtgcgaaatctcctccccggcctgggggctgaacagcccctcatcggtttgccattaa

SEQ ID NO: 116878 - DNA, 1065 bp, Enterobacter cloacae
atgttacgatcattcatgttcctgctcctcaccagcattagcgggatgagctatgccacctgctccggcagcagcatcgtttatggcacaccgattaccattgatttatcggataagctgagcccggccacgcccacatggaccggcagcttcagcacccagtacagcggctcgttcaactgtacgacgggtaacagtgaattttcttacacgccgatcctctcgaccgacagcaaatacgcgaccatcctcgggttcagcaataacaagtatatggtgcgggcggagatcaccgatcccccggccaataaaaccctgtctgccagcggtagccatacggcgtctgagctgaacacaccgtttacggttcgcttcaccctcgttaaccagagcggtaccaccctgacgggggatacggcgaacatgagcgacgttctgttcgtcagcgacatgagcgggttatccatctgggaaatcatcacctggccaatcaatcaggtcatcaagatagcgcagtggttattcagcgggttcaagtggccttacgacaaccgcgatatgtttggtcagccgatgatcatcaaatacgcgccaaaactgactacctgttcctttgataatgcggggctgaccgtggcgctgccgacgctcggcattccccagctcagtgcatcctcacagccggggctgacgcctttttcactgaacatgagctgtcagaacgtcggggttaacggcaattccgatcggtcaattgagatgtttctgtccagcacgcagctgctctcaaccgacagctcggtgctgatcgacagcagcagtagcgcggcgcagggcgtggggctccgcctgataaaacgtgacgccccgcaaacgccggtgaccttctctacctcaaccaccagccgtggcaacgccacgatgattttcagcgtggcggctggcgcggcgctggacgaacatttcacccttccgatggcggcgtactattacgtgtgggcgcccgcccaggtgagccagggtaagatcaatacatcggctacgctgaatattatctatccctga

SEQ ID NO: 116879 - DNA, 666 bp, Enterobacter cloacae
atgaataatactgaacgtatcgtaagggtaatggtgttttacaaaataaatatatttaaagagataatattccgggcgctccaggatcttttacccgattacgtactgaacattactcaggtcgattccacagaacaggcgctggcggcggtggcggataataacgtggatgttttcttcactgaatttaattatctgcttaatcataaagagtggagtgcggaggtcagcagccgttttacatctttatgtaaaacccatcacgtcaggcgtgttctgttggtgcccgagctgccttacgggctgttaaaaaaagttctggagatgaaatttgaattaaccatcagtcagcaggatgaattgactgaactgaaaaaggaattacccgcgttgctcatggcggacgggcaaaaaccgtcgatctcttcgtggctcaggcgggtaatgcggtccggctcccgggcgcgttccatcctctcggccagagagtgggaggtgcttcatcttatcgtggaaggattttcaacgacggagattgcccgtcatcgaaaccgttcggtcagtaccattgcgacacagaaacacaatgcaatgaaaaagctgaatctttccaaccacagcgaactgattaagtatgtgcaagcggttggaaagatggaggaatag

SEQ ID NO: 116880 - DNA, 621 bp, Enterobacter cloacae
atgcaaaataaaaaaacaattcacgttgccgttgttgacagctgcgaattcacgatgattggcctgcaatcgcttggaaagcgtgagcctgatgaaaaacacgacgttattttccatggatttacccatatcgaagaacttgctatgagtgaacaactctttgatatcatcatttatgatccgttgaatacgcgtcatttccgggtgacgacgaatgacgacattctctgtattaaacagaaacaagtgacggcgaagatctatatctattcgttatccgccggctatttgaaattcaaacatgttgatggagtcatcagcaaaagagtctccctgggggatatcaaagcgctgtggcaaatactgatgagccagacgccgcaagagtctggccgttacaacgtaggcatgacgacccgcttacgcaccccggcgaggctgtccagcgaggaggcaagcgtattgcgcggctattcctgtaatctcaaaaccaagcaaatcgcccgtcagctggggtgtaacgtcaggctggtttacttttataagaacaacgccatgaacaagcttaaggccgtgcgtggcccctcgttttaccagagcattcgctggatcctgaattaa

SEQ ID NO: 116881 - DNA, 681 bp, Enterobacter cloacae
atgtataccgttcttccctctcccctgttgcaacgtatctcagggctgcgattccagcctcttgtcgatcttcattcgggccaggtgttcgcgcatgaagttctcgtggagatccataacgtcaatcttgaggtgctgtttgcctcgctgccctcgcgcagcgcgctgcaaatcttcttctggcaggccaacaccctgttacagatacccgcccgggacgcttactggctaaaccttcaggcagaacaccttctcaacgaacgcgctatccggttgttgctggcattacgccatcagcagcggttaacgattgaaattcaggatcccctcaccatcacacggctgagcgaggatgagcaacgtcgccttcatgccacgcttgttcggttaaaagaggcgggatggcaaatctggctggacgatttaacccgggagttggcggaggcgttcgcgcggcttgcgctgccgctggatggggtgaaaattgaccgctcagcgctgcgcgagcgcgcgccgcttgccccgtttgtacaggaggtcagggcaggtatcgcgcaatcaattcttatagaaggcatcgaaaactcgcgggatctggcgcgcgcccgcgcgtccggcgcacagtctggtcagggttttctgtggcccgaaagccgaaccgatgcccgcgtaacgctttga

SEQ ID NO: 116882 - DNA, 801 bp, Enterobacter cloacae
gtgaaacttcgattgggtgcgcttctcctgactggcctgctgctcgcgggctgtgatcagggcggcaatgatgccagacacattaaagtcggcgtgatcaatggcgctgagcaggacgtggcggaagtcgccaaaaaggtggcaaaggagaaatacggtctggatgttgagctggtgggttttagcggctcgctgctacccaacgatgccaccaaccagggcgaactggacgccaacgtcttccagcatcgcccgttcctcgcagaagataacaaggcgcacaattacaagctggtcgccgtggccaataccttcgtcttcccgatggcgggttactcccgaaagattaaatcggtctctgagctgaaggacggcgcaaccattgcgattccaaacgatcccaccaaccttggccgcgcgctgttgctgctgcaaaaagagaagctgattacccttaaaccggatgttggcctgctgccaacggcgctggatattaccgcgaacccgaaaaacttacagattatggagctggaaggggcgcagctgccgcgcgtgctggacgatccgaaagtggatgtggccatcatcagtaccacctatctccagcaaacggggctttctccggtacacgacagcgtctttatcgaagacaaaaactcaccctacgtgaatattgtggtcacgcgtgaagagaacaaagacgccgaaaacgtgaaggaatttatccagtcctatcagtcgccggaagtggcgaaagcggcggagaccctttttaacggtggcgcggtgccgggctggtaa

SEQ ID NO: 116883 - DNA, 1485 bp, Enterobacter cloacae
atgactcaacctgcgaaaaaggcgccgtcgattaagctgctgttcagcgcactcctgctggtgatgctgctctcggcgctggatcagaccattgtctccaccgcgctgccgaccatcgtcggtgagctgggcgggctggataagctctcgtgggtggtaacggcctatatcctcagttcgaccatcgtggtgccgctgtatggcaaattcggcgatctgtttggccgaaaaatcgttctgcaaatcgcgattgtgctgtttcttgtagggtccgcgctgtgcggtctggcgcagaacatgacccagctggtgctgatgcgcgccctgcaagggctggggggcggcggtctgatggtgatcagcatggctgccgtggcggacgtgatcccgcctgccgatcggggtcgctatcaggggttgtttggcggcgtgtttggcctggcgacggtgatagggccgctgatcggcgggtttatcgttcagcacgcatcctggcgctggattttctacatcaacctgccgctggggctgtttgccctgctggtgattggcgcggttttccacggcagcgcgcggcgcagcaagcatgagattgactacctgggggcgatttacctcagcatggcgttgctgtgcatcattctgtttaccaccgagggcgggacgatccgccaatggagcgacccgcagctgtggtgcattctggccttcggcctgacggggatcgccgggtttatctacgaagagcggctggcgtgggagccgattatcccgctgtcgctcttccgcgaccgcagcttcctgctctgtagcctgatcggttttattatcggcatgtcgctgtttggctccgtcactttcctgccgctctatttacaggtggtaaaagacgccacgccgacgcaggccggtttgcagctgatccccctgatgggggggctattgctcacctccattatcagcgggcgcatcatcagccgtaccgggaaatatcgtctgttcccgatcctcggcacgctgctcggcgtggtggggatggtgttactgacgcgcatttcaatcacctccccaacctggcagctgtacctgtttaccggcgtgctgggcatggggctgggactggtgatgcaggtgctggtgctggcggtgcagaacagcgtgtcagccgatcaatacggcgtcgcgacgtctggggtgacgctgttccgttccattggcggggcgattggcgttgcgctgtttggcgcggtgttcacccatattctgcaatcaggcctgatcgacaggctgccggaaggggcggaactgccgcgcgaacttaatcccgttgccatacaccatctgcctgatgccctgcgtctggactatctggatgcgttcggctcggcgatccatgcggtattcatgctggcggcggggattatggtgctggcgtttgtgctgtcgtggtttttgcgcgaagcgccgctgcgtcggcaggcgtga

SEQ ID NO: 116884 - DNA, 648 bp, Enterobacter cloacae
atgccagcacaaaaggacaattctgaaccccgccgccccggtcggccacgcggcggcaagcgcgttaccgccagccgtgaacagctgctggacatcgccctgaacctcttttcccgccaggggatcgccaatacgtcgttgaacgctattgcccgcgaagcaggcgtgacgcccgccatgctgcactactacttcaactccagagaacagttactggatgcgatgattgaggagcgcttcctgccgttacgcgagcggatcggggcgattttcgccgacaaccgggattcgccggtggatgccctgacggaaatggtcagggtgctggccgaactggcggaaaagtatcgctggtttgccccgctgtggatgcaggaggtgattggcgagatgccggtactgcgcacccatttgcaggcacgctttggcaatgagaaatatcacaccacgctggcaaccatcaaaggctggcagcaggaaggaaagctgaatccggcgctggcccccgaactgctgttcactacgctgctgagcctggtgctggtgccgttctcccgcatgcgcaatgacgagaggcttagcgccctctcgccggagatcgtggtgcgccacgtgttagccgtgataggcaccgggataggcggttaa

SEQ ID NO: 116885 - DNA, 420 bp, Enterobacter cloacae
atgcatctgagcattacagataatgtcacagccgaagaaaaagaagaattattaacggggctaagagcctataacgcgcagtttttagatctgtcgacatttggcggcgatattggcgtatatatgcgagacgacaatggcgtcatgctgggcgggttaatcggcgtacggaaaggcgactggctgaacatcgactatctgtgggtcagcgacagcgtgcggggaacgggcgtgggaagccagcttatcaaaacggctgaagaggaggcccgtcgcaaaggctgtcgtcacgcgctggtggatacggtcagcttccaggcgcgcccgttctatgaaaagcagggttatcaggtgcagatgtccttgcaggattacccttatcagggaatgcagagacattatctgtccaaaaatctttaa

SEQ ID NO: 116886 - DNA, 570 bp, Enterobacter cloacae
atgagtacaaagctggaagaacgacaaaaactgcggcaggacgaaatcattaccgccgcgcgccgctgctttcgcgccagtggatttcacgctgccagcatgtcgcagatcgccagcgaagccaggctcagcgtcggacaaatctatcgctatttcagtaacaaagacgcgattattgaagagatgatccggcgcattatcgactcacgtattgaagagatgcagggcaaaaccctggttgaagggatgccgcaggcgcttgcctggcgccagacgcttaacgaagacgatgacgcgctgatgctcgaaatgtccgcagaggccacgcgcaatccgctggtggcaaacatgctgatcgaagccgaagcccgcatgttcgccaacgcctgcgcgcatctgaaaaagcagttccctcacctgagcggtgagcatattcgctgctgcgtggagattaccgccgtgatgatcgaaggcacgatttaccgtcgactcacgcctttaaaagtaccatcagaacaattagagcctatataccagaatattttaaatatgattttctctgcgaagtaa

SEQ ID NO: 116887 - DNA, 1122 bp, Enterobacter cloacae
atgaaaaccataacaacctccatcgcggcattactcctcctgacagggtgcgataatgcgcaaacatctgctcctcaacgtcctcttccggaagtggggattgtcaccctcatgagccagccggtgtccgtcgtcagcgagctgaccggccgcaccgccgccgcaatgagcgccgaagtgcgcccccaggtaggtggcattatccagaagcgcctgttcaccgaaggcgatacggtcaaggccgggcaagcgctgtatcagatcgatccttccagctaccgcgccgcgtatgatgaagccgccgccgcactgaaacaggcgcaggcgctggtgcaggccgactgccagaaagcccggcgttatgcgcagctggtgaaggacgacggcgtatcacgtcaggatgcggaagacgcgaagtccacctgcgcgcaggacaaggccagcgtcgagtcaaagaaagccgcgctggaaagcgcccgcattaacctcaactggaccaccgtcaccgcgccgattgccggacgtatcggcatctcctctgtgacccccggcgcgctggtgaccgcccagcaggataccgcgctggccaccattcgcgggctggacagtatgtacgtcgatttaacccgttccagcgccgatctgctgcgtttacgcaagcaaaccctcgccagcaacagcgatacgctgaacgtgtcgttgattctcgaagacggcagcagctacagcgaaaaaggccgcctggcgctgaccgaagtggcggtggatgagtctaccggctcagtcaccctgcgcgccgtcttcccgaacccgcagcatcagcttctgccgggcatgttcgtccgcgccagagtggatgaaggcatcatgaatgacgcgatcctcgccccgcagcagggcatcacccgcgacgccaaaggcaccgccaccgcgctggtggtgaacgccagcaacaaggtcgaacagcgtcagctggagacgggcgacacctacggcgacaaatggctggtgctgagcggcctgaaggcgggcgataagctgattgtggaaggcaccgataaagtcaccgccgggcaggaagtgaaagctgaagagatgaaaaccaacggaggaaacgcctga

SEQ ID NO: 116888 - DNA, 3111 bp, Enterobacter cloacae
atgttttcccgtttcttcgtgcgtcgcccggtctttgcctgggttatcgccattctcatcatgctcgccggaatgctggcgatccgcacgctgcccgttgcgcagtacccggacgtggctccgccgtcgatcaaaatctccgccacctataccggtgcctccgcacagacgctggaaaacagcgtgacgcaggtgatcgagcagcagctcaccgggctggataacctgctctacttcacctccaccagcagctcggacgggtcggtgagtattaacgtcacgtttgaacagggaaccgatccggacaccgctcaggtacaggtgcagaacaaagtccagcaggcggaatcgcgcctgccgaccgaggtgcagcagtccgggatcaccgtcgaaaaatcccagagcaacttcctgctgatcatgggcgtatatgacaaaaccgacaccgccagcagctcggatatcgccgactggctggtgagtaatatgcaggatccgctggcgcgcgtggatggcgtcggtagcctacaggtgttcggtgcagaatacgcgatgcgcatctggctcgacccggcgaagctggcgtcgtactcgctgatgccctccgacgtgcagagcgcgattgaagcgcagaacgtgcaggtttccgccggtaaaatcggcgcactgccctcgtcgaacgcccaacagctgaccgccaccgtccgcgctcagtcgcgtctgcaaacggtcgatgagttcaaaaagatcatcgtcaagagccagtccaacggtgcggtggtgcgcatcagcgacgtcgcgcgcgtggagatgggcagcgaagattacaccgccaccgcgaagctgaacggccacccggcggcgggtatggcggtgatgctctcaccgggcgccaacgcgcttaacaccgccacggcggtaaaagataagatcgccgagttcaaaaagtcgatgccggaaggctacgatgtggcctacccgaaagacagcaccgagttcatcaagatctccgttgaggacgtgattcagacgctgttcgaagccattatcctcgtggtggtggtgatgtacctgttcctgcaaaacatccgcgcgacgctgatcccggcgctggcggtgccggtggtgctgctgggcaccttcggcgtgctggcgctgttcggttactccatcaacaccctgacgctgtttgcgatggtgctggcgatagggcttctggtggatgacgccatcgtggtggtggaaaacgtcgagcgtattatgcgcgacgaagggctgcccgcccgggaagcgaccgaaaaatcgatgggcgaaatttccggcgcgctgatcgccattgcgctggtgctctctgcggtattcctgccgatggcctttttcggcggctccaccggggtgatttaccgtcagttctcggtcaccattatttcggcgatgttcctctccgtggtggtggcgctgaccctgacgcccgcgctgtgcggctcgatcctgaatcacaccgctccgcacaaaaaaggtttcttcggcgcgtttaaccgcttctacagtaagaccgagcacggctatcagaacaaggtgctgcgcgccctgcgccgttccggtggcatgctggtgatctacgccctgctctgcggcgcgatggggttcgccatgctaaaactgccgggcagcttcctgccaaccgaagaccagggtgaaatcatggtgcagtacaccctgcctgccggcgcaaccgcggtgcgtaccgccgaggtaagccgccaggtacgcgagtggttcctcaccaaagagaaagccaataccgacgtgatctttaccgttgaaggcttcagcttcagtggcagcggccagaacgccgggatggcgttcgtctccctgaaaaactggtcagagcgcaaaggcgaggaaaacaccgcccaggccattgccctgcgcgccacgcaggagctgagcaccattcgggatgccacaattttcgccatgacgcccccggcggtggatggtttaggccagagcaacggctttacctttgagctgatggccagcggcggcaccgaccgcgacgcgctgctgaaactgcgtaaccagctgattggcgaagccaaccaggacaactcgctgcacgccgtgcgcgccaacgatctgccgcagatgccgcagcttcaggtggatatcgataacaacaaagccgtgtcgctggggctctccctgagcgatgttaccgacaccctctccagcgcctggggcggcacctacgtgaacgacttcattgaccgtggccgtgtgaaaaaggtctacatccagggcgacagtgactatcgcgcggtgccgtcggatcttaacaaatggtatgtgcgcggcagcgacagcaccatgaccccgttctccgccttcgccaccacccgctgggagtatggcccggaaagcctggtgcgctacaacggctcggcggcgtatgaaattcagggcgagaacgccagcggcgccagctccggtacggcgatgagcaaaatggagcaactggcgaataacctgccgtccggcagcacctgggcatggagcggtttgtcgttgcaggaaaaactagcgagcggtcaggcgatgagcctctatgccctctccatcctcgtggtgttcctgtgcctggcggcgctgtatgagagctggtcggtgcccatttcggtcatcctcgtgatcccgcttggggtgctgggcgcggccattgccgcctccctgcgtggcctgagcaacgacgtctacttccaggtggcgctgctgaccaccatcggtctgtcgtcgaagaatgccattctgattgtcgagtttgccgaagccaaagtcgccgaaggctactccctgacgcgcgccgccctgcgggccgcccagacgcgtctgcgtccgattatcatgacctcgctggcgtttatcgcaggcgtgacgccgctggcgattgccaccggcgccggggccaacagccgcgtggcgatcggtaccggcattatcggcgggacgctggccgcgacgctgctggccatcttctttgttcctttattctttgtactggtgaaacgtctgttctccggtaagcacgcaaaccggaggtcataa

SEQ ID NO: 116889 - DNA, 1365 bp, Enterobacter cloacae
atgtttcgtgaaactgttttagcgttagccctgctgagcgcaggctgtgtgtcattagatcccacgtatcagcgcccggacgcgcccgttccggccaccctgcccggcgcgcacggcgaagccaacgccgtggtgagccagtggcagcaggtgatgaatgatgcgcggttgaaaagcgtggtgacgatggcgctcaacagcaaccgcgacgtgcaaaaagcgatagcggatatcgacgccgcccgtgcccagtatggcgagacgcgctcgtccctgttcccgacggtggacgcggaactgagccacacccgcagccgcacgctggcgagcggcgtcgcgacaagtgacgaagccaacggcgcggtctccagcttcgagctggatctgtttggccgcaaccagagcctgtcgcgcgccgcgcgtgaaacctggcttgccagcgagttcaccgcgcagaacacgcgcctgacgatggtcagcgagctgaccacggcctgggtgacgctggcggcggataacagcaatctggcgctggcgaagtccaccctggagagcgccgcaaactcgctcaagattgtgaagcgccagcaggaagtgggcgtggcagcggcaacggacgtcagtgaagcgatggcggtttaccagcaggcgcgcgccagcgtggcgagctaccagacgctggtgatgcaggacaaaaacgctctcaacctgctggcgggcgatacggtgcccgagaacctgctgcccggcacgctggagagcctgagcgacaacgccatcacgctgatcccggcgggcgtcagctccagcgcgctgctgcgtcgtccggacattcaggaggcggaacataacctgctgagcgctaacgccaacatcggcgcggcgcgcgccaacttcttcccgaccatctcgctcaccgccagcgcgggcgtcggcagcgattcgctgtcgtccttgttcagccacgggatgaaggtctggtcgtttgcgccgtccatcaccctgccgctgttcagcggcggcaacaatatggcgcagctgcgctatgcggaagccgagaaaaaagggttaattgcgacctatgagaaaaccatccagagcgcgtttaaggacgtggccgacgcgctggcccggcgcgaaacgttgagtgaacagcttgatgcccagcgtgaatacgtggcggcggagcaaaaaacgctggatgtggcgacgcgcagttacaaggctggcgcaggcgattatctgacggtgctcaccgcgcagcggtcgctgtggtcggcgcaggaatcactgattgccttgcagcaaaccgacctggaaaaccgcatcacgctgtggcagtcgctgggcggcgggattcagtaa

SEQ ID NO: 116890 - DNA, 1158 bp, Enterobacter cloacae
atggcaaaactctctttttctttcgcggccatccttggcctgctgacggcgatcgggccgctgtgttccgatttttatcttccggcgctgccggagatcgccacccagctcaacacctccacaacgctgacgcagctttctcttacctcggcgctgattggcctggggctgggacaactttttttcggcccgctaagcgatcgcatcggacgtaaaacgccgctgctgttctcacttttgctgtttgtactggcttcagtgctttgtgccagcacgcagaatatttacgccctgatcggctggcgatttgtgcagggcgttgccggggcgggcggctccgtacttgcccgctccatcgcccgtgataactatcatggcacgatgctaacgcagttttttgccctactgatgacggtcaacggcatcgcgcccgtggtgtccccggtactcggtggctatatcgcgtcgcatttcgactggcggatgctgttctgggtaatggcaggggcgggtctggcgctgctgatcgccagccagctttttatccgcgagtccctcacagagaaacagggcgggggatcgctgacgcaaaccgccaggacggtacttaaaaatcgtcgctttatgcgctactgcctgatccaggccttcatgctggcggggctgttcgcctatatcggggcatcctcctttgtgatgcaaaacgaatatggcctgagcgccatgcagttcagcctgctgttcggtgtgaacggtatcggcctgatcgtctcagcgctgattttctcccgtctggcacgccgacacccggcggaagggttaatgcaaataggcctggtgttggccgtaacctgcgcggggctgacgttgctctttgcgtggatgcagctttccgttccggcactgattgcactctttttcaccgtcgcatttaacagcgggatcagcaccattgcgggttcagaagcgatgagcgcagtcgacgcgaaggagtccggcacagcgtcagccattctgggcatgctgatgtttttattcggcgggatcgcagcgcctcttgccggtatcggcggagaaacgatgctgaaaatgagtctcgcggtgttagtaagctatggcattgcactggcgttcggatcccgcacgcagaatgcgtaa

SEQ ID NO: 116891 - DNA, 297 bp, Enterobacter cloacae
atgaaatctgcacacctggtttgcctgctcgtttgcctgattttcgctgcgtttgttcacgcgcaggagaagagcgctccggagaaagaggcccagataaaacagcaggtcctgaaagatgtgaagaaaacctgtaccccgcagaaaaagcagagcgataaggcctggcaggcgatgattttgtcgtctgaggccaatcagctgctaatcaaaaacgccatcaccgccgtgaagcgtgacaacctggacgcctactgggatgcagtaagtcaggtggattgtatggaagattactga

SEQ ID NO: 116892 - DNA, 951 bp, Enterobacter cloacae
atgtctacaatcaacgatgtatcgcgtctggccggggtgtccaaagccacggtatcacgggtgttgagcgggtcgcgtggcgttaaagaagccagccgccaggctgttctgaaagcggtggacgagctgaactatcgtcccaacgtgatcgcccagtcgctgctcagccagtcgacgggctgcattggggtgatttgcgcgcaggaaaacattaaccagaccaccggttacctgtacgcgctggaaaaacacctcagccagcatcaaaaacatctgctgctgcgttttgcacacacaaaaacagaagtgatgaacgcccttgaagaactctcctgcggcttatgtgatgacattctggtgattggcgcgcgtttcccgctggacgtggacatggacaacgtgattctggtcgactgtatggaagccgataacgccaacagcattcagttcgaccacgccttcgcggctgaaacggcctgtaactacctcaccagccagggacgtcgccagatagcgctgatccacccgcacggcagcggctttgccgatcaggtgctgctgggctacaaacacgcgctggagaaaaacttcctgccctttaatcgcaacctcgtgtttatggacgcgacttcatcgtccgttgcgcttcaggaattactcaacaacgcgtccacgctgaactttaacgcgctgctggtggcggatgagcaggaagcccagcgggtgatcccgcagttacaggcgtttaataaatcggtaccggaagacatcatggtctttagcctcggcggttcgctgcatctgccgggtgttccggtgatcccggccattgagtattccatggatgccatggcggcgcgcatcgtgagctggctgacggagaaaacacaaatgctcgggtcctacgttctgcgcggggatttgattattccggatgtgcggaagcgttaa

SEQ ID NO: 116893 - DNA, 315 bp, Enterobacter cloacae
atgttcaagattatgctgtgctgctctgccgggatgtccaccagcctgctggtcagcaaaatgatcgatgttgcaaaagaacggggcttgcccgtgaagatagatgcgtatggcgtatccgaatttgatacgcagtttccgcactatcaggtggtgcttctcggaccgcaagtgaaatacatgttaaagacgctctcagacaaggcagcgacgcaaggcattccggtgcagcccatcgacatgatggattacggcatgcagcgtggcgataaagtactggactatgctctgtcgctcatcgaagcggcacactaa

SEQ ID NO: 116894 - DNA, 1326 bp, Enterobacter cloacae
atgagttcgttatatcaatccatggtcgcggtgattgagcagtcaattacgccgctggccgcgaagctcggtcagcaaaagtatgtgattgccatccgcgacggctttaccgctgcgctgccgtttatgatcatcggctcgtttatgctggtgtttatcttcccgccgttttcggcggataccaccaacagcttcgcccgcggctggctggatttctccgagacctaccgcgaacagctgatgctgccgtttaacctcagcatgggcgtgatgaccttcttcatctcggtggggattggggcgagcctggggcgtcagtttaacctcgatccggtgatgtccggcctgctggcctttatggccttcctgctggtcgccgcgccctatgccgatggcaaaatttcgacccagtatctctccggtcaggggatcttcactgcgcttatcaccgcgatctactccactcgcgtctatgcgtggctgaaacagaacaacgtcaccatccgcctgccgaaggaagtgccgaccggcgtggcgcgttcgtttgagatcctgatcccggtgatggtggtgatcggaacgctgcacccgctgaacctgttcattgaagcgcagaccgggatgatcatcccgcaggcgattatgcacctgctggagccgctggtgtcggcgtctgactcgctgcccgccattctgctctccgtgctgctgtgccagatcttctggttcgctggtatccacgggtcgctgattgtcaccggcatcatgaacccgttctggatggcgaacctctctgcaaaccaggcggcgctggcggcgggcgcggcgctgccgcacgtttatctgcaaggtttctgggatcactacctgctgattggcggcgtaggctccaccctgccgctggcgttcctgctgctgcgtagccgcgttacccacctgcgcaccatcggcaaaatgggcgtggtgccaagcttctttaacatcaacgaaccgattctgttcggcgcaccgatcatcatgaacccgatgctgtttatcccgttcgtgtttgttccgctggtcaacgcctgcctggcgtacggcgcaaccaaactcggctggctggctcaggtggtttcgttaaccccgtggaccacccccgcgccgattggcgcctcgtgggcggcgaactgggcgctcagcccggtggtgatgtgcctggtctgcatggtgatgtccgccctgatgtacctgccgttcctgcgcgcctatgagcgtacgctcatcaaaaatgaagagcagaaagcccaggcgaccgtcggtaacgctgaagccgccagcaattaa

SEQ ID NO: 116895 - DNA, 1377 bp, Enterobacter cloacae
atgaaatacgcatttcccgataacttctggtggggcagcgcaagctccgctctccagacggaagggacacgagagggtgaaaccacgtgggattactggtttgcccgcgagccgaaccgttttcacaacggcgtggggccgcagcacacctccacgttttatcagcactggaaaacggacattcagctgttaaagcagctgaaccacaacagctttcgcacctcgattagctgggcgcgcctgatccccgacggtatcggtgaagtgagcccggacgcggtcgatttttacaatcaggtcattgatgagctaaacgagcagggcatcacgccgtttatcaccctgttccatttcgacatgccgatggcgatgcaggagattggcggctgggaaaaccgtgacgtggtggacgcgtacgcccgctatgcgcagatttgcttcgagctgttcggcgatcgcgtgctgcactggtttaccttcaatgagccgattgttccggtggaaggcggttatctgtacgacttccactacccgaacgtggtggattttcgtcgggcagccaccgtggcgtatcacaccgtgctggcccatgcgaaggccgttcaggcttaccgcgccggacactacgcgggtgagatcggcatcgtgctcaacctgacgccgtcgtacccgcgctcccggaacccggcggacgtgaaggcggcgcacatagcggacctgatgtttaaccgcagcttcctcgacccggtgctgcgcggggagtatccggcggacctggtggcattgctgaaatcttacgatcagctgcccgcctgcaagccggaagacggtttcctgattgcggaagggaaaatcgacctgctcggcgttaactactatcagccgcgtcgcgtgaagtgtcgcgacagcgcggtgaacccgcaggcgccgtttatgccggagtggttctttgataattacgagatgccgggccgtaagatgaacccgtaccgcggctgggaaatctacgcgccgggtatttacgatattctggttaacctgcgcgataattacggcaaccctcgctgctttatttctgaaaacggcatgggtgtcgaaaacgagcagcgctttattgaaaacggccagattaacgatcaataccgcattgattttatttctgagcatttatcgtggctgcacaaaggtattagcgaaggctgcaattgccttggctatcatatgtggacgtttattgataactggtcgtggtgtaatgcgtataaaaaccgctacggttttattcagctcgatgtagagacgcagcagcgcaccattaaaaaaagcggagagtggtttgccgccaccgccttaaataatagttttgataaagagtaa

SEQ ID NO: 116896 - DNA, 306 bp, Enterobacter cloacae
atgatgatcgcactagaagaagccgtaatggaaattatcgtcaacgccggccagtcccgcagcctgtgctttgaagccctgcacgcggcgcgtcagggcaaccttgacgaggccaaaagcctgctgcgcgaagccgacggctacgcgcgccaggcgcacaagatgcagaccaaactgatcgagcaggatgcgggcgaagcccgccagccgatgaccttaattatggtgcacgcccaggatcatttaatgaattccttattagcgcgcgagttatccgaagaaattattcatttatatcagagatag

SEQ ID NO: 116897 - DNA, 1380 bp, Enterobacter cloacae
atgaatacgattaaaaaacttccagtaaccatggcggttatcgccgcgctttgcccaatttccgtcctcgctcaggaattcactcaggagcaaatcgacgccattgtggcgaaagcggtggataaagccctggccgagcgtcaggccaaaatggatgctgcggtcgcgaaaaaagcggacgtggtgaccgagccgcagagcgcggcgcaatctccggatatggcgatcccgttcggggttaaatttaccggctacgcccgctacggcgcgcacttccaggccgccgatcagaaatacgtggcggtggacggctcctacaacggcgcgtccgccattggtcgtctgggcaacgaaggcaacggcggcgagttccagctctctaaagccttcaagggcgaaaacggcgccatctgggacatcaacgtgatgatcgaccactggggcgacgaagttaacctcaagaaagcctacgccggcgtgaccaacattatggcctccaacccgaacgcctacttctgggcgggtcgcgacttccaccagcgtccgcagcagggcatcaacgattacttctggatgaaccacgacggtcagggcgccggggtgaagaacttcgacatcggcggcgtgcagtttgacgtggccgccgtggcagcggtggaatcctgtagcccggaagtgatggaggacgaagcgaacccgtcgcgcatcacctgtaccggcgggtccggcacgggcgacaaaggcaactacgccgcgacgtctaaaatccatggtatgaagctcggtccgctggatctggagctgtacgccaactacggctttgactcgaaagcggtggagagcgacgaacgtctgaacgcctggcagggcggcgtggtgctgagccacaccaacgacagcggcgtgaacaaggtgattgcccgctactccgataacgcggacaacagcgtgttcaacaaaaccgaggatctgaccacggtctacgccagcttcgaagggctgtacaaattcacccaggcgacgcaggtggagtacctcctcgccttccatgactacgacaacagccgcgataagaccgacaaccgcaagaactacaacgccatcgtgcgcccgatgcactggtggaacgacgttcactccacctggctggaagcgggctggcagcacgtggattacgacaacggcggcgacaacaagggctggaagctgaccctgtcgcagaacatgtctatcgccatggggccggagttccgtccgatgctgcgcttctacgtgaccggcggcaaggtggataacgaacgtaccgcgcgcgtgaacaataccaaagatgagacgctggacgacttcaacgtcggcgcgatgtgggaggcgtggttctaa

SEQ ID NO: 116898 - DNA, 906 bp, Enterobacter cloacae
atgggttccacacgcaaagggatgctcaacgtcctgatcgccgccgttttatggggcagttccggggtttgcgcgcagtacatcatggagaaaagccacatctcttcgccttacctgaccatggttcgtctgctgtttaccggcgtgatcctgctgacgctctccttcgttcacggcgacaagattttctcggtcgtcaaaaaccgcaaagacgccctcagcctgctgtttttctcgctggctggcgcgcttaccgtgcagctcaccttcctgctgacaattgaaaaatccaacgccgcgacggccaccgtgctccagtttctgtcgccgaccattatcgtggcatggtttgcgctggcgcggaaaacgcgtcccggcatatttgtcttatccgcgattttcacgtcgcttgtgggtaccttcctgctggtaacccacggcgacccgacgtcgctctccatctcgccggccgcgctgttcttcggtatcgcctcggcgtttgccgcggcgttttatacgacgtacccgtcgacgcttatcgcccgctacggcacgctgccgattgtcggctggagtatgttgattgcgggactaatgctgacgccgttctacgccggacgcggcaccaccttcgtgatcgacgggggcctgctgctggcgtttttctacctggtggtgataggtaccgcgctgacgttcagcctgtatctgaaaggcgcacagatgatcggcgggccgaaggcgagcattctgagctgcgccgagccgctgagcagcgcgctgctgtcggtggtgttgctgggggtggcattcaccctgccggactggctggggacgctgctgattgtgtcgtcggtggtgttgatttcgatggattcgagaagacgggttcagacatcggcgtag

SEQ ID NO: 116899 - DNA, 1191 bp, Enterobacter cloacae
atgacagaacatacccagcccacgactacaccgcaggccaaagaggtttcacgccccaactggtcggcggttttctccgtggcattttgcgtcgcctgcctgatcaccgtcgagttcctgccggtcagcctgctgacgccgatggcgcaggatctgggcatttccgagggcgtggcggggcagtccgtgaccgtcaccgcgtttgtggcgatgttcgccagcctgtttatcacgcaggcgatcggcaccattgaccgtcgcaaagtggttattctgttcagcgtgctgctgacgctctcctgcctgctggtctctttcgctgaaagcttcaccctgctgctgctcggccgtgcctgcctggggctgggattaggcggcttctgggcgatgtccgcctcgctgaccatgcgcctggtgcccgcgcgtacggtgccaaaagccttgtccgttatcttcggtgcggtctcgatcgcgctggtgatcgccgcgccgctgggcagtttcctcggtggaattatcggctggcgcaacgtctttaacgcggcggcggtgatgggcgtgctgtgcattatctgggtgtggaaggcgctgccgtcccttccgggggaagcggcgcaccacaaacagaacatgttcgcgctgctgaagcgccccggcgtgctggcggggatgaccgccatcttcatggcctttgccgggcagtttgctttcttcacctatatccgcccggtgtatatgaccatggcgggctttgacgtggacggcctgacgctggtgctcctgagcttcgggatcgccagttttgtcggcacctcgctgtcgtcccagttcctgaagcgctccctgaaggtggcgctggcgggtgccccgctggtgctggcgatcagcgccgcggcgctggtgttgtggggcagcgataagtgggtggcttcggcgatcgcgattatctggggctttgcctttgcgctggtgccggtgggctggtcgacgtggatcacccgctcgcttgccgatcaggcggaaaaagccgggtcgattcaggtggcggtgatccagctggcgaatacctgcggcgcggcggtgggcggcgtagcgctcgaccacctggggctgacctcgccgctggtaatttccggcacgctgatgctgctgaccgcgctgctggtggcggggaaggttaaggcgaagtag

SEQ ID NO: 116900 - DNA, 519 bp, Enterobacter cloacae
atgaaacaatccgccattatctggccgaacgactacctgcccggcaccaccgataactttgcctccaacgaaatcttcgtcgccgggctgagcgcaaaagagatttgggcgcagctcaacgacaccaccctgtggccgaactactacagcaacgccgaagatatccgttttcacgacggcagcggcccggcgctgagcgccaacgcccgcttccgcttcaccacctttggcttcccggttgaggcgcaggtgacggagtatgttccgcccgtggagggcgaagccgcgcgtatcgcgtggcacggctgggtagaaggggatgcaaattcgcgtctggacgtgatccacgcctggctgtttgaagacctgccgggaaaccgcgtgcgcattctgactcaggagtcgcagaaaggcgtgccggcgcaggaattagcgcgcaccgtgccgaacccaatgattaacgggcatcaggagtggatcgtgggatttgcgaatgccgctcttaaggctcgcgggtaa

SEQ ID NO: 116901 - DNA, 453 bp, Enterobacter cloacae
atggtctggataatgctggcaacgcttgccgtggtgtttgtggttggatttcgtgtcctgacctcagactcccgccgcgccatcaaacgtttaagcgagcggctggggatcaccccgatgccggtcgagtcgatgattgaccagttcggtaaaacgccgggcaatgagtttatccgctatcttgaacgccccgacgaggcgcatctgcaaaatgccgcccaggtgctgctgatctggcaggtctgcatcgtcgacgccagcgaagagaatctgcatacctggcaccgcatgctgcgtaaagcccgtctggccgcgccgatcaccgacgcgcaaatccgcctcgcgctcggctttatgcgcgagatagagccagacccgcaggagttcaacgccttccagctgcgctacaaccagcttttcctgccggaagagggcgtgttttacctgcaatga

SEQ ID NO: 116902 - DNA, 903 bp, Enterobacter cloacae
atgaaagcggatctgcgcacgctggatcttaacctactgaaaacgctggatgccctgctggacgaacgcagcgtcacccgcgcggcggcgcgtcttgccctgacccagccagcggtaagcggcatgcttaaccgcctgcgggattactttgaagacccgctgtttatccgcgcgccgcacggcatcgtgcctaccacccgggcggaagcaatggcggctcccgtcaaacgcattctggcagatatcgacgagctgcttcagccgatcgcctttgatccgctcaccgcaacgttcaccttcacgcttgccgcgaccgactacgccctgcgcgcggtcgtcgtgccgtttatcgctgcgcttaaggtgcaggcgccgggtattcgcgtgcgcgtggtgcctgtggaatctgaccgtctggtcagccaactcgaacaaggctctgtcgacgtggcgctgatcaccccgcataccacgcctgacgagcttcacagccgggcgctttatgatgaacggtacgtttgcatgatgcgtgctgaccatccggatgccggacagcccatgacgttagaccggttttgcgccctggagcatgtgctggtctcttacgagggcgacggttttcgcggcgtaacggatggcgcgctggagaagactggccgaacgcggcatgttggcttatcggtgagtaactttttagtcctgccggacgtgctggccctcagcgatatgattgccgttgtgccatcacgcatagcggaaaagcagacggggatgttcgtctgcgagacgccggttcccgtgcccggctttaccaaaagcatggcctggcacggcagaacgcaccgcaacctcgcgcaggcgtggctgcgcgggctgttgctggagaccagtcagcgcgcctga

SEQ ID NO: 116903 - DNA, 1005 bp, Enterobacter cloacae
atgttgacccgacgattgtcctgcctggcgctgctgatggcgctggcctcccccgcaatggccgcggatgcccccacctacggtgagaagctgggaggttttgactacggctggccggtaaaacactttacctttacctcgcagaaccagcctctggatatggcttacctggacgtgaagccggaaaaacccaacggccgcaccgtggtgctgatgcacggcaaaaacttctgcgctggcacctgggacggcacgatccgcgcgctttcagccagcgggtatcgcgtgatcgcacccgaccagatcggcttctgcaaatccaccaagccggagcattatcagtacaccttccagcagctggcggataacacccacgcgctgctgaaaacgctgggcgttgatcgcgtcacggttatcggccattcgaccggcggcatgctggcgacccgctacgcgctgatgtggccgcagcaggtggagcagctggtgatggtgaacccaatagggcttgaagactggaaagcgcgcggcgtgccgcatattacggtcgaccagtggtaccagcgcgagctgaaagtcagcgccgacggtattcgtcagtacgagaaaaacacctactacgccggggagtggaagccggagtacgagcgctgggtcaccatgcttgccgggctgaacaacgggccgggcaaagcgcgcgtggcgtggaactcggcgctgctctacgacatgatttatacccagccggtcgtctatgaatttaacgagctgaagatgccagtattattgatgatcggcacgaaggacaacaccgccatcgggaaggatctcgccccaccggagatccgcaagacgctcggcaattacgcggtgctgggcaaagagacggcgaagcgcattccgcacgcgacgctgattgaatttaacgacatgggccacgcgccgcagatgcaggatcctgcccgcttccacgaggcgctgctgaaagggcttcaggcgcgctga

SEQ ID NO: 116904 - DNA, 1392 bp, Enterobacter cloacae
atgctggccttcttaaatcaggtgcgcaagccgaccctggatctgccgctcgacgtgcggcgcaagatgtggttcaaaccgttcatgcagtcctatctggtggtcttcatcggctacctgaccatgtacctgatccgcaaaaactttaacatcgcgcagaacgacatgatctcaacctacgggctgagcatgacgcagctggggatgattggcctgggcttctccatcacctacggcgtggggaaaacggttgtgtcctactacgcggacggcaaaaataccaagcagttcctgccgtttatgctgatcctctccgccatctgtatgctcggctttagcgccagcatgggcgcgggctccgtcagcctgttcctgatgatcgccttctacgccctgagcggtttcttccagagcaccggcgggtcgtgcagctactccaccatcaccaaatggacgccgcgccgcaagcggggttcgtacctcggcatgtggaacatctcccacaacctcggcggagcgggcgcggccggcgtggcgctgttcggtgcgaactacctgttcgacggccacgtgattggcatgtttatcttcccgtcgattatcgccctgattgtcggctttatcggcctgcgctacggcagcgattccccggaatcctacggcctcggcaaagctgaagagctgttcggggaggagatcagcgaggaggacaaagagaccgaagaaaacgagatgtccaaatggcagatctttgttgagtacgtgctgaaaaacaaagtgatctggctgctctgcttctcgaacatcttcctgtacgtggtgcgtatcggtatcgaccagtggtccaccgtgtatgccttccaggagctgaagctctcgaaagaggtggcgattcagggcttcaccctgttcgaagtaggcgcgctggtcggtaccctgctgtggggctggctctcggacctcgccaatggccgtcgcgcgctggtggcctgcgtcgcgctggcgctgattatcgccacgctcggcgtttaccagcacgccagcaaccagtacgtttacctggcgtcgctgtttgcgctcggcttcctggtgttcggtccgcaactgctgatcggcgtggcggcggttggctttgtgccgaaaaaagcgatcggcgcagccgatgggattaagggcaccttcgcttacctgatcggcgacagcttcgccaagctcggtctgggcatgatcgccgacggcacgccaattttcggcctcaccggctgggcgggcacctttgccgcgctggatgcggcagcgattggctgtatcgtcctgatggcgatggttgcggtgctggaagagcgtaagatccgccgcgagaatcgtgcgcagaaattaaaagtagcctga

SEQ ID NO: 116905 - DNA, 1311 bp, Enterobacter cloacae
atgtttaaaacccccgccagcgccgccccgctaagcaacaaagcggaaatcgatgcccgctaccgctactggcgtcgccatatcctgattaccatctggctcggctacgcgctgttctatttcacccgcaaaagcttcaacgccgccgcgccggaaatcctcgccagcggcgtgatgacgcgcaccgatatcggcctgctggcgacgctgttttacatcacctacggcctgtcgaagttcttctccggcatcgtcagcgaccgttccaacgcgcgctattttatgggcgtcgggctgatcgccaccggcgtggtgaacatcctgtttggcttctccacctcgctgtgggcctttgccctgctgtgggcgctgaacgcctttttccagggctggggcgcgccggtctgcgcccgcctgctcaccgcctggtactcacgcaacgagcgcggcggctggtgggcgatatggaataccgcgcataacgtcggcggggcgctgatcccgatggtggtcggcgcggcggcgctgcactacggctggcgcgcggggatgatgattgccggtggcctcgcgattgtcgccgggctgttcctctgctggcgcctgcgcgacaggccgcaaaccgtcggccttccaccggtgggcgactggcggcacgacgagatggagatcgcccagcagcaggaaggggccgggctgtcccgccaggagatcctcaccaaatacgtgctgaaaaacccgtacatctggctgctgtcgctctgctacgtgctggtctacgtggtgcgcgcggcgatcaacgactggggcaatctgtacatgtccgaaactctcggcgtggacctggtgaccgccaactcggcggtgacgatgttcgagctgggcgggtttatcggcgcgctggtggcgggctggggctcggacaagctgttcaacggtaaccgcgggccgatgaacctgatttttgctgccgggatcttactctccgtcggctcgctgtggctgatgccgttcgccagctacgtgatgcaggcggcgtgcttcttcaccatcggttttttcgtctttggcccgcagatgctgatcggcatggcggcggcggagtgttcccacaaagaggcggcaggcgcggcgacgggctttgtcgggctgtttgcctaccttgtcgcatcgctctccggctggccgctggcgcgggtgatcgacgtctggcactggagcgggttcttcgcggtgatcgccatcgcggcgggcatctccgccctgctgttgctgccgtttttgcacgcgcaggcaccgcgcgaagcgtga

SEQ ID NO: 116906 - DNA, 1506 bp, Enterobacter cloacae
atgaactccctgttttcgcggctgatcgccgttgttgccagctttttcatcttctccgccgcgtggttctgtctgtggagtatcagcctgcatcttgtcgagcgcccggagctggcggtgctgctgttcccctttggcctgcggctggggctaatgctgcaatgcccgcgcggctactggccggtgctgctgggcgcagagtggctgatgctgatctggctggcgcaggaagtggccctcgcgcacctgcctttattgatgaccggaagcctgctcacgcttatcccggtcgccctgatttcccgctaccgtcaccagcgcgactggcgcacgctgctgcgtcagggtgcggcgctgattgccgccgcgctgttgcagtccctgccgtgggtgggtgaaaaggaggggctcaacgccctgctgctgaccctcaccggcggcctgacgctggccccgacctgccttgtgatctggcattaccttaccagcaccgtctggcagccgctcggcccggcgctggtctcccagccggtgaactggcgcgcccggcacctgatctggtatctgctgctgtttgtggtgagcctgtggttgcagcttggtctgcccgctgaattatcacgcttcacgccgttttgtctggcgctgccgatcatcgcccttgcctggcattacggctggcagggcgcattgatcgccacgctgatgaacgccatcgcgctgattgccagccagacctggcacgatcacccggtagatctgctgctctcgctgctggctcagagcctcaccgggctgctgctcggcgcgggcatacagcgcctgcgcgagctgaaccagtccctccaagccgagctggcgcgcaaccgccgtctggcggagcgtctgctggagacggaagagagcgtgcgccaggaggttgctcgcgaattgcacgatgatatcggccagaccatcaccgccatccgcacccaggcgggcattgttcagcgcctggcggcagaaaacgcgggcgtgaagcagggcggggcgcatatcgaacagctttcgctgggcgtctatgattccgttcgtcgcctgttagggcggctgcgcccgcgccagcttgacgatctctcgctcgagcaggcaatacgctctctgatgcgcgagatggagctggagagccgcgggattgtcagccatctcgactggcgcattaacgaacctgcgctgagtgaaggccagcgtgtgacgctgttccgcgtctgccaggaagggctgaacaacatcgtcaagcacgccagcgccagcgcggtaacgatccagggctggcagcaggacgagcgcctgatgctggtgattgaagacgacggctgcggcctgccgccgggctccggccagcaggggtttggcctggcgggcatgcgcgagcgcgtgaaggcgctgggcggcacgctgacgatctcctgcacccacggaacgcgcgtcagcgtcagtttgccgttaaggacacaccatgtttaa

SEQ ID NO: 116907 - DNA, 594 bp, Enterobacter cloacae
atgaccaccatcgcccttatcgacgaccaccttatcgttcgctccggctttgcccagcttttaaacctcgagccggattttcaggtcgtggccgagtttggctcaggacgcgaggcgctggcgggtctgccgggacgcggggtgcaggtctgtatctgcgatatctcaatgccggacctctccgggctggagctgttaagccagctgccgaaagggatggcgacgatcatgctctcagtccacgacagcccggcgctggtcgagcaggcgctcaacgcgggggcgcgcgggtttctctctaaacgctgtagcccggacgagctgattgccgccgtgcgtaccgtctccaccggcggctgctacctgacgccggatattgccatcaagctggcggcgggacggcaggatccgctcaccagacgcgagcgccaggtggcagagaaacttgcccagggcatgtcggtgaaagagattgccgtagagctggggctgtcgccaaagaccgttcacgttcatcgcgccaacctgatggaaaaactcaacgtcagtaacgatgtcgagctggcgcgccgtatgtttgatagctggcaatga

SEQ ID NO: 116908 - DNA, 288 bp, Enterobacter cloacae
atgcagaaacaatgtgataacgtcattctggaactcaccgtccgcaaccacccaggcgtcatgacccacgtctgtgggctctttgcccgtcgggcgtttaacgtggaaggcattctgtgcctgccgattcagggcagcgagcacagccgcatctggctactggtgaacgacgaccagcgtctggagcagatgatggcgcagatcgacaagctggaggacgtcaccaaagtggcacgcaaccagtccgatcccaccatgtttaacaaaattgcggtgttttttgagtaa

SEQ ID NO: 116909 - DNA, 1689 bp, Enterobacter cloacae
atggcaagttcgggcacaacatccaccaagacgcgttttacaggcgcgcagctgattgttcatttactggaacgacagggcatcaccaccgttgcgggcatcccgggtgggaccgtactgccgctgtatgatgcgttaagccaaagcacacagatccgccacgtgctggcgcgccacgagcagggcgcaggctttatcgcccagggcatggcgcgtacccagggtaaaccggcggtctgtatggcctgtagcgggccgggcgccactaacctggtgaccgccatcgccgacgcgcgtctcgactccattccgctgatctgcattaccggccaggtgccgtcctcgatgatcggcaccgatgcgttccaggaagtcgacacctacggcatctctatccccatcaccaaacataactatttagttcgcgatattagcgagctgcctcaggttatcagcgatgcgttccgcattgcgcagtctggccgcccgggcccggtgtggatagacattcctaaggatgtccagaccgcagaaattgagatcgacgttctgccggagccgggtgaccgtgcccccgcgccagaattcagcgctgagagcgtgcgcgatgcggcggcgatgatcaacgccgccaaacgcccggtgctctatctgggcggcgggacgatcaacgccgcggatgaaatccgccagttcgctgaaaaagctaatttgcccaccactatgaccctgatggcgctgggtatgctgccaaaagcgcacccgctctctctcggcatgctgggcatgcacggcgcgcgcagcaccaactacatcctgcaagaggcggatttgctgatagttatgggggcgcgttttgatgaccgggcgattggcaaaaccgagcagttctgcccgaacgccaaaatcattcacgtggatatcgaccgcgccgagctgggtaaaatcaagcagccgcacgtggcgatccagggcgacgtggccgaggtgctggcgcagctgatcccgcagacggaggcaaccgaccgcgccgactggcgccagctggtagccgatctgcaacgggagttcccgggcgctatcccaaccgagggcgacccgctgagccactatggtcttatcaacgccgtcgccgcctgcgtggatgacagcgcgattatcaccaccgacgtcggccagcatcagatgtggaccgctcaggcgtatccgctgaaccgtccgcgccagtggctgacctccggcggccttggcaccatgggcttcggcctgccagcagcggttggcgcggcgctcgccaacccggaccgcaaggtgatctgcttctccggtgacggcagcctgatgatgaatattcaggagatggcgacggcggccgaaaaccagttagacgttaaaatcattctgatgaacaacgaggcgctgggcctggtgcaccagcagcagagcctgttctacaagcagggcgtgtttgcggcgacctatccggggatgatcaacttcatgcagattgccgctggttttggcctgcacacctgcgatctgaacgccgaagaagatgcccacgcggcgttgcaggatgcgatttctcgccctggcccggcgctgatccacgtgcgtatcgaccctgaactaaaagtgtatccgatggtgccgccgggtgcggcaaatactgagatggtgggggaataa

SEQ ID NO: 116910 - DNA, 420 bp, Enterobacter cloacae
atgatgatcgtcgctgatgcaatgaaagctacgcacgcccttgttgcggccgttcctttactgggtgaacagccgagcgagaaagattataaggatgcgcttgagctggttgagtatctccttatgaacgagcccaatagtcctttgctggatattgtgtgcgccagaattagccattacgaagctaatgggccagagatagtcgcattacgcaaggagatggagtccgttcccgtcggaattgcagttttaagaaccttgatggatcaatacaatctgacgatatcggattttaaggatgaaattggtagtaaatcgatggtttcacgggttctgaatggtcagagacagcttaccctgaaccatattaaaaagctggcggccagatttggggtatcacctgcgttatttattgagtga

SEQ ID NO: 116911 - DNA, 315 bp, Enterobacter cloacae
atgcatttaatctcaatgaaggcaattttggatgcggtaagccagttcccgcaacacagagaagagcttctctttttaggacgagttattgaaaagagccactgcccgacgcccgctgcactgagaaaacttttcccaacgctggataacttcaagtatcttgataagcattatgttattgatattgcaaataacaatctcagagtagtggctctcatattctttgaaagccaaaagttttatgtgcgccatgtttttactcataaggaatatgaccgttttacggagaaacatcgcactaaggggaagaaatga

SEQ ID NO: 116912 - DNA, 447 bp, Enterobacter cloacae
atgtcgcgtctgttaattgagcccgtcacgcccgatgaacccgggtatatcgccctgaaggcggagagtatcgcgttgaatttcaatatgctgcgcaggctggaagagaactggcagcggggtgaaaaccgctttaacgcgccgggtgaaaaactgctgggggcgtttcttaacggcaggctggtgggcgtgtgcggccttaatcgcgatccgttcagccagcagccgcgcgccggacgtattcgtcatctctacgtcagcgagaagtgccgtgggcagggcataggcaaacagcttttgaccgtggtgatggcggatgccagcatctggtttgattttcttaatacccatgcgccggaaaccgcgtacggattttaccatcgggcgggcttcaggctggtgtcagacgaaccccgggtgacgcaccgccttttttgcgcagtgtaa

SEQ ID NO: 116913 - DNA, 834 bp, Enterobacter cloacae
atgaccatcaccgttttctgcattttactgttcgccgcactgctgcatgccagctggaacgccatcgttaaagccggaacggataaactctactcggcgatcggagtcagcggttcagccgcgcttattgccctgattttactgcccttctctcctcagccaactgccgcaagctggccatatttgttcgtctcctgtgcgttacaggtggtgtacaccgtgctggtagcgaagacctatcaggtctccgacatgagccagacctacccccttatgcgcgggacggctcctctgctggtggcgctgatcagcgtattggtgctcggggatcatctctcctggcttgcctggtccggcattggggtcatttgtctgtcgattctggccatggcgatgaacggccgcatgcagtcacgcaaggggatctggctggcgctgctgaacgcctgttttatcgccgggtataccctggtggacggcaccggtgtgcgactctcggacactgcgctgggctatacgctctggaccttcttcatgaacggtttctgcctgctgagctgggcaatggtggcgcggcgtcgcgaagcgtccagctacctgcgcctgcactggaaaaaagggctgctcggcggtgtcgggacgatgggatcttacggtctggcactctgggcgatgacccaggcaccgctggctgtggtcgcggcactgcgtgaaacctctattctcttcggcgcattaatcgcatttgtgcttttaaaagagaaggttgccggcctgcgcatcgcggcggcactgggtattgctgccggtgcggtcctgctgcgcctggcgtaa

SEQ ID NO: 116914 - DNA, 1185 bp, Enterobacter cloacae
atgaaaaagcaacggaacgtgaacttattgttgatgctggtgttactggtggccgtcgggcagatggcacaaaccatctacattccggcgattgccgatatggcaaaagatctgagcgtccgcgaaggtgcagtccagagcgtgatggcagcctatctgctgacctatggcgtttcacagctggtttatggtcccctgtccgatcgcgtcgggcgtcgtccggtcattctggtgggcatgagcattttcatggtagcaacggtgattgccattaccacgcacagcctgaccgtcctgattgccgccagcgccctccagggcgtgggcaccggcgttggcggggttatggcgcgtaccctgccgcgtgatatgtaccagggcacacagcttcgtcacgccaacagtctgttaaatatgggtattctggtcagcccgctactggccccgctgattgggggtctgctggacaccgtctggtcctggcgcgcctgttacgccttcctgctggtgctgtgcattattgtcaccttcagcatggcgcgctggatgccggaaacccgcccaaaagacgcgccgcgcacgaagctcatcgccagctacaaaacgctgttcggtaatgggtcctttacctgttatctgttgatgctaatcggcggcctggcgggaattgcggtgtttgaagcctgttccggcgtgctgctgggcgcaggccttggcctgagcagcatggtggtgagtattctgtttattctgccgatcccagcggcgttcttcggcgcatggttcgccggacgtccgaacaagcgtttctccacgctgatgtggcagtcggtgatcagctgtctgctggccgggctgatgatgtggatcccggggctgtttgacgtgatgtcggtctggacgttgctcatcccggcggcgctgttcttcttcggcgcgggcatgctgtttcccctcgccaccagcggcgcgatggagccgttcccgttcctcgcaggcacggcaggcgcgctggtaggcggtttgcagaacatcggttccggcgcgctggcctggctttcggctatgatgccgcagaccgggcaggcgagtttaggcttgctgatgaccctgatggggctgctgattttgctgtgctggctgccgctggcgtcgcgtgtctcgcatcacgaacagccggtttaa

SEQ ID NO: 116915 - DNA, 1113 bp, Enterobacter cloacae
gtgttaaagccttttattgccactgcgatcttactctcttccggctgggcgattgccgctgagccgccgctgacggctgcccgttacgcgcagatgctgggcgtcggaatggatgtcgactgggcacgcaccgagcgcggtatccgcgagttcgacccgctggtggtccgtgattttcaggtgaaaggcatacaccatgtccgtattcgggtggcgggcgaaccgacggaagcgcggctgattcacctgcgtaagctggtggaggcctgcgagcaatacggcgtcatccccatcatcgcttatcaggccgatgaatataaaaacgacccgaaagcggataccgaaaaagaggtgattaactggtggattgccgtggcgcactattttggtcagcgctcgccgttgctgggctttgacctgatctacgaaccggcggacaagctcaaccacaacgttgcttcgctcaaccgggtgtatgagaaagcgatcaaagacattcacgccattgatgccagccgcatgatttttatcgcccctcgtctgcgcgccgcgccggaggatttatccagcctgaagctgcccgcgcacagccagaattacctgctggcggagtggcatattttcccctggggcccgctgaaaacgaacggtaaatacccgtggacgtccggaactgcggctgagaaagcggctatccgtaaccgaatcaacgccgcgctgcactggcaacaaaaaaccgggcatgtgagctgggttggcggttggggggtgggcgaatcgaaaagcctgacgccaaccgcctcgcagatggcgtttgccacgtttatggcgtgcgagctgcaacaggccaacatcccgtatgcgataaacgccgatgttcagttttatgacggggaagagggggcgtggcggcctgccccagagcggctattgcaggcgatgattgcgcccgtctgtgaaaagcccggcgagaagccgggccatcatgcggttaaaccggctgttcgtgatgcgagacacgcgacgccagcggcagccagcacagcaaaatcagcagccccatcagggtcatcagcaagcctaaactcgcctgcccggtctgcggcatcatag

SEQ ID NO: 116916 - DNA, 927 bp, Enterobacter cloacae
atgaccgatgcgaatgaaggcagaaaccggcttttaaacggctggcagctgtcgaaaatgtacacctttgaagtggccgcccggcatgagtccttcgcgctggcggcggcggagctgtcgctcagccccagcgcggtgagccaccgcataaacctgctggaagaggagctgggcattcagctgtttgtccgctcacaccgcaaagtggagctgacgcaggaaggcaagcgcgtttactggacgctgaaatcgtccctcgacaccctgaatcaggagatcctggatattaaaaaccaggcgctgtcaggtacgctaacggtgtactcccggccgtcgatcgcccagtgctggctggtgccgatgctgggggattttacccgccgctacccgtcgatttcacttactattctgactggtaatgattacgtcaacatgcagcgaaccggcatcgatctggcgctctatttcgacgatacgccgccaaaccacctttctcatcactttttgatggataaagagattttgcccgtctgctcgccggcgtatgcccgggagcatgaactgctgaaaaacccccataacctcagccactgcacgttactgcacgaccgtcaggcctggagcaatgattccggtacggatgagtggctgagctgggcgcagcattacgcggcgaatatgccgttatcatcgggtattggcttcgatcgctctgatttagccattatcgcggccatgaataatgtgggggtagcgatggggagaaagcggctggtgcaaaaacgtctcgaacgaggggagttgatcgcaccctttgatgggaaaactctcaagtgccatcagcattattacgtctcaacgcttcccggccgtcagtggccgaaaattgacgcctttatcggctggctaagagagctggcgggttga

SEQ ID NO: 116917 - DNA, 1338 bp, Enterobacter cloacae
atgggatctcaggtctgggttgtggcaacgctgcttgtcagcatcgtattgattgttttaaccatcgtaaaactgaagtttcacccgttcctcgcgctgctgctggcaagctttttcgtcggcgcgatgatggggatgagcccgctggatatggtgaacgccattgagagcgggattggcggtacgctgggcttcctggcggcggttatcggtcttggcactattctcggcaaaatgatggaagtctccggcgcggcagagcgcatcgggattacgttgcagcgctgccgctggctgtcggcggacgtgattatggtcctggtcggcctgatctgcggcattacgctgtttgtggaagtgggcgtggtactgctgatcccgctggcgttttccatcgccaaaaagaccaacacgtcgctgctcaagctggccattccgctctgtaccgcactaatggcagtgcactgcgtggtgcctccgcatccggccgcgctgtttgtcaccaataaattaggggcggacgtcgggacggtgattgtctacggtctgatggtgggcctgatggcgtctctggttggcggcccgctgttcctgaagctgctcggcgatcgtctgccctataagccggttccggcggaattttcagacctgaaggtgcgggaagaacacacgctgccgtcgctgagcgccacgctgttcaccgtgctgctgccgattgccctgatgctggtgaaaaccattgccgagctgaacatggcaaaagaaggctcgctgtataccctgctggagtttatcggcaaccccatcaccgcgatgtttatcgccgtgttttttgcctactacctgctggggatccgccagcacatgggcatgggcgcaatgctgacccatacggagcacggctttggctctatcgccaacattttgctgattatcggcgcgggcggcgcgttcaacgccatccttaaaactagcggtctggcggagacgctggcgcatattttctcgaaccggcatatgcaccctatccttctcgcctggctggtggcactggtgctgcacgccgccgtcggttcggcaacggtagcgatgatgggtgccacggcgatagtggcgccgatgctgccgctctacccgaacgtaagcccggagatcatcaccattgccatcgggtccggcgctattggctgcacgatcgtgaccgattctctcttctggctggtgaagcaatactgcggcgcgaccctgaacgagaccttcaaatactatacgacggcgacgtttatcgcctcggtgcttgcacttggcagcacattcctgctttctttcattatctga

SEQ ID NO: 116918 - DNA, 1287 bp, Enterobacter cloacae
atggaaaacgcaactatcactactttaaccgcacagtttcctctggttgaggatctgattgccctgaaagaaaccacctggcttaacccgcgcaccacgacgctggcggaaggattgccgtatgtcgggctgaccaaagccgacgtggacgacgcgcacgcgcgcctgaaacgcttcgcgccgtatctggcgaaagcgttcccggaaacggcggcaacgggcgggattatcgaatccgacctggtcgcgatcccggcgatgcaggcgcggctggagaaagagtccggtaaggccattccaggcacgctgctgctgaaaaaagacagccatctgccgatttccggctcgatcaaagcgcgcggcggcatctatgaggtgctgactcatgcggagaaactggcgctggacgccgggttgctgagccttgaagacgactacagcgttctgctggagccgcgctttaagaacttcttcagccagtacagcatcgcggtgggctcaaccggcaacctggggatgtccatcggcattatgagcgcccgcattggctttaaggtgacggtgcatatgtccgccgacgcccgcgagtggaagaaagccaaactgcgcagccacggcgtgatcgtcgtggaatatgagcaggattacggcgtggcggtggagcagggacgcaaagcggcggaaagcgatccgaactgtttcttcattgacgatgaaaactcccgtacgctgttcctgggctatgcggttgctggcgagcgcctgaaggcgcagtttgccgagcagggccgcgtggtggatgccgatcatcccctgtacgtctacctgccgtgcggcgtcggcggtggccccggcggcgtggcgtttggcctgaagctggcctttggcgataacgtccactgcttcttcgcggagccaacgcactcaccatgtatgctgctgggcgtttataccgggctgcacgatgagattgcggtgcaggatctgggcattgataacgtgacggcggcggacggtctggcggtagggcgtgcgtccggcttcgtgggccgcgcgatggagcgcctgctcgacgggttctataccctctccgatcaaagcatgtacgacatgctcggctggctggcgcaggaggaagggattcgcctggagccgtcggcgctggcggggatggccgggccgctgcgcgtcgatgccgatgagaacgttacccacctggtgtgggcgaccggcggcggcatggtgccggaggatgagatggcgaagtatttagctaaagggaagtaa

SEQ ID NO: 116919 - DNA, 348 bp, Enterobacter cloacae
atgccggatagccgcaaagcgcggcgggaagcggaccccgggcttcagccggagcgaacctcgctggcctggctgcgcacgctactggggtatggcgcgctgatcgctcttgccattaagcacaactggcaccgcacgggggcgccattctggatctccattgttgtgctggcgctggtagccgtcattttatggcgctacacccgcagccgtaacctgatggacgtggcgcagaacgactttgcgcagccgaaagcggtgcgggataagttcctgattgcgttggctgtgctgtctctgtctttactctttgcagttactcacattcagcaaattatgagcttataa

SEQ ID NO: 116920 - DNA, 348 bp, Enterobacter cloacae
atgaacatttcccgcctcggtgaagcaccggactaccgcttctcactggctaacgaacgcacattcttagcgtggatccgcaccgccctgggctttctggccgcaggtgtcggtcttgatcagctcgcccccgattttgccaccccgttgattcgcgaagtgctggccctgctgctgtgcctgattgccggtgtgctggcgatttatggctatctgcgctggcttagaaatgaaaaggcgatgcgtctgaagcaggatctcccctacacgcgcggcttgctcatcattagtacgattttgctgatggttgcgggcgtagtgatgttactggtgttgtatgccggatag

SEQ ID NO: 116921 - DNA, 1323 bp, Enterobacter cloacae
atgaaaaaattctcagttgttattgcaggcggcggcagtacattcacgcctggtatcgtcctgatgctgttagccaaccgtgaccgtttcccactgcgtgcgctgaagttctatgacaatgacggagcacgtcaggagatcatcgccgaggcgtgcaaaatcatccttaaggagcaggcgccggagattgaatttagttacaccaccgatcctgaagcggcctttaccgatgtggatttcgtgatggcgcatattcgcgtgggcaaataccccatgcgtgaaaaagatgaaaaaatcccgctgcgccacggcgtgttgggccaggaaacgtgcgggccgggcggcatctcctacggcatgcgctccatcggcggcgtgctggagttggtggattacatggagcagtactccccgaacgcgtggatgctgaactactccaacccggcggcgattgtcgcggaagccacgcgccgcctgcgtccgaacgcgaaaattctcaacatctgcgacatgccgatcggcattgaaggacgtatggcgcaaatcgtcggtctgaaagaccgcaaagagatgcgcgtgcgctactacggtctgaaccacttcggctggtggacgtcgattgaagatctgaacggcaacgatctgatgccgaaactgcgcgaatacgtagcgaaaaacggttatgttccgccttcggaagatgcgcatactgaagcgagctggaatgatactttcgccaaggctaaagacgtacaggcgctggatccggacaccatgccgaacacctacctgaagtattacctgttcccggactatgtggtcgcccattccaacccggagcgtacccgcgccaatgaagtgatggatcaccgtgagaagcatgtattcagttcatgccgggcgattatcgaagccggtcattcttctgccggtgaactggaaatcgacgaacatgcgtcgtacatcgtcgatctggcgaccgcgatcgcctttaatacccaggaacgcatgctgctgattgtgcctaacaatggggctatccataattttgacgccgacgcgatggtagaaattccgtgtctggtcggccacaacggaccggagccgctgaccgtgggtgatattccgcacttccagaaagggctcatgagccagcaggtggcggtggaaaaactggtggtggacgcctgggagcagcgctcgtatcagaaactatggcaggcgattaccctgtcgaaaaccgtaccgagcgcgtcggtggcgaaggcgattctggacgatctgattgaagccaacaaagagtactggccggaactgcattaa

SEQ ID NO: 116922 - DNA, 1623 bp, Enterobacter cloacae
atgctcagtcaaatacaacgttttggcggcgccatgttcaccccggttttgctgtttccctttgccgggatcgtggttgggatcgccatcatgcttcgcaatccgctgtttgtcggtgaggccttaaccgcgccggataatctgttcgcgcaaattgttcacatcatcgaagagggcggctgggcggtgttccgtaatatgccgctgatttttgctgtcggcttaccgattggcctggcaaagcaggcgcagggccgcgcctgtctggcggtgctgattagcttcctgacctggaactactttatcaacgcgatggggatgacctggggtcacttctttggcgtcgacttctctgctgaacccactgccggcagcgggctggcgatgattgccggaatcaaaacgcttgataccagcatcatcggggcgattatcatttccgggctcgtcaccgccatccacaaccgatttttcgacaagccgttgccggtctttctggggattttccagggcacctcgtttgtcgttatcctcgcgttcttcgtcatgatcccttgcgcctggctgacgctgctgggatggccgaaagtgcagatgggcattgagtcgttgcaggcctttctacgtaccgctggcgcgctgggcgtatgggtttataccttcctggaacgcattctgatcccaaccggattacaccactttgtctacggcccgtttatcttcggcccggctgcggtagaaggcggcattcaggtctactgggcacagcaccttcaggaattcagccagagcactgtgccgctgaaaacgctgttcccggagggcggattctcgctgcacggcaactctaaggtgtttggctcagtcggtattgcgctggctatctggcataccgcgtcgccggagaaccgcgtcaaagtggcaggtctgctgatcccggccacgcttaccgccgtgctggtgggcattaccgaaccgctggagttcaccttcctgtttatctcgccgttgctgtttgccatccacgccgtgctggccgcaacgatggcgacggtgatgtataccttcggggtggtggggaacatggggggcggtctgctggaccagttcctgccgcaaaactggatcccgatgttccataaccacgcctcgacggtattcacccagattggcatcggcctctgcttcaccgctctctatttcgtggttttcaggacgcttatcgaacgtctgaatctcaaaacgccgggccgggaagagagcgaaatcaaactctacaacaaagccgactataaggccgcgcgcgggcaaaccaccgccccggcggcagccagccagcagatcgggcaggctgctgggttcttacaggcgctcggcggcgcagcaaacatcgaaagtatcaataactgcgccacccgcttgcgtatcgccctggtggatatgacgaaaacccaaagcgacgacgtcttcaaagccctgggcgcacacggtgtggtgcggcgcggcaacggcatacaggtgattgtcggtctgcacgttcctcaggtgcgcgaccagctggaatcgctgatgaaaacccctttaacaaacgaacaaaccactctgacagaggctatatcatga

SEQ ID NO: 116923 - DNA, 747 bp, Enterobacter cloacae
gtgatctacaaatcaattgccgatcggctacggctgcggctgaattcctcggactacaacattggcagtccgttacccggagaaaaagcgctggcaaaggagtttggcgtagcccggatgaccatccgcaaggcgctggatctgctggtaagctgggggctggttgaacgtcgacacggcagcgggacgttcgtggcgcgcaaagacgttcatcatgaaacgactaatctgaccgggctggtggaggtgctgcgccagcaggggaaagaagtgcagagcaaggtgttgcagtttgaagtgatgcccgcgccgcccgccatcgccagccagctgcggattcaggttgatgagcggatctatttttcaaggcgggtgcgttacgtggacggaaaaccgctgatgctggaggacagctttatgccggtgaagctgttccgcaatctttccctggcgcatctcgaagggtctaagtttgattacatcgagaaggaatgcgggatcaccatcagcggcaactacgagagcctgacgccggtgctggcagataaacagctggccggttatatgaatgtgccggaacagacgccgctgctgcgcatcacctccctttcctacagcgacagcggcgagttcctcaattattccgtgatgttccggaacaccagcgattaccaggtggactaccatttgcggcgtatccacccggaagacttgttagcccatcccccagaacagcaccgccagtag

SEQ ID NO: 116924 - DNA, 1662 bp, Enterobacter cloacae
atgagtgatatcgcgttaaccgttagcgtgttggcccttgtcgcggtagtggggctatggctggggaatatcaaaatccgcggcgtcggatttggcatcggtggggtgctgttcggcgggatttttgtcggccattttgccgaccagcttgggtgggtgctcagcgccgatatgctgcatttcatccaggagttcggcctgatcctctttgtgtataccatcggtattcaggtggggccgggcttcttcgcttccctgcgcgtctccggtttacgccttaatctctttgccttcggcatcgtcgtgatgggggggctggtgaccgccattctgcataaactcttcgctattccgctgcccgtcgtgctgggcatcttctccggcgccgtcacgaatacgcccgcgctcggggcgggccagcaaattctgcgcgatctgggtatccctgctgatgtcgtcgatcagatggggatgagctacgccatggcctatccgtttggcatttgcggtattttgctctcgatgtggctggtgcgcgtgctgttccgtgttaacgtcgagcaggaggcaaaagagcatgaaagcacgctgaccaacggccatgcgctcattaaaactatcaatattcgcgtcgaaaaccctaatctgaacaatatggcgattcaggatgttcccattctgaacagcgcgaccattatctgttcccgcctgaaacgtgatgaaacgctgatggtgccttcaccggatacccttattcagcacggcgatctcctgcatctggtagggcaaccggcggatttaaacaatgcccggctggtgattggtcaggaggtggatacctcactctcaacccgtggaacggacatgcgcgtggagcgggtggtagtgaccaatgagaaagtcctgggcaagaaaatacgcgatttgcaggttaaagagcgttatgacgtggtgatctcccggcttaaccgcgccggtgtcgagctggtggccagccaggatgccagcctgcaattcggtgatattctcaacctcgtcgggcgtccctcatccattgatgccgtagcggacatggtaggcaacgcccagcaaaaactccagcaggtgcagatgctgccggtctttatcggcgtcgggcttggcgtcatgcttggctccatccccctgtacgtgcccggcttcccggtagcactgaagctgggtctggcaggcgggccgctcattatggcgctgatcctcgggcgtatcggctccatcggtaagctctactggtttatgccgccgagtgctaacctggcgctgcgggagttgggcatcgtgctgtttctggcagtggtggggctgaaatccggcggcgattttgtcgatactctggtcaacggcgaagggatgagctgggtaggatacggcatatttattaccgctatcccactgataacggtcggattactggcacgtatcttcgctaaaatgaactatcttacgctgtgcggcatgctggccggttccatgaccgatccgcccgcgctggcgttcgccaacaacctgcacgccaccagcggcgcggcggcattgtcctacgccacggtttatccgctggtgatgtttctgcgcatcatcaccccgcagctactggcggtgctgttctgggggatgggctaa

SEQ ID NO: 116925 - DNA, 429 bp, Enterobacter cloacae
atgcgtaactacgatttatcccccctgctgcgtcagtggatcggttttgacaaactggctaacgcgctgcaaagcgcaaccgaacagcagacctttccgccgtacaacatcgaaaaaagcgatgataaccactaccgcatcacgcttgcgctggccgggttccgccaggaagatctcgacatccagcttgagggtacgcgcctgaccgtgaaagggtcaccggaaaaaccagacaccgagaccaaatggctgcatcaggggcttgtcactcagccgtttagcctgagctttaccctggcagaccatatggaagtttctggcgcgacgttcactaacgggctgctgaacattgacctcacccgtaacgtgccggaagccattgcgcctcagcgcatcgccattagcgaacgcccggcgttgaacagctaa

SEQ ID NO: 116926 - DNA, 411 bp, Enterobacter cloacae
atgcgtaatttcgatctctctccgctataccgttctgccattggtttcgatcgtctgttcaaccacttagaaaacaaccagagccagagcaacggctatcctccttacaacgttgaactggttgacgaaaaccactatcgcattgcgattgctgttgccggtttcgcagagagcgaactggagatcaccgcgcaggacaatctgctggtggtgaaaggctcccatacggccgagcagaaagaacgaacctacctctaccagggcatcgcagagcgcaactttgagcgcaagttccagctggctgagaacatccacgtcaagggcgcgaacctggtgaacggcctgctgtttatcgaactggaacgtgtgattccggaagagaaaaaaccgcgtcgtatcgaaatcaactaa

SEQ ID NO: 116927 - DNA, 330 bp, Enterobacter cloacae
atgagaaatgttctgattaagctggcgtcgttcagcggggttgttttactttgcgggtgttcgagcgtgatgtcgcacaccggcggtaaagaaggaacatatccggggacgcgcgccagtgccgcaatgatctctgatgatgagacaaactggggtaccaaatctctggcgattcttgatatgccgtttacggcggttgccgatacgcttctgctgccgtgggatatgttccgcaccgacagctcagtgcgttcgcgcgttgagaaaagcgagcaggaaaagctggcgaccaattccgtcatcccgcccgcagagatgcctccacgctaa

SEQ ID NO: 116928 - DNA, 1230 bp, Enterobacter cloacae
atgaaacaaatcaccttcgcttcccgcaaccaccagctcaccaacatcaacacctggacgccagacagccagtggcttgtctatgatgtccgcccgtccggcgcgtcgtttaccggtgaaaccattgagcgggtcaatgttagtacgggcgaggttgaggcgatctaccgtgcgactgacggcgcgcatgtcggcgtggtaaccgttcatccggcgcaggacaaatatgtttttatccacggcccgaaaaacccggatgcagactggcagtatgattttcaccatcgtcagggggtgattgcgcacaatggtcaggtgagcaatcttgatgcaatggatatcaccgcgccttacaccgcaggggcgctgcgtggcggcagccacgtccacgtttttagcccgaacgggcagttcgtcagctttacctacaacgaccatgtgctgcacgcgcgcgatccgcagctggatttgcgtaacgtcggggtggcggcgccttttggcccagtaaacccacaggggaaccatccgcgggaatatgccggcaccttctggagcgtactggtaagccgtacaacgccgaacccgaaaccgggcagcgatgaggtaaaccgcgcctatgaagagggctgggtgggcaacgacaggctggcgtttatcggcgatacggtgtctgcgaaaggcgagaaagtgcccgaactgtttattgtcgatctccccaaagacgagcagggctggaaacgggcgggcgatgcgccgttgcagggaacgcctgatacaatgcccgcgccgcctgcgggcgtaacgcaacgtcgcttaaccttcacccatcagaaggcgtatccggggctggtgaacgtgccgcgccactgggtgcgcagcaatccgcaggggacgcagattgcgtttttaatgcgggacgataacggcgttgtgcagctgtggcttatctcccctgagggcggcgagccgcgtcagctgacccacactgagcgtgatattcagtcggcctttaactggcatccttccggcaacgggctgggatttgtgcttgcaggccgtattgcctgctgcgatgcgcagaccggagaggtgacgtttttgacgtccgatcacggcaatccgccgtctgctgacgctgtggtgttttccccggacggacgatttattgcatggatggaagagaagggcggtttccgccagctgtggctaacggaaaccgcacagaattag

SEQ ID NO: 116929 - DNA, 1293 bp, Enterobacter cloacae
atggatattccagttactgctgcaaaaaccgggcgtcgtcgttacctgacgctgatcatgatctttattaccgtggtcatctgttatgtcgaccgcgccaaccttgccgtggcatcggctcatattcaggaagagtttggcatcaccaaagcggaaatgggctacgtcttctcggcgtttgcctggctgtatacgctctgtcagatccctggtggctggttccttgaccgcgtgggttcacgtctgacctactttatcgctattttcggctggtccgtggcgaccctgttccagggcttcgcgaccgggctgatgtcgctgattggcctgcgcgccatcaccggggtgtttgaagcgccggcgtttccgaccaacaaccgcatggtgaccagctggttccctgaacacgaacgcgcttccgctgttggtttttacacctccgggcagtttgttggtctggcgtttctgacgccgctgttaatctggatccaggagctgctgagctggcactgggtgtttatcgtcaccggcgggatcggcattatctggtcgctcatctggtttaaggtttatcagccgccgcgcctgaccaaaagcatcaccaaagccgaactggactacatccgcgacggcggtggcctggtggacggcgatgcgccggtgaaaaaagaggcgcgccagccgctgaccagagcggactggaagctggtcttccaccgtaagctggtgggcgtatatctgggccagttcgcagtgacctccacgctgtggttcttcctcacctggttcccgaactatctgacgcaggagaagggcattaccgcgctgaaggcgggctttatgaccaccgtaccgttccttgcggcgtttttcggcgtgctgctctcgggctggctggcggacaaactggtgaaaaaaggcttctcactgggcgttgcgcgtaaaacgccaattatctgcggactgctgatctctacctgcatcatgggagcgaactacaccaacgatccggtgtggatcatgaccctgatggcggtagcgttcttcggaaacggttttgcctccatcacctggtcgctggtgtcgtccctggcgccgatgcgtctgatcggcctgactggtggcgtgtttaacttcgttggcggcctgggcgggatcaccgtaccgctggtcatcggttacctggcgcaggactacggctttggtccggctctggtgtatatctctgccgtggcgctgatcggggcgctctcctacatcctgctggtcggcgacgttagacgagtaggctaa

SEQ ID NO: 116930 - DNA, 1149 bp, Enterobacter cloacae
atgaaaataaccaaactcaccacgtaccgtttacccccgcgttggatgttcctgaaaatcgaaaccgacgaaggcgtggttggctggggcgagccggtgattgaaggccgtgcgcgcaccgttgaagccgcggtgcacgagctgggcgaatacctgattggccaggatccggcgcgcatcaacgacctgtggcaggtgatgtaccgcgcgggcttctaccgcggggggccgattctgatgagcgccatcgccggtattgatcaggcgctgtgggatatcaaaggcaaagtgctcaatgccccggtctggcaattaatgggcggcctggtgcgcgacaaaatcaaagcctacagctgggtgggcggtgaccgccctgcggaagtgatcgacggtatccggcaactgcgcaacatcggttttgacaccttcaaactcaacggctgcgaagaaatgggcgttatcgacaactcgcgcgcggtagaccgggcggtgaataccgtggcgcaaatccgtgaagccttcggcaacgagattgagtttggtctggatttccacggccgcgtcagcgcgccaatggccaaagtgctgattaaagagctggagccgtatcgcccgctgtttatcgaagagccggtgctggccgagcaggcggaatactatccgaaactggctgaacagacgcacattcccatcgcggcgggggaacgcatgttctcgcgcttcgagtttaaacgcgtgctggaagcgggcggcattgcgatcctgcaaccggacctctcccacgcgggcggcatcaccgaatgctacaaaattgccggaatggcagaagcctacgatgtggcgttggcgccgcactgtccgcttgggccgattgcgctggcggcctgcctgcacgtcgacttcgtctcccgcaatgcggtgttccaggaacaaagcatgggcattcactataacaagggcgcggagctgctcgactttgtgaaaaacaaagaagacttcagcatggaaggtggtttctttaaaccgttaacgaagccgggccttggcgtggagatcgacgaagccaaagtcattgagctgagtaaaagtgcgccggactggcgtaacccactgtggcgtcatgaagacggttccgtagccgagtggtaa

SEQ ID NO: 116931 - DNA, 618 bp, Enterobacter cloacae
atgcagtggcaaactgaacttcccctgatcgcgattttgcgcggtatcacgcccggtgaggccttagcgcacgttggcgcggtgatcgacgccgggttcgacgcggtggaaatcccgctcaactccccggagtgggaaaaaagcattccggcaattgtgaaggcgtttggtgataaggcgctgattggcgctggcaccgtattacagccggagcaggtggatgaactggcgaagatgggctgcaagcttatcgtcacaccgaatatcaaccccgaggtgatccgccgggcggtggattacggcatgaccgtctgcccgggttgcgccacggccacagaagcctttgccgccctcgatgcgggcgcacagtctctcaaaattttcccgtcgtcggcctttggtccggattacatcaaagcgctgaaagcggtcttacccgccagcgtgccggtctttgccgtgggcggcgtcacgccggaaaacctgggccagtggatgagcgcgggctgtgtgggcgcggggctgggcagcgatctctatcgtgccggtcagcccgttgagcgtaccgcacagcaggcggcagcatttgtgaaagcgtatcgagaggcagtgcaatga

SEQ ID NO: 116932 - DNA, 879 bp, Enterobacter cloacae
atgacatcacgctacatcgcaattgactggggatcgaccaatctgcgcgcctggctctaccagggtgagcagtgcctggaaagcaggcaatcagaagcaggtgtgacgcgcctgaacggtaaatcccccgcagcggtgttagcagaggtgacacaaaactggcgcgacggtacaacgccagtggtgatggccggaatggtcggcagtaacgtggggtggaaggtcgcgccttacctgtcagttccggtgcatttcaccgccgttggcgagcagttaacgtccgttggcgacaatgtctggattattcccggtttatgcgtctctcgcgacgataaccataatgtgatgcgcggcgaagagacgcagctgctcggggcgcgcaccctttctccttcttctgtctacgtcatgcccgggacgcactgcaaatgggtccaggcggatgctgagcaaattcatgatttccgcaccgtgatgaccggcgaactgcaccacttgctgcttaagcattcgctggtgggggccggtttgccggagcagaccccttcgccggaagcgtttgccgccgggcttgagcgcgggatcgcatcccttgccgttttgccgcaactttttgaggttcgcgcctcgcacgtgctgggaaatcttccgcgcgaacaggtcagcgaatttctgtccggcctgctgattggcgcagaagtcgccactctgagcgacgcgttcgccgggcagcaggccatcacgctcgtcgcgggttcatcgctgacgtctcgttaccgccaggcgttccacgctatcggacgggatgttgctgcggtggaaggcgacacggcatttcaggcaggcataaggagcatcgctcatgcagtggcaaactga

SEQ ID NO: 116933 - DNA, 690 bp, Enterobacter cloacae
atgacactcaataaaaccgatcgcattgtcatcacgctgggcactcagattgtgggtggcaaatacgttcccggttcgccgctaccagcagaggcggaactgtgcgaggagtttgaaacctcgcgcaacatcatccgggaagtgttccgctcgctgatggcgaagcggctgattgaaatgaagcgctatcgcggcgcgtttgtggcgccgcgtaaccagtggaactacctcgataccgatgttctgcaatgggtgctggaaaacgactacgacccatggcttatcggcgcgatgagcgaagtccgaaatctggtggaaccggctatcgcccgctgggcggctgagcgcgcaacgtcaggtgacctggctcagattgagtcggctttaaatgacatgatcgccaataaccagaatcgggaggcgttcaacgaagcggacattcgctaccacgaagcggtattgcagtcggtgcataacccggttttacagcagcttagcgtggcgatcagctcgctacagcgagcagtatttgaacgtacctggatgggcgatgaggccaacatgccgaaaacgcttcaggaacataaagcgctgttcgatgcgatacggcatcaggacggcgatgcggcagagcaggcggcgctgaccatgatcgccagctcgacacgaaggttgaaggaaatcacatga

SEQ ID NO: 116934 - DNA, 813 bp, Enterobacter cloacae
atggccatcaaactcattgcaatcgatatggacggcacgctgctgctgccagaccacactatctctcctgccgttaaaaatgcgatcgccgccgcacgcgaaaaaggcgtgaacgtggtgctcaccaccggacgcccgtatgccggggtgcacagctacctgaaagagctgcacatgaaccagcctggcgattactgcatcacctataacggcgcgctggtgcaaaaggcagccgatggcagcacggtggcgcaaactgcactgagctatgatgactaccgtttccttgaaaaactctcccgcgacgtgggctctcacttccacgcgctcgatcgcaatacgctttacaccgccaaccgcgatatcagctactacacggtgcacgagtcctacgttgcaaccattccactggtgttctgcgaagcggaaaacatggacccggcaacccagttcctgaaagtaatgatgatcgacgaacccgcgatcctcgacaaagccatctcgcgcattccggctgaggtaaaagagaaatacaccgtgctgaaaagtgcgccgtacttcctcgaaatcctcgataaacgcgttaataaaggcacgggcgtcaaatcgcttgccgatgcgctgggcatcaagcctgaggagatcatggcgctgggcgaccaggaaaacgatattgcgatgatcgaatatgcgggcatgggcgtggcgatggataacgccatcccgtcggtaaaagaagtggcgaacttcgtgaccaaatctaacctggaagacggcgttgcctgggcgatcgagaaattcgttctgtcgtaa

SEQ ID NO: 116935 - DNA, 1233 bp, Enterobacter cloacae
atgtatactggaagacgatattttatccttgtgctcctttttattgcatcaatgataaattatatagatcgggcggcattatctattcttgccccctatatcacgacggatttgaatgtcaataaagctgagctgggtcttatttttagtagcttcgcgatcggttatgcggtgttctgttttgtcggcggctggctggctgataaatatggaccacgacgtatatttgctggcgcgatggggttatggtcgctgtttgccggtttgacctgcgccgcgtttaattttacctccctgtttattattcgcgttatttttggggcggcggaaggcccaatggggtcagtcaccaataaaaccattgtgaagtggtttcctgccagggagcgcgccagggctgtcggcgtctctttttcaggcaacccgatgggcggcgcggtctcggcgcccatcgtcgccgcctctgcgctggcgtttggctggcgtatgacgttcgtaggaatgatgcttatcggtttcgtgtgggtggtcgtctggctgatcgccacgaaggggagcgaagcgccaaaagaggaggcggatgcccggaccgtggcagagacagtcgggaacgacctgccggatgaaaagctctcgtattacctgaagcagccgatcattctgttcaccgcgctggcctttttcgcctacagctacattctgttcttctttatgacctggtttccaagctatctgctggacgcgcgcggtctgaatatgcgcgatatgagtatcgccaacgtgctgccctggctgctgggctttgtcggcctgatctccggtggctttatctctgactatatctacaagctgaccaataacctgctgttttctcgtaaagtgattatcgttgttggcctgattatcgccgcgatatgcatcactgcctccgcgctggtgcttaacctgtacggggcgattgcgctgatgtccgtcggaatgtttgccatgtatgttacgacgtcatgttactgggctatcgttcaggatacggtgaagggcaataacgtgggcgccgtcagcggctttatccactttcttgctaatcttgcaggggtattcgcgccgatgttaaccgggtttattgtgcaaggaaccgggcaatattattccgcgttctacctggttggcgcgctggccatcggctctgctgtgctgctgatgctgggaggcaaaaagcagacgattgcctga

SEQ ID NO: 116936 - DNA, 1011 bp, Enterobacter cloacae
atgaccaccgtatttattaaagaagatggcttaaaaaagctggtattaaataaattaattcccgccgggctggatgaaaaaacggcgcaagatgtcgcggacgtgctggtacatgcggatatgacgggcgtgcattctcatggcgttatgcgcgtggagcattattgtacgcgcctgcaagcaggcggcctcaatccggctgcaaacatgacgatcaatactctttctccatccgtggcggtgctggatgctgacgacggcatggggcattcggcactcaaggccgcgacggatcacgcgatagcgctggcgaaagagaccgggctgggttttgtggggataaaaaatgcttcccactgcggggcgctctcctggtttgctgaacgcgctacccaacaaaacaccattgctatcgtcatgacacaaacggatacctgcgtggcgcctcatggtggcgcagagcggttcctgggcacgaacccgattgcctttggtttcccggtcgcgggcgaagaaccgatgatcgtcgatatggcaaccagcgctatcgcgtttggcaaaattttacatgccaaagagacgggcaaacccatcggcgaagggcttgcgctggataaggaaggcaatgtcacaaccgatccgcataaaattgaaaatctattgcctttcggcgggcataaaggctcagggattgcgctggcgattgatgcgctgaccggtatcttaatgggagcaaactttggtaatcatatcgttcgtatgtatggtgattacgataagatgcgcaaactggcgagcctggtcattgttatcgatcctgaaaaactgggtaatccgctttttgccgccaccataaaaataatgcgggatgaactccgggcggttaaaccggttcctggcgttgaaaaggtcctggcgcctaacgatcctcaggtacgttataaagagaaatgccagcgcgaaggcattccagttgtggaaagtatttatcaatatttatctgcgttgtga

SEQ ID NO: 116937 - DNA, 1017 bp, Enterobacter cloacae
atgaaaacgctcatttgccaggctcccggcaatattgaatacatcgaaagggcgatgcctgagttacacgaggccgaagcgctgttaaaaatcaacgcggtgggcatttgcggtacggatatccatgcttatgcgggacgccagcccttcttttcttatccgcgcgtattgggccatgaaatttgcggcgtagtggaagagacaggccgcgcctgccagcgtgtacagaaaggccgccgctacagcgttattccctgtatcccatgcggcgattgcgcggcctgccgggaagggaaaaccaactgctgcgaaaacgtctcgctttatggcgtacatcaggacggcggattcaatgaatatctggccgtgcgggaagacaatctggtggaactgccgcccacgctgagcgacaacgctggcgcgctggtcgagtgttttgccattggcgcgcatgcggttcgccgggcggatatcgcgccgcagcaaaatgtgctggtggtcggcgccggaccgattgggctggcggcggcagccattgctaaagcgaaaggaggccgcgtcgtggtcgccgatatcgacgcaggaagacgccagcaaatcgccgataaagttggcgtagataccgtcgatcctgggcaggataattatattgaaacggtgaaagcctgttttaacggacagttagcctgtacgttgcttgatgccaccggtaataaaggctctatgacgcgggcggtggatctgattcgtcacggtggaaaaatagtctttattggtctttatattggtgagctgtcgattgacgatcccactttccataaaaaagagaccacgctgttagccagccgtaacgcaacgcgagaagattttgaatgcgtaatcgccttaatggcgaacggaacgcttaacgaacatctgatggtgaatcaggaatttgatttctgcaaaattggcgatcgctaccagcaggatgtcgtggaaaataaaaaactggtcaaaggcgtaattaaattttaa

SEQ ID NO: 116938 - DNA, 1440 bp, Enterobacter cloacae
atggaaagcacggcttactcccgccaggatttagaaaccgccatcgtacatatcggtactggagcatttcaccggggacaccaggcggtttacaccgatttaagcaacgaagcggcaggaacgcggtggggcatttttggcattaatctgttcggcagcgctgacgtagtggacgcgttaaatgcgcaacacggtctttttaccgtggttgagcgatcgtcacacgccacgctgtgccgtcaggtacgttcgttgaccggcgcgctgcatacgccacagagcggtatccaggccgcgattgaaaaactgatcgaaccgcaggtaaaaatcgtctccttaacggtgacggagaaaggctactgtaccgatccgcagtctcgtcagctcgatctgcttaacccgcttattcgccacgatctggccaatccgcaggcgccgcagtcagctatcggcctgatcgtggaggcgctacgcctgcgtcggctccacaatctgcccccgtttagcgtcatgtcatgcgataacatcccggaaaatggcgcgctgacgaaaggtgccgttattgccttcgccgcgcagcgtgatgtcacgctggccgactggattgcgcagaacgtcaccttcccgggaacgatggttgaccggattgttccggcaatgaccgaagaggcgtttgccctgatcgaagcggaaaccggcagggccgatcccgccggtgtggtatgtgaagatttccgtcagtgggtcatcgaagataattttgtcgcagggcggcctgagtgggaccgggctggcgccatgtttgtcgccgacgttctgccctatgaagagatgaagctgcgtatgttgaacggcagtcactcatttctggcctactgcggcaccctggcaggctatgagttcatttaccagtgcatggaagatgcggtttttaacgccgccgtacggtatctgatggttgaagagcaggccaactccctgagtccgcacctggatctggatgttaaccaatacgctaacgtgcttattgcgcgctttagcaatccgcatatccgacataaaaccagccaaatcgccatggatggttcacaaaaactgcctcaacgggctatcgatccctggcgcacgcttcagatgcgcggggtaaacggcacggccctgacggttctggtcgccggctggctccacttcgttatcagcgccattgccaggggagaggcggttgccgatccgcttaacgctgagtttcacgcctgcgtgacaacgcaaaaagaggcatgggcaaaagcgctctcgctgcttcagataaaaagcattttcggtacgctcgcgagcgacaatccgcaatttctgcacgatgtgcggcaggcgttcgaagcgattgaaacacacggcgtaaaagccgctattcaacatttactagtgaaggctaacgtatga

SEQ ID NO: 116939 - DNA, 1116 bp, Enterobacter cloacae
atgactgatcatgaaaaggatatgaagatggataccgctattaagtacgttgaaaccagactcttcaaagtgccgctggcagaagtattagtcgatgccaaacatggtgatcacagccatttcgagctgattaccaccaccattaccctggaaaatggcgagactggcacaggctacacctataccggcggtaaagggggttatgcgattaaagcgatgatcgatcacgatctggcccccgtactggcaggcaaggatgcggcggccattgatgatatttatgactttatggagtggcatatccattacgtgggccggggcgggatcgcttcctttgcaacgtcagcgattgatattgccctgtgggatttgaaaggcaagcgcgagcagctcccgctctggaaaatggcgggcggcaaaaacaagagctgtaaagcctactgtggcggtatagatctcgccttcccgctggaaaagcttctgaacagcattaagggatatttagaaagcggctttaatggcgtgaagattaaggttggccagaagaacccgcaggaggatatcgagcgaatcaaagcagttcgtcagctcatcgggccggatattacctttatgattgacgccaactactctctgaccgttgatcaggcgattgcgctatcgaaggccgtcgagtcatgcgatatcacctggtttgaagagccgaccatcccagatgattacgatggttacgccactatcgcggaaaataccaccatcccgctggcgatgggcgaaaacctgcataccattcatgagttcggctatgcgctggatcgcgcaaaactgggctttattcagccggacgcctctaactgcggggggatcaccggttggctgagagccgcccggctgtcgatccgttatggtctgccggtctgttcacatgggatgcaggagctgcacgtcagcctggtttccgcctttgacaccggctggctggaagttcacagcttccctatcgatcgctatacccatcgtccgctggtggtcgaaaattaccgggccgttgcgccggatacctgcggtacgggtgttgaatttgactgggataagctgaccccgttcgaggtctga

SEQ ID NO: 116940 - DNA, 750 bp, Enterobacter cloacae
atggaacaggcgatcacaaaacgacgctattacgatatcgggcttcaaatagaagagttgctctattccggcgtgttcaaagcgggagagcgccttccttcagaaagggagcttggcgagcgttttaataccagtcggacaacgattcgcgaagcgatcatcatgcttgagctgaaaggcgtggtggaagttcgccagggcgcggggatctatttcatcgacagccctgaaaaactcaaccagaagtcgctactcccctattccgatatcggtccctttgagttactccaggcccgtcaggtgatcgaaagcaatatcaccgggtttgccgccacgcaaatcaggctcaatgagctgcgtgagctgaagaagatcatcacgcagcaagaaaagatgattgatggcaacagcgacaagttcgaagagcttgatcgacagttccacaacattattgcggaagcgacccagaacagggtgctgatgaaacaatctgccgagctgtggcgtgccgtgcgcacggagaaccctcgctggaagcgcctcaactacaaatatctgcataaaaaagagctgcggatgcagtgggtggacgatcaccgcagcatcttcctcgccctgcaaaaacgtaacgcagagcaagccagacaagccgcctgggaccatctggaacacagtaaaaacgagctggttaaaatcttccagcaggatgattcgctcgacgattttgacgattttttctttgccacctga

SEQ ID NO: 116941 - DNA, 2412 bp, Enterobacter cloacae
atgtcgaattcttatgactcctccagtatcaaagtcctgaaagggctggatgcggtgcgtaagcgcccgggtatgtatatcggcgacacggatgacggcaccggtctgcaccacatggtattcgaggtggtagataacgctatcgacgaagcgctcgcgggtcactgtaaagacatcgtggtcacgatccatgcggacaactccgtgtccgttaccgatgacggtcgtggtatcccaaccggtattcacccggaagagggcgtatctgctgcggaagtcatcatgaccgttctgcacgcaggcgggaagttcgatgataactcctataaagtttccggcggtctgcacggcgtaggcgtatccgtagtaaacgccctgtcgcagaagctggagctggttatccagcgcgaaggcaaaattcaccgtcagatctaccagcacggcgtgcctgaagcgccgctggccgtcacgggtgataccgataaaaccggtaccatggtgcgtttctggccgagcctcgaaaccttcaccaacgttaccgagtttgagtacgacattctggcgaaacgcctgcgcgaactgtcgttccttaactccggcgtgtcgattcgtctgcgcgacaaacgcgacaacaaagaagaccacttccattacgaaggtggtatcaaggcgttcgttgagtatctgaacaagaacaaaacgccaattcacccgaatatcttctacttctctactgaaaaagacggtatcggcgtggaagtggccttgcagtggaacgacggtttccaggaaaacatctactgcttcaccaacaacattccacaacgcgatggcggtacgcacctggcgggcttccgcgcggcgatgacccgaaccctgaacgcctacatggacaaagaaggctacagcaaaaaagcgaaagtcagcgccaccggtgacgatgcacgtgaaggcctgattgccgtggtctccgtgaaggtgccggatccgaagttctcctcacagaccaaagacaagctggtctcttctgaggtgaaatcggcggttgaacagcagatgaacgaactgctgagcgaatacctgctggaaaacccgtccgacgcgaaaatcgtggtgggtaaaattatcgatgcggcgcgtgcccgtgaagcggcgcgtaaagcgcgtgaaatgacccgtcgtaaaggcgcgctggacctggcaggcctgccgggcaaactggctgactgtcaggaacgcgacccggcgctgtctgaactgtaccttgtggaaggggactccgcgggcggttctgcgaagcagggccgtaaccgcaagaaccaggcgattctgccgctgaagggtaaaatccttaacgttgagaaagcgcgcttcgacaagatgctctcttctcaggaagtggcgacgctcatcaccgcgctcggctgcggcattggtcgcgacgagtacaacccggacaaactgcgctatcacagcatcatcatcatgaccgatgcggacgtcgacggctcgcacattcgtacgctgctgttgaccttcttctatcgtcagatgccggaaatcgttgagcgcggccacgtctacattgcccagccgccgctgtacaaagtgaagaaaggcaagcaggaacagtacattaaagatgacgacgcgatggatcagtaccaaatcgcgatcgcccttgatggtgcgaccctgcacgcaaattccagcgcgccagcgctggccggtgagccgctggagcgtctggtctccgagttcaacgccacgcagaaaatgattggccgtatggagcgtcgctatccgaaagcgctgctgaaagagctgatttaccagccgaccctgaccgaagccgatctgagcaacgagcagaccgtcacccgctgggtgaacaccctggtgagcgagctgaacgagaaagagcagcatggcagccagtggaagttcgacgttcagcagaacgctgagcagcagttcgagccgatcgttcgcgtgcgtacccacggcgtcgataccgactacccgctggagcacgaatttgtgaccggtccggaataccgccgtatctgcaccctcggcgagaagctgcgcggtctgatcgaagacgatgcgtttatcgaacgtggcgaacgtcgtcagccggtagccagcttcgaacaggcgctggagtggctggtaaaagagtcccgtcgtggtctctctattcagcgttataaaggcctgggcgaaatgaacccggatcagctgtgggaaaccaccatggatccggaaagccgtcgcatgttgcgcgtcaccgttaaagacgcaatcgcagcggatcagctgttcacgaccctgatgggcgatgcggttgaaccacgtcgcgccttcatcgaagagaacgccctgaaggcggcgaatatcgatatttaa

SEQ ID NO: 116942 - DNA, 1074 bp, Enterobacter cloacae
atgtcgctcacccgtctgttgatccgcgactttcgcaatatcgaaagcgcggatctcgctttatcccctggctttaacttcctggttggcgcgaacggcagcggcaaaaccagcgtgctggaagccatctatacgctcggccacggccgggcgtttcgcagtttgcagattggtcgcgtgattcgccacgagcaggaatcttttgttctgcacgggcgtttgcagggagcagagcgggaaaccgccatcggcctgaccaaagacaagcagggcgacagcaaggtgcgcatcgacggcaccgatggccacaaagtggcggagctggcgctgctgatgccgatgcagctgattacgcccgaggggtttactttactcaacggcggccccaaatacagaagagcgttcctcgactggggatgctttcacaatgaagccggtttctttaacgcctggagcaacctgaagcgtctgcttaaacagcgtaacgccgcattgcgccaggtcacgcgctacgctcagctgcgtccgtgggacatggaactcatccctcttgcggaacaaatcagccgctggcgtgccgaatacagcgcaggtatcgccgaagacatggccgacacctgcaaacagtttttacccgagttctctctcaccttctcttttcagcgtggctgggaaaaagagacggattatgccgaggtgttagagagaagcttcgagcgcgatcgcatgttgacctacaccgcgcacggcccgcacaaggcggatttccgcattcgtgccgacggtgcgccggtggaagacacgctgtcgcgcgggcagctgaagctcctgatgtgcgcgctgcgcctggcgcagggggagttcctcactcgagagagcgggcgacgctgcctgtacctgatagatgattttgcctcggaacttgacgacgcgcggcgcgggctgcttgccagccgcttaaaagccacgcagtcgcaggttttcgtcagcgccattagcgctgaacacgttatagacatgtcggacgaaaattcgaagatgtttaccgtggaaaagggtaaaataacggattaa

SEQ ID NO: 116943 - DNA, 1101 bp, Enterobacter cloacae
atgaaatttaccgttgaacgtgaacatttattaaaaccgctgcaacaggtgagtggcccattaggcggccgccctacgctgcctattcttggaaacctgctgcttcaggtcgcggacggtacgctgtcgctgaccggcacagatctggaaatggaaatgatcgcgcgcgttacgctgactcagccgcacgacgcgggcgcgaccacggttccggcacgtaaattctttgatatttgccgtgggctgccggaaggcgctgaaatcgccgtgcagctggagggcgaccgcatgctggtgcgctctggccgcagccgtttctccctctccacgctgcccgctgcggatttcccgaacctggatgactggcagagcgaagttgaatttaccctgccgcaggcgacgatgaagcgtctgattgaagccacgcagttctccatggcgcatcaggacgttcgttactacttaaacggcatgctgttcgaaaccgaaggtgaagagctgcgtaccgtggctaccgacggtcaccgtctggcggtttgttccatgccgattggcgattcactgccaaaccattcggtgatcgtaccgcgtaaaggcgtaattgaactgatgcgtatgctcgacggcggtgaaacgccgctgcgcgtgcagatcggcagcaacaatattcgtgcccacgtgggcgattttgtcttcacatcgaagctggtagacggtcgtttcccggattatcgccgcgtattgccgaagaacccggataaaacgctggaggcgggttgcgacatcctcaagcaggcgttcgcgcgtgccgctattctctccaacgagaaattccgcggcgtacgtctgtacgtgagtgaaaaccagatcaaaatcaccgccaacaacccggagcaggaagaggcagaagagattctggacgtcacctacgccggggctgagatggaaatcggcttcaacgtcagctatgtgctggatgtgctgaatgcactgaaatgcgagaacgttcgcatcctgctgactgactccgtttcgagcgtacagattgaagatgccgcatcgcagtcggctgcttatgttgtcatgccaatgagactgtaa

SEQ ID NO: 116944 - DNA, 1395 bp, Enterobacter cloacae
gtgtcactttcgctttggcagcagtgtcttgcccgattgcaggatgagttaccagccacagaattcagtatgtggatccgcccgttgcaggcggaactgagcgataacacgctggctttgtatgcgccaaaccgtttcgtgctcgattgggtaagagataaataccttaataacatcaatggactgctgaacgatttctgcgggtcagatgccccacagctgcgttttgaagtgggcacaaagccggtcacccaaaccgttcgtgaagttgtcaatgtggcagcccctgcacaggcggcgcccgctccagcgcctcgcgttgcaccggttcgtcagggctgggataacgttccggcccccgctgagcctacctaccgctctaacgttaacgtgaaacacacgttcgataacttcgttgaaggtaagtcgaaccagctggcacgtgcggcggctcgtcaggttgccgataaccccggtggcgcttacaacccgctgttcctgtatggcggcacgggtctcggtaaaacgcacctgctgcatgcggtgggcaacggcattatggcgcgtaagcccaatgccaaagtggtgtatatgcactccgaacgcttcgttcaggacatggtaaaagccctgcaaaacaatgcgatcgaagagtttaaacgctactaccgttccgttgatgcgctgctgatcgatgacattcagttctttgccaataaagaacgatcgcaggaagagtttttccatacctttaacgccctgctggaaggcaatcagcagatcattctgacctcggatcgttatccaaaagagatcaacggcgttgaagatcgtctcaaatcccgcttcggctggggcctgaccgtggctatcgagccgccggagctggaaacccgcgtcgcgatcctgatgaaaaaagccgacgagaacgacattcgcctgccgggtgaagtggcgttcttcattgccaagcgcctgcgttccaacgtgcgtgagctggaaggggcgctgaaccgcgttatcgccaacgccaacttcaccggtcgggcgatcaccatcgattttgtgcgtgaagcgctgcgcgatttattggctttgcaggaaaaactggtcactatcgacaatattcagaagacggtggctgagtactacaagatcaaagtggcagatttactgtctaaacgtcgttcccgctcggtggcgcgtccgcgtcagatggcgatggcgctggcaaaagagctaaccaaccacagcctgccggaaatcggtgatgcgtttggtggccgtgaccatacgaccgtgctgcacgcctgtcgcaagatcgagcagttacgcgaagaaagccacgacataaaagaagatttttccaatttaatcagaacattatcatcgtga

SEQ ID NO: 116945 - DNA, 327 bp, Enterobacter cloacae
ttgttaactcccactcatttcactttcgtcttccagcagccattacgggctggcacgccgcaaatcaccatcctcggccgccaaaattcgctggggcatccccgcatcggtctcacagtcgccaagaaaaacgttaagcgtgcgcatgaacgcaaccggattaaacgtctgacgcgtgaaagcttccgtttacgtcagcacgaactgccttcaatggatttcgtggtggtggctaaaaaaggggttgccgacctcgataaccgtgctctctcggaagcgttggaaaaattatggcgccgccactgtcgcctggctcgcgggtcctga

SEQ ID NO: 116946 - DNA, 1644 bp, Enterobacter cloacae
atggattcgcaacgcaatcttcttatcatcgctttgttgttcgtgtctttcatgatctggcaggcatgggagcaggataaaaatcctcaaccccagcagcagaccacgcagaccacgaccaccgcagcgggtagcgccgccgaccagggcgtaccggccagtggccaggggaaacagattacggttaagaccgatgtgcttgagctgactatcaacacccgtggtggtgatgttgagcaggcgctgctgttgacctacccgaaagagctgaagtctaccgaaccgttccagttactggaaaccacgcctgaatttatctaccaggcgcagagcggcctgaccggtcgtgatggcccggataacccggctaacggtgcgcgtccactgtataacgtcgagaatgacacgtttgtgctggctgatggtcagaacgaactggttatcccgatgacctacaccgacgcggcaggcaacaccttcaccaaaaccttcaccctgaaacgcggtgagtatgcggtgaacgtgggctacagcgtacagaacgccggtgcgaaaccactggaaatctctacctttggtcagttgaagcagtccatcaatctgccgtctcaccgtgacaccggaagcagcaactttgcgctgcataccttccgtggcgcggcttactccacgccagataccaagtacgagaaatacaaattcgacaccattgccgataacgaaaacctgaacgtcagctctaaaggcggttgggtcgcaatgctgcaacagtatttcgcgacggcgtgggtaccgaataacgacggtacgaacaacttctacaccgcgaacctcggcaacggtattgcagccatcggctacaaatctcagccggttctggtgcagccgggtcaaaccggtaaactggcaagcaccctgtgggtcggcccggaaatccaggacaaaatggctgccgttgcgccgcacctggatctgaccgtcgattacggttggttgtggttcatctctcagccgctgtttaagctgctgaagttcatccacagcttcctgggtaactggggcttctccatcatcgttatcacctttatcgttcgtggcatcatgtatccgctgactaaagcgcagtacacctccatggcgaagatgcgtatgctacagccgaagattcaggctatgcgtgagcgtctgggcgatgacaaacagcgtcagagccaggagatgatggccctgtataaagcagagaaagtgaacccactgggtggttgcttcccgctgctgattcagatgccaatcttccttgcgctgtactacatgctgatgggttccgttgagctgcgccacgcgccgttcgctctgtggatccatgacctgtccgcacaggacccgtactacatcctgccgatcctgatgggcgtgacgatgttcttcatccagaagatgtctccgaccaccgtgaccgacccgatgcagcagaagatcatgacctttatgccggtcatcttcaccgtgttcttcctgtggttcccgtcaggtctggtgctgtactatatcgtcagcaacctggtgaccatcatccagcagcagctgatttaccgtggtctggaaaaacgtggcctgcatagccgcgaaaagaaaaagtcctga

SEQ ID NO: 116947 - DNA, 1365 bp, Enterobacter cloacae
atgagccataacgacactatcgtcgcccaggcaaccccaccgggacgcggtggtgtaggcattctgcgcatctccggcctgaaggcgcgtgaggtggccgaagcggtgctgggtaaactgccaaagccgcgctacgctgattatctgccgtttaaggatgccgacggcacaccgctggaccagggcatcgcgctgtggttccccggcccaaactcctttaccggcgaagatgtgctggagcttcagggtcacggcggcccggtgatcctcgacctgctgttaaaacgtattctgaccctgcctggcctgcgcattgcaaagccgggtgagttctccgagcgtgctttcctcaacgataagctcgacctggcgcaggccgaggcgattgccgacctgatcgacgccagttccgaacaggcagcccgctccgcgctgaactcgttgcagggggcattttccgcacgcgtgaatcaccttgtggaagcacttactcacctgcgaatctatgtcgaagcggctatcgacttcccggacgaggagatcgacttcctctcagacggtaaaattgaagctcagctcaaccaggtgatgaacgatctcgatgccgttcgcgccgaagcgcgccagggcagcctgctgcgtgaaggaatgaaggtggtgattgctggtcgccccaatgccggaaaatcgagcctgctgaacgccctggcgggccgtgaagcggcgatcgtgaccgacatagccggcaccacccgcgatgtcctgcgcgagcatatccatatcgacggcatgccgctgcacatcatcgacaccgctggcctgcgcgatgcgagcgatgaagtcgagcgtatcggtatcgaacgcgcctggcaggagatcgagcaggccgaccgcgtgctgtttatggtggacggcaccacaaccgacgccgttgacccggctgaaatctggccagactttatcgcccgtctcccggctaaactgccgatcaccgtggtgcgcaacaaggccgacgttaccggcgaaacgctgggcatcagcgatgtgaatggtcactcacttattcgcctgtcggcccgtaccggtgaaggcgtggaagccctgcgtagccatctcaaacagagcatgggcttcgacaccagtatggagggcggcttcctggcacgtcgtcgtcacttgcaggcgctggaagaggcggctcgccaccttgagcagggtaaagcccagctgatcggcgcgtgggccggtgaactgctggcggaagagctgcgtctggcgcagcagaacctgagtgagatcaccggggagtttacgtcggacgatctgctgggacggattttctcgagcttctgcattggtaagtaa

SEQ ID NO: 116948 - DNA, 1176 bp, Enterobacter cloacae
atggctcgttttctgttctgtagttttgcgctggttctgctgtatccgtccggcattgatatgtatctggtggggctaccgcatattgcccgcgatctgggcgccagcgaggcgcaactgcacatcgcgttttcggcctacctcgcgggaatggcgtcgtcgatggtatttgccgggaaaatcgcggataaagcaggccgtcagcccgtcgccattacgggtgcagttatctttgcgctggcatcagtactgtcttcagtagctcaggaaagcacaatgttcctgtcaggccgttttatccagggcattggcgcgggtggctgttacgtggtggcgtttgctattcttcgcgataccttaagcgcccagcgccgcgctaaagtgctgtcgatgctgaacggcattacctgcatcatcccggtgctggcaccggttgttggctacctgattatgcttaaatttccgtggcagagtcttttctggaccatggccgcaatgggcgccatcgtctttatcctgtccgtgacggtgctgaaagagacccatcccggttcgcaacagccatatcacaccgcaaccctccatccggctgaaaagctgatgaatcgctttttcctgagtcggctggcaatcaccacgcttagcgtggcggtgatcctcacctatgtaaacgtttccccggtgttactgatggagacgatgggcttcgatcgcggtgagtattcgacggtgatggcgctaaccgcgatggtgagcatggcggtttcattctccacgccctttgcgctcaacatcttccgccagcgcacgctgatgctcacatcacagacgctgttcctcgccgcaggcgtgatcctggcgaccgccacctcacacgctgtaatgctggtgggcattactctgatctgcgccggattctccgtcggctttggtgtggcgatgagtcaggcgcttggcccgttttcgctgcgggctggcgtggcaagctcggtgctgggcattgcgcaggtctgcggttcgtcactgtggatttggctggcggcggtgatcggccttaacgcgctgaatatgctgatcggggttctgattggctgtagcatactctgcattaccttacttatggtcatccagcccgcggcgcactatgaagaagcccatcagcagtctcgatcttaa

SEQ ID NO: 116949 - DNA, 972 bp, Enterobacter cloacae
atgaagaagcccatcagcagtctcgatcttaatcttttactttgcctgcaacttttgttgcaggagcgcagcgtcaccaaagccgcgaagcggatgaacgtgacgccgtccgcggtgagtaaatcgctggcgaagctgcgcgactggttcgacgatccgctgtttgtgaaaacgcctttagggctattgcccacaccgctgacggtgagtctggaacaggatttggccgactggatgcagattggcaaccagatcctcgataaattccaccatagctctcctggcgggcttaagtttgtgctcgccgccgaaacaccgctgatgctgatccgctttaataccctgctggagcaggtgaatgaacgctacccacaggcgacggtgaagctgcgccaatgggattacgattcgctggacgccattacgcgcggagaagtggatctgggcttcaccgggcgtgaaacgcaccctcgctcgcgcgaactgctaaagctgatgccgtggtttatcgactacgaaatcctgttcagtgaccgtccgtgtgtgtatttgcgcgaggatcatcccgcgctccatgaagcgtgggatctggagacgtttctgcgctacccgcatatcagcatcttctgggaacgcagcgacacctgggcgctcgacgaggtgctaagagagatgggtcgggagcgtagcatcgccatgagtttgcccggttttgaacagtcgatgtttatggcggcccagccggatcacaactacattgccactgcgccgcactactgccatcactacaatcaactccaccagcgtaatctggtctgtctgcccattcccatcgatgaggcgcaggcagaaaagctcaccgtccccttcacgctgatctggcataaacggaacagccataatccgaaaatcctctggctgcgcgagacgatcaaagcgctgtataccgcaccaggtcaggtttttgcctaa

SEQ ID NO: 116950 - DNA, 747 bp, Enterobacter cloacae
atggctacgcactttgcacgaggaacattaacggaagggcatctcgtatcggccagactttcttcagcctgtcacagtgaggcgctcaaactacctgaacaccgcaggacgcggtttttagcttccagagcgctcctcgcagaactgctttttatgctctacggcaccagcgaattaccggacatactcacccagccagaaggtcgcccggtttttgcggacccggcactcccccatttttccattgcgtacaccggcaacattgttggcgtcgcgctgacgacggaaggtgattgcggcctggatatggagctacaacgcgtcacgcgcagcttccatggtgctaatgcgctcgatgaatacccgctctccagcaatgagaagctgtggatacgtaaccagaacgatcccgttgaagccagagcgcagctcatcacccttcgccagagcatccgcaaactgagcggcgcggcgtcagacgacgccagcctgttgcagctgctccccggctccggacgcctgcgcgcgacaaaagcctcgctggtagaggcgctctgcgacgctgaggacgtactgatctggtccgttgcggtgacccccgccatcgaacggctgaaaatctgggagtttgacagcactcgcggttggcgtagtcttccggatgtacctgagcgcgccaacgagcccgccgcgcgcctgatgcgattaaccagtttaccggcagaaaaagcatacacccatagctga

SEQ ID NO: 116951 - DNA, 567 bp, Enterobacter cloacae
atgtctgatacgttgaaagttgttacgttactgggaagcctgcgcaaaggttcttttaacgggatggttgcccgtacgctgccgcagctggcgcctgcgggaatggagatcagtgccctgccgtccattggcgacatcccgctttatgatgctgacgttcagcaggaagaagggttcccgcagagtgtggaagcgatagccgagcaaatccgtcaggctgacggcgtggtgattgtgacgcctgagtataactactcggtgccgggtggtctgaagaacgccattgactggctgtcccgtttaccggagcagccgctgtctggtaaacctgtgctgatccagaccagctcaatgggcgccatcggcggcgcgcgctgccagtatcacctgcgtcagatcctggtgttcctggatgcgatggtgatgaacaagccggaatttatgggcggcgtgattcagaacaaggtcgacccgcagacgggtgaagtggtggatcagagtacgcgtgaccatctctctggccagctgaccgcgtttggggattatattaagcgggtgaaggcctga

SEQ ID NO: 116952 - DNA, 1341 bp, Enterobacter cloacae
atgatgagtcaacaacacactacccagacatctggtcagggtctgcttgagcgcgtgttcaaactgcgcgagcacggcacaacggcacgcaccgaagtgatcgccggtttcaccaccttcctgacgatggtgtatatcgtttttgttaacccgcaaattctgggcgttgctggcatggataccagcgccgtctttgtgactacctgcctgattgctgcgcttggcagcattctgatgggcgtgttcgctaacctgcctgtggcgctcgccccggcaatgggtctgaatgccttcttcgcgttcgtggtcgttcaggcgatgggcctgccgtggcaggttggcatgggcgctatcttctggggcgctgttggcctgctgctgctgaccatcttccgcgtgcgctactggatgattgccaatatcccggtgagcctgcgcgtgggcatcaccagcggtatcggcctgttcatcggcatgatgggtctgaaaaacgccggtgtgatcgtggcgaacccggaaacgctggtgagcatcggcaacctgacctctcacagcgtgctgctgggcgtgctgggcttctttatcatcgccatcctcgcgtcccgcaatattcacgcggcggtgctggtgtccatcgtggtcaccacgctgctgggctggatgctgggcgatgtacagttccacggtatcgtctcagcgccaccgagcgtctctaccgttattggtcacgtggatctggctgggtcgtttaacctcggtctggcgggcgtgattttctccttcatgctggtgaacctgtttgactcctccggtacgctgatcggcgtgaccgataaagccggtctggcggatgagaaaggtaaattcccgcgcatgaagcaggcgctgtttgtggatagcgtctcctccgttgccggttctttcatcgggacctcctctgtgaccgcttacattgagtcctcttcgggcgtctccgttggcggtcgtaccggcctgacggcggtagtagtgggccttctgttcctgctggtgattttcctgtctccgctggcggggatggtcccaccgtatgcggccgcaggcgcgctgatctacgtaggcgttctgatgacgtccagcctggcgcgcgtgaagtgggaagatttgacggaagccgttccggcgtttattaccgcagtcatgatgccgttcagcttctcgattaccgaaggtatcgcgctgggctttatctcttactgcgtgatgaaggtcggtaccggccgcttccgcgagctcagcccgtgcgtgatcgttgtggcgctgctgtttgtgctgaagattgtgtttattgacgcgcactga

SEQ ID NO: 116953 - DNA, 666 bp, Enterobacter cloacae
atgtccggaattgaagcggtatttttcgactgtgacggtacgctggtcgacagtgaggtcatttgttcccgcgcgtatgtcgccatgttccaggaatttggtattacgctcgatctcgaagaggtgtttaaacgctttaagggcgtgaagctgtacgagatcatcgacatcattaacgaagagcacggggtggatctggtgaaagcggatctggaaccggtgtaccgcgccgaggtcgcacgcctcttcgacgccgagctggaagttatcgccggcgctaacgcgctgctggatgcgatgacggtgccgatctgcgtagtctctaacggcccggtcagcaaaatgcagcactcgctcggcaagctggagatgttgcaccacttcccggaaaaactgttcagcggctacgatatccagcgctggaagcccgatccggcgctgatgttccacgcggcgaaggcgatgaacgtcaacgtggagaactgcattctggtggatgactcatctgccggcgcgcagtcagggattgatgcggggatggaggtgttttacttctgcgccgatccgcacaacaagccgatcgaccatccaaaagtgacaacctttaccgatctggcgcaactgccagcgttgtggaaggcgcgcgggtgggatattacgcgttga

SEQ ID NO: 116954 - DNA, 726 bp, Enterobacter cloacae
atggacaacctcaatcttaataaacacatttccggccagtttaacgcagaactggaaagcattcgcacccaggtgatgaccatgggcggcatggtcgagcagcagctttctgacgcgatcacggcgatgcacaaccaggacagcgagctggctaagcgcgttattgaaggcgaccacaacgtcaatatgatggaagtcgccatcgacgaagcctgcgtgcgcatcattgcgaagcgtcagccgacggcgagcgacctgcgtctggtgatggcgatcatcaaaaccatcgccgagctggagcgtatcggtgacgtggcggataaaatctgccgtaccgcgctggagaaattctcccagcagcaccagccgctgctggtgagcctggagtctctcggtcgccacaccgtgcagatgctgcacgacgtgctggacgctttcgcgcgcatggatctggacgaagcggtccgtatctaccgtgaagacaagaaagttgaccaggaatacgaaggcattgtgcgtcagctgatgacctacatgatggaagattcacgtaccattccaagcgtactgaccgcgctgttctgcgcgcgctccatcgagcgtatcggtgaccgttgccagaacatttgtgaatacattttctatttcgtgaaggggcaggatttccgacacgtgggcggcgacgagctggacaagctgctggcgggtaaagatccgaaagagtga

SEQ ID NO: 116955 - DNA, 774 bp, Enterobacter cloacae
atgagtatggttgatactgccccgggtaagattcaggttcgtgatttgaacttctactacggcaaattccatgccctgaagaatatcaacctggatatcgcaaagaaccaggtaacggcattcatcggtccgtccggctgtggcaaatccacgctgctgcgcacctttaacaaaatgtattcgctctatccggagcagcgcgcagaaggtgaaattctgctggacggtgacaacatcctgaccaatacccaggatatcgccctgctgcgtgcgaaagtggggatggtattccagaaacccacgccgttcccgatgtcgatctatgacaacatcgcctttggtgtgcgtctgtttgagaagctctcccgtgcggatatggacgagcgcgtgcagtgggcattgaccaaggccgcattatggaacgaaaccaaagataaacttcaccagagtgggtactctctctccggtggtcagcagcagcgtctgtgcattgcgcgcggtatcgccattcgcccggaagtcttgctgctggatgagccgtgctcagccctggacccgatctcaaccgggcgtatcgaagagctgatcaccgagctgaagcaggattacaccgtggtgatcgtgacccacaacatgcagcaggctgcacgttgttctgaccacacggcgtttatgtacctgggcgagttgattgagttcagcgatacggacgcgctgttcactcgtccggcgaagaaacaaaccgaagattatattactggccgctacggttga

SEQ ID NO: 116956 - DNA, 891 bp, Enterobacter cloacae
atggcaactctcgacatgcaaaacaccgctcagcttgcggaatcccgtcgcaaaatgcagtcaaagcgccggattaaaaaccgcattgcgttgacgctttccatggcaacgatggcgttcggcctgttctggctgatctggatcctgatgtccaccatcacccggggtattgatggaatgtccctggcgctgttcaccgagatgacgccgccgccgaacacggcgggtggcggtctggcaaacgccctggcgggcagcggcctgctgatcctgtgggcgaccgttttcggtacgccgttgggcatcatggcgggtatctatctggcggaatatggccgcaagtcctggatcgctgaagtcatccgcttcattaacgacattctgctttctgccccgtcgattgtcgtgggtctgtttgtttacaccatcgtggtggcgcaaatggaacacttctccggctgggcgggtgtgattgcgctggcgctgttgcaggtgcctatcgttattcgtaccactgaaaacatgctgaaactggtgccggacagcctgcgtgaagcggcttacgcgctgggtacgcctaaatggaagatgatttcggcgatcaccctgaaagcgtccgtctcggggatcatgaccggtatcctgctggctatcgcccgtatcgccggtgaaaccgcaccgctgctgtttaccgccctctccaatcagttctggagcacggacatgatgcagccgatcgccaacctgccggtgacgatctttaaatttgcgatgagcccattcgcggaatggcagcagctggcctgggctggggtgctgatcatcaccctttgcgtactgttgctgaacattctggcgcgcgtcattttcgcgaagaagaaacacggttaa

SEQ ID NO: 116957 - DNA, 960 bp, Enterobacter cloacae
atggctgcaaccaagcctgcatttaaccctccgggtaaaaaaggtgacatgattttcagcgcgctggtgaaactggctgcgctgattgtgctattgctgctgggcggcattatcgtgtccctgattttctcctcctggccgagcattcaaaaatttggtttcgccttcctgtggaccaaagagtgggatgcgccgaacgatatttacggtgcgctggtgccgatttacggcacgctggtgacctcttttatcgccctgctgattgcggttccggtgagctttggtattgccctgttcctgacggaactggcgccaggctggctgcgacgtccgctgggtatcgccattgaactgctggcggccatcccaagtatcgtttacggcatgtggggcctgtttatcttcgcgccgctgtttgcaacgtacttccaggagccggtcggtaacgttctctctgccattccgtttgtgggggcgctgttctccggcccggcattcggtattggcattctggcggcaggtgtgatcctcgccataatgattattccgtacattgcggcggtcatgcgcgatgtcttcgaacaaaccccggtgatgatgaaagagtccgcctacggtatcggctgcaccacctgggaagttatctggcgcatcgtccttccgttcaccaaaaacggggtgattggcggcattatgctgggcttaggccgcgcgctgggtgaaaccatggcggtcacctttatcatcggcaacacctaccagctcgacagcgcctcgctttatatgccggggaacagtattacctctgcgctggcgaacgaatttgccgaagcggaatccgggctgcacgtcgccgcgctgatggaactgggtctgatcctgtttgttatcacctttattgtgctggctatctccaagctgatgattatgcgtctggctaaaaacgagggggcacgctaa

SEQ ID NO: 116958 - DNA, 1041 bp, Enterobacter cloacae
atgaaagttatgcgtaccactgtcgcaactgttgtcgccgcgaccttatcaatgagcgctttctctgcctttgcagcagcaagcctgactggcgctggtgcaaccttccctgcgccggtgtatgccaaatgggcggatacctaccagaaagagaccggcaacaaggtcaactatcagggtatcggctcctccggtggcgtaaaacaaattaccgcgaataccgttgatttcggcgcgtcagatgctccgctgtctgatgagaaactgaatcaggaaggcctgttccagttcccgaccgtaatcggcggcgttgtgctggctgttaacatccctggcctgaaatcaggcgagctggtgctggacggcaaaaccctgggtgacatctacctgggcaaaatcaaaaaatgggatgacgaagccatcactaagctgaacccgggcgttaagctgccttcgcagaatatcgcggtggttcgtcgtgctgacggctctggtacctctttcgtgttcaccagctacctggcgaaagtgaacgaagagtggaaatctaaagtcggttccggctctaccgttaactggccaaccggtctgggcggtaaaggcaacgacggtatcgcagccttcgtacagcgtctgcctggctctatcggctacgtagagtatgcctacgctaagcagaacaacctggcttacaccaaactggtttctgccgacggcaaaccggttagcccgaccgaagagaacttcgccaacgccgcgaaaggcgctgactggagcaaatccttcgcgcaggacctgaccaaccagaaaggcgacgatgcatggcctatcacgtctaccaccttcattctggtccacaaagagcagaagaagcctgagcagggtgctgaagtgctgaagttcttcgactgggcatacaaaaatggcggcaaacaggctaacgatctggattacgccagcctgccagacagcgtggttgagcagatccgtgctgcatggaaaaccaacgtgaaagacagcagcggtaaagcactgtactaa

SEQ ID NO: 116959 - DNA, 1830 bp, Enterobacter cloacae
atgtgtggaattgttggcgcagttgcgcagcgtgatattgctgaaatccttctcgaaggtttacgtcgtctggaataccgtggttacgactcagccggtctggctgtggtcgatgcagaaggtcatatgacccgtctgcgtcgtctcggtaaagtgcagatgctggcccaggctgcggaagaacatccgctgcacggtggcaccggtattgcacatacccgctgggcgacccacggtgagccatctgaaggcaacgcacacccgcatgtgtctgaacacattgtggtggtgcataacggcattatcgaaaaccacgaaccgctgcgtgaagaactgaaagcgcgcggctataccttcgtctctgaaaccgacaccgaagtgattgctcacctggtgcactgggagctggcaaagggcggtacactgcgtgatgcggtgctgcgcgctatccctcagctgcgtggtgcttacggtacggtgatcatggattcccgcgacccgtccacgctgctggccgcgcgttccggtagtccgatggtgattggtctgggcatgggtgaaaactttatcgcttccgaccagctggcgctgctgccggttacccgtcgctttatcttcctggaagagggagacattgccgaggtgacacgtcgcagcgtgaccgtattcgacacgaaaggcgagcaggttaagcgtcaggagatcgaatcaaacctgcaatacgacgcgggcgacaaaggtgcttaccgtcactacatgcagaaagagatctacgaacagccaaacgccattaaaaacaccctgaccgggcgcatcagccacggcgaagtggatctgagcgagctgggcgccaatgccaacgaactgctgggcaaagtcgagcacattcagatcgtggcctgcggtacctcttataactccggtatggtctcgcgctactggtttgaatccctggcgggcgtgccgtgtgatgtggaaatcgcgtctgagttccgctaccgcaaatctgcggtgcgtcgtaacagcctgatgatcaccctttctcagtctggcgaaacggctgataccctggcggcgctgcgtctgtctaaagagttgggttacctgggctcgctggccatctgtaacgtgccgggctcttcgctggtacgtgaatccgatctggcgctgatgaccaaagccggtactgaaattggcgtggcttccaccaaggcgtttaccactcagttaaccgttctgctgatgctggtggcgaaactggcgcgtctgaaaggtctggatgcctccgttgaacacgacattgtgcatggccttcaggcgctgccgagccgtatcgagcaaatgctgtctcaggacaaacgcattgaggcgctggcggaagatttctctgacaaacatcactccctgttcctggggcgtggcgatcagtatccgattgcgctggaaggcgcactgaagctgaaagagatctcttacattcacgctgaagcttacgcggcaggtgaactgaaacatggcccgctggcgctgatcgacgcggatatgccggttatcgtggtggcaccgaacaacgaactgctggaaaaactgaaatctaacatcgaagaagtgcgcgcccgtggtggtgttctgtacgtctttgcggataaagatgccggtttcgccagcagcgacaacatgcacatcatcgagatgccgcatgtggaagaggtgattgcgccgatcttctataccgttccgctgcaactgctggcttatcacgtcgcgctgatcaaaggcaccgacgttgatcagccgcgaaatctggcgaagtctgttaccgtagaataa

SEQ ID NO: 116960 - DNA, 1371 bp, Enterobacter cloacae
atgttaaacagtgcgatgagcgtggtgatccttgccgcaggcaaaggtacccgcatgtattccgatctgcctaaggtgctccacacgctggcaagaaagccaatggttcagcatgttattgatgcagcgaatgaattaggcgccagccaggtgcatctggtttatggacatggcggcgacctgctgaaaaaaacgctgcgtgatgacaatctcaactgggtgctacaggcagaacagttgggtacaggccatgcgatgcagcaggctgcacccttcttcgctgatgatgaagatatcctgatgctctacggcgacgtcccgctgatctccgttgaaaccctcactcgcctgcgtgaagccaaaccgcagggcggcatcggtttgttgaccgtcgtgctggacgatccaaccggctatggccgcattacgcgtgaaaacggcaaggtaaccgggattgttgagcataaagatgccactgacgaacagcgccagattcaggagatcaacaccggcatcctgattgcgaacggtgcggatatgaagcgctggctgtccagactcaacaataacaacgcgcagggtgaatactacatcaccgatattattgcgatggcgtaccacgaagggcgtgaaattgccgccgttcacccggctcgcatcagcgaaacggacggggtaaacaaccgtctccagctttctcgcctggagcgtatttaccagtccgagcaggcagaaaagctgttgctcgcgggcgttatgctgcgcgatccggcgcgtttcgatctgcgtggcacgctgacccacgggcgcgacgttgaaatagatactaacgttatcctggaaggtaacgtcacgttgggcaaccgcgtcaaaatcggcactggctgcgtgattaaaaacagcgtgatcggtgacgactgcgaaatcagcccgtacagcgtggtggaagatgcccatcttgaggcggcatgtaccatcggcccgtttgcgcgtctgcgcccgggcgctgagctgctggaaggcgctcacgtaggtaactttgtggaaatgaaaaaagcgcgtctgggtaagggctcgaaagccggtcatctgacctatctgggcgatgcggaaattggcgacaacgtaaacatcggtgctggaaccatcacctgtaactatgacggtgccaataagtttaaaaccatcatcggtgatgatgtgtttgtaggctccgatacccagctggtggcgcccgtcaccgtgggcaaaggcgtgaccattgccgccgggacaaccgttacgcgcgatgtggccgagaacgagctggtgttaagccgtgtgccgcaggtcagcaagcagggctggaaacgcccggtgaagaagaagtaa

SEQ ID NO: 116961 - DNA, 420 bp, Enterobacter cloacae
atggcaatgacttaccacctggacgtcgtcagcgcagagcaacaaatgttctctggtctggtcgagaaaatccaggtaacgggtagtgaaggtgaactgggtattttcccgggtcacgcaccgctgctcaccgccattaagcctggtatgatccgcatcgttaaacagttcggtcatgaagagtttatctatctgtccggcggcattcttgaagtgcagccaggcagtgtgaccgttctggccgataccgctattcgtggccaggatctcgacgaagcgcgagccctggaatcgaagcgtaaggctgaagagcacattagcagctctcatggtgacgtggattacgctcaggcgtctgcggagctggccaaagcgatcgcgaaactgcgcgttatcgagttgaccaaaaaagcgatgtaa

SEQ ID NO: 116962 - DNA, 1383 bp, Enterobacter cloacae
atggctactggaaagattgtccaggtaatcggcgccgtggtggacgtcgagttccctcaggacgccgtaccacgcgtgtacgacgcgcttgaggtacagaatggtaacgagagcctggtgctggaagttcagcagcagctcggcggcggtatcgtgcgtaccatcgccatgggttcttccgacggtctgcgtcgtggtctggaagtaaaagaccttgagcacccgatcgaagtcccggtaggtaaagcaacgctgggtcgtatcatgaacgtattgggtcagccaatcgacatgaaaggcgacatcggtgaagaagagcgttgggctatccaccgcgcggcaccttcctacgaagagctgtccagctctcaggaactgctggaaaccggcatcaaagttatcgacctgatgtgtccgttcgcgaagggcggtaaagtcggtctgttcggtggtgcgggtgtaggtaaaaccgtaaacatgatggagctgatccgtaacatcgcgatcgagcactccggttactccgtgtttgcgggcgtgggtgaacgtactcgtgagggtaacgacttctaccacgaaatgaccgactccaacgttctggataaagtatccctggtttacggccagatgaacgagccaccaggaaaccgtctgcgcgttgcgctgaccggcctgaccatggctgagaagttccgtgacgaaggtcgtgacgttctgctgttcgttgataacatctaccgttacaccctggccggtactgaagtatctgcactgctgggtcgtatgccttcagcggtaggttatcagcctacgcttgcggaagagatgggtgttcttcaggaacgtatcacctctaccaaaaccggttctatcacctccgttcaggcggtatacgtacctgcggatgacttgactgacccatccccagccaccacctttgctcacttagatgcaaccgtggtactgagccgtcagatcgcgtctctgggtatctacccggccgttgatccgctggactccaccagccgtcagctggatccactggttgttggccaggagcactacgacaccgcgcgtggcgtacagtccctgctgcaacgttatcaggaactgaaagacatcatcgccatcctgggtatggatgaactgtctgaagaagacaaactggtggtagcacgtgcgcgtaagatccagcgcttcctgtcccagccgttcttcgttgcggaagtattcaccggtgcaccgggtaaatacgtttccctgaaagacaccatccgtggctttaaaggcatcatggaaggcgaatacgatcacctgccagagcaggcgttctacatggttggttccatcgaagaagccgtggaaaaagccaaaaaactttaa

SEQ ID NO: 116963 - DNA, 864 bp, Enterobacter cloacae
atggccggcgcaaaagagatacgtagtaagatcgcaagcgtccagaacacgcaaaagatcactaaagcgatggagatggtcgccgcttccaaaatgcgtaaatcgcaggatcgcatggcggccagccgtccttatgcagagaccatgcgcaaagtgattggtcaccttgcgaacggtaatctggaatataagcacccttacctggaagaacgcgacgttaagcgcgtgggctacctggtggtgtcgactgaccgtggtctgtgtggcggcttgaacattaacctgttcaaaaaactgctggcggatatgaaaggctggtccgataaaggcgttcagtgcgatctggcactgattggctctaaaggcgtctctttctttaactccgttggcggcaacattgtcgctcaggtgaccggtatgggtgataacccgtccctgtccgaactgatcggcccggttaaagtgatgttgcaggcctacgatgaaggccgtctggacagactgtacgttgtcagcaacaaatttattaacaccatgtctcaggtgcctacgctcactcagatgctgccgttaccggcatcagaagatgacgagctgaaacagaaagcctgggattacctgtatgaacccgatccgaaaccgctgctggataccctgctgcgtcgttacgttgaatctcaggtttatcagggcgttgtagaaaacctggccagcgagcaggccgcacgaatggtggcgatgaaagccgcgaccgataatggcggcagcctgattaaagagctgcagttggtttacaacaaagctcgtcaggccagcattactcaggaactcaccgagatcgtctcgggggccgccgcggtttaa

SEQ ID NO: 116964 - DNA, 1542 bp, Enterobacter cloacae
atgcaactgaattccaccgaaatcagcgaactgatcaagcagcgcattgctcagttcaatgttgtgagtgaagctcacaacgaaggtactattgtttctgtaagtgacggtgttatccgcatccacggcctggccgattgtatgcagggtgagatgatttccctgccgggtaaccgttacgctatcgcactgaacctggagcgcgactccgtaggtgccgttgtgatgggtccatacgctgaccttgccgaaggcatgaaggttaagtgtactggccgtattctggaagtaccggttggccgtggcctgctggggcgcgttgttaacaccctgggtgcgccaatcgacggtaaaggtccggttgagcacgatggcttctccccaatcgaagttatcgcaccaggcgttatcgaccgtcagtccgttgatcagccagtgcagacgggttataagtccgttgacgccatgatcccaatcggtcgtggtcagcgtgaactgatcatcggtgaccgtcagaccggtaaaaccgcgatggcaatcgacgccatcatcaaccagcgtgattccggcatcaaatgtgtgtacgtggctatcggccagaaagcgtccaccatttccaacgtggttcgtaaactggaagagcacggcgcactgtctaacaccatcgttgtggtagcaaccgcgtctgaatctgctgcactgcaatacctggcgccatacgccggttgcgcaatgggcgaatacttccgtgaccgcggtgaagatgcgctgatcgtatacgatgacctgtctaaacaggccgttgcttatcgtcaggtttccctgctgctccgtcgtccaccaggacgtgaagcattcccgggcgacgtattctacctccactctcgtctgctggagcgtgcttcccgcgttaacgcggaatacgtcgagaacttcaccaaaggtgaagtgaagggtaaaacaggttctctgaccgctctgccgatcattgaaacccaggcgggtgacgtttctgcgttcgttccgaccaacgtaatctccattaccgatggtcagatcttcctggaaaccaacctgtttaactccggtattcgtccggcggttaacccgggtatctccgtatcccgtgtgggtggtgctgctcagaccaagatcatcaagaaactgtccggtggtatccgtaccgcgctggcacagtatcgtgaactggctgcgttctctcagttcgcatccgatctggacgaagcaacccgtaaacagctgagccacggtcagaaagtgaccgagctgctgaagcagaaacagtacgcgccaatgtctgttgctcagcagggcctggtactgttcgcggctgaacgcggttacctcgaagatgtggaactggcgaaaatcggtagcttcgaagccgctctgctggcttacgtcgaccgtgatcacgctccgctgatgcaagagatcaaccagaccggtggctataacgacgaaatcgaaggcaagctgaaagctatcctcgattccttcaaagcaacccaatcctggtaa

SEQ ID NO: 116965 - DNA, 534 bp, Enterobacter cloacae
atgtctgaatttgttacggtagctcgcccctacgccaaagcagcttttgactttgctgtcgaacaccaaaatgtcgatcgctggcagaatatgctggcgtttgccgctgaggtgacgaaaaacgaacaaatggccgagttgctttctggtgcgttagcgcctgaaaccctcgccgcgtcgtttatcgccgtgtgcggagagcaactggatgccaacggccagaacctgattaaggtgatggcggaaaatggtcgtctccgtgtgctcccggatgttctcgagcagtttgagcacttacgtgcccttagtgaagctaccgctgaagttgaagtaacttctgcgactgaactgagtaacgaacagcttgcgaaaatcaccgccgcgatggaaaaacgtctgtcacgcaaagttaagctgaattgcaaaatcgataagtctgtaatggcaggcgtaatcatccgctcgggtgatatggtcattgatggcagcgtacgcggccgtcttgagcgccttgcagacgtcttgcagtcttaa

SEQ ID NO: 116966 - DNA, 471 bp, Enterobacter cloacae
gtgaacatgaacgcaacaatcctcggccaggccatcgcgtttattctctttgtctggttctgcatgaagtatgtatggccgcctttaatggctgccatcgaaaaacgtcagaaagaaattgctgacggtctggcttccgcagaacgcgctaagaaagatttggaccttgcacaggccaacgcgacagaccagctgaaaaaagcgaaagctgaagctcaggtaatcattgaacaggctaacaaacgccgttctcagatcctggacgaagccaaagctgaagcagaacaggaacgtactaagatcgtgacacaggctcaggctgaaattgaagctgagcgtaaacgtgctcgtgaagaactgcgtaagcaggttgcgattctggctgttgctggcgccgagaagatcatcgaacgttccgtggatgaagctgctaacagcgacatcgtggacaaacttgtcgctgaactgtaa

SEQ ID NO: 116967 - DNA, 240 bp, Enterobacter cloacae
atggaaaacctgaatatggatctgctgtacatggctgccgctgtgatgatgggtctggcggctatcggtgctgcgatcggtatcggcatcctcgggggcaaattcctggaaggcgcagcgcgtcaacctgatctgattcctctgctgcgtactcagttctttatcgttatgggtctggtggatgcaatcccaatgatcgctgtaggtctgggtctgtacgtgatgtttgctgtcgcgtag

SEQ ID NO: 116968 - DNA, 816 bp, Enterobacter cloacae
atggcttcagaaaatatgacgccgcaggattacataggtcaccatctgaataaccttcagctggacctgcgtacattctcgctggtggatccacataaccccccggccaccttctggacgatcaacatcgactccatgttcttctcggtggttttgggtcttctgttcctggccatgttccgcagcgttgctaaaaaggcgaccagcggtgttccagggaaattccagacgttcatcgagatgatcatcggcttcgtccatggcagcgtgaaagacatgtaccatggtaagagcaaactgattgctccgctggccctgaccgtgttcgtttgggtcttcctgatgaacctgatggacctcctgcctatcgatttcttaccttggatcggtgagcacgtactcggcctgcctgcactgcgcgtggttccgtctgccgacgtgaacatcaccctgtcgatggcgctgggcgtatttatcctcattctgttctacagcatcaaaatgaaaggcgtaagcggctttgtgaaagagcttaccttgcagccgttcaaccactgggcgtttattccggtcaacctgatcctggaaggcgttagcctgctgtccaaacctgtttcactgggtctgcgactgttcggcaacatgtatgcgggtgagctgattttcattctgatcgcgggtcttctgccgtggtggtcacagtggattctgaatgtgccatgggccattttccacatcctgatcattacgctgcaagcctttatcttcatggttctgacgatcgtctatctgtcgatggcgtctgaagagcactga

SEQ ID NO: 116969 - DNA, 381 bp, Enterobacter cloacae
atgtctgtgtcgctcttgagtagaaacgttgctcgtaagcttctgttcattcagtttctggctgtgatagcaagtggactgctgtttagcctcaaagaccccttctggggcatctccgccgcgtgcggaggtttggcggtggttctgccaaacgtgttgtttatgatttttgcctggcgtcatcaggcgcatacacccgccaaaggccgcgtggcctggtccttcgctctcggcgaagtgtgtaaggtgttgctgacctttgctctactggtgatggcgctggcggttttgaaagtggtattcatgccgctgatagcaacgtgggttttggtgctggtggtacaagttctggctccagctgtaatcaataacaaagggtaa

SEQ ID NO: 116970 - DNA, 624 bp, Enterobacter cloacae
gtgctcaataaactctctcgtctgctggaacaggcaggtatttcgctcaccgatcaccagaaaaatcagctggtggcctatgtcgatatgctgaacaaatggaataaagcgtacaacctcacctccgtacgcgatcccaacgagatgctgattcgtcatattctcgatagcatcgtcgtggcgccatatctgaacggggaacgttttatcgacgtgggcaccggcccgggcttgccgggcgttccgttgtctattgttcgaccggagagtcaattcacgctgctggacagcctgggcaagcgcgtacgctttttacgccaggttcagcatgagctgaagctggaaaacatcacgcccgtgcagagcagggtagaggagttcccggctgagccaccgtttgacggcgttatcagccgcgcatttgcgtcactcaatgacatggtgagctggtgcaaacacctgccggcggagaaggggcgtttttatgcgctgaaagggcaacttccgggggacgaaatcgagcagcttccggacggttttgctgtcgaatccattgagaaacttcagatccctcagctcgaaggtgagcgtcatctggtgataattaaaccaaacactttttaa

SEQ ID NO: 116971 - DNA, 1890 bp, Enterobacter cloacae
atgttttatcaggatccttttgacgtcatcatcattggcgggggtcacgcaggcactgaggccgcaatggccgcagcgcgaatgggtcagcagaccctgcttttgacacacaatatcgacacgctgggacaaatgtcctgtaatccggcgattggcggcattgggaaaggacacctggtaaaagaagtggatgcacttggcggcctgatggcgaaagcgatcgatcatgcaggcattcagtttagaatactaaacgcgagtaaagggcctgctgttcgtgcgacccgcgcacaggcagaccgcgtgctttaccgtcaggctgtgcgcaccgcgctggagaaccagccgaacctgatgatcttccagcaggcagttgaagatcttatcgtcgagaacgatcgcgtcgtgggtgccgtaacccagatggggctcaagttccgcgcaaaagcggttgtgctgaccgtcgggacattcctggacggaaaaattcatatcggcctggataactacagcggtggccgtgctggcgatccgccgtctatcccactttcacgtcgtctgcgtgaactgccgctgcgcgtcagccgcctgaaaaccggtacaccgccgcgtattgacgcgcgcaccattgatttcagcgtgctggcgcaacagcacggtgataatccgatgccggtgttctcgttcatgggcaatgcggctcagcatccgcagcaggtgccgtgctacatcacgcacaccaatgaaaaaacccatgacgtgatccgcaataacctcgatcgcagcccaatgtacgccggtgtgatcgaagggatcggcccacgttattgcccgtcgatcgaagacaaagtgatgcgatttgccgatcgtaaccagcaccagatcttcctcgaacctgaagggctgacctctaacgaaatttatccaaacggcatctccaccagcctgccgttcgacgtgcagatgcagattgtgcgttcaatgcagggcatggaaaacgcgaagatcgttcgtcctggctacgctattgagtacgatttcttcgatccgcgcgacctgaagccgacgctggaaagcaaattcatccagggtctgttcttcgcaggccagattaacggtaccaccgggtacgaagaagctgccgcacaagggttgctggccggtctgaacgccgctcgcttctctgccgagaaagagggctgggcaccggcgcgttctcaggcctacctgggcgttctggtcgacgatctctgcacgctggggaccaaagaaccgtaccgcatgtttacttctcgtgcggaatatcgcctgatgctgcgcgaagacaatgccgatctgcgtctgactgaggtgggccgtgaattgggtctggtggatgacgaacgctgggcgcgcttcaacgagaagctggagcgtatcgaacaggaacgtcagcgcctgaaaaccacctgggtgaatccgcaggcggaaaccgctgccgaagtaaacgctcacttaacagcaccgctgtcgcgcgaagccagcggggaagatctgctgcgtcgtcctgaagtcacttacgagaatctggtcaaactgaccgcgttcgcgccgggccttgaagacgcggaagcggctgaacaggtcgagatccaggtgaaatacgaaggctacatcgcgcgtcagcaggatgagatcgaaaaacagcagcgcaacgaaaacacgctgctgccggaaatgctggactatcgtcaggtgacgggcctttccaacgaagtgatcgctaagctgaacgatcacaaacctgtgtcgattggccaggcctcacgtatctccggcgtcacacctgccgcgatttcgattctgctggtgtggctgaaaaagcagggtatgctgcgccgcagcgcgtaa

SEQ ID NO: 116972 - DNA, 450 bp, Enterobacter cloacae
atggcggacattactcttatcagcggcagcaccctgggcggtgcggaatatgtagcggaacatctggctgagaagctggaagatgcgggcttttcaacacaaacgctgcacggaccgctgctggaagatctcccgactgacggggtctggctgctgatcacctctacgcacggcgcgggcgatctgccggataacctgcaacctttatatgacgaactgctggaacaacagcccgatctgtcaaacgtccggtttggcgctgtggggatcggcagccgtgaatatgacactttctgtggcgccatagagaaagtagaagctgcggtgaccgcctgcggagcaaaacagctgggtgaaacgctgaagatcaacatcctcgatcatgacattcccgaagatccagccgagatctggctcgcggaatggaaaaatttactcaaaaacgattaa

SEQ ID NO: 116973 - DNA, 459 bp, Enterobacter cloacae
atggaaaattatcagatcgacaatctggaccgcggcattctggaagcgctaatggccaacgcacgcaccgcgtatgccgaactggcgaaacaatttggcgtcagcccggggaccattcacgttcgcgtcgagaaaatgaagcaggccgggatcatcaccggcgcacgcattgatgtcagcccgaagcaacttggctacgacgtctgctgcttcattggcattattctgaaaagcgccaaagattacccctccgcgctggagaaactgaacgcgctggatgaagtcaccgaggcgtactacaccaccgggcactacagcatctttataaaggtgatgtgccgatccattgacgccctccagcaggtacttatcaacaagatccaaacaatcgatgaaattcagtccactgaaaccctgatctccctgcaaaacccgatcatgcgtactatccgcccgtga

SEQ ID NO: 116974 - DNA, 993 bp, Enterobacter cloacae
atgaaaaccgcttacatcgcaaaacaacgccagatcagtttcgtaaaatcccatttttcccgccagctggaagagaagcttggccttattgaagttcaggcgccgattctgagccgcgtgggtgacgggacgcaggataacttgtctggttgcgaaaaagcggtacaggtaaaagtgaaaacactgccagacgcccagttcgaagtggttcattccctggcgaagtggaagcgtcaaaccctgggacaacacgacttcagcgcgggcgaagggctttacacgcacatgaaagcccttcgccccgatgaagaccgcctttccccgattcactctgtctacgttgaccagtgggactgggagcgtgtaatgggagatggcgagcgtcacgtcggtacgctgaaatccactgttgaggcgatctacgccgggatcaaagcaaccgaagcggccgtgagcaaagagtttggtctggcaccgttcctgccggaaacgatccactttgttcacagtcaggaattgctgagccgtttcccggatctggatgccaaaggccgtgaacgcgcgatcgccaaagagctgggcgcggtattccttatcggcattggcgggaaattgtctgatggtaaacgtcacgacgtccgtgcgccggattacgatgactggagcaccgtgggcgaaagcgaatatgccggtctgaacggcgatattctggtctggaacccggttctggaagatgcgtttgaactctcttcgatggggatccgcgtggatgctgaagcactgaagcgtcagctggccgtgaccggtgatgaagatcgtctgcaactggagtggcaccaggcactgctgcgcggtgaaatgccgcagaccatcggcggtggtattggccagtctcgtctgaccatgctgctgctgcaactctctcacattggtcaggtacagtgtggggtctggccgcagcaggtacgtgagagcgtcggttctcttctttaa

SEQ ID NO: 116975 - DNA, 1452 bp, Enterobacter cloacae
atgctaacgctggacacgcttaacgtcatgctggcggttagcgaggaagggttgatcgaagaggtcgtcattaccctgctcgcttcaccgcagctggcggccttctttgaaaaattcccgaagctccgaaaagcaatgacggacgatctgccccgctggcgcgataacctgcgacagcggtttaaggagacggaagtcccgccggaactgacagaggaagtggctggttaccagcagtgccagcggctttcaacaccgcagtttattgcccagctacagcaaaccctgacgctgcttgataacgttcactccccgtttgccagccaggccagagcgctggtcactgacaaccccagctttactcccgccctgcatacgctgtttttacagcgctggcgtctgagccttgtggtccaggccacggcccttaatcagcagttgctggacgaagagcgcgaacagttgctcagtgaagtccaggagcgaatgaccctgagcggccagttagaacaggtgctggtggagaatgaaaacgccgccggtcgactctgggatatgagtgccggccagttaaagcggggcgattatcagctgatcgtgaagtacggcgactttctggcgcaacagccggagctgatgaagcttgcagaacagctcggccgctcccgggaggcccggtcggtcccaaagaaagatgcgccgatggagaccttccgtacgctggtacgcgaaccctccaccgtaccggagcaggtggacgggctacagcaaagcgatgacatcctgcgcctgctgcctacggaactcagcacgctgggcatgaccgaactggagtatgagttttatcgtcggctggtggaaaaacagctcattacctatcgactgcatggcgaagcctggcgcgagaagatcagccagcgtccggtggtacaccaggattttgatgagcaaccgcgcggcccattcattgtttgcgtcgatacgtctggatcgatggggggctttaatgaacagtgtgcaaaagcgttctgcctggctctgatgcgcgtggcgcttgccgatcgtcgtcgctgctacatcatgctcttttccagcgaagttgttgggtatgaactgaccagcccacaggggctggagcaggcgatccgctttttaagccagcgctttcgcggcggcaccgatctggccagctgttttcgcagcatcattgagcgcatgcagggcggagactggtacgacgcggatgcggtggtgatttccgattttatcgcccagcggctgccggacgacgtcgtgaataaagtgaaggagatgcagcgcgtgcaccagcaccgtttccatgccgtggcgatgtctgcacatggaaaacccggcatcatgcgcatcttcgatcacatctggcgctttgataccgggttgcgtagccgcctgctcagacgctggcgacgttaa

SEQ ID NO: 116976 - DNA, 1497 bp, Enterobacter cloacae
atggctcactcacatttattagcagaaagaatttcccgcctcagcagtgcgctggagaaaggcctttacgagcgtagccacgccattcgcctctgtttactggcggcgctgagtggggaaagcgtatttctgctgggcccgccgggcattgccaaaagtctgatcgcacgccgcctcaaattcgctttccagaacgcgcgcgcattcgagtatttgatgacgcgcttctccacgccggaagaagttttcggcccactctccattcaggcgttaaaagatgagggacgctatgaacgtctgacggcgggctatcttccggaagcggaaatcgtctttcttgatgagatctggaaagccggcccggccatactgaataccctgttgacggcaattaacgaacgccgcttccgcaacggcgccagcgaagagaagatccccatgcgcctgctggtggccgcgtctaacgaattgcccgaagccgacagcagcctggaagcgctgtatgaccgtatgctgatccgtctgtggctggataaagtccaggataaatcaaacttccgttccatgctggtaagccagcaggatgaaaacgaaaacccggtggcagcgtcattgcaggtcacggacgaggaataccaccagtggcaggaggagatcggcaagataaaactgcccgatcccgtttttgagctgatcttcatgctgcgccagcagcttgatttgctgccctccgcgccgtacgtctccgatcgtcgctggaaaaaagccattcgcctgctccaggcaagcgcgctgtttagcggccgcgatgctgtcgccccaatcgatctgatcctgctgaaagactgcctgtggcacgacgcagaagggatgaatctgatgcagcagcagctggacgttttgatgaccggacacgcgtggggtcaacagtcgatgcttaatcaactgggcgcgattgcccaacgtcgccttcagctccagcagcagcaaagtgacaaaaccgcgctgaaggtgaaccgtcttggcgggatgtttgcccgtaaaccgcactatgaactgcccgccgggctgactgacgcctcgctcacgcttcttcttcagcaaccgctgaagcttcatgatatgcaggttgtgcacgtgacgatcgaacgcgttgcgctggttcagtggctggataaaggcggtgagatccgcggtaaactcaacggtatcggctttgcacagccgctgtcgatggaagtcgacagcagccagcacctagtgatccgtgacgtcagccttcagggatcgcgcctggcgctgccgggcacggcctccgatactgttccggaggagatcaaacagcagctcgacgcgctggataacgaatggcatcagcagcacacgcgcttcagcgagcagcagaaatgcctctttatccatagcgactggttaggtcgcattgaagccagcttgcaggatgtcagcgcgcagatcaaacaggcgcgtcaatgctaa

SEQ ID NO: 116977 - DNA, 1869 bp, Enterobacter cloacae
atgagcactgataataagcaatcattacccgctgtaacgcttgcggcgatcggggttgtctacggtgatatcggcaccagcccgctttatacgcttcgtgaatgtctgtccggtcagtttggttttggtgtagagcgtgacgccgtatttggtttcctctcgctcatcttctggctgctgatcctggtggtctcccttaagtatctctctttcgtaatgcgggctgataacgcgggcgagggcggtattctgaccctgatgtcccttgccgggcgcaatacgtctgcaagaatgacctccgtgctggtcatcatcggcctgattggcggcagcttcttctatggagaagtcgtgattacgccggcgatttctgtaatgtcggccatagaggggctggagattgtcgcgccacagcttgatacgtgggtggtgccactcgctattatcgtgctgacgttgctgtttgccatacaaaaacacggtaccgggctggtgggtaagctgttcgcgcctattatgctggcctggttcctgatcctggcggcgctgggcttacgcagtattatcgccaacccggatgtcctgcacgcgctgaacccaatgtgggcggtgcatttcttccttgaatataaagtggtgtcgtttgtggcgctgggcgcggtggtgctgtccattaccggtgttgaagcgctgtatgcggatatgggccacttcgggaaactccctattcgcgtcgcctggtttagcgtggtcttgccatcactggtgctgaattacttcggtcagggcgctctgctgcttgcacaccctgaagcgattaaaaacccgttcttcctgctggcgccggactgggcgctggttccgatgctgatcctggcgacgctggcgacggtcattgcctctcaggctgtcatttccggcgtattctccctgacgcgtcaggccgtgcgtttgggttatctctccccaatgcgcattatccatacctcggagatggagtctggccagatctacattccgttcgtcaactggctgctctatttcgcggtggtgattgttatcgtcagctttgagcactccagtaatctggcggcggcgtacggtatcgcggtaaccggaacgatggtgttgacctctattctctccactaccgtggcgtaccgtaactggcactggaataagttcctcgtggggctgatcctggttggcttcctctgcatcgacgtgccgctgttttctgcgaacctcgacaagattgtctccggcggctggctgccgctgacgctgggtctggtgatgtttattgtgatgacgacgtggaagagcgaacgtttccgcctgctgcgtcgtatgcacgagcacggtaactctctggaggcgatgatcgcctcgctggagaaatccccaccggtgcgcgtgccgggcacagcggtgtatatgtctcgcgcgctgaacgtgatcccgtttgcgctgatgcataacctcaagcacaacaaagtgctgcacgagcgcgtgatcctgctgacgctgcgtaccgaagatgcgccgtacgttcacaacgtgcgtcgcgtacagattgaacagctatcgccaaccttctggcgcgtggtggcaagctacggctggcgcgaaacgccgaacgtggaagaggtgttccaccgctgcggtctggaaggcctgagttgccgcatgatggagacgtcgttctttatgtcccacgagtcgctgatcatcggcaagcgcccatggtatctgcgcctgcgcggcaagctgtatctcattctgcaacgtaacgccctgcgtgcgcctgaccagtttgagatcccgcctaaccgcgtgattgagctggggacgcaggtcgagatttaa

SEQ ID NO: 116978 - DNA, 420 bp, Enterobacter cloacae
atgaagaaaggcacagtactcaactcagaaatctcatcggtgatttcccgtcttgggcataccgatacgctggtggtttgcgatgcaggcttaccggttccgcgcagcacaacccgtatcgatatggcgttaacgcagggcgtaccctcgttcatgcaggtactggaagtggtcaccgcggagatgcaggttgaggcggccattctcgcggcggaaatcaaacaacataatccgcaactccacgaaacgttgctcagccacattgagcaactgcaacagcaccagggaaacaccatagaaattcgttacacaacgcacgagcagttcaaacaacaaaccgcagacagtcaggcggtgattcgcagcggggagtgctccccgtatgcgaatatcattctctgtgctggcgtcaccttctga

SEQ ID NO: 116979 - DNA, 1506 bp, Enterobacter cloacae
atggacgtattactgcaactcaaagggatcgataagtcgttcccgggcgtaaaagccctctccggcgcggcgctgaacgtctattccgggcgcgtcatggcgctggtgggcgaaaacggcgccggcaaatccaccatgatgaaagtgctgaccggtatctaccaacgcgatgccggttcgctgctgtggctgggtaaagagaccacctttaacggcccgaaatcctctcaggaagcgggcatcggcatcatccaccaggagttgaacctgatcccgcagctcaccattgcggagaacatcttcctcggccgtgagttcgtgaaccggtttggcaaaatcgactggaaaaccatgtatgccgaagcggacaaactgctggcgaagctgaatctgcgctttaagagcgaccgactggtgggcgacctttccatcggcgatcagcagatggtggaaatcgcgaaggtgctgagcttcgagtcgaaggtcatcattatggatgaaccgaccgacgccctgaccgataccgaaaccgaatccctgttccgcgtgatccgtgagctgaaatcccagggccgcggcattgtctatatctcacaccgcatgaaagagatcttcgagatctgcgacgacgtcaccgtctttcgcgacgggcagtttattgccgagcgcgaagtggcaaccctgaccgaagataccctgattgaaatgatggtgggacgtaagctcgaagatcagtatccgcatctggagaaagcgccgggagaaatccgcctgaaggtggataacctctgcgggccgggcgtgaatgacgtctcctttactctgcgcaagggcgagatccttggcgtcgcgggcctgatgggcgcggggcgaaccgaactgatgaaagtgctctatggcgcactgccgcgcaccagcggctacgttacccttgacggccatgaggtggtcacccgctcgccgcaggatggcctggcgaacggcattgtctatatttccgaagaccgtaagcgcgacggcttagtgctgggcatgtcggtgaaagagaacatgtccctgacggcgctaggctatttcagccgcagcggcggcagcctgaaacacaaagatgagcagcaggcggtcagcgattttatccgtctctttaacgttaaaaccccatcgatggagcaggcgattggcctgttgtccggcgggaatcagcagaaagtggcgattgcccgcgggctgatgacgcgcccaaaagtgttgatccttgatgaacctacccgcggcgtggacgtgggcgcgaagaaagagatatatcagctgattaaccagttcaaggccgacggtctgagcatcattctggtctcttccgagatgccagaggtattaggcatgagcgatcgcattatcgtcatgcatgaagggcatctcggcggtgaattcactcgcgagcaggccacccaggaagttctgatggctgccgctgtgggcaagcttaatcgcgtgaatcaggagtaa

SEQ ID NO: 116980 - DNA, 966 bp, Enterobacter cloacae
atgactacccaggctgtttctggtcgccgctatttcacaaaggcatggctgatggaacaaaaatcgctgattgccctgctggtgctgatcgcgattgtctcgaccatgagcccgaacttttttaccgtcaataacctgttcaacattcttcagcagacctccgtcaacgccattatggcggtggggatgacgctggtgattttgacctcgggtatcgatctgtccgtcggttccctgctggccctcaccggcgcgatcgccgcgtcgattgttggtattgaggtcaacgcgctggtggccgttgccgctgccctggcggcaggtgcggcaattggcgccgtaaccggcgtgattgtggcgaaaggtcgcgttcaggcattcatcgccacgctggtgatgatgctgctgctgcgcggtgtgaccatggtgtacaccaacggtagcccgattaataccggttttaccgataacgccgatctgtttggctggttcggtatcggtcgcccgctgggtgtcccgaccccggtctggatcatggctatcgtcttcctggcggcatggtacatgctgcaccatacccgtctgggtcgttatatctatgcgctgggcggtaacgaagcggcaacgcgcctgtccggtatcagcgttaataaagtcaaaattatcgtttactccctgtgcggcctgctggcgtctctggcgggcatcatcgaagtggcgcgcctctcctccgcgcagccaacggcgggtacgggctatgagctggatgccatcgcggcagtggttctgggcggtacgagccttgcgggtggtaaaggtcgcattgttgggacattgatcggcgcactgatcctcggtttcctgaataatggtttgaatttgttaggtgtttcctcctattaccagatgatcgttaaggcagtggtgattttgctggcggtactggtagacaacaaaaaacagtaa

SEQ ID NO: 116981 - DNA, 891 bp, Enterobacter cloacae
atgaacatgaaaaaactggctaccctggtttctgctgtcgcgctgagcgcaaccgtaagtgctaacgccatggcgaaggacaccatcgcgctggttgtctctaccctgaacaacccgttcttcgtctccctgaaggatggcgcgcagaaagaagcagataaactgggctacaacctggtggtgctggattctcagaacaacccggcgaaagagctggctaacgttcaggacttaaccgttcgtggtaccaaaatcctgctgatcaacccaaccgattccgacgcggtcggtaacgccgtgaagatggcaaaccaggcgaagatcccggtcatcacccttgaccgtcaggcaacgaaaggggatgtggtcagccacattgcgtctgataacgtactgggcggtaaaatcgccggtgactacatcgcgaagaaagcaggtgaaggcgcgaaagtgatcgagttgcaggggatcgccgggacttccgcggcccgtgaacgtggtgaaggtttccagcaggctgtagcggcgcacaaattcaacgtgctggcgagccagccggcagacttcgaccgtacaaagggcctgaacgtcatgcagaacctgctgaccgcgcatcctgatgtgcaggcggtattcgcacagaacgacgaaatggcgctcggtgcgctgcgtgcgctccagactgcgggtaaatcagatgtgatggttgtcggatttgacggcacgccggatggtgaaaaagcagtaaatgatggcaaactggctgcgaccatcgctcagctgcctgagcaaattggcgcgactggcgtgcaaactgccgataaagtgctgaagggcgaaaaagttcaggccaaatatcctgttgacctgaaactggtcattaagcagtaa

SEQ ID NO: 116982 - DNA, 930 bp, Enterobacter cloacae
atgaaaaccgcaggcaacctcgtcgtccttggcagtatcaatgccgatcacattcttaaccttgaaacgttccccactccgggcgaaaccgtcactggcaatcagtatcaggtggcgttcggcggtaagggcgcaaaccaggcggttgccgccggacgcagcggggcgaatatcgcgtttatcgcctgtacgggtgatgacgataccggcgagcgcgtacgcaaacagctggcaagcgacaacatcgacattgcacccgtcagcgtggttgcaggggaatctaccggcgtggcgctgattttcgtcaatgcggaaggtgagaatgtcatcggtattcatgcgggggctaatgccgcgttaacgactgaacgcgtcgaagcgcagcgtggaatcatcgccggagcggaagccctgctgatgcagctggagtcaccggttgaaagcgtgctggccgccgcgaaaattgcgcatgaaaatcatacgtctgtcgtacttaaccctgcgcctgcccgtgtattatcagacgagctgctggcgctggtggatatcatcaccccgaacgaaaccgaagcggaaaagctgacgggtatccgtgtcgaaaatgatgacgatgccgcgcgtgccgcgcttgcactgcatgaaaaaggcatcggcaccgtaatcatcaccctcggcagccgtggggtgtgggctagcgtcaatggcgaaggccgtcgcgtaccgggctttaaggtcaaagccattgataccatcgccgcaggagacaccttcaacggtgcactggtaacggcgctgctggaaggaaaagcaatggatgacgcgatccgcttcgcgcatgccgccgctgcgattgcggtgacgcgtaaaggcgctcagccttctgttccatggcgtaaagagattgatgaattcttaagtcagcaggggtaa

SEQ ID NO: 116983 - DNA, 984 bp, Enterobacter cloacae
atgaaagatgtcgcccgtatggcgggcgtttctacctcgactgtctcccacgtaatcaataacgatcgcttcgtcagcgaggcgattcgggagaaagttgacgctgcaattaaagaactcaactatgcgccgtctgcgctggcccgcagcctgaagctcaaccagacgcgcaccatcggcatgctgatcacggccagtaccaaccctttttattctgaactggtgcgcggcgtggagcgcagctgcttcgagcgcggctacagcctggtgctgtgcaataccgaaggcgatgagcagcgcatgaaccgtaacctggaaacgctgatgcaaaaacgcgtcgacgggctgctgctgctctgtaccgaaacgcatcaaccctcgaaagagatcatccagcgttatccttctattcccacggtgatgatggactgggcgccgttcgacggcaccagcgatctgatccaggataactcgctgctgggcggcgatatggcgactcagcatctgatcgataaaggtcatacccgcattgcctgtattaccggcccgctggataaaaccccggcgcgcctgcgtctggaaggctatctttcggccatggaacgggcggggcttgccattcctgatggctatcgcatcaccggcgatttcgaatttaacggtggatttgaagcaatgcagaaactgctggcgcaagagctgcgcccgcaggcggtgtttatcggtaacgatgcgatggcattcggagcttatcaggcgctgtatcaggcgggattacgtgttccggacgacatggcgatcgtcggttacgatgatatcgaactggcgcgctacatgacgccgccgctgaccaccatccatcagccgaaagatgaactgggcgagctggccatcgatgtgttgatccaccgcatggcccagcccacgctacaacagcaacgtttgcagcttactcctgttctgatggaacgcggttcggtttag

SEQ ID NO: 116984 - DNA, 1434 bp, Enterobacter cloacae
atgacagagaaaaaagcacgcagtatggccggactgccgtggattgcagccatggcgttctttatgcaggcactggatgccactatcctcaataccgcccttcccgccatagcccaaagccttaaccgctccccgctggcgatgcaatccgccatcatcagctacaccctgacagtggcgatgcttattccggtcagcggctggctggccgatcgttttggcacacgcaaagtattcatgctggcggtgacgctgttcacgctcggttctctggcttgcgccctctccacctctctgacggaactggttatcttccgcgttctacaggggataggcggcgcgatgatgatgcccgtcgcgcgtctggcgttattacgcgcctatccgcgcagcgaactgctcccggtgctcaactttgtgactatgcctggcctggtcggcccgatacttggcccggttctcggcggcgtactggtgacctgggctagctggcactggatcttcctgattaatattccgattggtgtggcagggctgatttatgcccgcaaatatatgccgaacttcaccacgccaagacgcagcttcgatatgggtggtttcttcctgtttggcctgagcctggtcctgttctccagcgggatggagctgtttggcgagaaaatcgtagcgacgtggctggcgctggccgtcatcctcagcggtattctgctgttccttctatatatacgtcatgcgcgtcgccatccgacaccgcttatctctttatctctgtttaacacccgaacgttctccgtcgggatcgcgggcaatattgcctcgcgtctgggcacgggctgcgtaccgttcctgatgccgctgatgctccaggtcggtttcggctatccggccctgattgctggctgcatgatggcacccacggcgatgggctcaattctggcaaaatcgacggtcacgcaggtgctgcgctggtttggctatcgtaagacgctggttggcgtgacgatctttatcggattgatgattgcgcagttctccctgcaatctgcggcgttaccaatctggatgctgatcctgccgctgtttgtgctgggtatggccatgtcgacgcagtttacgtcgatgaacaccatcacccttgcggacctcaccgacgagaatgccagcagcggcaacagcgtactggcggtcactcaacagctgtcgatcagcctcggggttgccgtgagcgcggcggtactgcggttttatgaagggttcgagggaactaataccgttgagcagttccactatacctttatcactatgggcgcgcttaccgtggtatcggcggtggtctttatgttgttaaaaccaaaagacggccggaacctgattaaagagcgtcacaaagagaaggctaaaccgaaccgcgttccatcagaacaggagtaa

SEQ ID NO: 116985 - DNA, 708 bp, Enterobacter cloacae
atgccattaagcgcacaacagctggcagctcaaaaaaacctgtcctatgtgctggcagagaaactggcgcagctgatcttagcgggtaaatatgctccaggtagcatcctgcccagcgagatggagctgggagatcagtttggcgttagccgtaccgccgttcgcgaagcggtaaaaacattaacggcgaaagggatggtgcttccacgtccgcgcattggcacccgcgttatgcctcagggaaactggaactttctcgatcaggagttactcacctggtggatgaccgaagataactttaatcaggtcgtcgatcactttctggtcatgcgcagcagtcttgagcctcaggcctgcctgcttgccgccacgctcggcacagcagagcaaaaagcgcagctcaatactttgatggaagagatggtggatctgaaaaagcactttaaccgcgagcgctggatagcggtcgatatggcctggcatgaacatatctataatatgagcggaaatcctttcctgacctcctttgcttctttattccattctgtgtaccacacttactttacctctatcacgcaggatgaggtggtgaagctggatctgcatcaggcgatagtcgatgccattcaggagagcgacgggcagcgagccctgagtgcgtgccaggcgttgctggccgcgccaacccaccagcaggtaaataaatga

SEQ ID NO: 116986 - DNA, 714 bp, Enterobacter cloacae
atgacaggtgatcttaagaatgttgatgcgggtttgttcgacacctcaatcacagaagcaagattcggtgttcctgccgttcctcatccgccgcgaatcctcatgctatacggctctgtacgtgaacgctcttacagccgattggcaacggaagaagcggcaagattgctgacagccatgggcgcagaggttcggatcttcagtccctcaggcttgcctcttcctgatgatgcgcctgactcgcatcctaaagtcatggaactgcgcgagctggttcgttggtccgaagggatggtgtggtgttcccctgaacgccatggtgcgatgaccggcatcatgaaagcccagattgattggataccgttatcagaaggcgctgttcgcccttcgcagggtaagacactggccgttatgcaggtctgcggtggctctcagtctttcaatgccgtaaaccagatgcgaattcttggccgctggatgcggatgatcaccatcccaaatcagtcctctgtggcaaaagcctggcaggaatttgatgaagatggacgaatgaaaccgtcgtcttattacgacaggatcgtggatgtgatggaagaactggtgaaatttactctgctgacccgaggtaactccgcctatctcgttgatcgctacagcgaacgaaaagagtctgcagaagaactttcacggcgggttaatcagagcaaaatttga

SEQ ID NO: 116987 - DNA, 546 bp, Enterobacter cloacae
atgagtgatgtaacggcattcaacaactgcatgagcgtgttctggcggctacatgaagccgaactatctcgcttactgacatcgaagacaggtgatagcgaaaaagcagcagaccttctgcaagagctattcctgcgtgcccgcgctcattcagacagtttctgcgaaatggagaatccgcgagcctggctgtatcgggcggcgaggaatctgctgattgatgagtaccgcaccaccagggaattcgttgagctggaagatgatgccccattaactgatgcatcccctgatgcaatctcaacgctggatatttgcctgcctgaaacattgcaggcattacctgaagatgagcggtggttgattgaagaatccgaccttaaccggcgtccccagcagtccctggccgatgaactgggaatcacgcttacggcgtttaaatcccgactacttcgggccagaaaacacctgaaagagacgatgacagaactttgtcagattgaggcggatgacacgtcttccgtctgctgccacaaaaaaatgaattaa

SEQ ID NO: 116988 - DNA, 363 bp, Enterobacter cloacae
atgtcaaaaattgagatctttgaagcagcaggctgctgtgcaaccagcagcgttgtagtcagtgacgaagccgtcaaatggaacgccagcgccgaatgggcgaaaaagaatggcgttgatatacagcgctacagccttgcgaagaacccgcagcagttcctgaattcgccggtcattaaagagtttctgaacacatcagggatggagtctctccctgtcacattgctcgacggcaaactcgtgatggcaggcaaactcccgactcgtgaagatatcgcccgttgggcaggtattccgcttagtcaggactggagtgaagacagcacgcaaccacgctgctgcagcattccacgtatgccttaa

SEQ ID NO: 116989 - DNA, 1758 bp, Enterobacter cloacae
atgaatatgccatttttgaaagacattcccccgttcatcttcttcactggcaaaggtggcgtgggtaaaacatccctggcctgtgctactgcggtatggctggccgatcagggtaagagaacgcttctggtgagtaccgatccggcttccaatgtcggccaagtctttagccagactatcggccaccgaatcacagatatcagtaccgtagaaaatcttgccgcgatggaagttgatccgatggctgcagcacaggcatatcgtgaccgagtactcgacccggttcgcgggctgatgccagccgatgtggtcagcagcattgaagaacagctctccggttcatgcactacggaaatcgcggcatttgatgagtttactggtcttcttaccaaccatgagttgcgggaaaagtatgaccatatcgtatttgatactgcgccaaccggtcataccatccgtatgcttgagttgccgggggcctggagcggttatctcgaagcgaaccctgatgccgccgctaacctcgggccgctggtggggctggagaaacaacagcaccagtactcagacgcggttaaggcgctgtctgatgcagctctcacgcgcttggttctggttgcccgagcccaagcttcaacactgaaagaagtctctcatacgcacgatgagctttctgctatcggtttgcagcatcaacaccttgccattaatggcgtgctgccgccgtttgcgggtgaaaatgatccactggcgcaaagtattctggctcgagaagaaaaagcattacaggcaatgccagagaacctggcgaaccttccccgctcgcagctgtatctgaagccatttaatctggtcggtctggaagccctgcgtcagttatttacggagaacaaagcctcgctgccgctccctgctaccacgctggatactttggatttaccgaaacttgcctctctggtagatgaactcagcctggcaggtaaaggtctggtaatgacgatgggtaaaggcggtgtgggcaaaacgactgttgcagcatcggtggctgtatcgctggcaaaacgaggccataaagttcatctgaccacgtccgatccggcagcacatctgtcttatacgctggatggctcgttaccaaaccttcaggtcagccgtattgacccgaaagttgagacagagcgctatcgtcgctttgttttggaaaatcaggggaaagggttagatgcagaagggctggcggtgctggaggaagatctccgctcgccatgtactgaagagatcgcggtattccaggcattctcgcggatcatcaaagaggcagacgatcattttgtcattatggacactgcgccaacaggtcacactcttctgctactggatgcaacaggagcctatcaccgggaaatggtgcgccagatggggcaaacgcatgaccatgtgttgacgccaatgacgcaattgcaggacccggagaagacgaaggtgattatcgtgacgcttgccgaaacgacacctgtactggaagcggcaaatttgcagcaggatttgcgccgggccggaattgaaccatgggcatgggtaatcaatagcagtctggctgctgcgaaaccgtcctcaccgttccttgtaacccgagccagtcgcgaactgccgctgataaatgaagttacagagcagtatgcaaagcgtattgcattaacgccactgcagaatgaagagcccgtgggtacggctttgctggcagaaatggcgggctaa

SEQ ID NO: 116990 - DNA, 537 bp, Enterobacter cloacae
atgcacattattaaagctgaagaacagcacattaccgcgatacgcaatatctatgctcaccatgttatgcatggtacaggtagcttcgaaaccgaacctccggatacgcaggaaatgcttaaccggctgaggagcattcagtctcggggattcccttggtatgtcgctctacagggcgatacggtcatcggctactgttatatttcccgttaccgcgaacgccatgcctatcggtttactgtcgaaaattcgatatatattgatccggcttatcagcgacagggcgtcggaaaagcactgctcgatcatgcattaaaatgggccgaatctcagggatatcgtcagatgattgctgttgtgggtgacagcgctaacgtcgcttctgttgcgctgcatatccgcgcaggatttactgaaataggcacattaaaggacattggtttcaaacatggccgctggcttgacacggttttgctgcaaatgaaacttggtgaagggaatggtactctgccagaagattcagatcttatgctctga

SEQ ID NO: 116991 - DNA, 426 bp, Enterobacter cloacae
atgagcaacatcaccatttatcacaacccagcctgcggcacgtcgcgtaatacgctggagatgatccgcaacagcggtaatgaaccgaccgtcattcattaccttgaaaatccaccgtcacgcgatgagttggtcaaacttatcgcagatatggggattacagtacgggcgctgctgcgtaaaaatgtcgagccttatgaagaactggggcttgccgaaaacaagtttactgacgatcagttaatcgattttatgcttcagcatccgatcctgattaaccgcccgattgtggtgacaccgttgggaacgcgcctttgccgcccttccgaagtggtactggatattcttccggatgcgcaaaaaggcgcatttgctaaggaagacggcgagaaagtcgttgatgaaacaggtaagcgattgaaataa

SEQ ID NO: 116992 - DNA, 1290 bp, Enterobacter cloacae
atgttactggcaggcgctatttttgtcctgaccattgttttggttatctggcaaccgaagggattagggatcggctggagtgcaatgctgggcacgggactggctctgatatcaggcgttgtgcatgtgggcgatattccggtggtgtggaatattgtctggaacgcgacggcgacctttattgccgtaattattatcagcctgctgcttgatgagtccggttttttcgaatgggcagcgctgcacgtttcccgctggggtaacggtcgtggacgtttgctctttacgtatatcgttctgctcggtgcggcggtggcggcactgtttgccaacgatggtgcggcacttattctgacgccgatagtcatcgccatgctgctggcattagggttcagcaaaggcaccacgctggcattcgtcatggctgccggttttattgccgatacggccagcctgccgcttatcgtgtcgaacctggtgaatatagtctcggcggacttctttggactgggcttcactgagtatgcgtcggtaatggtgccggtggatattgccgctattatcgccacgctggtgatgctgcatctgttcttccgcaaagatattccaccgacttacgacctggctctcctgaaagcaccggaaaaggcgattaaagatctggcaaccttcagaaccggctggatagttttaatcctactgctggttgggttctttgtcctcgagccgctcggtattcccgttagcgcgattgcggctgttggagctgtgatcctgtttgcagtagctaaacgaggccatgccattaacaccggcaaagtgctgcgcggtgcgccatggcagatcgtcatcttctcattggggatgtacctggtggtctacggtctgcgcaacgccgggctaaccgaatacctttccggtgtgctgaacgtactggcggataaagggctctgggctgcgacgctgggtactggcttcctgacggctttcctgtcttccatcatgaacaacatgcctaccgtgctggttggcgctctttctatcgatggaagcaccgcaacaggcgttatcaaagaagcgatgatctacgccaacgtgattggctgcgatctgggcccgaaaattacacctattggtagcctggcaacgctgctctggctgcatgttctttcacagaagaatatgaccatcacctggggatactatttccgcaccgggatcgtcatgactctgcctgtgctgtttgtaacgctagccgcgctggcgctacgtctctctttcactttgtaa

SEQ ID NO: 116993 - DNA, 1752 bp, Enterobacter cloacae
atgaaattcttacagaatatcccgccttacctgttttttaccggtaagggaggcgtaggaaaaacttctatttcctgcgcgacggcaatccgccttgctgaacagggtaagcgggttttgctggtcagtaccgatccggcctccaatgtcggccaggtattcgatcaggctatcggtaacaccattcgccctgtggcagcagttcatggactttccgctctggaaatcgacccgcaggaagccgccaaacaataccgctccagaatcgttgatcctatcaaaggtcttttgcctgatgacgttgttaacagtatcagcgagcagctttcaggagcctgtaccactgagattgcagcgttcgatgaattcactggcttgctaacagacgcttccctgctgacccgcttcgatcacatcatttttgatacagcgccgacgggccacacgattcgccttctccagcttcccggtgcctggagtagcttcattgtaagcaatccagatggtgcttcctgtcttggcccaatggccgggctggaaaagcagcgtgagcagtatgctcatgcggtagaggcgttatccgatcctgaacgtacccgcctggttctggttgcgcgactacaaaaatctacgctgcaggaagtcgcccgcactcatgaagaactcgccgcaattggcctgaaaaaccaatatctggtcattaatggtgtgctgcctaaagccgaagctgaacatgacgccctggcagctgcgatatggcaacgtgagcaggaggcactggcaaatcttcctgccggtttatctgggctaccgacagataccctattactacagccagtcaatatagttggtgtttcagcattgaagggactgctggataccggttctgaggcattaccgctcccggtaacgaacatccaatacacgcctgaaaacttatcgctctctggcctggtcaatgatatcgctcgcagtgaacacggcctgattatgctgatgggcaaaggtggcgtagggaaaaccacaatggctgctgccatcgccgtaaggctggcagacatgggatttgacgtgcatctcacgacctctgatcctgctgcgcacctaagtacaacgctgaacggcagcctcaaaaaccttcaggtcagccgcatcaaccctcacgatgaaaccgaacgctatcgccagcatgttcttgagacgaagggaagagatctggacgaagcagggaaacggctactggaagaggatttgcgctctccctgtactgaagagattgccgtgtttcaggccttttccagggtgattcgtgaagcgggtaaacggtttgttgtcatggataccgcccctaccggacacacgctgttgctgctggatgcgaccggggcttaccaccgagagattgccaaaaaaatggggaataaaggtcattttactaccccaatgatgcagcttcaggatccggatagaaccaaagttctgcttgttacgcttcctgaaaccacaccggttctggaagcggcaaacctgcaggttgaccttgaaagagcggggattgatccgtggggctggattatcaataacagcctttccattgcggatacgcgttctccgttgctttgccagcgcgcccggcaggaatggcctcagattgaggctgttaagaatcagcacgctgagcgtatagcgcttgttccggtgctggcgtcagagcccgccggtattgaaaagcttagagagttgatgaattaa

SEQ ID NO: 116994 - DNA, 366 bp, Enterobacter cloacae
atgaaaacgttaaaggtgtttgacccggcaatgtgctgcagtaccggcgtatgtggctcagatgtcgatcaggttctggttgatttttctgctgatgtgcagtggctgaaaggacgtggtgtacaggttgaacgttacaacctggcgcagcagcccataagctttgttcagaatgagaaagcgaaagcattcctcgaagcatctggagcagaagggcttccgctactgctgttggacggtgaaacggtgatggcagggcgatacccaaaacgcgctgagctggctcgctggttcggtataccgctggagaaggtagggttagctcccaccagctgctgtggtggtggtaatacttcctgttgctga

SEQ ID NO: 116995 - DNA, 351 bp, Enterobacter cloacae
atgacgctgacttctttgatgctttttaaaaccctctccgatgaaactaggctgggcatcgtgttgctgcttagagagatgggggagctgtgcgtatgcgatctatgtacggcgctggaacagcctcagcccaagatttcacgccatctggcaatgctccgggaaagtggtctattgctggatcgtaaacagggcaagtgggttcactaccgcttatccccgcatattccttcctgggccgctcaggtgattgagcaggcctggttaagccaacaggacgacgtacaggccatcgcccgtaggctggcatcggcaaactgttctggtagcggtaaggctgtttgtatctaa

SEQ ID NO: 116996 - DNA, 630 bp, Enterobacter cloacae
atgtctttaatcaataaagaagaagcccatttagtatgccgtccttactacaacaccttaacttctgttttcgataatgcttggaaaaactggattcaaaatgatattgcccgtcgcctggtcgacaaacgagtgcgctcggctgtgctccgaaacgatgccttattttttttgaaggaccagattgaagctgcagaaattgaaggtattaagtacgtaaagatgcctcatcaagtgggatttttgattcaggatcgctattttgtaagaatcaaaaaaggggacaagagccttcgctcttctaactatccgacgcaaagagcattggatttccacaaccctgaaattgacatgtttggtggtctgattcgattagagctactttacatacttagtgacgactgtgtaggaattgataaaatcgtccttactcagcgcaacgggaaatttgttgcatgggcaattgatataacagatgaaaatctgtacgacttgcctgtacacgagcttgaagtgaacataccccaacctcagcctgttacaaaaagtgtttcacctgcgaaaagtgttgtgaaaccgaaacgggttagaaagacagaaccgaaggtagaaaatggtcgtggagattaa

SEQ ID NO: 116997 - DNA, 1089 bp, Enterobacter cloacae
atggtcgtggagattaagtcagcagccaccgtacgcccagagatgattgagttgcgtcggaaaatgttgggtatgagccaaaaggatttggctcatcgtgtagccctgtctcaagggacgttgtccaaaattgaacaagggcttaaatctgcaactgaagaccaaatccgcagtattgcggaagcgcttaactgtcccgtcgatttttttatgatgtcagaaaggctttatggtggaccaatcagtgcaaacccgatgtaccgtaaaaaagcatctgtcagcatgaaagtgctggataaacttgttgctgaagtgaatgtacgtattgctcatctcagaaagctgttgcagttcgttgagttcgagcccgaatatgagctcccttactacgatcctgaagactacgaagaaaatatcgaacaaattgctcgtaatgtccgtactgcgtggcatgtcccacgtgggccgataaaaaaccttgttgaggtactggaaagagcaggcatcattatcattgattgcgatatggaagatactggactttcagggctaagttacaaagtggcggggctaccaccattaatctttataaataaaaaccagccagttgataggtacagatttactctagcccatgagctgggtcatttagtgatgcaccgggctcccactccaacgatggaggacgaagccaacgcttttgctgcagaattgcttatgcccgcctctgatatttataacgatttacgaaatatcagtatcgaaaaagccgctgcccttaaaccattttggcggacttcaatggctgcgttgttctatagagcaaaaacgctaaaagcgattacggcaggtcaaagcgattggatctggcggcaaatgtccattaaacgttacaaaatagatgagcctgtaaaactcgatgtaaacggtgaaacaccaacattactgaacgcaataattgatcatacgaaagacgagctagggtatgaccaaagcgaacttgcatccatcttcaatttattccttcccgaggttatgcgtctgtatgctttgggagctcaaaaccaacatttacggctggtaaattaa

SEQ ID NO: 116998 - DNA, 1206 bp, Enterobacter cloacae
atgaagctaacagtcagacaaatcgacacagccaaacctaaagagaagccgtataagctatctgatggtggaggcctctaccttgaagtaactaccaacggctcacgttactggcgtttaaagtatcgctacgcaggtaaagaaaagcgtcttgctttcggcgtttatcccgaggtttctctcgcccaagcgcgcgaaaagcgtgatgctgcgaaaaagctgctgtctgctggaagcgatcccggtgaagtaaagaaagcagagaaaattgcccaaaagcttaactatgaaaataccttcgaagctattgcacgtgaatggcatcagttgagagcggatcgttggtcattacgctatcgcgatgaaattattgatacctttgaaaaggatattttcccctacatcggtaagcgccctatagctgaaattaagcccatggaattgctggaaacccttcgtcgtatggaaaagcgtggtgcattagaaaagatgcgcaaagtcagacagcgctgcggtgaagtattccgtcatgcgattgtgaccggacgcgctgaatacaatccagcacccgatctcgccacagccctcgcaacaccaaagaaaacacattttccattcctaacagccgaagaactccctcactttcttagggatcttgccggttacaccggtagcgttattaccaagactgcgactcaaatcatcatgcttacaggggtacgaactcaggaattacgttttgcccgctgggaggatatcaattttgaaaagcggctttgggagatccctgctgaagtgatgaagatgaaacgaccacacatcgttccgatgtcggatcaggttgtcgagctctttgagtcacttaaacctattaccgggctatacccactggtattcgtcggacgtaacgatcgaatgaagccgatctcaaaggaaagcgttaatcaggttattgagttattgggatataaaggaaggctgacaggacatggtttccgccacacgatgagtaccatcctccatgaagaaggttttaactcagcgtggatagaaacgcagctagcacatgtggataagaacgcgatacgtgggacttacaaccatgcgcagtatttggaggggcgtagggagatgatgcagtggtatgccgactacgttagctctctggcagaatcttcattttcacaaattaaaacagtaggttaa

SEQ ID NO: 116999 - DNA, 1392 bp, Enterobacter cloacae
atgagcgaagtcctgtcagtaaaagagaagattggctacggcatgggagacgccgccagccacatcatttttgataacgtcatgctttatatgatgtttttctacaccgatatttttggtattcccgccgggtttgtcggcaccatgttcctgctggcccgcgcgctggatgcgatctccgacccgtgcatggggctgattgccgaccgcacccgcagccgctggggtaagttccgtccgtggattttgttcggcgccattccgttcggcatcgtctgcgtgctggcgtataccacgccggacctcagcctcaacggtaaaatggtttacgccgccgttacctacaccctgctgaccctgctctataccgtggtcaacatcccgtactgcgcgctgggcggcgtgatcaccaacgacccgacgcagcgtatctccctccagtcctggcgctttgtgctggcgacggcgggcggtatgctctctacggtgctgatgatgccgctggtgaacctgattggcagggatgacaaagccttcggcttccagggcgggatcgccgtgctgtcggtggtcgcgttcctgatgctggcgttctgcttcttcaccaccaaagagcgcatccaggtgccgccgagcaccacctccatgcgtgaagatctgcgtgatatctggcaaaacgaccagtggcgcatcgtcggcgtgctcaccatcctcaacattctcgccgtctgcgtgcgcgggggcgcgatgatgtactactgcacctggatcatgggttcgccggaagtgttcgtcgcgttcctcaccacctactgcgtcggcaacctgatcggctccgcgctggcgaaaccgctcaccgactggaagtgcaaggtcagcatcttctggtggaccaacgccgcgctggcggtggtcagcgtggcgatgttcttcgtgccgatgcatgccaccgtcctgatgttcggcttcatcttcgttatcggcgtgctgcaccagctggtgacgccgattcagtgggtaatgatgtccgataccgtcgactacggcgaatggaccaacggcaaacgtctgaccggcatcagctttgcgggcacgctgttcgtgctgaaactcggcctggcgctgggcggggcgatgataggctggatgctggcaggcggcggctacgacgcggcagccaaaacccagaacagcgcgaccatcagcatcatcatcggcctgtttaccctggcaccggcgatctgttacgtgctgagcgccatcatcgccaaacgctactacacgctgaaaacccccttcctgaccaaaattctgcgcgagctggcgcagggcgcgcgccgcaatcagcaggagtttgaaaacctgccggtcagcaaagaattgcagaactaa

SEQ ID NO: 117000 - DNA, 2319 bp, Enterobacter cloacae
atgaaaatcagtgatggaaactggcttattcaaccgggcctgaatgtgacctatccggtgcaggtgttcgacgtggagcagcagggcaatgacctggtggtgtatgtggcgccgcgtgacgtgcgcgaacgcacctggcagctcgacacgttgatgttcacggtgcgcctgtttgccccgcaggaagggattgtcggggtgcgcattgagcacttccagggtgcgctgaacaacggcccgcactatccgctgaacgttctgaaggatgtaaaagttgagattgaaaacaacgccgaatttgccgagctgaaaagcggcagcgtcagcgtgcgcgtcgccaaaggcgagttctgggcgctggatttcctgcgcaacggccagcgcattaccggcagccagctgaaaaacaacggctacgtgcaggacagcaataccgatcgcaactatgtgtttgaacgtctggatctgggcgtgggggaaacggtctacggcctgggcgagcgctttaccgcgctggtgcgcaacggccagacggtcgaaacctggaaccgcgacgggggcaccagcaccgagcagtcctacaaaaacatcccgttctacctgaccaaccgcggctacggcgtgctggtgaatcacccggagaacgtctcgtttgaagtcggctccgaaaaagtctccaaagtgcagttcagcgtggaaggggagtatctggagtacttcgtgatcgacggcccgacgccgaaagaagtgctgaaccgctatacccgcttcaccggcagtccggcgctgccgcctgcgtggtcgttcggcctgtggctgaccacctcgttcaccaccaactacgacgaagcgacggttaacagctttatcgacggcatggccgagcgcgacctgccgctgcacgtgttccacttcgactgcttctggatgaaggccttccagtggtgcgacttcgagtgggacccggtgaccttccccgatccggaaggcatgatccgccgcctgaaagagaaagggctgaaggtctgcgtgtggatcaacccgtacatcggccagaaatcgccgatcttccgggagctgaaagagaagggctacctgctgaagcgcccggacggctccctgtggcagtgggacaaatggcagccggggctggcgatctacgacttcaccaacccggacgcgtgcaggtggtatgcggacaaactgaaaggcctggtggagatcggcgtcgactgcttcaagaccgacttcggcgagcgtatcccgacggaggtccagtggtttgacggttccgatccgcagaagatgcataaccattacgcctacatctacaacgaactggtgtggaacgtgctgaaagagacggtgggagaagaagaggcggtgctgtttgcccgttctgcctccgtgggtgcgcaacagttcccggtacactggggtggcgactgctacgccaactatgagtcgatggccgaaagcctgcgcggcgggctgtcgattgggctgtccggcttcgggttctggagccacgatatcggcgggttcgaaaacaccgctccggcgcacgtctacaaacgctggtgcgcgttcgggctgttctccagccacagccgcctgcacggcagcaaatcctaccgcgtgccgtgggcgtacgatgacgagtcctgcgatgtggtgcgccacttcacgcagctgaaatgccagctgatgccgtacctgtatcgtcaggcggcgctggcgcacgagttcggcacgccgatgctgcgggcgatgatgctggagttcccggacgatccggcgtgcgattacctcgaccgccagtacatgttgggggattcaatgatggtggcgccggtgttctccgaggcgggcgacgtgcagttctacctgccggaagggcgctggacgcacctgtggcacaacgatgaaatcgagggtagccgctggcataagcagcagcacgatttccagagcctgccggtctatgtgcgcgacaacacgctgctggcgctcggcaataataaccagaagccggactatgcgtggcacgaggggacgaccttccagctctttaacctgagcgatggcgcaacggcggtgagtgaagtgcctgcggcggacggttctgtagtgtttgcgctgaaggcgtcacgtcagggcgacgtcgtgacctttaccggcgcgggagatgcgcaaaactggtcggtgtgcttgcgcaacgtgcagaaggtcggcggcgtaaaaggcggttcacatgcgggcagcgaatggggtgtggtggtgaaagccgagggggatgaggtggtggttcacctctga

SEQ ID NO: 117001 - DNA, 1695 bp, Enterobacter cloacae
atgaaatttattggaaagctgcttatctatcttctggtagccctgctcattgtagtgctcgccttttattttctgctccagacccgctggggcgcatcgcaggtcagcagctggatcacggtgaataccgattacgagctcaactttgacctgatggatcaccgcttttcatctccttctcacatccttctggaaaacgttaccttcggacgagatggcaaaccggccacgctggtcgctaaaaaagtggatattggcttaagcagccgccagatcaccgacccgctgcatatggatgccatcaccctgttcgatggcacgctgaatttatcgccgcagacggcgccgctgccgttccaggccgaccgtctgcaactgaataacatggcctttaacagcccgaatacggagtgggatctcagtgcgcaaaaggtgaccggcggcgtcagcccgtggcagcccgaggcggggaacgtactgggaaaaaatgcgcaaatccagatgagcgccgggtcgctcacgctcaacggcataccggccaacaacgtgctgattcagggacaactcaacggcaaagaggtggtgctgaataccatcggtgccgatatggcgcgcggctcgctgacgggctcggctctgcgtaatgccgacggtggctgggttatcaacaccctgcgtctgaatgagatccgcctgcaaagcgacaaatcgctgctggatttcttcgcccctctctccaccctgccttcgttacagattgggcggctggaagtgaccgatgcccgtctacaggggccagactgggcggtaaccgacctcgatctcagcctgcgtaacctcaccctgagtaaaggtgactggcaaagtcaggagggaagattatccatgaacgccagcgaatttatctacggctcgctgcatctgtttgaccctatcctgaatgcggaattctccccgcagggcattgcgctgcgtcagttcacctcccgctgggaagggggcatggtgcgtacctccggcaactggctgcgcgagggtcaggcgctggtgctggacgacgttgccattgccgggctggaatatacgcttccggaaaactggaaaacgctgtggatggacccgctcccggtatggctgaacagcgtaacactgaaaaaattcggactgagccgcaacctggtgatcgacatcgatccggcgttcccgtggcagatcacctccctcgacggttatggcgctaatctgcggctggcgcaggatcacaagtggggcgtgtggggcggtaacgcaaccctcaacggggcggcagcaacctttaaccgcgtcgacgtgcgtcgcccgtcgctggcgctgaatgccaacgccgcaacggtaaatattaccgatctgagcgcctttaccgagaaagggatcctggaagcgaccgccaccgtgtcacagctgccacagcgacaaaccaccgtgagcctgaacgggcgcggtgtaccactcaacgttatgcagcagtggggctggccagcgctgccgattgcgggcgacggcaatattcagctcaccgccagcggaagcgtgcaggccaatgcgccgctgaagccgacggtgaatgggaagctgagcgcggtgaatatggataaacggcaggtgcaacagacgatgaccggcgggatggtgtcgacggtggctccggcacagtaa

SEQ ID NO: 117002 - DNA, 1392 bp, Enterobacter cloacae
atgtctgttaacactctggagtctgctgatgcgcaaccgattgcgcagaagcaaaaaagcgaactgatttaccgccttgaagatcgtcccccgctgcctcaaaccctgtttgccgcctgccagcacctgctggcgatgttcgttgcggtcatcacgccggctctgctgatttgccaggcgctggggttaccggcgcaggatacgcaacacatcatcagtatgtctctgttcgcttccggcgtggcctccatcattcaaattaaagcctggggtccggtgggctcgggtttgctgtcgattcagggcaccagctttaactttgtggcgccgctgatcatgggcggtacggcactgaaaaccggcggcgcagatgtcccgacgatgatggcggcgcttttcggcaccctgatgctggcaagctgcacagagatgatcatttcccgcgttctgcacctggcgcgccgggtgatcaccccgctggtctccggcgtggtggtgatgattatcggcctgtcactgatccaggtgggtctgacctccatcgggggcggctacgcggcaatgagcgaccataccttcggcgcgccgaaaaacctgctgctggcaggcgtcgtgctggcgatcattattctgcttaaccgccagcgtaacccgtacctgcgcgtggcatcgctggtgatcgccatggcggccggttacctgctggcgtgggcgctgggcatgctgccggaaaacaccaccccaaccaacagcgcgttgattaccgtgccaacgccgctctactacggcctgggcattgactggagtctgctcctgccgctgatgctggtctttatgatcacttcgctggaaaccattggcgatatcaccgccacttccgacgtgtccgagcagccggtctccggcccactgtacatgaaacgtctgaaaggcggcgtgctggcgaacggactgaactcgtttgtctcggcggtgttcaacaccttcccgaactcctgctttggccagaacaacggcgtgatccagctgaccggcgtggccagccgctacgtgggcttcgtggtagcgctgatgctggtggtcctcggcctgttcccggcggtgagcgggtttgtgcagcacatccctgagccggtgctgggcggcgcgacgctggtgatgttcggtaccatcgcggcctctggcgtgcgtatcgtctcccgcgagccgctgaaccgccgcgcaatcatgattattgcgctgtctctcgccgtagggcttggcgtctcccagcagccgatgattttgcagtttgcccctgactgggtgaaaaacctgctctcttccggcatcgccgcgggcggtattaccgctattgtgctgaatctcattttcccgcctgaaaagaactga

SEQ ID NO: 117003 - DNA, 1203 bp, Enterobacter cloacae
atgattcatctcgatacgttgtcgacccttgttgccgcaacgctggttcttctgcttggtcgcaagctggtacacagtgtttcctttctgaaaaagtacaccattcctgaacctgtcgccggtggattgctggtggcgctggccctgctggtgctgaaaaaaagcatgggctgggaaatcgattttgatatgtccctgaaagatccgttgatgctggccttctttgctactatcggcctgaacgctaacctcgcaagcctgcgttcgggcggcaaggtgctgggcgtgtttctgattgttgtggtgggcctgctgctgatgcaaaacgccatcggcatcggtatggcgtcgctgctggggctggatccgctgatgggtctgctggcggggtcgattaccctgtcaggtggccacggaacgggcgcggcgtggagcaagctgttcatcgaacgctatggctttgaaaacgcaacggaagtggcaatggcctgcgcgacctttggcctggtgcttggcgggctgattggcggcccggtggcgcgctatctggtgaaacactccaccacgccggaaggcaggccagacgatgaaatggtgccgacggcatttgaaaaaccggacgttggccgcagcatcacctcgctggtgatgattgaaaccatcgccatgattgccatctgccttaccgtgggcaaaatcgttgcgcaatggctggcgggaacggctttcgaactgccaacctttgtctgcgtgctgtttatcggggtgatcctgagcaacggtctggcgcagatgggcttctaccgcgtctttgagcgcgcagtgtccgtgctggggaacgtcagcctgtcgctgttcctggcgatggcgctgatgagcctcaagctgtgggaactggcctcgctggcgctgccgatggtggcgatcctggcggtgcaggccgtgttcatggcgctgtatgccatctttgttacctggcgcatgatgggcaaaaactatgatgcggcggtactggctgcgggccactgtgggtttggtctgggagcgacgccaacggccatcgcgaatatgcaggcgatcaccgaacggttcggcccgtcgcacatggcgtttctggtggtgccgatggtgggcgcattcttcattgatatcgtcaacgcgctggtcattaagctctacctgatgctgccgatgtttggctga

SEQ ID NO: 117004 - DNA, 2082 bp, Enterobacter cloacae
atgaaaggccgcctgctggacgccataccgctcaacagcctgacgggcgtgggcgcggcacaaagcagtaaactggcgaagataggcctgcacaccgtgcaggatctcctgctccacctccccctgcgctacgaagaccgtactcagctttataagattggcgatctgctgcccgctatttacgccaccgttgaaggggaagtgctgaactgcaacatcacctttggcggacgcaggatgatgacctgccagatcagcgacggcaccggcattctcaccatgcgctttttcaacttcaatgcggcaatgaaaaacagccttgccactggacgacgcgtacttgcgtacggtgaagccaaacggggcaaatacggcgcggagatgatccacccggaataccgcgtgcagggtgatctcagctcacctgagctacaggagacgctcacgccggtctatccaaccactgaaggcattaagcaggctacgctgcgcaagctcaccgatcaggcgctggagctgctcgatacctgcgccattaacgagctgcttccgccggagctggcgcagggcatgatgagcctgccggaggcgttgcgcaccctgcatcgtccaccgccaacgcttcagcttgttgatttagagagcggtaaacaccccgcccaacggcgtcttatccttgaggaattactggctcacaacctgagcatgctggccctgcgcgcaggtgcgcagcgtttccacgcgcagccattaagccagcgtgatgagctcaaagataagctgctggcctcactgccgtttaaacccaccggcgcccaggcgcgggtgactgccgagatcgaacgcgatatggcgctggatgtgccaatgatgcgcctggtgcagggcgacgtgggttccggtaaaacgctggtcgccgcgctggccgctttgcgcgccatcgcccacggtaagcaggtggcgctgatggcgccgacggaactgctggccgagcagcacgccaacaatttccggaactggtttgccccgctgggaattgaagtgggctggctggccgggaagcagaagggcaaagcgcgccttgcgcagcaggaagccattgccagcgggcaggtgcagatgattgtcggcacgcacgccattttccaggaacaggtgcagtttaacggcctggcgctggtgattatcgacgaacagcaccgctttggtgttcatcagcgtctggcgctgtgggagaaaggtctgcaacagggcttccacccacatcagctgatcatgaccgccacgccgattccgcgcaccctggcgatgacggcctatgccgatctggatacctccaccatcgacgaactccccccgggccgtacgccggtgacaacggtcgccattccggacacgcgccgcagcgacatcattgaccgcgtgcgcaacgcctgcacccaggaagggcgtcaggcttactgggtctgtaccctgattgaagagtctgagctgctggaagcgcaggctgccgaagccacatgggaagagttaaagctcgccctgccggagctgaacgtcggtctggttcacgggcgcatgaagcctgccgagaagcaggcggtgatgcagtcgttcaaacagggcgaactgcatttactcgttgcgaccacggtcatcgaagtgggcgtggacgtgccgaactccagcctgatgattattgagaacccggagcgcctgggcctggcgcagctccaccagctacgaggccgcgtgggccgtggtgcgatcgcctctcactgcgtgctgctctacaaagcccctctgtcgaaaaccgcgcagatgcgtttgcaggtattacgcgacagcaatgacggcttcgtcattgcgcaaaaagatctggagatccgcggcccgggcgaattgctgggcacgcgtcagacgggtaacgccgagtttaaagtggcggatttattgcgcgatcaggccatgatccccgaagtacaacgccttgcgcgtcatattcatgaacgctaccccgaacaggcggcagcgttaattgaacgctggatgccggaaaccgagcggtattccaacgcctga

SEQ ID NO: 117005 - DNA, 657 bp, Enterobacter cloacae
atgctcgccaggcgtcagcctgatctgacggtctgcatggagcaggtccataaacctcataacgtctctgctatcgtccgcaccgcagatgccgtcggcgtgcatgaagtccacgccgtctggcctggcgcacgtatgcgtaccatggcctccaccgccgcaggcagcaacagctgggtatccgtgaaaactcaccagactattggtgaagcggtctcgcacctgaaagggcgtggcatgcaggttctggcaaccaacctctctgctaaagccgtggatttccgtgagatcgactacacccgtccgacctgtattttaatgggccaggagaaaacggggatcacgcaggaagcactggatttggccgatcgggacatcatcattccaatgatcggcatggtccagtcactcaacgtgtcggtcgcctcagcgctgatcctgtatgaagcgcagcgccagcgtcagaatgccggaatgtacgagcgcagcaacagcatgctgccggaagaggagcagcagcgcctgctgtttgaaggtggctatccggtgctggctcgcgttgcgaagcagaagaaattgccttacccccacgtcaacgcgcagggcgaaattgaagccgatgccgagtggtggtccaccatgcagtacgcggggtaa

SEQ ID NO: 117006 - DNA, 2115 bp, Enterobacter cloacae
ttgtatctgtttgaaagcctgaatcaactgattcaaacctacctgcctgaagaccagattaagcgtcttcagcaggcgtatctcgttgcacgtgacgctcacgagggccagacacgttcaagcggtgaaccctatatcacgcacccggtagcggtggcctgtattctggccgagatgaaactcgactacgaaacgctgatggccgccctgctgcacgacgtgatcgaagatacccctgccacctaccaggacatggaacagctgtttggcaaaagcgttgccgagctggtggaaggggtctctaagcttgataagctgaaattccgcgacaagaaagaggcgcaggccgaaaacttccgcaagatgatcatggcgatggtgcaggatatccgcgtcattctcatcaaactggctgaccgcacccacaatatgcgcacgctgggctcacttcgcccggataaacgtcgccgcatcgcccgtgaaaccctcgaaatttacagtccgctggcgcaccgtttaggtattcatcacattaaaaccgagctggaagagctgggttttgaggcgttgtacccgaaccgctatcgcgtgattaaagaggtggtgaaagccgctcgcggtaaccgtaaagagatgattcaaaagatcctctctgaaatcgaagggcgtttgcaggaagcgggcattccgtgccgcgtgagcggtcgcgaaaagcatttgtactctatctactgcaaaatggtgcttaaagagcagcgttttcactcgatcatggatatctacgcgttccgcgtcatcgtccacgattcagacacctgttatcgcgtgctggggcagatgcacagcctgtacaagccgcgtccggggcgcgtcaaagattacatcgccattccaaaagcgaacggataccagtctttgcacacctccatgattggcccgcacggtgtccctgttgaggtgcagattcgtaccgaagatatggatcagatggcggagatgggtgtcgcggcgcactgggcttataaagagcacggcggcgaaagcagcaccaccgcgcaaatccgcgcccagcgctggatgcagagcctgctggagctgcaacagagcgcaggtagctcgtttgaatttatcgagagcgttaaatccgatctcttcccggatgagatttacgttttcacgccggaagggcgcattgtcgaactgcctgcgggcgcgacaccggtcgacttcgcttacgccgtgcataccgatatcggccatgcctgcgtaggtgcccgcgtcgacaggcagccttatccgctgtcgcagccgcttttcagcggacagacggtggagatcattaccgcgccgggggcacgtcctaacgccgcctggctgaactttgtcgtgagctcaaaagcgcgcgcaaaaatccgccagctgctgaaaaacctcaagcgcgacgactccgttagcctggggcgtcgtctgctcaatcacgcgctgggtggcagccgcaaactggcagagatcccgccagaaaacattcagcatgagctggagcgtatgaagctcgcctcgctggatgacctgctggcagagattggtctcggcaacgccatgagcgtggtcgtggcgaagaacctgcaacaaggcgaaacgacagccgttcctgccaccacgcaaaatcatggtcacctgccgatcaaaggcgctgacggggtgctcatcaccttcgccaaatgctgccgtcctatcccgggcgacccgattattgcgcacgtcagcccgggtaaagggctggtgatccaccatgaatcctgccgtaacatccgtggctatcagaaagagcctgagaagttcatggcggtcgagtgggataaagagacggcgcaggaatttatcactgaaatcaaggtggatatgttcaaccaccagggtgccctggcgaacctgacggcagcgatcaacaccgcctcatccaacattcaaagcctgaatacggaagaaaaagatggccgcgtttatagcgcctttattcgcctgaccgcccgtgaccgtgtgcatctggccaatattatgcgcaagatccgcgtgatgccggacgtcattaaagtcacccgtaaccgaaactag

SEQ ID NO: 117007 - DNA, 276 bp, Enterobacter cloacae
atggcacgcgtaactgttcaggacgctgtagagaaaattggtaaccgttttgacctggtgctggtcgccgcgcgtcgcgctcgtcagatgcaggtaggcggtaaagatccgctggtaccggaagaaaacgataaaaccaccgttattgcacttcgcgaaatcgaagaaggtctgatcaacaaccagatcctcgacgtgcgtgagcgccaggagcagcaagagcaggaagccgctgaattacaagctgttaccgctattgctgaaggtcgtcgttaa

SEQ ID NO: 117008 - DNA, 624 bp, Enterobacter cloacae
atggctcaaggcacgctttatattgtttctgcccctagtggcgcgggtaaatccagcctaattcaggcactgttaaaaacccaaccgttgtacgatacgcaggtttctgtttctcacaccacgcgagcaccgcgtccgggtgaagtgcacggtgaacactatttctttgtgaatcacgacgaattcagagcgatgattggcagagacgcgtttcttgaacacgcagaagttttcggtaactactacggtacttcgcgtgaaaccattgagcaggtactggcgaccggcgtgaacgtgttcctggatatcgactggcagggcgcgcagcaaattcgtaagaaaatgcctgattcgcgcagtatctttattttaccgccatcgaaagatgaactggatcgccgcctgcgtggtcgcggccaggacagcgaagaagttatcgcgaagcgtatggcgcaggcagttgcagaaatgagccattacgcggaatatgattaccttattgtgaatgatgattttgatgccgcgctgagcgatctcaaaactatccttcgcgcagaacgtctgcgtatgagccgccagaagcagcgacatgacgcattaatcaccaaactgttggcagactga

SEQ ID NO: 117009 - DNA, 1671 bp, Enterobacter cloacae
atggtgaaatggataagcatactgatgatcttcttaagcagcggggcgatggctatctgcccggtctggtcaccggctaaagccgggcaggagatcgcggccctgaaggcgcagctgacccgctggaatgatgattactggaagcagggcagcagcgaggtgagcgacgacgtttacgacaggcttaacgcccgcttaaaacagtggcagcgctgttttcacgatgaaccgctgcacgacgatcttccagctgccagtgggacggtgaaacatcccttcgcccataccggcgtgcataaggtagaaagcaagcaggcgcttagccgctggatggcgacgcagcaggatctctgggtacagccaaaggtggatggtgttgcggtcaccctggtctacaaaaacggcaagctggtgcaggcgattagccggggcgacggcttacagggggaagagtggacggcacaggcgcgaatgatccccgctattccgcaaacgctggccgggccgcttgccaacagcgtgttgcagggtgaactttttctgctgcgcgacgggcatatccagcagcggatgggggggatgaacgcgcgtgcgaaggtagcgggggcaatgatgcgcgcgaccgatcgcgcagcgctgaagcagacaggcatttttatctgggcctggccggacggcccaaaagcgatgaaagcacgcctttccgcgctggcggaggcaggttttaccctgacggcccgctataccctgccggttaaaaacgcggttgacgtggaggcgcagcggacggcctggtttaaggcttcgttgcccttcgccacggatggcattgtggttcgcgcctcggcagagccgccgggcgagcgatggctgccgggggaagggagttgggtcgtcgcatggaaataccttcctgtggcccaggtgacggaagtcaaagcgattcactttaccgttggccgtaccgggcggatcaccgcgattgcgcagcttgagccgctgatgctcgacgataaacgtgtacagcgcgtcagcttagggtcggttaaccgctggcagaggctggatattgcccccggcgatcaggtgctggtaagcctggcgggacaaggtattccccggctggataacgtggtgtggcgcaatgtggatcgccgtaaaccgcagccgccctcatcgcgctataacggcttaacctgtttctatgcctccccggagtgcatggagcaattttttgcccggctgacgtggctaagttccaggcaggcgttagatatcgaaggagtgggcgaatcaggatggcggaccctctatcaggcgcatcggtttgagcacctcttctcctggctacagctcacgcaggcgcagctcaccgcgacggcggggatatcggcatcgcatggcgctgcgctgtggcatcagtttaacctggcgcgggagcgaccttttatccgctggatcaccgcgatgggaataccgctggcccggtcgacgctcaaggcggcaggggatcgcacctggcaggcgctgattcagcgaagcgaagcggagtggcggatgctgccgggtgtcgggcaggagaaggcccgccagatcgtaaactggctgcatcagcctcagattgatgccctggcaaaatggctggccgcagagcacatcggtggattttaa

SEQ ID NO: 117010 - DNA, 297 bp, Enterobacter cloacae
atgaaaaggacgctttgtacagtgctgacggcactcacgctggcgactgccctgcctgctataggcgctaccaccgaagcaggtagcaccagcgcagcaacaaccggtacaacaaccggagcaacggtgggaactaccgctggcactacggggggactggcggcaggcgcgattgggacaaccgctgttgtcaccaccgctgcgattgccggcgtagcgacgttagccgttgtcgcggcaagcgacagtggcgatgactcaggcaatggtacttccacgacgacagttacccgctaa

SEQ ID NO: 117011 - DNA, 645 bp, Enterobacter cloacae
gtgagactgtttattctgctcatcatgactctgctgatccagggatgtacgccgagccagcagagcattattgagacctttaacgccagcctggacgggcgccaggatgtgacggtaacggacgggcagattcaggtgctcccatactcaaccatgtacctgcgtctggataatggcccgaggatcctggtggttctcggatacatcgaacagagaaacagtaagtggttatcgcaggataatgcgatgatcgtcacgcataacggtcgccttatccacacgctcaagcttccttataacctgcttgaggtaaccaatcttgagcacgatccgctgcgccacacgccgcagctccgcgacggcagccagtggtcgcgtgatgtgcgctggcaggaagaggggcggtatcgctccgcacacctgacctcgcgcttctccctgagcgggacggaaaacctgacccttgccggaaacacgctacgttgtcaggtctggcaggagacggtgcaggccgacggcctcgatcgtcgctggcataacaccttctggattgattccgccaccggccaggtacgccagagcgaacagatgctcggcgcgggcgtattccctgtcgccatgacgatgttgaagcccgccccatga

SEQ ID NO: 117012 - DNA, 738 bp, Enterobacter cloacae
atgaacagactcagaaaatggttacctggcgtagggctatctctcttcagcctgcccgccttatgcgcaagcgtcgttaccgtgcatcagccgggcaaaacgtggtctgctggacaggccgatacgctctcccggctggtcacccagccgcagctgaacaacgtctggtggcagggcgctgtcatcgcaaccccttccgccacgcggcgagcgcaacagacgcaacagcaggtgctggcgtcgctttcagcctggcagaatcgcgccgatgacgagcggatcgcgaccattcgcgctgtcgctacacagacccgctccctgcggatcgtcgggcggcagtttatcagcctcgatccagacgccgtgcgtaccgacgcccgcggcgatcgttcccttgagggccgttacgatctgtgggtctcgcctgcgccccgcaccgtcacgctgatgggggcggtcgccacaccggggaaactggcctggcgtccgggcgcaagcatcagggattacttacaggggcagctgcggctggctggcgccgacaggaataacgtgaccgttatcgatcctgacggcagtacggttgttgcgccggtggcgtactggaacgcacgccatattgaagcagagccgggcgctgttctgtgggtggggtttgatccccgggcggtgccggacgattttaccggtctgaatgagcaaatcgttgcgctcctgacgcggcggatacctgactga

SEQ ID NO: 117013 - DNA, 2094 bp, Enterobacter cloacae
atgaacaaactttttttactgagcggccttgctctggcgatctcttctgcctgccacgcggaactgcgtacctggcccgatccgaccggaccttcacagtccgactttggcggcaccggcctgatgcaaatgcccgacgcgcgctttggtcgggaaggggaattcagcgtcaactaccgcgataacgaccagtatcgtttttactcctcttcggtcgtgctctttccgtggctggaagggacgattcgttataccgacgtccgcacccgcaaatatagcagcgacgaggatttcagcggcgatcaaagctacaaggataagtcgttcgattttaaggttcgtctgtgggaagaggactatagcctgccgcaggtggcgctcggcaagcgcgatattgcgggcaccggcctgttcgacggtgaatatctggttgccagtaaaatggccggaccggtcgattttacctttggaatagcctggggatatcccggtaatagcgacaacgtgggtaacccgctgtgccacgacaacaataagtattgcacccgcggcgaatcacatgatgccggggatatcagctttagcgatatgtttcgtggtccgacgtcgctgtttggcggcctccagtatcagacgccctggcagcccctgcgcctgaagctcgagtatgacggcaacaattatgccgatgattttgccggctccattaagcagtcgagccatatcaacgtgggggcagtctatcgcgttgccgactgggccgatctcaacctcagctacgagcgcggcaatacgctgatgtttggcttcaccctgcggaccaactttaacgatctgcgccccgcgctgcgtgataacccgaaaccggcctggaaaccggcaccggcaggcgagacgctggactatacctcggcggcaaaccagctcaccgcgcttaagtacaacgcaggcttcgatgcgccggagatccttcagcacggcaataccttatacatgaccggcgaacagtatcgctatcgcgatccgcgcgaagcggtggatcgcgccaaccgtattctgatcaataacctgcccgacggggtcgacacgatcgctatcacccagcggcgtgaccatctgccgctggtcacgacgcaaaccgatgtcaccagcctgcgcaaacagctggcgggacagccgctcggccaggaggaggcgctcaggcagcagcgcgtcgagcctgtggataccacagcgttcgggcgcggctaccgtattcgcgccgatcgcttcagctacagcgtcaaaccgacgctggcgcagtcgctgggcggtccggaagatttctatatgttccaggcggggttgatggccagcgccagctactggctgaccgatcgtctgctgctcgacggcggcgtgttcgccaacctctataacaactacgacaagttcaaatcctcgctgcttcccgctgactccagcctgccgcgcgtcagaacccatattcgcgattatgtcagcaatgacgtctacatcaacaacttacaggccaactatgtcgatgcgctggggcacggcttctatgcccagatttatggcggctacctcgaaaccatgtacggcggtgtgggagtagaggcgctctggcgcccgcttgatagcgactgggcgctgggcgtggatgcgaactacgtcaagcagcgcgactgggacgacatgatgcgcttcaccgactacagcgcgccaaccggatttatcaccgcctactggaacccggcgaagctcaacagcgtgctgatgaagctgagcgtcgggcagtacctggcgaaggataaaggcgccaccctcgacgtcgcgaagcgattcgacagcggcgtgacggtaggcgcctgggcggcgctgaccaacgtctcgaaagaggattatggcgaaggtggctttagcaaaggcttctacatctcgatcccgcttgatctgatgacgatcggcccaaatcgcaaccgggcggtggtctcgtggacgcctctcacgcgtgatggcggccagacgttaggccgtaaatatcagctctatgacatgacgtcagaacgcgaaaccccggtagggcagtag

SEQ ID NO: 117014 - DNA, 1134 bp, Enterobacter cloacae
atgaaaaacgttaaattttccgtgcttgcgttggctatgatggcgttaagcggttgtactatcgtaccgggccagggacttcgcacccagggcaaagatattatcgatctgcctgacagcaattacgatctgaataagatggtcaacgtctatccgctcacgccggggctggtggagcagttgctgcctggcaaagtcgactcccgcgcgaatcctgaactggatcgccagctccagaactaccaatatcgcatcggcgtcggcgacgtgctgatggtgaccgtctgggaccacccggagctgaccacccccgcaggtcagtaccgtagcgccagcgatacgggcaactgggtgaatgccgatggcacgatcttctatccctatatcggcaaaattcgcgtcgtcggcaaaacgctggcccaggtgcgtgatgagatcgccgcccggctggactcggtgattgagagcccgcaggtggatgtcagcgtcgcggcgttccgctcgcaaaaagcctacgtgacgggcgaagtggctaagtcgggccagcagcccatcaccaacattccgctgacgataatggatgcgatcaatgcggcaggcggcctgacgtcagaggcggactggcgccacgtggtgctgacccataacggccaggatacgcacatttcgctctacgcgctgatgcagcgcggcgatctcacccagaacaaactcctctatccgggcgatattctcttcattccccgcaatgacgacctgaaagtgtttgtcatgggcgaggtgggtaaacagagcaccctgaagatggaccgtagcggcatgacgctggcggaagcgctgggtaatgcgcagggcgtgaatcaggatatggccgacgccaccggaatctttgtgattcgtccgttgcagggcaagcagaacggcaaaatcgccaacgtctaccagcttaacgccagggatgccaccgcgatggtgttgagcaccgaatttcagcttgagccttacgacatcgtctatgtcaccaccgcgccgctggtgcgctggaaccgcgtgatctctcagcttgtgccgaccattaccggcgtacatgacctgactgaaacagggagatatatcagaacatggccaaactaa

SEQ ID NO: 117015 - DNA, 444 bp, Enterobacter cloacae
atggccaaactaacgtttaacgccatcctggtgatctgtaccggcaatatctgccgctcccccattggagaacgactgctgcgccggctgcttcccaccgcccgggtcgattcagcgggaatttgtggcctggaagggcgcaccgccgattcacaggcgacagagatcgccgccgaacgcggcaccctgcttgagggccacgtggcgcgcaggctcacccccgccatggtgcgcgactacgatctgattctggcgatggagctggaacatatcgagcaggtcacggctatcgcaccggaggcgcgcggcaaaatgatgctctttggtcactggacgggcagaaaagagatcccggacccctaccgtaaaaaccgggacgcatttgaatatgtttatgggctgctggagcaggccagtctggaatgggcgaaacggctcagttaa

SEQ ID NO: 117016 - DNA, 2178 bp, Enterobacter cloacae
atgtcaacaaataaccttcacgcccatgatgcgtctgccgcgaataacgagatcgatctggtgcgcctgttgggtgagctgctcgaccatcgaaaatttattctcatccttaccgcgctgttcacgttggcggcactgctttatgcgctctttgccacaccagtttatcaggccgatgcgctgatacaggtggaacagaagcagggcaacgcgctactcagtaaccttagcgagttcatccctgactcctcgcctgagtcggcgccggagcttcagcttctccagtcgcgcatgatcctcggtaaaacgattgatgacctgaacctgcgcacgcaggtaagtgaaaactattttccccttgtcggacgcggctgggcgcggctcaccgggcaacagcctggcatcgtcgatatccgtatgctcaatcttccccctttcgcgggccgggcgcaaaagctgacgctgaccgtcggcgagaagggccactatcagctggaaggcgataacgtgacgttacagggcgtcgtgggacagccgctgagcgcggcgaatatcgccattaccattgccgctatccaggcgaagccgggtacgcaatttacgattacacagctgagcgagctggaggccattgacgcgctacagctgcgtttttccgtgagcgagcgcagcaaggacagtgggatgcttggcctgaccatcacgggggaagatcccgatgagatggcgcgcgtgcttaactgcatcgccgataactatttacaacagaacgtggctcgccaggcggcgcaggatgcgaaaagcctgcaatttttgaagcagcagcttccgcaggtgcgcagcgagctggaccaggccgaggagaagctcaaccgctatcgccagcaaaatgactccgttgacctgaacctggaggcaaaagcggtgctggagcagattgtaaatgcggacaatcagctcaatgaactgaccttccgggaagcggaaatttcgcagctctacaaaaaagatcaccccacctaccgggcgctgattgagaaacgccagacgctggagcaggaaaaaaaccgcctgaataaacgggtatcgtccatgccgtcgacccagcaggaggtgttgcgcctgagccgtgatgtggagtcgggacgcgttatctaccagcagctgcttaaccgcgaacaggagctgagcatcgcccggtcgagcgcaattggtaacgtccgcattatcgatccggccgtgacccggccgcagccagtcaagccgaaaaaagcgctggtcgtcgttctgggggttctcctgggtctgttcgtctctgtgggctggatcctggcgcgcagtatgctgcgtatgggcattgaaacgccggagcagctggaggagcatgggattaacgtctatgccaccgtaccgctgtcggaatggctggctaaaaagatgcgtttgcgcaaaaaagactttatgtcctcagggctgcgccataagaccaaacatatccccttcctggcggcggataacccggtcgatctctccgtggaggcgattcgcggcctgcgcaccagtctgcattttgcgatgatggagtcagcgaacaatatactgatgatctctggcgccacgcctgacagcggtaaaacctttgtcagcagtaccctggcggccgtcgtggcgcaggcgggccagaaagtgctctatattgatgcggatatgcgtcgcgggtatgcccatgatctgtttaagctcgacaatacctgcggcttatcggagatgttgtccggtaaggcggagtatacccagggcgttcagaccttcgataaaggcgggttcgataccatcgtgcgcgggcagatcccccctaatccggcggagcttctgatgcatacgcgtttccagcagctgctggactgggcgaatgaacgctacgatctggtgattatcgatacgccaccgatcctggcggtcaccgacgcggctgttgtcggtcgtcgcgcaggcaccacgctgctggtcgcccgcttcgggatgaacagcgtgaaggagatgctggtctgtgtacagcgtctggagcagagtggcgtcaataccaaaggggtgattctcaacggcgtcgttaagcgggcaagcaacgcttacggctacggctatcatcactacggttacaactattcgagtaattga

SEQ ID NO: 117017 - DNA, 618 bp, Enterobacter cloacae
atgctgcttcacattctctatcttattggcattaccgcagaagccatgaccggcgcgctcgctgccggacgtcgccgtatggacaccttcggcgtgattattattgccacggccaccgcgctcggcggcgggtccgtgcgcgatatcctgcttggccattatccgctcggctgggtaaaaaaccctgagtacgtcattatcgtggcaacggcagccgtgctaaccacgattgtggccccggtgatgcctcatctgcgccgcgtgtttctggtgctggatgcgcttgggctgattgttttttccatcattggcgcacaaatcgctctcgatatgggtgaaggcccggttatcgccaccattgctgccgtgatcacgggcgtgtttggcggggtgctgcgggatatgttctgcaagcgtatcccgctggttttccagaaggaactgtatgccggcatctcctttgccgcggcagtgctttatgtcgccttgcagcactatgtcaccagccacgatgtggtggttatctccaccctgctgtttggcttcaccgcgcgtatgctggcattgcgccttaagctgggccttcccgtttttcattacaaacacaatgcgcattaa

SEQ ID NO: 117018 - DNA, 864 bp, Enterobacter cloacae
atgatccgcagtatgaccgcctacgcccggcgtgaaatcaagggtagctggggtagcgctacctgggaaatgcgctcggtaaaccagcgctatctggaaacgtatttccgtatgccggaacagttccgcagcctggagcctgtggtgcgtgagcgtatccgtacgcgtctgacccgcgggaaagtggaatgtaatttgcgttttgagcccgatgccagcgcacagggcgaacttatcctgaacgaaaagctggcaaaacagctggttaatgcggcgaactgggtcaaaatgcaaagcgatgaaggcgagatcaacccggttgatattctgcgctggcctggcgtgatggccgccggagagcaggatctggacgcgattaccgctgagatcctggctgcactcgacggcacgctggacgactttatcgttgcccgcgaaaccgaaggccaggcgctgaaagcgatgattgagcaacgccttgaaggcgtgagcgccgaagtcgctaaagtgcgcgctcatatgccagaagtgctgcaatggcagcgtgagcgtcttgtcgccaaactggaagaggcggaagttcagctggaaaacaaccgtctggaacaagagctggtgctgatggcgcagcgtgtggacgtggctgaagagctggatcgtctggaagcgcacgttaaagagacctacaacattctgaagaagaaagaagcggtaggccgccgtctcgactttatgatgcaggagttcaaccgcgagtcgaacacgctggcgtctaagtctatcaatgcagaggtaaccaattcagcgattgagctgaaggtcctgattgagcagatgcgcgagcagatccagaatatcgagtaa

SEQ ID NO: 117019 - DNA, 717 bp, Enterobacter cloacae
atgcgtccagcaggtcgtagcgccaaccaggtgcgtcccgtcaccctgacccgtaactatacaaaacacgctgaaggctccgtgctggttgagtttggtgacaccaaggtgctttgcaccgcgtccattgaagagggcgtgcctcgcttcctgaaaggtcagggccaggggtggatcaccgccgaatacggtatgttgccgcgcgcaacccatacccgtaatgcccgtgaagcggcaaaaggtaagcagggcggccgtactatggagatccagcgcctgatcgcgcgtgcgctccgcgccgcggttgacctgaaaacgctgggtgagttcaccatcacgctggactgcgacgtgatacaggccgatggtggcacgcgtacggcctctattaccggtgcctgtgtggcgctggcagatgccctgaacaagctggttgccgccggtaagctgaaaaccaacccaatgaaagggatggttgctgctgtctccgttggtatcgttaacggcgaggcgctttgcgatctggaatacgttgaagattctgccgcagaaaccgacatgaacgtggtgatgaccgaagatggtcgcatcattgaagtgcagggtacggcagaaggcgagccattcacccacgaagaactgctcaccttgctggcgttggcccgagggggaatcgaatctattgtagcgacgcagaaagcggcgttagaaaattga

SEQ ID NO: 117020 - DNA, 642 bp, Enterobacter cloacae
atgaaatcgtatcagcgccagtttattgagtttgcgcttaacaagcaggtacttaagtttggcgagttcacgctgaaatccgggcgtaaaagtccgtatttcttcaacgccggactgtttaataccgggcgcgacctggcactgttaggccgcttctatgccgaagcgctggtggattccgggattgatttcgacctgctgtttggccccgcgtacaaaggcattccaatcgcaaccaccacggcggtagcgctggcggagcaccatgaccgcgacgtaccgtactgctttaaccgtaaagaggccaaaacccacggtgaaggcggcaatctggtaggcagtgcgttgcaggggcgtgtgatgctggtggatgacgtgatcaccgcaggtaccgcgatccgtgaatcgatggagattatccaggctaacggcgcaacgcttgcgggtgtgctgatttcgctcgatcgtcaggagcgcgggcgcggcgacatctctgctattcaggaagtggagcgcgattatggctgcaaggtcacgtcgattatcacgctgaaagacctgattgcgtatctggaagagaagcctgagatggctgatcatctggcggcggtgcgtcaataccgcgaagagtttggcgtataa

SEQ ID NO: 117021 - DNA, 597 bp, Enterobacter cloacae
atggcagaaaaacaaaccgcgaaaaggaatcgtcgcgaagaaatacttcaatctctggctctgatgcttgaatccagcgacggcagtcaacgcatcaccaccgcaaaactggcggcctctgtgggcgtgtcagaggcggcgctgtatcgtcatttcccgagcaaaacccggatgtttgacagcctgatcgagtttatcgaagacagcctgatcacgcgcatcaacctgattctgaatgatgaaaaagacaccagcacgcgtctgcgtctgattgtgctgctgattctgggctttggtgaacgtaacccgggtctgacccgtattctgaccggccacgcgctgatgtttgaacaggatcgtctgcaaggccgtataaaccagctttttgagcgtatcgaagcccagctgcgtcaggttctgcgcgagaagaaaatgcgggagggcgagggatataatacggatgaaaccctgctggcaagccagatcctggcattttgcgaagggatgctctcccggtttgtgcgcagcgagtttaaatatcgaccaacggacgattttgacgcccgctggccgttagtggctgctcagttacagtaa

SEQ ID NO: 117022 - DNA, 459 bp, Enterobacter cloacae
atgatgaaaaaaatcgacgttaagattctggacccgcgcgttggcgagcaatttccgctgccaacgtatgccacctccggctctgccggtcttgacctgcgcgcctgtcttgatgacgccgtagaactggcgccgggtgcaacgaccctgatcccgaccgggctggcgattcacattgctgacccgtcactggcagcggtgatcctgccgcgctctggcctgggccacaagcatggcgtcgtgctgggtaacctggtcggcctgatcgattctgactatcagggtcagctgatggtatccgtctggaaccgtggccagaacagcttcaccattgagccgggcgagcgtatcgcgcagatggtgtttgtaccggtggtgcaggcagaatttaacctggtggcagacttcgacgctaccgaccgtggcgaaggcggcttcggccattccgggcgcaaataa

SEQ ID NO: 117023 - DNA, 1215 bp, Enterobacter cloacae
atgatgagcctggccggtaaaaaaatcgttcttggcgtcagcggcggtattgctgcctataaaacgccagacctggtgcgccgtttgcgcgagcgcggggccgacgtacgggtcgcgatcaccgaaggcggcaaagcctttatcaccccgctgagcctgcaagccgtctcgggatacccggtatccgacagcctgctcgacccggcggccgaagccgcaatgggccacattgagctgggaaaatgggccgatctggttatccttgcccccgccacggcagatttaattgcccgcgtggcagccggtatggcgaacgatctggtaacgaccatttgcctcgccacgcctgcgcccgtcgcggttgtgcccgcaatgaaccagcagatgtaccgcaacgccgctacccagcataatctggacacgctggcctcgcgcggcctgctgatttggggaccggacagtggcagccaggcctgcggcgacgttgggccagggcgtatgctcgacccattgacgattgttgatatggccgccgcccatttctcgcctgtcaacgatctgcaacatctcaacatcatgattaccgcgggtcccacgcgcgagccgctggatccggtgcgttacatcaccaaccacagctccggcaaaatgggctttgcgattgctgccgcggcagccaaacgcggcgcgaacgtcacgctagtgagcggcccggtgtcgcttaccacccctgcgtttgtgcagcgtattgatgtaacgaccgcgctggaaatggaagccgccgtacaggcacatgctcaacagcagcatatttttatcggctgtgcggccgtcgctgattaccgcgccgaaaccattgccgacgccaaaattaaaaagcaaggtgatgaattaacaataaaaatggtgaagaacccggatatcgttgccggtgtcgccgcattgaaaactcatcgaccttacgttgttgggtttgccgcagaaacgaataatgtggaagaatatgcccggcaaaaacgtacccgcaaaaacctcgatttgatttgcgcgaacgacgtatcgctgtccacgcaaggatttaacagcgacagcaacgcattgcaccttttctggcaggatggagataaagtcttaccgcttgagcgcaaagaactcctgggccaacacttactggacgagatcgttacccgttatgatgaaaaaaatcgacgttaa

SEQ ID NO: 117024 - DNA, 666 bp, Enterobacter cloacae
atggaagagactgaactgctgctaccgcgtgaaaaaatgctgcgtcatggcgtcacgttgttaaaggacgacgagctgctggcgctctttttacgcacaggcacgccggggaaaacggtatttacgctggcgaaagaactgatagaccatttcggttcactgtatggattgctgaccgctgagctggaggcgtttacgcacgttgagggcattggcgtggcgaaatatgcccagttacggggcattgccgagctggcccggcgattttacaacgtgcgtatggaggaagaagacccgatcctcacccccgatatgacccgcgaatttctgcaaagccagctctccgatctggagcgggagatctttatggtgatctttctcgataacaaaaaccgggtactgaaacatacccgccttttttcgggaacattgagccatgttgaggtgcatccgcgtgaaattgtgcgggaagcgataaaagtgaatgcagccggcgtgatcctcgcgcataatcacccctctggctgtgcagaaccaagcagagctgacaaagcaattaccgaacgtattatcaaatgctgtcaattcatggacattcgtgtgctggaccatctgataattggccgcggagagtacatttcttttgccgaacgtggctggatttag

SEQ ID NO: 117025 - DNA, 237 bp, Enterobacter cloacae
atgtcccgagtctgccaagttactggcaagcgtccggtgaccggtaacaaccgttcccacgcactgaacgcgactaaacgccgtttcctgccgaacctgcactctcaccgtttctgggttgagagcgagaagcgttttgtcaccctgcgcgtatctgctaaaggtatgcgtgtaatcgataagaaaggcatcgatacagttctgtccgaactgcgtgcccgtggcgaaaagtactaa

SEQ ID NO: 117026 - DNA, 168 bp, Enterobacter cloacae
atggctaaaggtattcgcgagaaaatcaagctggtttcttctgctggtacaggtcacttctacaccaccacgaagaacaaacgtactaagccggaaaaactggaactgaaaaaattcgatccagttgtacgccagcacgtactgtacaaagaagctaaaatcaaataa

SEQ ID NO: 117027 - DNA, 810 bp, Enterobacter cloacae
atgcctgaattaccagaggtagagaccagccgccgcggcattgagccccatctggttggcgcgactattcttcatgctgtcgttcgcaacgggcgtctgcgctggccggtgtccgatgagatccacgctttaagcgacaaacccgtcctgagcgtgcagcgccgcgcgaaatacctgctgctggagctgcctgacggctggatcattatccatctgggcatgtcgggaagcctgcgcatcctcaccgaagagttgcctgcggaaaagcacgaccacgttgatctggtgatgagtaacggcaaagtactgcgttacaccgacccgcgtcgctttggcgcatggctgtggaccaaagagctggaaggacacaacgtgctggcgcatctcggacctgagccgctgtcagaggcgtttaacgcggattatctcaaagagaagtgcgcgaaaaagaaaaccccgattaaaccctggctgatggataacaagctggtggtgggcgtgggaaatatctatgccagcgaatcgttgtttgccgccgggatccatcccgatcggctggcctcctcgctgtcggcgcaggagtgcgagctgctggtcagagtaattaaagcggtactgctgcgctcaattgagcagggcgggacgacgctgaaggatttcctgcaaagcgacgggaagccgggctattttgcgcaggagttgcaggtttatggccgtaagggtgagccgtgcagagcctgcgggacgccgattattgccacgaagcacgctcagcgcgccacgttttactgccgtcagtgccagaagtag

SEQ ID NO: 117028 - DNA, 480 bp, Enterobacter cloacae
atgagcacaaaagcgatttatccgggtaccttcgatccgatcactaacggtcatcttgatatcatcacccgtgcggcgtgtatgttcgacaaggtgattctggccattgccgccagcccgagcaaaaagccgatgttcgacctgaacgaacgcgtgcagcttgccaccgatgcgatttcgcatctgtcgaatgttgaggtcgtcggattcagcgacttgatggcaaactttgcccgtgaccggcaggccaatatcctgatccgcggtcttcgcgcggtagcagacttcgaatatgagatgcagctggcacacatgaaccgccatctgatgccggagctggagagcgtattcctgatgccctccaaagagtggtccttcatctcttcctcactggtgaaagaggtggcgcgccatcacggggacgttacccacttcctgccggttaacgtccaccaggcgttgatggaaaagctaaagtaa

SEQ ID NO: 117029 - DNA, 771 bp, Enterobacter cloacae
atgtcaacgcgtctgtcggtcgtgatgatcgccaaaaacgccgccgacctgcttccggattgcctggcctctgttgcctgggctgacgaaatcgtcattctcgactccggaagtacggacaacacggcggacgttgcccgtgcagccggggcaaaagtctttaccgacaccgactggcagggctacggtattcagcgccagcgtgcgcagggttacgccacgggcgattacgtgttgatgatcgataccgatgagcgcgtcaccccggaactccgacaggccattcaaacggtgcttgccgcgccacagcccggcgcggtctacagtatcgcgcgtcgtaactatttcctgggccgctttatgcgccacagcggctggtaccccgaccgcgtgatgcgcctctatgcgcgcgagcgttatcagtacaacgacaacctggtccatgaatctctggcctgcgatagcgctcaggtcatccctctgacgggcgatctgcttcatctgacctgccgcgatttcgccagcttccagcggaaacagctgaactatgccaccgcctgggcacaggagcggcatacgcgcggcaagaaggccacgctgaccggcatcttcacccacacgctgggcgcgtttctgaaaacgctgctgctgcgtggcggcgtgctggacggcaaacagggctggttactggccgtagtgaatgcccagtatactttcaacaaatacaccgagctgtgggcgctgaaccgcggctactcagagaaaacgtga

SEQ ID NO: 117030 - DNA, 1275 bp, Enterobacter cloacae
ttggaattgttgtataccgccctgctctacatcattcagccactggtgtggctgcgactgttgcttcgtagccgtaaagcgcctgcgtaccgtaaacgctgggccgaacgttatggctactgccgcaataaagtggcgccggacggtattctgctgcattccgtgtcagtcggggaaacgctggccgccattccactggtgcgtgccctgcgccaccgttatccgtcactgcccatcaccgtcaccacgatgacgccaaccggctcagagcgcgtgatgtctgccttcggtaaagacgtgcatcacgtctacctgccgtacgatctcccctgcgccatgaaccgtttcctgaataccgtgcgccctaaactggtgatcgtcatggaaaccgaactgtggccgaatatgatttccgccctgcatgcccgtaaaattcctttggttatcgccaacgcgcgtctgtcggaacgctcggcgaaagggtacggcaagctgggtaaatttatgcgtcgcctgctcagcaaaatcacgctgatcgccgcgcagaacgaagaagatgccgcgcgctttatcgccctcggcctgaagcgcaaccagcttgcggtcacgggtagcctgaagttcgatatttccgtcacccctgaactcgccgcccgtgcggtaacgctgcgtcgtcagtgggcgccgcgtcgccaggtctggattgccaccagcacccatgatggcgaagaagccattattcttcaggctcaccgccagctgctggaaaaattccctgatttactgctgattctggttcctcgccatcctgagcgttttaaagatgcccgcgagatggtgcaaaaaggcggtttcagcttcaccctgcgcagcagcggcgaaatcccctctggcagcacgcaggtggtgattggcgatacgatgggcgaactgatgctgctgtacgggatcgccgatcttgcattcgttggcggaagcctggtggagcgcggtggtcataacccgctggagccagcagcccacgccatccccgtactgatggggccacacacgtttaacttcaaagatatctgcgcgaaattgcagcaagccgatggcttaatcaccgtgaccgacgcggattcggtggtcaaagaggtctctacccttctgactgacgaagattaccgcctgtggtacggtcgtcacgccgttgaagtcctgcatcagaaccagggcgcactgacccgtctgctgcaacttctgcaaccttacctgccgcagcggagccactaa

SEQ ID NO: 117031 - DNA, 990 bp, Enterobacter cloacae
atgcaaaattcagcgcctttattaagcgtggtggtggccgtttataacggtgaagcttttctcgatcagttctttacctgccttgtaaatcaacacatcgacagtatggaagtcatcatcgtgaatgacggttccactgaccgctcgatgcagattgtcgaaaaatggcgcgaaaagctgccaaagatgcaggttattgaacaacctaatcagggcgtgtccatcgcgcgtaatactggcctggccgttgcgaccgggcagtatctctctttcccggatattgatgatgtcttcaaacccggcatgtaccagcgtctgctggatatggccgtcacgcagaacctggatgtcgccacctgcaatggcaactacgtctgggaaaataacaaaaaaccgtctcgccctatcttccctgaagataagctcgcctcaacgggcgtcatgaatggcgcggcatggttaaaaaaggcgctggattcacgtaagttcctgcatgtgacctggctgaatatctatcgtcacgattttattcgtcagcacggcttccgtttcgagccaggcctgcgccatcaggatatcccgtggacgactgaggtgctgcttgccgcggaacgcgttcagtacaccagcgaacgcttttacgactactacattcactccgcctcggtatcgcacaccccggataatgacgacacgctgattcgctctgcgcgccattatatgaagatcctgaagatgcttgatgccattaaccagcgctacccggataaagtgaaaaatatcccggcctgttactggcaaatcgctaaagagggtctgggaattattcataccttcgacaacatgaaggatgaggcgaagaaatcaatgataatcaaagagttcttcgacaccgggatctggaagctcatctggaaaagtgccaaaagcccgcgtttgcgctggcgcctgggccggcgctacttccgtttaaaacggtatctggcataa

SEQ ID NO: 117032 - DNA, 1101 bp, Enterobacter cloacae
atgcgcatcctaatgattattgatggtttacccggtggaggagccgaaaagacggttcttaccctctccagcggactgacagaagtggggcatcaggtcacccttttctccttacggaaggtgtgcgactacgccattccagaaggcatcgattttcaggttgtgcaggatacctgtaaaaaaccctggcggaagctgaccgagatcccgcgtcgcgcccgtttgctggatcgcgccatcgagcaggcagaacgcagcggtaaatttgacgtcgtgttctcacatctgcataaaaccgaccgtatcgtggcgcacagccgcgtgctggatcgggataaggtctggttctgcgtacacgggatgttctccttctcctatttgcgccatcgcagcgggctttctcgctggtttaagcattataaaatccgtcatacctatgaaaaccgcaacgtggtggcggtatccggcgccgtgctgcacgatctgtctgaagtactcgcgatccccctgcggcgcaaagcggttatccataacccctttgatatccctgaaattcagcgtctggcggaagcgccctttgagatgcaggggcaggattacattatccatgttggccgttttcatgaacacaaacgtcacgacaggctgctgcgggcgttcgcgctgagcaagatcgacgcatcgctggtgttgatgggcaaaggttctgacgcgaaaataaatcagctcaaacagcttgccgctaagctgggaattgaaaacaagatcgtcttccgcccgttcgaaaccaacccctacccgtggatcaaaggggcacgccttttagtgttaagttccgactgcgaaggttttggtaatgtactggtagagtccattatctgtcagaccccaccggtgagtacaaactgccctggcggccctgctgagatccttactggccccctggcgcgtggtctgacagcgttaaccgacgaatcactggcgaaaacactggcagaactgtatgcctctccgccggttgttgatcgcgaaacgatcgcatcgttcggtatcaacgccatttgccagcaatacattgctttggtcgacaaccaaaaataa

SEQ ID NO: 117033 - DNA, 1128 bp, Enterobacter cloacae
atgaagcttcatcgtctggccattgtgcgccaaaaatatcgtccggatgggggagcagaacgttttgtctccagggcacttaccgcgctgagcaatcaaaatcttgagctcaacgtcatcacccgcgagtggcagggcgaaaagcaggacgactggcatattcatatttgcgatccccgaaagtggggccgcatcagccgtgagcgcggctttgcacacgccgcacgcgcgctgtggcagcaacagcagtttgatattgtccagagccacgaacgtattccgggctgcgatatttaccgcgccggggatggtgtacatcgacgctggctgctacagcgtacgcgtattcttcccgcctggcgcgcgaagctgcttatgcacgatcgctatcaccgctacgtgatgcacgcagaacgtgaaatgtaccaggctcccgagttgaaagccgttatctgtaatgcggagatgatcaagcgcgaaatcgtcgaagactttgatattgacgcaaaaaagatacatgtgatttataattcaatagattccagccgcttcgttccggcagaagagagacaacgcgctgtactgcgtcagcaatttggcttacccgctgatgccgtcattttctgcttcgtgggttcaggatttgaacgcaaggggctggcaagcgctattcgggctatagcaggaacctcggcatggctggttgtggtcggtcaggataaagcggaaagccgttatcgcgacctcgcccgttcattaggctgtgaggggcaaatccgtttcctggggatgcaaaaagagacgctgccgttttatcagctttctgatggtttactgctgccgacgctgtatgatcctttccctaacgtcatacttgaagcaatggcctgtggattgcccgtcattacgtcagagagttgcggtggttcagaatttattgagcaaggccagaacgggttttactgtgatgcacttgatatccacacattgaaggaggccgtcatgtccatcccttcactggagaaaaataacaatatggggcttgcggcgcgtgaacgcgtcagagaagcaacccctgaaaaactatcaagtcagcttatttcgctttatcaaaaattactggattaa

SEQ ID NO: 117034 - DNA, 1071 bp, Enterobacter cloacae
atgatgatgaataacttacctgacacgcctgatttgcgcattttactgatcaaacttcgccatcatggtgacatgttactcaccacccccgtcatcaattcattacgccagaaatggcctgaagcccaaatcgacgtgcttctctatgaagagacgcgagacatgctcgccgcgcatccggcaatcaggacgatctatggtatcgatcgtaaatggaagcagctggggacgctgaagcacctgcaaaaagagtggcagttgcttcgtgctttacgcgctcagcattatcatctggtgatcaatcttgccgatcagtggcgcagcgcgattgttacccgcttcaccggtgcaccgattcggctcgggttcgcttttaacaagcgcaataatgccttctggcgtttttgtcacagtgaactggtctcggtcgccagccatcagtcgttgcacaccgttgaacaaaatctctccatactgtcagcgctgccggtaatggccaaccctaccgtgaccatggcttacagcgcggatgactggcgccatgctcaccaaaagctgtcgcaaaagggcgtgggagaccgctacatcgttattcaacccacttcacgctggttctttaagtgctgggatgaaggcaaaatggcgcaaactatcgccgcgttgcagcaggacggccacactatcgtcctcacggcgggaccggataagaaagagctggcgatgattgaccgcattcttgccgcctccccgcagacgggtgttgtatcactggcaggccagttaaccctgcgccaactggcctcgctaatcgatcacgcgatcctgttcattggcgttgactccgtacccatgcacatggccgccgcccttcagacgccctgcgtggcgctgtttggcccgtcaaaattgacgttctggtcgccatggcaggttaacggagaggtcatctgggcaggtaactacggcccgcttcccaaccctgacgccattgatacaaaaacgacggaacgttatctcgacgccatccccgttgatgctgtcgtctccgccgcaaggagatacctgcaatga

SEQ ID NO: 117035 - DNA, 954 bp, Enterobacter cloacae
atgaaaaaaccagcgtttatcatcacgatcgataccgaaggggataatctctggcagaaccaccgggtgatcaaaacggaaaacgcgcgctacctggcgcggtttcaggcgctttgtgaacgcttcggctttaagcccgtctggctgaccaactacgagatggcagtcgaaccggtattcattgagttcgcgaaagaggtcatagcccgcggccagggtgaggtgggaatgcatctccatgcctggaatagccctccggagcacgatctgaccggtgatgactggcgctggcagccttatctgattgagttttcagacgaggtcatgcgtgagaaagtgctcttcatgacccgcttactggaagagactttccagacaaaaatgctcagccatcgcgccgggcgctgggcattcgacagccgttacgcccagttgctgattgagctggggtatcaggtagattgttccgttacgccgcgcgtgaactggcgcaacgcgaaaggtgccccgcagggtaagggcggaacgaattaccagcattttcccgatcgtgcctactttttggacgtagacgacatttcccggccgggaaacagccctctcctcgaagtgccgatgagcatccagtataaacacccggcatggctgaattccctgaagcagggttatgatcgtctgcgcggtaaataccgttctccgtcagttaactggttacgtccgtccggaggaaatgcggcggagatgattaaggttgcgcagcagtgcctggctcaggggaatgactacgtggaattcatgctgcattcgtcggaatttatgcctggcgggagccctacttttaaagacgaggtcgcgattgaggggctgtatcaggatctggagcagctctttacctggttatcagataagaccgtggggatgacgctggcggagttttaccagtacaaaaaatag

SEQ ID NO: 117036 - DNA, 900 bp, Enterobacter cloacae
atggcttttttaagcgtcattattgctgcgcataacgctgaagctacgctgcacgccacgctttcaagcctgctggcagcaaccgatcaggacactgaaattattattttcaatgacagttctgaggatgccacgcaggcaataattgatgagtggtcgccgaaatttcctcagatcataacgcgcaacgtgaactttcgtaacgtaggccgggtaagaaacagcgctgtcgcgctggcatcgggtgagtatattacgatgctcgacagtgacgattgcttaaagccgggcagcctcagggacgcaatggcctacctgaaagcgcaacgtccggatatgttactgacacgtttgcttgagattcgcgatccccggagaatgacttcagactggcagggatttaatcctgtgccattgtcacaacatgaagcaattgctcgtttcttacgtcataaagactttcaggcacatctcattggccagtttattcatcgtagtctttacgagaaaaatcccatacctccgatgttatgttatgaggatttcgctgtcttcccgggaatgttgatgcaatcgagcaaaatagcctatcaacgccaggggcattattattacatcaagcgtcgcgacagtttgtcgagcagtctggacgccagcaaaatttcaacgcttgtcgaatgcacgttacagatggaaagaacatttccgtcacgctacaaacatctcgtcaattgccactggtttgatatttacagcaaccatcggtcctgtctgacagaccaacaattgcagctcgtgaaacaacgcgtaaagaccatgtatacattgtcttttttcctgtccaccgatgttcgttttagctacaaaaaaagggttattgaggcgttatggaaaaaataa

SEQ ID NO: 117037 - DNA, 1110 bp, Enterobacter cloacae
atgagttatgtatttctgctgattttactctttccggtgaaactcatccggaagctgtttcgaaaggacacgggcaagaaccttgtcattcagacagccaaaatcggtgactttattaatgcgacgcctcttctggcatatctgcaaaaaagcgatgtgttgatcagtcgcagcgttggcgcgctggcgaagcatgatgagactattgagcagatctattttattgagcagcataagcgcaacctgtggcgtaaactgtgcttcgcgtgcaggatcatgaaccgctacgacaacgtctacctgctacagcccaacagcgtgaacctcttttttgccgccgtctgcaatgccaaaaacaaacaatttttaagcatttacacgcgcaggtggtatcacgggattttctatctcgcggccgacggtaccgttgagcatggcaaaaaaacgctttcggtgacgaactacctgaaactggccgaccgctcgctcacgtggcaagactctcccaagcacgccacaaagccactcttcaagccgacgacctggccggccattcttgataaacctggcgttatccgcatcggcatcagtattgcggcgggcaataaagccaaaaccgtccctccggttatctggaagcggattgttgatcaactcgctgatttaccctgcgagttttatgtcttcggcgcgccaaacgaacagtcgtggatggacgatatcacccgtctttacggtgacatccccaattttatcaatcttattggcaaaatttcgctggaagagcttccctgggccatttctaagatggactgctatatcgcgtctgactcggggaatgtctacatcgcagacgccgtcggcgtgccggtggtcctgctgtttggaccgtgttgtcactatgaacagcgtccgcttggcaatgtgatgctgatcgggaatgacgataacatttgttcttatgtgtttgaaacgcgctattacttcccgcaagaacgggaagcgctattctctgtcactgactccgcgttacacgatcttcagcagtttatccgtacattaccaaaagcccgctcactggctagcgctaccgacgctcaaggaaactaa

SEQ ID NO: 117038 - DNA, 984 bp, Enterobacter cloacae
atgcgggtattgatcgttaaaacctcctcaatgggtgatgttctgcatacgctgccgtcgctgacggacgccatgcgggccattcccggcatccgttttgactgggtggtggaagaaggcttcgcgcagatccccacctggcatgaagcggttgatcgcgtgatcccggtggccattcgccgctggcgcaaagcatggttctccgcaccgattaaagccgaacgcaaagccttccgcgaagcggtgcaggcccggcgttacgacgcgatcgtcgacgcccaggggctggtgaaaagcgccgcgctggtcacgcgtctggcgcacggcgtaaagcacggcatggactggcaaaccgcccgcgaaccgctggcgagcctgttctataatcgtcgccaccatattgcgaagcagcagcacgccgtggaacgtacccgcgagctgttcgctaagagtctcggctatgcaaaacccgacctccagggtgactacgccatcgcacagcattttctgcgcgaaacggacaaggatatcgcgccctatctggtcttcctgcatgccacaacgcgcgacgataagcactggccggaaacgcactggagaaggctgattgaactaatgcaaccttgcggtatccatattaaactcccgtggggcgctgaacatgagcggcagcgagcggaacgtctggcagcaggtttttcccacgtcgaggtgttacccaaactcacgctggcgcaggttgccgcacagctggcgggcgctaacgccgtcgtttctgtggatacagggttaagccatttaaccgccgcactggatcgtcctaatatcacgattttcggcccgaccgatccggggttgatcgggggttacggtaaaaaccagcatcagatggtcagccctacgcaacaaacgaaggatattagcgcagatgctattttttcatttttacagggcagccatcggctttccaacagggatatttaa

SEQ ID NO: 117039 - DNA, 1047 bp, Enterobacter cloacae
atgaaaattctggtgatcggcccgtcatgggtgggcgacatgatgatgtcgcaaagtctctatcgcacgctcaaggcgcgttatccccaggcgataatcgacgtgatggcacccgcatggtgccgtccgctgttatcgcgtatgccggaagtgaacgaggcgatcccgatgccgctcggacacggcgcgctggaaatcggtgaacgccgcaaactcggccacagcctgcgcgagaaacgctatgaccgcgcgtacgtgctgcctaactccttcaaatccgcccttgtgcccttctttgcgggcatcccgcaccgtaccggctggcgcggtgaaatgcgctacggcctgctgaacgacgcccgggtgctggataaagaggcctggccgctgatggtggagcgctacgtggcgctggcctacgacaaaggcgtgatgcgcagcgcgaaagatctgccgcagccgctgctgtggccgcagctccaggtaagcgatggggagaaatcccacacctgcaacgcatttggcatttcgtccgaacgcccgatgattgggttctgccctggcgcagaattcggtccggcaaaacgctggccgcactatcactatgcagagctggcgaaacagcttatcgatgaaggctatcagattgtgctgtttggctcggcgaaagaccatgaggcgggcaatgaaattctcgccacgctgagcaccgagcaacaggcatggtgccgaaacctggccggggaaacgcagctcgagcaggcggttatcctgattgctgcctgtaaggccgtggtcagtaacgactctggcctgatgcacgtcgccgccgcgctggaccgcccgctggtcgcgctgtatggcccaagcagcccggacttcacgccgccgctgtcgcacaaggcgcgcgtgatccgtttgatcaccggctaccacaaggtgcgcaaaggcgatgccgcagaaggttaccatcagagcctgatcgacattaccccgcagcgtgttctcgaagaactcaacgcactgctgttgagcgaagaaggataa

SEQ ID NO: 117040 - DNA, 933 bp, Enterobacter cloacae
atgatcatcgttactggcggcgcgggctttatcggcagcaatattgttaaggccctcaatgacaaaggcatcaccgacattctggtggtggacaacctgaaagacggcaccaagttcgtgaacctggtggatctgaacatcgctgactacatggataaagaagacttccttatccagattatggcgggtgaagagttcggcgagatcgaagccatcttccacgaaggtgcttgctcctccaccaccgagtgggacggcaagtacatgatggataacaactatcagtactccaaagagctcctgcactactgcctggagcgtgaaattccgttcctgtacgcctcttccgcggcaacttacggtgggcgcacttcagatttcatcgaatcccgcgaatatgagcagccgctgaacgtttacggttactccaaattcctgtttgatgagtacgtacgtcagatcctgccagaagcgaactcgcagattgtcggcttccgctacttcaacgtctacgggccgcgcgaaggccacaaaggcagcatggcgagcgtggcgttccacctgaacacccaattaaataacggcgaaagcccgaaactgttcgaaggcagcgacggcttcaagcgtgacttcgtctacgtgggcgatgtggcggcagtaaacctgtggttcctggaaaatggcgtgtccggcattttcaacctgggcaccggccgcgcggaatccttccaggcggtggcagacgcgacgctggcgtaccataagaaaggcagcatcgagtacattccgttcccggataagctgaaaggccgctaccaggcattcacccaggcggacctgactaacctgcgcgccgcaggctacgacaagccgttcaagaccgttgccgaaggcgtaacggaatatatggcctggctgaaccgcgacgcataa

SEQ ID NO: 117041 - DNA, 1197 bp, Enterobacter cloacae
atgcgtggtgatttttacaaacagttaaacagcgacctcgacaccgcacgtgcggaagggttgttcaaagaagagcgtattatcacgtctgcccagcaggcggacatcaccgttgccgacggcagccatgtgatcaacttttgcgcgaacaactacttaggtcttgcgaatcaccctgagctaattgccgcggcgaaaaacggcatggacacccacggtttcggtatggcctccgttcgctttatctgcggtacgcaggacagccacaagcagcttgagcaaaagctggcgaacttcctcggaatggaagacgcgattctgtactcctcctgcttcgacgccaacggcggtctgtttgagaccctgctcggcgcagaagacgcgattatctccgacgccctgaaccacgcctccatcatcgacggcgtacgcctgtgcaaagcgaagcgtttccgctacgccaacaacgacatggtggagctggaagcgcgcctgaaagaggcccgtgaagcaggggctcgccacgtcctgatcgccaccgacggcgtgttctccatggacggtgtgatcgccaacctgaagggcgtgtgcgatctggcggataaatacgacgcgctggtgatggtggatgactctcacgcggtcggttttgtcggcgaaaacggtcgtggctcccacgaatactgcgacgtaatgggccgcgtggatatcatcaccggtacgctgggcaaagcgctcggcggcgcgtctggcggctacactgccgcgcgtaaagaggtggtcgagtggctgcgccagcgctcccgcccgtatttgttctccaactccctggcgccggcgattgtggctgcctccattaaagtgctggagatggtggaatccggggctgagctgcgcgaccgcctgtgggctaacgcccgcctgttccgtgaaaaaatgagtgccgcaggattcaccctggccggtgccgatcacgcgatcattccggtgatgctgggcgacgcggttgtcgcgcagaaatttgctcgtgagcttcagaaagaagggatttacgtgaccgggttcttcttcccggtggtaccaaaaggtcaggcgcgtatccgcacccagatgtctgcggcgcactcgcctgaacaaattgaacgtgcggtggaagcctttacccgcatcggcaaacagctgggcgtcattgcctga

SEQ ID NO: 117042 - DNA, 1029 bp, Enterobacter cloacae
atgaaagcgttatccaaactgaaagcggaagaagggatttggatgaccgacgtgccggagccggaagtcggtcataacgatctgctgatcaaaattcgtaaaaccgccatctgcggtactgacgttcacatctacaactgggaccagtggtcacagaaaaccattccggtaccgatggttgtcggtcacgaatatgtcggcgaagtggtgggtatcggccaggaagtaaaaggcttcaacattggcgatcgcgtctccggtgaaggccacattacctgcggtcactgccgtaactgtcgcggtgggcgtacccacctgtgccgcaacaccgtcggcgtgggcgtgaaccgtccgggctgtttcgcggaatatctggtgatcccggcgtttaacgccttcaaaatcccggacaatatctctgacgatctggcctccattttcgacccgttcggcaacgcggtacacacggcgctctccttcgacctggtgggtgaagacgtgctggtttccggcgcgggccccatcggcattatggcggcagccgtggcgaagcatgtgggtgcgcgcaacgtggtgatcaccgacgtgaacgaataccgcctgtcgttggcgcgcaaaatgggcgtcacccgcgcggtggatgtctcgaaagagagcctgaccgatgtgatggaagagctgggcatgaccgaaggctttgacgtgggtctggagatgtccggcgcgccaccggcgttccgcaccatgctcgacaccatgaaccacggtggccgtatcgcgatgctgggtattccaccgtcagatatgtccattgactggaacaaagtcatcttcaaggggctgttcattaagggcatctatggccgtgagatgttcgaaacctggtacaagatggccgcgctgatccagtccggtctggatctgtccccgattatcactcaccgtttctccatcgatgagttccagcagggctttgacgcaatgcggtccggccagtcagggaaagtgatcctgagctgggataagtaa

SEQ ID NO: 117043 - DNA, 915 bp, Enterobacter cloacae
atgtttaaattcctgaatgctcgctaccgccacattaccgggcgtcataacattccttacgcttcccttccggtcacgcgcgatctcgttgcggtggattccattgtgatcccgtgtacgggcgcggatttcgtcgaagaggcgttattgtcagcgacctttgcagagcgttatgccaccgacgtcagcgagattgttatcgtcagcgatcagcctgaatccgctttcggcgagctgccgccaaaaacccgcgttgttaccctcacgcttccaaaacgtgaagaaggttaccgctataagcagatctacctcagtcgtctggtgaagcttaacgctccgttgcaggcgcgcggtgaaggtgtgctgatgatcgactccgatctcaacctgcttaaaatgccagagatcaacatggcggatatgcacatctactccagcttccgtcagggcaaaatgattgccaagctggacggcgcgccagcggagaaagtgccggcatattacaaagaaacggtgcgtccgtatctggtcgatcacgttaacggcgcgtttcttgccgccaccaaaaagacctggcgccgtatctgcccgctgtggctgacgctgttccaggatacctgggagctgatggacgacacgcagccgccgaccgatcagctgccgctcgctgcgctgctggacatgctggatgtaaaaacggttaacctcggtgactggatgaactggccggtctccaagaagatcggcggtcaggaagccgttgtgccgaaagaggtgattggcgcgcacggtggtttcccgctttccgaatggcagaagtatctggaatcgccggataacaggctgctgttcaaaggccaggattacacccgcaaggtgcgttacctgacggacgaagagaaaaagaatcagtaa

SEQ ID NO: 117044 - DNA, 1206 bp, Enterobacter cloacae
atgccgcaaaaacgtaaaatcctcctcctggacacgggcaaagaatgggggggaggtaccaacagtatgcttgagcttctgaagcgaatcaaccgcgacaaattcgacattacttgttgtttttacagtgattatagtcgtgctgaaggtcaaacgattggccaggtgctcaatagcattgggatcccgctactcgttatccctcaacgtaagcaaccggcatgggcaaaactactgaaagaagcgggacgtggtctgctgtttttctcgcgttcagcgcgcaaagcatttacgcggcatatcgataccctgtggcgcattcgccccaacgtcagcaagatcgagaccattttcagggaaggtggattcgatacgctgtatatgaacaaccagccaggctctaacgaagaagggtatctggcgggcgcaaacctgcatgcgcggataatccagcactgccggattgaaccggtgctgaccccgccgctggtgaagctggtcaatgcccatgccacaaaaatcatcgccgtctcgcacggcgttgaacgcgtgttgcttcagcatggcgtccggccagcgctgtgtaccacggtcaacaatgctatcgacatccaccagcctttgcccgaccgacgcgcgatgcgccagcgtctgaacattgatgacgacacgtttgtgttcggcagcattggctcgctaatccctcgcaaagccaaccaccatacgctggaggcgctggcacagttcagccagaggcacccgcaggcaaaatggaagatggtgctggtcggtgaaggggcggagcgcggcgcactggcggcacaggctgacgcgctgggtattgctgagcacgtcatttttaccggtttccagaacacgccttttgactatctcgccacctttgacgcatttattctggcctcgaagagcgaaggcctgccgcgcgtcgtgctggaggcaatgctgctgaatattcccgtgattggttcaaaggtgaccggcacggcagaattgatcgatcatgagtcgaccggcctgctgtttccctggagcgacgtgtcgcaacttgctcaacatctggataatatctggcaggatcctgctctgcgcgcccggctcgccgctgccgcacaccagaatgtctgcaacatgtatgccattgaaagctatgttaacggtgtcgaggccgttcttggcgcgcaataa

SEQ ID NO: 117045 - DNA, 801 bp, Enterobacter cloacae
atgtttaaaataacggtctgcttattaacgtttaactccgaaagaacgttgcacgatgttattcctcctcttttaaaaatagcagatgaattcgttatagtggattccggaagtacagactcgacgatatatatttgccagagttatggattgtcgcccatattcaaaaaatatagctggcacggcgagcagatgaaccatgccgtatcccatgcgcataacgactgggtgctgtgcatggacagtgacgaaatactcgatcaagaaaccgttgatgctattttagaattaaaaatgggcgatgaacccgaactggatatggcgtggcggatatgtcgtcactggtttgttttgggagaaaatgtccgaacgatttatcccgtctcatcaccggattatccggtgcgtctttttaaccgtacgcagtcgcgatttaataaccggccagtagacgatcaggttgaaggttttctccgttctgaacgtattccaggttatgtcagacatgagacgtttcattcgctgcatgaactttttaataaattaaacggatataccactcgcctggttcaatatcagacgatacgtccctctcttggtcgcggcgcgatcagcgctatcggcgcatttttcaaatggtatctgtttagcggtgcctggcgtcagggcaaagtaggtgtggtgacagggttttatgccacggcgtacagttttttgaagtatttcaaggcctggtatcaggatcgggaaaagagagagtccgttgcaaaagagcagtcggactcttatctggcagaatag

SEQ ID NO: 117046 - DNA, 798 bp, Enterobacter cloacae
atgccgccagccatctctgtcgccgtcctgcctaatgcgcctcacgcgcatgaaatggcgaccaaagcgcacaatggcggccatcaggtcctcatccatctgccgatggcccccctcagcaagcagccgctggaaaaagataccctgcgcccggacatgagcagcgacgagatcgatcgcatcatccgcgatgcgtacaataaagtgccgtatgccgtgggtctgaataaccatatgggcagcgcgatgacctccagcctgtacggtatgctgaaagtgatgcaggcgctggagcgttacaatctctatttcctcgacagcatgaccatcggcaacagccaggcgatgcgtgccgctcaggggacaggtgtaaaagtcatcaagcgcaaagtattcctggacgactcccagaacgaagcggatatccgcgtgcagttcaaccgcgcggtacagctggcgcgccgtaacggttcggcgattgccattgggcatccgcatccgtctaccgttcgcgttttgcagcaaatgttgtcgggattacccgccgatattacgctggtgcgtccgagcgatctgctcaatgaacctcaggtggatacttctcgtccgggtagcacgcaaccatccgcaacgcagccgcgtaatccattccgcggcgtgaagaactgcacgctgaaacagccgcctgaaccggtctatgcaacccgcttcttctcggtgattggcgaaagcatcagcagcagtacactggttaaatacgtccagcaacagtggcagggttggggaaaaaaagcctga

SEQ ID NO: 117047 - DNA, 1284 bp, Enterobacter cloacae
atgaggggaaaggcgattttttcaatcacatgggtcgtgaagccgcttcggttatcagtcagacctctgctttgcgccagcgcactcagcgctggcgtattgctgtgcgccgcatccgcccacgcggatgaccgcgatcagcttaaatccattcaggccgatatcgccgccaaagagcgtgcggtacgtcagcagcaacagcagcgcgccaccctgctcgcccagcttaaaaagcaggaagaggccatttccgccgccgcgcgtaagctgcgtgaaacacaaaacacccttgcccagctcaataagcaaatcgatgaaatgaacgcgtcgattgcgaaactggagcgtcagcgcgatgcccaggagcggaaccttgctgcacagcttgatgctgctttccgtcagggtgagcacacaggccttcagctgatcctcagcggtgaagagagccagcgtggtcagcgtttacaggcctatttcggctatctaaaccaggcgcgtcaggagaccattgcgcagctgaaacagacgcgcgaagaagtcaccacgcaaaaagccgagctggaagagaagcagagccagcagcaaacgctgctctacgatcagcaggcgcagcaggagaagctagagcaggcgcgcaatgagcgtaagaagacgctcgccgggctggagtcctctatccaggcaggacaaagccagctgagcgaaatgcgcgccaacgaatccagactgcgtaacagcattgcccgggcagaagccgcggccaaagcgcgcgccgaaaaagaagcgcgcgaagcgcaggcggtgcgtaataagcagcaggaagcctcccggaaaggcaccacctacaaaccgactgaaaatgaacgttccctgatgtcgcgtaccggcggcctcggctccccgcgtggtcaggcttactggcccgttcgcggtacgatcctgcatcgctatggcgaacagttgcagggtgagctacgttggaaggggatcgttatcggtgcgtctgaaggtagcgaagtgaaagccatcgccgatggccgcgtgatcctggccgactggctacagggttatgggctcgtggtggtggttgaacacggtaaaggcgatatgagtctttacggctacaaccagagcgcgctggtcagcgttggcacccaggtgcgcgcgggtcaacccattgcccttgtgggcagcagtggcggtcagggccgcccgtcactctatttcgaaattcgtcgtcagggtcaggcggtcaatccacagccgtggttgggaagatag

SEQ ID NO: 117048 - DNA, 1545 bp, Enterobacter cloacae
atgtcggtttctaaaaaacctatggtactggtgattctggatggctatggctaccgtgaagatcaacaggataacgccattttcaacgccaaaaccccggttatggatgcgctatgggcaaaacgtccccacaccctgattgatgcgtctggcctggaagtgggtctgccggatcgtcagatgggcaactctgaagtgggtcacgttaacctgggtgcgggccgtatcgtttaccaggacctgacgcgcctggacgttgaaatcaaagaacgtacattctttgccaacccaacgctcaccggagcggttgataaagccgttgccgcaggcaaggccgttcacattatgggtctgctctctgcgggcggcgttcacagccacgaagatcacatcatggcgatggtagaactggccgccgagcgcggtgcggaaaaaatctatctgcacgccttcctggatggtcgcgatacgccgccacgcagcgcaaaaggttctcttaaagcgtttgaagataaatttgccgcactgggcaaaggccgcgtggcgtccatcgttggccgttactatgccatggaccgcgacaaccgctgggaccgcgttgagcaagcctatgatctgctgaccctggcaaaaggtgagttccagttcccgaccgccgttgaaggcctggaagcggcttacgcgcgtgatgaaaacgacgaatttgtgaaggcaaccgtgatccgcgctgaaggccaggccgatgccgccatggaagatggcgatgcgctgatcttcatgaacttccgtgctgaccgcgcgcgcgaaatcacccgcgccttcgtcaacagcgatttcgacggtttcgcccgtaagaaagtggcgaagatcgatttcatccagttgaccgaatatgcagcggatatcaaagcgccatgcgcgtatccacccgcttccctggaaaataccttcggcgagtggatggcgaaaaacgataaaacgcagctgcgcatctccgaaactgagaagtatgcgcacgtgaccttcttctttaacggcggcgtagaagagccgtttgaaggcgaagaccgcatcctgattaactcgccgaaagtcgccacttacgatctccagccagaaatgagctctgcggagctgaccgaaaaactggtggccgcgatcgaaagcggtaaatacgacaccatcatctgtaactatccgaatggcgacatggtgggccacaccggcgtgatggaagcagccgttaaagcggttgaagcgctggaccactgcgttgagcaggttgcgaaggcggttgaatccgtaggcggccaactgctgatcaccgctgaccacggtaacgcagaacagatgcgtgacccggcaaccggtcaggcgcataccgcccataccaacctgcctgttccactgatttatgtgggtgataaatcagtgaaagctgtggaaggcggcaagctttccgacatcgcgccaaccatgttgtcgctgatgggtatggaaatccctgaagagatgactggcaagccgctgttcatcgtggaataa

SEQ ID NO: 117049 - DNA, 432 bp, Enterobacter cloacae
atgcaagaaattatgcaattcgttagccgccacccggttctgagcatcgcgtggattggcctgctggtcgctgtactgttcaccacatttaagggactgacgtctaaaattaaggtgatcacccgcggtgaagcgacacgtctgatcaacaaagaggacgccgtggttgtcgatctgcgtcagcgcgacgatttccgcaagggccacatcgcaggtgctatcaacctgctgccagcggaaattaaagcgaacaacattggtgagctggagaagcataaagcccagccgattattgttgttgacggcactggcatgcaggcgcaggaatctgccaacgcactgcataaagcaggctttgaaaacgtaacggtgctgaaagaaggcatctccggctggagcggggagaatcttcctttagtgcgcggtaaataa

SEQ ID NO: 117050 - DNA, 252 bp, Enterobacter cloacae
atggccaatattgagatctacaccaaagcaacgtgcccgttctgccaccgagcgaaagcgctgctgtccagcaaaggcgtaacgttcaaggaactgccgatcgatggtgacgcgattaaacgcgaagagatgatccaacgcagtggtcgcacaacggttccacagatttttattgatgcgcagcacattggcggctgtgatgacttgtatgcgctcgacgcccgtggtggactcgatccgctgctgagctag

SEQ ID NO: 117051 - DNA, 468 bp, Enterobacter cloacae
atgtcagaacaaaataacaccgagatgactttccagatccagcgcatctacaccaaggatgtctctttcgaagcgccaaatgcgccgcacgttttccagaaagactggcagccagaggttaaacttgatctggataccgcatccacccagctggcggatgatgtgtatgaagtcgtactgcgtgtcaccgtgaccgcctctctgggcgaagagactgcattcctgtgcgaagttcagcagggcggtatcttctccatcggcggcatcgaaggcaaccagatggcacattgcctgggtgcatactgcccgaacatcctgttcccgtatgcccgtgaatgcatcaccagcctggtttctcgcggtacattcccgcaactgaaccttgcgccagtaaactttgatgcgctgttcatgaactatctacagcagcaggctggcgaaggtgccgaacaacatcaggatgcctga

SEQ ID NO: 117052 - DNA, 1020 bp, Enterobacter cloacae
atgagcactgttaatgcgtcaatgactgtgatcggtgccggctcttacggcaccgctcttgccatcacgctggcaagaaatggtcacgacgtggtcctgtggggccacgatccaaaacatatcgcgacgttgcaacacgaccgctgcaacgtggcgtttctcccggacgttccgttccctgactctctgtatctggaaagcgacctcgcgaccgcgctggcggccagccgcaatattttgattgtggtgccaagccacgtgtttggcgaagtcctgcgtcagattaagccgctgatgcgtgcggatgcgcgtattgtatgggcgacgaaggggctggaagcggaaaccggacgtctgttgcaggacgttgcccgcgaagcgctgggaacagcgatcccgctggcggtgatctccgggccgacgtttgccaaagagctggctgcgggcttgccgacggcgatttcgctggcgtccaccgaccaggcattttccgacgatcttcagcaactgctgcattgcggcaaaagcttccgcgtgtacagcaatcccgattttatcggcgtgcagctgggcggcgcggtgaagaacgtcattgccatcggggccgggatgtctgacggcatcggtttcggcgcgaatgcgcgtactgcgctgatcacccgtggcctgaccgaaatgtcccgcctgggcgaagcgctgggtgccgatccggccacctttatgggaatggcagggctgggcgacctggtgctgacctgcaccgataaccagtcgcgtaaccgccgctttggcatgatgctcggacagggcagcgatgtaaaaagcgcgcaggagaagattggtcaggtggttgaaggctatcgcaataccaaagaagttcgcgaattggcgcaccgtttcggtgtcgaaatgccaataaccgaggaaatttatcaggtattgtattgcggaaaaaatgcgcgcgaggcagcattgaccttattaggtcgtgcgcgcaaggacgagcgcagcagcaattag

SEQ ID NO: 117053 - DNA, 822 bp, Enterobacter cloacae
atgccgtgtgaagaactggatatcgtctggaataatattaaagccgaagcccgagctttggccgactgtgagcccatgctggccagtttctatcacgcgacgctactcaagcacgaaaatctcggcagcgccctgagctatatgctcgccaataaactggcttcccctatcatgcctgctattgcgattcgcgaggtggtggaagaggcctacgccgcagatccggaaatgattgcttctgccgcctgcgacatccaggctgtgcgcacgcgagacccggcggtggataaatactccacgccgctgctgtatctcaaaggcttccacgccttacaggcgtaccgcatcggccactggttatggaatgagggacgccgcgcgctggccatcttcctgcaaaaccaggtttccgtgaccttccaggtcgatattcacccggcggcgaaaattggccgcgggatcatgctcgatcacgccaccggcattgttgttggtgaaacggcggtgatcgaagatgacgtgtcgatcctgcaatccgttacgctgggcggtaccggtaaaaccagcggcgatcgccatccgaaaattcgtgaaggggtgatgattggcgcgggcgctaaaatcctcggcaatattgaagtcggacgcggcgcgaagattggcgcggggtcggttgtgctccagcctgtaccgccgcacaccaccgccgctggcgtcccggcgcgcatcgtcggtaagccagacagcgataagccgtcgatggatatggatcagcacttcaacggtattcatcacaccttcgaatacggcgacggtatctga

SEQ ID NO: 117054 - DNA, 282 bp, Enterobacter cloacae
atggcaaaaacagcagcagcactgcatatccttgttaaagaagagaaactggcacaggatctgctcgaacagattaaaaacggcgccgacttcggcaaactggcgaagaaacactcgatttgcccgtcaggcaaacgcggtggtgacttaggcgagttccgccagggccagatggtcccggcgtttgataaagtggtcttctcctgcccggtgctggagccaactggccctctgcacacacaattcggctatcacattatcaaagtgttataccgcaactaa

SEQ ID NO: 117055 - DNA, 2025 bp, Enterobacter cloacae
atgcgtttaaaccccggacaacaacatgctgtcgaattcgtcaccggaccctgcctggtgctggcaggagcgggatccggtaaaacacgcgtgatcaccaacaaaatcgcccacttaattcggggttgtggataccaggcgcgccatatcgcggcggtcacctttaccaacaaagcggcgcgtgagatgaaagagcgcgtcggccagacgctgggccgtaaagaggcgcgcgggctgatgatctccaccttccacacgctgggtctggatattatcaagcgcgaatacgcggcgctgggcatgaagtccaacttttctctcttcgatgacaccgaccaggtggcgctgcttaaagagctgacggaagggctgatcgaagatgacaaagtgctgttgcaacagctgatctcgacgatctcgaactggaaaaacgatctgatgacgccggcccaggcagcggcaagcgccaaaggcgagcgcgaccgcatctttgcccactgctacggtctgtacgacgcgcatatgaaagcctgtaacgtcctggatttcgacgatctgatcctgctgccgacgctgctgcttcagcggaatgaagaggtacgcgagcgctggcagaacaaaatccgttacctgctggtggatgaatatcaggataccaacaccagccagtacgagctggtgaagctgctggtagggcagcgtgcacgctttaccgtcgtaggcgatgacgatcagtcgatttattcatggcgtggcgcgcgtccgcaaaacctggtgctactgagcaaagacttcccgacgttgcaggtgattaaactggagcagaactaccgttcttccgggcgtatcctgaaggcggcgaacatcctgattgccaataacccgcacgtctttgagaagcgcctgttctccgaactgggttacggcaccgagctgaaagtgctaagcgccaacaacgaagagcacgaagcggagcgcgtaacgggcgagctgattgcccatcacttcgtcaacaaaactgaatacaaggattacgcgatcctctatcgcggaaaccaccagtcgcgcgtctttgaaaagatgctgatgcagaaccgcattccctacaaaatctccggcggtacgtcgttcttttcgcgtcccgaaatcaaggatctgctggcctatctgcgcgtgctgaccaacccggatgacgacagcgctttcctgcgcatcgtgaacacgccgaaacgcgagattggctctgcgacgctgcaaaaactgggtgaatgggcgatgacccgcaacaaaagcctgttcaccgccagcttcgatatggggctgagccagaccctgaccgggcgcggctatgacgccttaacccgctttacccactggctgggtgaggtgcagcgtctggcagagcgcgagcctgtggcggcagtacgcgatctgatccacggcattgattacgaatcctggttgtatgaaacctctgccagcccgaaagcagccgagatgcggatgaaaaacgttaaccagctcttcagctggatgaccgaaatgcttgaaggatctgagattgacgagcccatgaccctgacgcaggtggtcacccgcttcacgctgcgcgatatgatggagcgcggcgaaagcgaagaagaggccgatcaggttcagctgatgacgttacatgcctcgaaagggctggagttcccctatgtctatctggtggggatggaagagggcctattgccgcaccagagcagcattgatgaagataacgtcgacgaagagcgccgtctggcctacgtggggatcactcgtgcgcagaatgagctgacgtttacgctgtgcaaagagcgccgccagtatggtgagctggtgcgcccggagccgagccgttttctgctggagttgcctcaggacgatcttatctgggagcaggagcgtaaagtcattaccgctgaagagcgtatgcacaaagggcaggcaaacgtggcaaacattcgcgcgatgctggcaaaagccaaagagaagggataa

SEQ ID NO: 117056 - DNA, 1485 bp, Enterobacter cloacae
atgctcagctccacctcgctttatgcggcaattgatctcggttcgaatagttttcatatgctggttgtgcgcgaggtggcgggaagcatacaaacgctgacgcgcattaagcgcaaggtccgcctcgcggcgggcctgagcagcgataatcacctctccccggaagccatggaacgtggctggcagtgtctgcgtctgtttgcagaacgtttgcaggatatcccgctcagtcaaattcgcgttgttgccacggcgacccttcgtctggcggttaacgctggcgatttcattgccagagcacaggaaattctgggctgcccggtgcaggtcatcagcggtgaagaagaagcgcgtctgatttatcagggtgtggcgcatacgaccggcggcgacgatcgtcgtctggtggtcgatatcggtggcgccagtactgaactggtcacgggcacaggcgcgcaggcgacgtcactgttcagcctgtcgatgggctgtgtgacctggctggaacgctactttaccgatcgaaaccttgccaaagagaattttgacgaggcggaaaacgcggcgcgtgcggtcctgcgcccggtcatggacgaactgcgctatcacggctggaaagtgtgtgtcggcgcgtccggaaccgttcaggcgttgcaggaaatcatgatggcacagggaatggacgagcggatcacgcttgccaaactccagcagcttaaacagcgcgccatccagtgtggtcgtctggaagagcttgaaatagaagggctgacgctcgaacgcgcgctggttttccccagtgggctcgccattctgatcgccatttttactgaactcaatatccagtgtatgaccctggcaggcggtgcgctgcgcgaaggtctggtctacggaatgctgcaccagtcggtcgatcaggacatccgtagccgtacgctgcgtaacgttcagcgccgctttattgttgatatcgaccaggcacacagagtgagtcaactggcgtcactgtttgccgatcaggtgaaaaaaagctgggatattgaaccgttaagccgcgatctgctgctaagcgcctgtgcgctacatgaaattggtctcagcgtggagtacaagcaggcaccgctgcacgcggcctggctggtgcgtaatctcgatttaccgggctatacgcccgcccagaagaagctgctggccaccctgctgctaaatcagactaacgccgtcgatctctcttcccttcaccagcagaacgctgtaccgccgcgcgtggcggagcatctgtgtcgtctgcttcgcctggcgatcctgtttgccagtcggcgtcgtgatgatttgctgccagccattacgctggcggcagacgatgagaaactgacgctgacgctaccggaaaactggcttgaggatcatccgcttggggcggaactgattgagcaggagtaccagtggcagagctatgtgcactgggcgcttgatgtgaagtga

SEQ ID NO: 117057 - DNA, 1269 bp, Enterobacter cloacae
atgagcaaaacacatttaacagaacagaagttttccgacttcgccctgcacccaaaggttatcgaagcccttgaaactaaagggtttcataactgcacgcccattcaggctctcgccctgccgctgacgctggccggtcgcgacgttgcagggcaggcgcaaaccggtactggcaaaacgatggcgtttttaacgtcaacgtttcattatttactttctcacccggcgattgcagaccgcaaagttaaccagccgcgcgcgctaattatggccccgacgcgagaactggcggtacagatccacgcagacgctgagcccctggcgcaagccaccggcctgaaacttggcctggcctatggcggcgacggctacgataaacagctgaaagtgctggaaagcggcgtcgatatcctgattgggaccaccggccgtcttatcgactacgccaaacagaaccatatcaacctcggcgcaatccaggtcgtggtgctggatgaagcagaccgcatgtacgatctgggcttcattaaagacatccgctggctgttccgccgtatgcctgcggcaaaccagcgtctgaacatgctgttctccgctaccctgtcataccgcgtacgtgaactcgcattcgagcagatgaacaatgcggaatatgtggaagtagaaccggagcagaaaaccgggcaccgcattaaagaagagctcttctatccttcgaatgaagagaaaatgcgcctgctgcaaaccctgatcgaagaagagtggccggatcgcgcgattatcttcgcgaacaccaaacaccgctgtgaagatatctggggtcacctggcggcagatgggcaccgtgtgggcctgctgaccggcgacgtggcgcagaaaaaacgcctgcgcattctcgacgaatttactcgtggcgaccttgatattctggtcgcgaccgacgtggcggcccgtggcctgcacattccagccgtgacgcacgtctttaactatgacctgccagatgactgtgaagactatgtacaccgtatcggacgtaccggtcgtgccggcgcaagcggtcactccatcagccttgcgtgtgaagagtatgcgctgaatcttccggccattgagacctacatcggtcactctattccacagagcaaatacaatccggacgcgctgttgagcgagctgccgccacctaagcgccttacccgtccacgctccggcaatggtccgcgtcgttccggcggtgcaccgcgtaatcgtcgtcgttcaggttaa

SEQ ID NO: 117058 - DNA, 330 bp, Enterobacter cloacae
atgagcgataaaattattcacctgactgacgacagttttgacacggacgtacttaaagctgacgggctgatcctcgttgatttctgggctgaatggtgtggtccttgcaaaatgatcgctccgattctggatgaaatcgctgacgaatatcagggcaaactgaccgttgccaagctgaacatcgaccagaacccgggcaccgcgccaaaatacggtatccgtggcatcccgaccctgctgctgttcaagaacggtgacgtggcggcgaccaaagtgggcgcactgtccaaaggtcaactgaaagagttcctggacgctaacctggcgtaa

SEQ ID NO: 117059 - DNA, 1260 bp, Enterobacter cloacae
atgaatcttaccgaattaaagaatacgccggtttctgagctgatcactctcggcgaaaatatgggactggaaaaccaggctcgtatgcgcaagcaggacatcattttcgccatcctgaagcagcacgctaagagtggcgaagatatctttggcgacggtgtgctggagatactgcaagacggatttggtttcctccgctccgcagacagctcctacctcgccggccctgacgacatctacgtatcccctagccaaatccgccgtttcaacctccgcactggtgacaccatttcaggtaagattcgtcctccaaaagagggtgaacgctactttgcgctgttgaaggttaacgaagttaactacgacaaaccggaaaactcccgcaataagatcctgttcgagaacttaacgccgctgcacgctaactctcgtctgcgcatggagcgtggtaacgggtctactgaagacttaaccgctcgtgtgctggatctggcatcgccaattggtcgtggccagcgtggtctgattgtggcgccgccaaaagccggtaaaaccatgctgctgcaaaacatcgcgcagagcattgcttacaaccatccagactgtgtgctgatggtgctgctgattgacgaacgtccggaagaagtgaccgagatgcagcgtctggtgaaaggggaagtggttgcgtctaccttcgacgagcctgcttctcgccacgttcaggttgcggaaatggtcatcgagaaggcgaaacgcctggttgagcacaagaaagacgtgatcatcctgctcgactccattacccgtctggcgcgtgcctacaacaccgtggtgccggcttccggtaaagtactgaccggtggtgtggatgctaacgccctgcatcgtccgaagcgtttcttcggtgcggcgcgtaacgtggaagagggcggtagcctgaccattatcgcgacggcgctgatcgataccggctccaaaatggacgaggttatctacgaagagttcaaaggtacaggcaacatggaactgcacctttctcgtaaaatcgcagaaaaacgcgtcttcccggcgatcgactacaaccgttccggtacccgtaaagaagagctgcttaccactcaggaagagcttcagaaaatgtggatcctgcgtaaaatcatccatccaatgggcgaaatcgacgcaatggaattcctcattaacaaactggcgatgaccaaaacgaacgacgatttcttcgacatgatgaaacgctcgtaa

SEQ ID NO: 117060 - DNA, 1104 bp, Enterobacter cloacae
gtgaatctactcactgctgtaactgagctgatcagtatttttttattcacaacctgttttttgttcattgcgcgcaaggtagcaaaaagaattgggttagtggacaaaccgaacttccgtaaacgtcatcaggggcttattccgctggtgggcggcatttcggtatacgcaggcatctgtttcacattcgggatcgcggattactatatcccccatgccgcactctacctggcatgtgccggtgtgctggtactggtcggcgcccttgatgatcgttttgatatcagcgtgaagttccgcgcgacggtacaggcggccattggcatcattatgatggtggtaggcggcctctatctaagaagcctgggctacgtgtttggtccctgggagctggtgcttgggccattcggcttcttcctgacgctgtttgccgtgtgggcggctatcaacgcctttaacatggttgacggtatagacggtctgctcggtgggctgtcctctgtttcgtttggcgctatcggcatcatcttatggtttgacggccagtacagcctgtcaatgtggtgctttgccatgattgccgccatcctgccttacatctgcctgaacctgggtgtgttagggcgtcgctataaagtctttatgggcgatgcgggcagtacccttattggctttacggttatctgggtcctgctggaaaccacgcagggtaaaacgcaccctatcagcccggtaacggctctctggattatcgccatcccgctgatggacatggtggctattatgtaccgccgtctgcgtaaagggatgagcccgttttctcccgatcggcagcatattcatcacctgattatgcgcgccggcttcacgtctcgtcaggcatttgtgttgattacgcttgcggctgctattctggctgcgattggcgttgccgcggaatacgcacatttcattcctgaatgggtaatgttggtattattcttgctagcatttttcatgtacggttactgcatcaagcgtgcatggaaagtcgcgcgttttattaaacgtttaaaacgcaggatgcgtcggaacagtggcaaaaacacaacattaactaagtaa

SEQ ID NO: 117061 - DNA, 1047 bp, Enterobacter cloacae
atgactcaaccgttggcgggagcgaaatcagtgggcactgagaacgagctggatattcgtggtttgtttcgcgtgttatggcagggcaaactgtggattgtggggattgccctggggttcgcgctgttagcgcttgcctacaccttctttgcaaaacaagagtggagcgccacggcgatcacagaccgaccaacggtgaatatgcttggaggctactactcccagcagcaattcctgcgtaatcttgatatcaaggccaatctggcgaccccggatcaggcctcggtgatggatgaatcctacaaagagtttgtgatgcagctggcgtcgtgggatacacgtcgcgatttctggtcccagacggactattacaagcagcgcatggtcggtaacagcaaagcggatgccgcactgctggatgacctgattaataacattcagtttatgcctggcgatgtgctccgtaacgttagcgacagcgtgaagctgattgcggaaacggcgccggacgccaataacctgttgcgacagtacgttgcttttgccagccagcgcgcggccagtcatctgaatgacgagctgaaaggcgcctgggctgcgcgtactattcagatgaaagcgcaggtcaaacgccaggaagaggtcgctaaggctatcttcgcccgtcgcgtacataatattgagcaggcgctgaagattgcggaacagcacaatatttcccgtagcgaaacggatgttccggctgacgaactcccggattcagaaatgttccttcttggtcgcccaatgcttcaggcacgtctggaaaatatccaggccgttggccctgactttgaccttgattacgaccaaaaccgcgccatgctcaatacgctcaacgtcggtccaacgctggacccgcgttttcagacctatcgttatttaagaacgcctgaagagcctgtaaaacgcgatagtccgcgtcgcgcattcctgatgattatgtgggggattgtgggcgcactgactggcgctggcgtagcgttattgcgtcgccgcacaaactaa

SEQ ID NO: 117062 - DNA, 1086 bp, Enterobacter cloacae
atggcgcctctggttcatgcgctggccagagatcctgatattgaagcgaaagtgtgcgtgactgcccagcaccgtgagatgctcgatcaggtcttaaccctcttttctatcgtcccggattacgatctcaatataatgaaaccgggacagggactgacggaaatcacctgccgtattctgcaagaattaaagcctattctggagtcgttcaagccggatgtggtgctggtgcacggcgacaccaccaccaccgtggcgaccagcctggccgcgttctatcagcgtatccccgttggtcatattgaagcgggtctgcgtaccggcaatctctattccccgtggccggaagaggccaaccgtacgctcaccggtcacctggcgatgtaccattttgcgccaaccgagaactcacgtcagaacctgctgcgcgaaaatatcagcgacagcaagatcttcgtcaccggcaatacggtcattgatgcgctgatttgggtgcgtgaccgcgtgctggctaacagcgagcttcaggcagaacttgctgcgcactatccgttcctgaacaacggcaagaaaacgattctggtgacgggccaccgccgcgaaagctttggccgtggctttgagcaaatatgccacgcgctggctgaaatcgccgcgcagaacgaggatgtgcagattgtctatccggtgcacctcaacccgaacgtcagcgaaccggtcaaccgtatcctgggccacgtggaaaacgtgctcctgatcgagccgcaggactatttgccatttgtctggctgatgaaccacgcctggctgatcctgaccgattctggcggcattcaggaagaggcgccctccctcggtaagccggtactggtgatgcgtgaaaccaccgaacgcccggaagcggttactgccggtaccgtgcgtctggtgggaacggatccgcgtcgtattgtcgaagaggtcacgcgcttactgcatgacgatgaagagtatcaggcgatgagccgggcccacaatccgtacggtgacgggcaggcttgtggtcgtattttgcacgcacttaaacacaatcgggtaacgctatga

SEQ ID NO: 117063 - DNA, 1263 bp, Enterobacter cloacae
atgagtttttctaccatctctgttgttggtcttggctatatcgggctgcctactgcggcggcctttgcctctcgtcaaaagcaggtcgttggcgtagatatcaacgcgcacgcggtggaaaccatcaaccgtggcgaaattcatatcgtggagcccgatctcgatcgtgtggtgaaaaaggcggtggacggtggcttactgcgcgccagcaccacgccggtagaagccgatgcgtacctgattgcggttccaacgccctttaaaggcgatcatgagcctgacatggtttacgtcgaggcggcagcaaaatccattgcgcctgtgctgaagaaaggggcgctggttatccttgagtccacttcacctgttggggctaccgagcagatggcgcagtggctggccgaggcgcgtcccgatctcagcttcccgcagcaggcgggcgaccaggccgatatcaatatcgcctactgtcctgagcgcgtactgcccggccaggtgatggtggaactgattaaaaatgaccgcgtgattggcggcatgacgccagtctgctccgcgcgcgccagcgagctgtataaaattttccttgaaggcgaatgtgtggtgaccaactcccgcaccgccgagatgtgcaaactgaccgaaaatagcttccgcgacgttaacatcgcgtttgcgaatgaactgtcgttgatttgcgccgatcaggggattaacgtctgggaacttattcgccttgctaaccgtcacccccgcgtgaacatccttcagccggggccgggcgtgggtgggcactgcatcgcggtcgatccgtggtttatcgtggcgcagaacccggaacaggcacgcctgattcgcaccgcacgcgaagtaaacgaccacaaaccgcactgggtcatcaaccaggtcaaagccacggtcgcggattgcctggccgacagcggcaaacgcgccagtgagctgaaaattgcctgctttggtctggcattcaaaccgaatattgacgatctgcgcgaaagcccggcgatggaaattgccgaaatgatcgctgcctggcacagcggtgaaacgctggtggttgagccgaatattcatgcgctgccggcaaaacttgccggtcactgcacccttaccgccctggatgacgcgctggcgacggcggatgtgctggtgctgctggtggatcacaatgcgttcaaagcggtttccggtgatgccgtacgtcagcagtatgttgttgataccaaaggcgtgtggcgttga

SEQ ID NO: 117064 - DNA, 678 bp, Enterobacter cloacae
ttgagtatcctcaacggcgtgctggaggcccttgagtgggaaagcgcattctttgcgcgtccctcagcgatagtgcgtctgcgcgacaatgcccctgcgttgcaggaagcagacttcagcgcctggcagcgcgtacaagctaagatcccggcggaccgcgccgatctgctggacgccctccagcagcacggattccggctggtcgagggtgaggttgatctctctgttaccgtggctctccacgcctcaccgggcgcggaaattgcaacggagcaggatatccccgcgctgcgcaagatggcggcgctggccttcgctcagagccgtttccgggcgccctggtatgcgcccgatgacagcggccgcttttatgcccagtggatagagaatgcggtcaaaggcacgtttgaccacgtctgtctggtgttccgtactgccggggggcagattcagggttttgtttcgcttcgcaggctcaacgagcacgaggcgcgcatcggtttgttagccgggcgcggcatgggcgagaaactcatgcaggcggcgctgcactgggcggagcaacaacaggtatcgacgctgcgggtcgcaacccagatgggcaacaccgctgcgcttaaacgttatattgcgagtggtgccagcatcgacgccaccgcctactggttatacaggtga

SEQ ID NO: 117065 - DNA, 1131 bp, Enterobacter cloacae
atgattccatttaacgcgcctcccgttgtgggcactgaacttgattacatgcagtctgctatgggcagcggcaagctctgtggcgatggcggttttacccgccgctgccagcagtggatggagcaacgttttcacagtgccaaggtactgctgacgccgtcctgtaccgcatcgcttgagatggcggcgctgttgctggatatccagcccggcgatgaagtgatcatgccgagctacaccttcgtctccacggcgaacgcgtttgtcctgcgcagggcgaaaatcgtgtttgtggatatccgtccggatactatgaacatcgacgaaacgctgattgaagcggcggtcaccgataaaacgcgggcgattgtgccggtgcattacgcgggcgtggcctgtgagatggacaccatcatggccatcgctaaaaagcacaacctgtttgtggtggaagacgcagcgcagggcgtgatgtccacctacaaagggcgcgcgctgggcaccattggtcatatcggctgctttagcttccacgaaaccaaaaactacaccgcaggcggcgaaggcggcgcgacgctgattaacgatcgtgccctggtggagcgtgcggaagtgatccgtgaaaaagggaccaaccgcagccagttcttccgcggtcaggtggataagtacacctggcgcgatatcggctcaagctacctgatggcggatttgcaggccgcgtacctctgggcgcagctggaagcggcagagcgaatcaatctgcaacgcctctccctgtggcaaacctactacgacgcgctggagccgctggcaaaagccggacgtattgaactgccgactattccggcagactgtatccacaacgctcacatgttctacatcaagctgcgcgataacgacgatcgcagcaagctgattgcctggctgaaagaggcggaaattatggcggtattccactatattccgctgcactccagcccggctggcgaagccttcgggatgtttgccggtgaagaccgctacaccaccaaagagagcgaacgtctgctccgcctgcccctgttctacaacctcgcgccggtgaaccagcgtacggtgatcaattcgcttctgagttatttcgcctga

SEQ ID NO: 117066 - DNA, 1251 bp, Enterobacter cloacae
atgtctctggcaaaagcgtcggtgtggacggcagcgtccacgcttgtaaaaattggcgccgggttactggtcgtcaagctgctggccgtctcatttggtccgtcaggcgttgggctggcagggaatttccgccagctggtcacggtgcttggcgtgctggcgggtgccgggatattcaatggcgtcaccaaatacgtcgcgcagcatcatgacgatgccgaaaagctccgcacggtggtgggcacctcctctgctatggtgctgggcttttctacgttgctggccgtcgtctttttgctggcggcggcacccatcagccagggactgttcggacacacgcactatcaggggctggtgcgcctggtggcgctcgttcagatggggatcgcctgggcaaacctgctgctggcgctgatgaaaggcttccgtgatgccgccgggaatgcgctggcgctgatcctcggcagcatcatcggcgttatcgcctactacttttgctatcggctgggcggctatgaaggcgcgctgctggggctggcgctggtgcctgcgctcgttgtcattccggcagcgtttatgctgatgcgcagaggcaatgtcccgctgaattacctgaaaccgcagtgggacaagatgctggcggggcagctaggaaagtttaccctgatggcgctcatcacttcagtaacgcttcccgttgcctacgtgatgatgcgaaacctgctggcagcgcattacagctgggatgaagtggggatctggcagggcgtgagcagcatttcagatgcttacctccaatttattacggcttcctttagcgtctatttactgccaaccttatcgcgcctgacttccaggcaggatattacccgcgagatttttcgctccctgcgttttgtattgccggcggttgcgatcgccagctttaccgtctggttactgcgtgatttcgccatctggctgctgttttcggcgaagtttaccgccatgcgcgatctgtttgcctggcaactggtcggcgatgtgctgaaagtgggggcatacgttttcggctatctggtgattgcgaaggcttcgctgcggttgtatatcctggcagagatcggccagtttgcgctgctgacggcattttctcactggctgatccccacccacggtgcgctgggggcggctcaggcctatatggcaacttatatcgtttatttcgctgcctgttgcggcgtatttttactttggcgtaaacgcgcatga

SEQ ID NO: 117067 - DNA, 1080 bp, Enterobacter cloacae
atgactgcactgatacacatactgggatcggatatcccgcatcataaccagaccgttctgcggttcttcaacgatgaactggcatccggcacgcccgatgcgcgcgagtttatggtcgttggacgcgataacggcctgagcgcggcgtgtccggcattgcacatcaccttctggccagacaaagcggccctgaccaaagccgttgtcgcgaaagccaaagcggaccgaagccagcgtttcttcttccacggacaattcaataccgggctgtggctggcgctgttaagcggcgggataaaaccttcccagttcagctggcatatctggggagcggatctctacgaagtctcccacggctggaagttccgtcttttctatccgctgcgtcgtctggcgcaggcgcgcgtgggctgcgtttttgctacccgtggcgacctcaactattttgctaaacagcacccgaaggttcgcggggaactgctctattttccgacccgtatggatccggcactgaataccatggcgaatgacgcggttcgtgagggcaaactgactatcctggtgggaaattccggcgatcgcagtaacgagcatgtcgcggcgctgcgggcggtgcatcagcagtttggcgatacggtgaacgtggtggtgccgatgggctatcccgccaataacgacgcctacatcgatgacgttcgccagcaggggcttgggctgtttagcgcggaaaatctgcacattctcagcgataagctggaatttgatgactatctcgcgctgctgcgaaaatgcgatctgggctatttcatctttgcccgtcagcaggggattggtacgctgtgtctgctgattcaggcgggcgtaccgtgcgtgctcaaccgcgaaaacccgttctggcaggacatggccgaacagcatattccggtgctgtttacctctgacacgcttaatgtcgaggtggtacgggaagcgcagcgtcagctcacgctggtggataaaaatagcatcgactttttcagcccgaactatctcacgccgtggcaccgcgcgctgcgtattgcttcaggagacaacgcatga

SEQ ID NO: 117068 - DNA, 1353 bp, Enterobacter cloacae
atgagccaattgcaatttagcggcttgctggtggtctggctgctgagcacgctgtttatcgccacgctcacatggtttgaattccggcgcgtacgttttaacttcaacgtattcttctcgctgctgtttttgctgacctttttttttggcttcccgctgaccagcatcctcgtgttccgctttgatgttggcgtcgctccgccggaaatcttgttgcaggcgctgctctctgcgacctgcttctacgcggtgtattacgtcacctataaaacgcgcctgcgcgcggcgaaagacaccacaccccgtcgtccgctgtttaccatgaaccgggtagaaacccatctgacgtgggttatgctgatgaccatcgccctcgtcagcgtggcgattttcttcatgcataacggctttttactgtttaagttgcagtcctatagccagattttctccgccgaagtctctggcgtcgcgctcaagcgtttcttctatttcttcattccggcgatgctggtggtctttttcctgcgtcaggacagcaaagcctggctgttcttcctggtcagcaccgtcgcatttggcattctgacctacatgatcgtcggcggcacccgcgccaacatcattatcgccttcgcgattttcctgtttatcggcattattcgcggttggatctcgctgtggatgctggcggcggcaggcgtctttggcattgtggggatgttctggctggcgctgaagcgctacggactgaacgtggcgggcgacgaagcgttttataccttcctgtatctgacgcgcgacaccttctcgccgtgggaaaacctggctttactgctgcaaaactacgacaaaatcgaattccaggggctggcgccgattgttcgcgatttctatgtctttataccgacgtggctgtggcctgaccgtcccggtattgtcctgaacacggcgaactactttacctgggaagtgctgaacaaccattcgggcctggcgatttccccaaccctgattggctcgctggtagtgatgggcggaacgtggtttatcctgccgggcgcgatcgcggtcgggctgataataaaatggttcgactggctatatacgctgggtaacgaagagaccaaccgctacaaagccgctgttttgcacagtttctgtttcggtgccattttcaatatgatcgttctggcgcgcgaggggctggattcgttcgtctcacgcgtggtgttttttatggtcgttttcggtctctgtctgctgctggcaaaactgctgtactggttgtttgacagtgcagggcttgtgcacagacgtgagccacagggcagcacaacgctgtcgcaagtctga

SEQ ID NO: 117069 - DNA, 741 bp, Enterobacter cloacae
atgacggatacaacttcagccccgcgttatgcgctgcgtgggctacagcttattggctggcgtgacatgcaacacgcgctggatttcctgttcgcggacgggcagatgaaatcgggcacgctggtggccatcaacgcagaaaaaatgctggcggttgaagataatgcggaagtgaaaagcctgattgaagccgcggagtttaaatatgccgacggtattagcgtggtgcgttcaattcgtaaaaagtttcctgacgctaatgtgtctcgcgtggcgggtgctgacctttgggagcgacttatggaacgcgcaggcgctgaaggcacgccggtatttttgattggcggcaaaccagaggtgctggcgcagaccgaacaaaagctgcgtagccagtggaatgttaacatcgtgggcagccaggatggctatttcaggccggaagatcgccaggcgttatatgagcgcgtgcgcgacagcggggcgaaaattgtcactgtcgccatggggtcgccgcggcaggaaattctgatgcgcgattgccgtctggtcagcccggatgcgctctatatgggcgttggcggcacctacgacgtctttaccggccacgttaagcgggcgcccaaagtctggcaaaacctggggctggagtggctctaccgcctgctctctcaaccgacgcgtatcaaacgacagattcgtctgctgcgctacctcgcctggcactacaccgggaaaatgtaa

SEQ ID NO: 117070 - DNA, 1386 bp, Enterobacter cloacae
atggcagagaaaaaaccggagcttcagcgtgggctggaagctcgacatattgaattgatcgcgctgggcgggactatcggcgttggcctgtttatgggctcggcaagcacgctgaaatgggcggggccttccgtcctgctggcgtatattattgccgggctcttcgtcttcttcatcatgcgctcaatgggcgaaatgttgtttctggagccggtaacgggctctttcgccgtttacgcccaccgttatatgagcccgttctttggctatctcacggcctggtcgtactggtttatgtggatggccgtcgggatttcggagatcaccgccatcggggtctacgtgcagttctggttcccggagatggcccagtggatacccgcgctcatcgccgtagggcttgtggcgctggcgaaccttgccgccgttcgcctttacggtgaaatcgagttctggtttgcgatgatcaaagtcaccaccattatcgtgatgattgttgtgggtctgggtgtcatcttctttggtttcggtaacggcgggcacgcgattggtttcggtaacctgaccggacacggcggcttctttgccggcggctggaaaggcttcctgaccgcactctgtatcgttgtcgcctcttatcagggcgttgagctgatcggcattaccgcaggtgaggcgaaaaacccgcaggtcacgctgcgtagcgcggtaggcaaggtgctgtggcgtatcctgattttctatgtgggcgcgatcttcgttatcgtgaccattttcccatggaacgagatcggcaccaccggcagcccgtttgtcttaaccttcgctaagattggcatcacggcggcggccgccattatcaactttgtggtgctgacggcggcgctctccggctgtaacagcgggatgtacagctgcgggcgtatgctttacgcgctctcgcaaaacaaacagctgccggcggtgatgggtaaagtctcccgcgtgggtgtaccggtggcgggcgtagcggtgtcgattgtgattctgctgattggctcttgcctgaactacatcatcccgaatccgcagcgcgtgtttgtttacgtctatagcgccagcgtgctgccgggaatggtaccgtggtttgtcattttgattagccagctgcgtttccgacaggcgcacaaaaaagcgatcgccagccatccgttccgctccattctgttcccgtatgcgaactatttgacgatggcgttcctgatttgcgtattaattggaatgtactttaatgaagatacccgcatgtcgctgtttgtcgggatgatcttcctggctgccgtcacagctgcatataaactttttggcctgggccgccgtggctccgcccataaagtggaggaataa

SEQ ID NO: 117071 - DNA, 1203 bp, Enterobacter cloacae
atgatgctaaaagtcttcttactcttcatcctgctgatcgccgggattgtactggggccgatgctcgcgggtcaccagggttatgtattgatccagaccgataactacaatatcgaaaccagcgtaacagggctggtgattatcctgatcctgggtgtggtcgttctgctggcagtggagtggctcctgcgtcgtattttccgtaccggcgtacatacgcgcggctggttcgttggccgtaagcgccgtcgcgcccgcaagcagaccgagcaagcgttgctgaagctggccgaaggcgactatcagcaggttgaaaagctgatgtcgaaaaatgccgaccatgcagaacagccggttgttaactatctgctggccgctgaggcggcgcaacagcgaggcgatgaggcccgcgccaatcagcatcttgaacgcgcgtctgagctctctactaaagatccgattccggttgagatcacccgcgttcgtctgcaactggcgcgcaatgaaaaccatgccgcccgtcacggcgttgaccgtctgctggaaattacccctcgtcacccggaagtgctgcgtctggctgagcaggcatatattcggaccggtgcctggggctcgctgctggacattatcccttccatggcgaaagccgacgtgggcgatgatgaacatcgtgatgaacttcagcgtctggcctggattggcctgatggatcaggcgcgcgccgatctcggcagcgacggcctgaaaacctggtggaaaaaccagagccgcaaaacgcgccagcaggttcctcttcaggtggcgatggcagaacatctgattgagtgtgatgaccatgacaccgcgcaggagatcctcctcgacggtctcaagcgacagtatgatgaccgcctggtgatagtcatcccgcgtctgaaaaccaacaatccggaacaaattgaaaaagcactgcgccagcagatcaaaaccgtgggcgatcgtccgctgctgtggagtacgctgggccagtctctgatgaaacacggcgagtggcaggaggcgagcctcgccttccgcgccgcgctgaagcaacgtccggacgcatttgattacgcctggcttgctgattcgctggacaagcagcataagccggaagaggccgcagctatgcgccgtgatgggctgttattgacgttgcaaaataacggaacgcagcagtaa

SEQ ID NO: 117072 - DNA, 1194 bp, Enterobacter cloacae
atgacggaacacgaaaaatcctccgccgtggttgaagagaccagggagactgtggacaccacgtcacagccagagacgacagacacaaccgttgagaagaaaaacggcagcaacaaaaccagcctcacgctgagcgtgattgccatcgcgattgcgctggccgcaggcgtgggactctacggactggtgaagaaacaaggcaccaaccagacggccaccagcgacgcgctggttaaccaaatcactgccctacagaaagcgcaggagacgcaaaaagctgagctggaaggtgtgatcaaacagcaggctgccgccctcgccgacgcgaacagcaaacgtgaagagttgaccaaacagctgagcgaagtgcaggaaaaagtcgccacaatttcgggaaccgatgccaaaacctggctactttcacaggccgattttctggtgaaactggccgggcgcaagctctggagcgatcaggatgtcaccaccgccgccgcgctgctgaaaagcgccgacgcaagcctggcggacatgaacgatccgagcctcatcaacgctcgccgcgctattacggaagatatcgccagcctgtccgcggtttctcaggtcgattacgatggtatcatccttaaggtaaatcagctctccaaccagattgataaccttcagctggccgataacaacgacgatgactccccgatggattctgacggcaccgagctgtccagctccctgagcgaatggcgtatcaacctgcaaaagagctggcagaactttatggacagctttattaccattcgccgccgtgatgaaactgccgtgccgctgctggcgccgaaccaggacgtctatctgcgtgaaaacatccgctcccgcctgctggtggctgcccaggccgtaccgcgtcaccaggaagagacctacaaacaggcgctggataacgtttcaacctgggtacgtgcttactacgataccaatgacgcaaccacgaccgcgttccttgaggatatcgacaagctgagccagcaaaacatcaccatgaacgtgccggacaagctggaaagccagccgattctggagaagctcatgcagacgcgcgtgcgtaacctgctggcccagccgggcgttccggcagagcgtccggctgaagcacctgccgccgcaccagcgcctgaaagcgcgccgcaaggagagtaa

SEQ ID NO: 117073 - DNA, 741 bp, Enterobacter cloacae
atgagcatacttgtcacccgcccttctcccgcaggagagcagttagtgagccgtctgcgcgcactggggcaggtggcctggagttttccgctgattgagttctcccccggtcgcgagctgcctgagctcgctgaccagatgcgtctcttgcaggaaggcgatctgctctttgcgctgtcgcagcatgccgtggagtttgcccatgcgcagctgcaacagcatgccgtttgctggcctcacgccccccgctatttcgccatcgggcgcaccacggcgctggccttacataccgcgagcggaatcgatgttcgttacccgttagatcgggaaatcagcgaagtcttgctacaattacctgaattacaaaccattgccggaaagcgcgcgctcattttgcgcggcaacggtggccgcgaactgctgggcgaaacgctgcgcgaacgcggcgcagacgtgacgtttgtggagtgctatcagcgctgtgcgaaacactatgatggcgcggaagaagcaatgcgctggcacgcccgcggtattaatacgctggtggtcaccagcggtgaaatgttacaacagctttggtcgctgattccgctttggtatcgcgaaaactggttactccgctgtcggcttctggtcgtcagtgagcgtctggcgaaccacgcccgggaactgggctggcaggatattcggatcgctgaaaacgccgacaacgatgcgctgctgcgcgcattacaataa

SEQ ID NO: 117074 - DNA, 963 bp, Enterobacter cloacae
ttgataatgacggtaacaagcatgttagacaatgttttgagaattgccacacgccaaagtcctcttgcactctggcaggcacattatgttaagcagcgcctggaagcctgccacaccggattacgcgttgagctggtgccaatggtcacgcgtggcgatgtcattctggatacgccgctggccaaagtgggcggaaagggtctgtttgtcaaagagctggagctggcattgcttgagaaccgcgccgatatcgccgtgcattcgatgaaggatgtgcccgttgagttcccggaagggctggggctggtgaccatctgcgagcgcgaggatccgcgcgatgcgtttgtctctaatcgctatgactcgctcgatgcgttgccggcaggcagcgtggtcggcacgtcaagtttacgccgccagtgtcagctggctgaacgtcgcccggatctggtgatccgttcgctgcgcgggaacgtcggcacacgccttggcaagctggataacggcgactacgatgccattattcttgcggttgcgggcctgaaacgcctggggctggaagaacgcattcgcgtcgcgttgccgccggagctgtcgctgcccgccgtcggccaaggtgccgtcggcattgagtgtcgtctggttgatgcgcgcactcaggcactgctcgcgccgctgaatcatgacgataccgcagttcgcgtaaaagccgagcgcgcgatgaatactcgcctcgaaggaggctgtcaggtgccaattggcagctatgctgaattaactgacggtgagctgtggttgcgtgcgctggttggcgcgccggacggctcacagatggttcgcggtgaacgtcgcggcaagccgcaagatgccgaggcgcttggcgtatcgctggcggaagagctgctgaataacggcgcgcgtgaaattctggctgaggtctataacggagagccccctgcatga

SEQ ID NO: 117075 - DNA, 2544 bp, Enterobacter cloacae
ttgtacctctatattgagactctgaaacagagactggatgccatcaatcaattgcgtgtggatcgcgcgcttgctgccatgggccctgctttccagcaggtatacagtctactgccaacattgttgcactatcaccatccgctgatgccgggttaccttgatggtaacgttccccagggcatttgcctcttcacgcctgatgaaacccaacagcattacctgactgaacttgaactctaccgtggtatgccgccgcaggattcgccgaaaggcgagctgccgattaccggggtttactccatgggcagcacgtcatcggttgggcaaagttgctcttctgacctggatatctgggtctgccatcagtcctggctcgacaatgaagagcgccagctgttgcagcgtaaatgcagcctgctggagagctgggcggcgtcgctcggcgtggaagtgagcttcttcctgattgatgaaaatcgtttccgccataacgaaagcggcagtctgggtggtgaagactgcggctcgactcagcacatcctgttgctggatgagttttaccgtactgccgttcgcctggccgggaaacgtattctgtggaatatggtgccgtgcgatgaagaagagaattatgacgactacgtcatgtcgctttactcgcagggcgttctgacgccaaacgagtggctggatctgggcggcctgagctccctgtccgccgaagagtactttggcgcaagcctctggcagctttataagagcattgattcaccgtacaaagcggtgctgaaaaccctgctgctggaagcctactcctgggagtaccccacgccgcgcctgctggcgaaagatattaaacagcgtctgcacgacggggagatcgtctcctacgggcttgatgcctactgcatgatgctggaacgcgtcaccgaatacctgacagccattgaggacgccacgcgtcttgacctggtgcgtcgatgtttctatctcaaagtctgtgaaaaactgagccgcgaacgcgcctgcgtgggctggcgtcgtgaagtcgtcagccagttagtcaaagagtggggatgggacgaagagcgtctcgccatgctcgacaaccgcgccaactggaagatcgatcaggtgcgtgaggcgcacaacgaactgcttgatgcgatgatgcagagctaccgcaacctgatccgctttgcccgccgtaacaaccttagcgtttctgccagcccacaggatatcggggtgctaacccgcaaactgtacgccgcgtttgaagcgttgccgggcaaggtaacgctggttaacccacagatttcgcctgacctgtctgaaccgaatctgacctttatctacgtaccgccgggccgcgcgaaccgcaccgggtggtatctgtacaaccgtgcgccaagcatggattcgatcatcagccatcagccgctggagtataaccgctacctgaacaagctggtggcctgggcctggtttaacggccttctcacttcacgtacccggttgtttatcaaaggcaacgaggtggtcgatttagccaagttgcaggagatggtggcggatgtctcgcaccacttcccgctgcgtctgcctgcgccgacgccaaaagcgctctacagcccgtgtgagattcgccatctggcgatcatcgtcaacctggaatacgacccgacggcggccttccgcaatcaggtggttcactttgacttccgcaagctggacgtctttagctttggcgagcagcaaaactgcctggtgggcagcgtggatctgctgtaccgcaactcgtggaacgaagtgcgtaccctgcactttaacggcgagcaggcgatgatcgaggcgctgaaaacgatcctcggcaagatgcaccaggacgccgcgccgccggacagcgtggaggtgttctgctacagccagcacctgcgcggcctgattcgtacccgcgttcagcagctggtgtctgagtgcatcgaactgcgtctctccagcacccgacaggaaaccgggcgctttaaagccttgcgcgtctccggccagacctgggggctgttctttgagcgcctgaacgtgtcggtgcagaagctggaaaacgccattgaattctacggcgcgatttcacacaacaaactgcatggcctgtcggtccaggtggaaaccaatcacgttaagctgccgcaggtggtggatggctttgcgagtgaagggattattcagttcttcttcgaagagtcgggcgataacgccgggtttaacatctacattctggatgaaaccaaccgtgccgaggtgtatcaccactgcgaaggcagcaaagaggagctggtgcgcgacgtcagccgcttctattcgtcctcgcacgatcgctttacctacggctcaagctttatcaacttcaacctgccgcagttctaccagattgtgaatgtggatgggcgagcgcaggtgatcccgttccgtacgcaggcgattaccccggcggcgcccgctaaccaggaaactgcgccgctgttgcagcagtatttttcctga

SEQ ID NO: 117076 - DNA, 321 bp, Enterobacter cloacae
atgaacgacagtgaatttcatcgccttgccgataccctgtggatgaccatcgaagagcgtatcgacgactgggacggcgacagcgatatcgattgtgaaatcaacggcgggatcctgaccttaagcttcgaaaacggcagcaagattattattaaccgtcaggagccgcttcaccaggtgtggctggcggcgaaacagggcggctatcactttgatctgaaaggtgacgagtgggtctgcgatcgcagcggcgaaacgttctgggataggctggagcaggcggcgacggcgcaggcaggcgaggcagtgagtttcaggtag

SEQ ID NO: 117077 - DNA, 204 bp, Enterobacter cloacae
atgaaaaacgtcttccgaacgcttgtcgttcttgtcactctgtttagcctgaccggctgtggactgaagggaccactgtacttcccgccagaggataaaaacgcaccaccgccgacaaaaccggtgcaaagtggtatcgagtcatctacgccggataccaacgatcgcggcaataacggcggcccgactcaggtcaatctctga

SEQ ID NO: 117078 - DNA, 825 bp, Enterobacter cloacae
atgcagttctctaaaatgcatggccttggcaacgactttatggtcgtcgacgcggtaacgcagaatgtctttttctccccggaattgatccgtcgcctggcggatcgacacgtgggcgtggggtttgaccagctgctggtggtggagccgccttacgatcctgacctggattttcactaccgcatttttaacgccgacggcagcgaagtttcccagtgcggcaacggcgcgcgctgttttgcccgctttgttcggctgaaagggctgaccaacaagcgcgatatccgcgtcagcaccgccaacggccggatggtgctcagcgtcaccgacgacgaactggtgcgcgtgaacatgggcgagccgaacttcgacccctctgccgtgccgtttcgcgccaacaaagcggaaaagacctatattatgcgtgccgccgagcagacagtattgtgcggcgtcgtctcaatgggtaacccgcactgcgtgattcaggtggatgatgtgcaaaccgcggcggttgaaacgctcggcccggtgctggaaagccacgagcgcttcccggagcgggcgaacatcggtttcatgcaggtggtgaagcgtgaacacattcgcctgcgggtttacgagcgcggcgcgggcgaaacccaggcctgcggaagcggtgcctgtgcggcggtggccgtcggtatctcacaggggttactggcagaagaggttcgcgtggaattaccgggcggacgtcttgatatcgcctggaaaggagcgggtcatccactgtacatgactggcccggcgacacatgtttatgacgggtttatccatctatga

SEQ ID NO: 117079 - DNA, 708 bp, Enterobacter cloacae
atgaagcaaccaggggaagaactgcgggaacctgtaacggagctggacgacagcgctgttgtggattacctgctgcacaatcctgagttttttatccgcaatgcacgcgtcgtcgaacagatgcgcgtgccgcatccggttcgcgagaccgtgtcgctggttgaatggcacatggcgcgctcgcgcaaccacatcaatcagctcgaagagaacatgacgctgctgatggagcaggccagcaataacgaaagcctgttctaccgtctactgcaccttcaggcgcgtctggcttccgcgcacagtctcgaagagttcctcaaccgcttccaccgctgggcgcgcgagctggggctggcaggcgcgacgatccgtctcttccctgaccgctggcgcattggcgcgccgtccgggtttacccatctggcgctgagccgtcaggcgtttgagccgctgcgcattcagcgtctgggccatgagcaccactatctggggccgcttaacgggccagaactgctggtggtgctgccggaagccaaagctatcggctcggtggcgatgtcgctgatggggcgcgatggtgacctgggcgtgatgttatttaccagccgcgacgcgcatcattatgaacaggggcagggcacgcaactgttgcaggagatcgccctgatgctgcctgagctgctggagcgctggattgagcgcgtatga

SEQ ID NO: 117080 - DNA, 903 bp, Enterobacter cloacae
atgacggacggattgctcgccactgacgtcaaccgctttctgcgctatctgggcgtagaacgccagctcagccctattacgctgctcaactatcagcgtcagcttgatgccatcatgcagcttgccgatgaaatcggcctgaaaagctggcaacaatgtgacgccgccacggtacgcgggttcgtcgtgcgtagccgtaaaaaaaatctcagcccggcgagcctggcgctccggctctctgccctgcgcagtttcttcgactggctggtcagtcagggcggtctgaaagccaacccggcaaaagggatcgccacgccgaaagccccgcgtcatctgccgaaaaatatcgacgtcgacgacgtaaaccgcctgctggatatcgatcttaacgatccgctggccgtgcgcgaccgcgcgatgctggaggtgatgtacggcgcgggcctgcgtctctctgagctggtgaacctcgacttaaagcacctcgatctagaatccggcgaggtgtgggtaatgggcaagggcagcaaagagcgccgcctgccgatcggccgcaatgcggtctcctggattgagcactggctggaccttcgcgggctgtttggcgccgacgaagatgcgctgttcctgtcgaaactcggcaagcggatctcggcgcgtaacgtgcagaagcgctttgcggagtggggcattaagcaggggctgaacagccacgttcacccccacaagctgcgccactcctttgcgacgcacatgctggaatcaagcggcgacctgcgcggcgtacaggagctgcttggtcacgcgaatctgtcgaccacccaaatctatacccacttagacttccaacaccttgcctcggtgtatgacgcggcgcatccacgcgccaaacgggggaaataa

SEQ ID NO: 117081 - DNA, 717 bp, Enterobacter cloacae
atgcgtttttaccgcccactcggtcagatatcagccctgacgtttgaccttgatgacactctttacgataaccgcccggtgatcctgcgtaccgagcaggagtcgctggcgtttgtgcagaactaccatcctgcgctgaaagcgatgcagaacaaagacttccagcagctgcgtcagtccctgcgggaaaccgaaccggagatttaccacgacgtgaccgaatggcgccgccgtgcggttgagcaggcgatgctcaacgccggcctgagcgcgcaggatgcggccacgggggccgaagcggccatggaaaacttcgccaaatggcgcagtcggatcgacgtgccgcaggagacccacgacacgctggcgaagctcgccgaaaagtggccgctggtggccatcaccaacggcaacgctcagcctgaactgtttggtctggggaactattttcagttcgtgctgcgcgcgggcccgcacggacgctcgaagccgttcaacgatatgtatcatctggcagcggaaaaactggatttgccgctcggtgagatcctgcacgtgggcgacgacctgaccacggacgtcgccggggcgatccgctgcggcatgcaggcctgctggatcaagccggaaaatgccgatctgatgactaccccggatagccgtcttctgccgcacgtggaaatttcacggttggcatccctcacgacgctgatataa

SEQ ID NO: 117082 - DNA, 2193 bp, Enterobacter cloacae
ttgcctgcccgacatgacgtgacggtgccaatggacgtttcttacctgctcgacagccttaatgataaacagcgtgacgcggttgccgcctcgcgtacgaacctgctggtactggctggagcgggcagtggtaagacgcgcgtgctggttcaccgtatcgcctggctacagagcgtggagaactgctcgccgtactcgattatggccgtgacgttcaccaacaaggcggcggcggagatgcgccaccgtatcgcgcagctgatgggcaccagccagggcggcatgtgggttggcaccttccacggcctggcgcaccgtctgctgcgcgcgcaccatatggacgctaacctgccgcaggatttccagatcctcgacagcgaagatcagctgcgcttgctgaaacgcctgatcaaggcgatgaacctcgatgagaagcagtggccgccgcgtcaggcgatgtggtacatcaacggtcagaaagacgaagggctgcgtccgcatcatattcagagcttcggtaacccggtcgagcagacctggcagaacgtctacaaggcctatcaggaagcgtgcgatcgcgccggtctggtggatttcgccgagctgctgctgcgcgcccacgagctgtggctgaacaaaccgcatattctgcaacactaccgtgaacgctttaccaacatcctggtggacgaattccaggataccaacaacatccagtacgcctggatccgcctgctggccggggataccggcaaggtgatgatcgtaggcgatgacgaccagtctatctacggctggcgcggcgcgcaggtggagaacatccagcgcttcctcaacgatttccccggcgcgcaaaccatccgtctggagcagaactaccgttctaccagcaacattctgagcgcggccaacgccctgattgagaacaacaacgggcgcctgggtaaaaagctgtggaccgatggcgtcgacggcgaaccgatttcgatttactgcgccttcaacgagctcgacgaagcccgcttcgtggtgaaccgcattaaaacctggcaggagaacggcggcgcgctggagcagtgtgccattctctatcgcagcaacgcccagtcgcgcgtgctggaagaggcgctgttgcaggtgagcatgccgtaccgcatttatggcggtatgcgcttcttcgaacgtcaggagatcaaagatgcgctctcgtatttgcgtctgattgccaaccgtaacgacgatgcggcgtttgagcgcgtggtgaacacgccgacgcgcggcatcggcgatcgtacgctggacgtggtgcgtcaggcctcgcgcgatcgtcagctcacgttgtggcaggcgtgccgcgagctgttacaggaaaaagcccttgccgggcgcgccgccagcgcattgcagcgcttcctggagttaatcgacgcgctggcgcaggaaacggccgacatgccgctgcacgtccagaccgaccgggtgatcaaagattccggcttgcgcaccatgtacgagcaggaaaaaggcgagaagggccagacccgtattgagaacttagaggaactggtgacggcaacgcgccagttcagctacaacgaagaagacgaagacctgatgccgttgcaggcattcctctctcacgccgcgctggaggcgggtgaagggcaggccgatacctggcaggatgcggttcagctgatgaccctgcactccgcgaaaggtctggagttcccgcaggtgttcatcgtcgggatggaagaggggatgttcccgagccagatgtcgctggatgaaggcgggcgtctggaagaggagcgtcgtctggcctacgtgggcgtgacccgtgcgatgcagaaactgaccctgacctacgcggaaacccgccgcctgtacgggaaagaggtatatcaccgtccgtcgcgctttatcggcgaactgccggaagagtgtgtggaagaggtgcgcctgcgcgccagcatcagccgtccggtcagccatcagcgtatgggctcgccgatctctgaaaccgacaccggttacaagctgggccagcgcgtgcgccactcgaagtttggcgaaggcaccatcgtcaacctggaaggcagcggcgagcacagccgtttgcaggtagcgttccaggggcaggggatcaaatggctggtggcagcctatgccaagctggaaagtgtgtaa

SEQ ID NO: 117083 - DNA, 951 bp, Enterobacter cloacae
atgttgagcgcatttcaactcgaaaataaccgactgactcggcttgaagccgaagagtcacagcccctcattgatgccgtatgggtggatctggtcgagccggacgacgatgagcgccttcgcgtacaatctgaactggggcaaagcctggcgacacgcccggaactggaagacatcgaagcatccgcccgtttttttgaagacgaagacggcctgcacattcactccttcttctttttcgaagatgccgaagaccacgcggggaactccaccgtggcgtttaccatccgcgatggccgcctgttcaccctgcgcgagcgcgaactgcctgcgtttcgtctctaccgtatgcgtgcccgcagccaggcgatgatggacggcaacgcttatgagctgctgctggatctgttcgaaaccaaaatcgaacagctggcggatgaaatcgaaaacatctacagcgacctggaaaagctgagccgcgtgatcatggaaggccatcagggcgatgagtacgacgaagcgttgtccacgctggctgagctggaagatatcggctggaaggtgcgtttgtgtctgatggatacccagcgcgcgctgaacttcctggtgcgcaaggcgcgtctgccgggcggtcagctggagcaggcgcgtgagatcttacgcgatatcgaatccctgctgccgcacaacgaatccctgttccagaaggtcaacttcctgatgcaggcggcgatgggctttatcaacatcgagcagaaccgcatcatcaagatcttctcggtggtgtccgtggtgttcctgccgccgacgctggtggcgtccagctacgggatgaacttcgagtttatgccggagctgaagtggagctttggctacccgggggcgattatctttatgatcctcgccgggctggcgccgtatctgtactttaagcggaagaactggctgtaa

SEQ ID NO: 117084 - DNA, 897 bp, Enterobacter cloacae
atggatgctaaacagacgcggcagggcgttttactcgcccttgccgcttattttatttggggtatcgcaccggcgtacttcaaacttatcgcctatgtcccggcggacgagatcctcactcaccgcgtcatctggtcctttttcttcatgattgcgctgatgagtatcagccgtcagtggtcaggcgtcaaaacgctgctgaaaaccccgaagaaggtcttcctgctcgctctctctgcggtgctgattggcggaaactggctgctgtttatctgggcggtgaataaccatcacatgctcgaagccagcctgggctactttattaacccgctggtcaatattttgctggggatgattttccttggtgagcgctttcgccggatgcagtgggtggcggtgattctggccttctgcggcgtgctggtacagctgtggaccttcggctcactgccggttatcgccctgggactggcgttcagctttgcgttttacggcctggtgcgtaagaagattgcggtggaagcgcagacgggaatgctgtttgaaaccctgtggctgctgcctgtcgccgcgatctacctgttcggtattgccgacagcgccaccagccacatgggcagcaatccatggtcgctgaacctgatgctgatggccgcgggcgtggtcacgacgatccccctgctgtgctttaccggcgcggcaacgcgtctgcgcctctccacgctgggcttcttccagtacattggccccacgctgatgttcctgctggcggtggtgttttacggcgaggtgccgggtgcggataagatggtgacgttcgcctttatctgggtggcgctggccatctttgttgcggatgcgatttatacccagcgcagggtgcgcaaagggctgtga

SEQ ID NO: 117085 - DNA, 468 bp, Enterobacter cloacae
atgtcagccacactcaccgccgaagaaaccttaaagctcgtgggcgagatttttgtgtaccacatgccgttcaaccgtgcactgggtcttgagctggagcgatacgaaaaagacttcgctcagctgagtttcaataatcagccaatgatggtcggtaactgggcgcaaagcattttgcacggcggggtcattgcctccgcgctggacgtggcggccggtctggtgtgcgtgggcagcacgctgacgcgccatgacaccatcaacgaagatgagttacgccagcgcctgtcgcgcatgggcaccatcgatttacgcgtcgactacctgcgtccgggacgcggaaaccgcttcacctgcaccagcagcctgctgcgcgccgggaataaagttgccgtcgcccgcgttgagctgcataacgaggagcaggtttatatcgccagcgcaaccgccacttatatggtgggttga

SEQ ID NO: 117086 - DNA, 870 bp, Enterobacter cloacae
atgcggacgtatctgggttggttactggcggcggttgcgctgcccctcacagcatatgcgcaggaagcgacgatcaaagaggtgcatgataaacctgccgttaagggcagcatcatcgccaatatgcttcaggagcatgacaatccgttcacgctgtacccttatgatacaaactacgtgatctacacccagaccagcgatctcaacaaagaggcgataagctcctataactggtctgataatgcgcgtaaagatgaggtgaagttccagctcagcctcgccttcccgttctggcgcggcatcctggggccgaactcggtgcttggcgcgtcttacacgcagaagtcatggtggcagctctccaacagcggggaatcttcaccgttccgcgaaaccaactatgaaccgcagctgttcctcggtttcgccaccgattatgagtttgcaggctggacgctgcgagacgtggaggtgggctataaccacgattccaacggtcgttccgacccaacctcacgcagctggaaccgcatctatacgcgtctgatggcgcagaacggcaatttcatggtggaagtgaagccgtggtacgtggtgggcagcaccgatgacaacccggatatcaccaaatatatgggctactatcagcttaaagtgggctatcagctgggtgacgcggtgctgagcgccaaaggccagtacaactggaataccggctacggcggtgcagagctgggcctgagctacccggtaacgaaacacgttcgtctttatactcaggtgtatagcgggtatggcgaatcgctgatcgactacaatttcaatcagacccgcgtcggtgtgggcgtcatgctgaacgatattttctaa

SEQ ID NO: 117087 - DNA, 1893 bp, Enterobacter cloacae
ttgaagtttctctctcaggcgctgaaaatagcgcctgtttcatttctggcatatggggttaacgtggcgcaggcggaagtattgaatcaggaatcgctggctaaacaggttttgcaggaaacctttggctaccagcagttccgtcctggccaggaaaccatcattgaaaccgtgctggaaggccgcgattgcctggtggtcatgccgaccggcggcggtaaatcgctctgctatcaggtgcccgcgctggtgcttaatggcctgacggtcgtggtatcgccccttatttccctgatgaaagaccaggtcgaccagctgcttgccaacggcgtggcggcggcctgcctgaactcgacgcagacccgcgagcaacagcaagaggtaatgaccgggtgccgcaccgggcagatccgcctgctgtatatcgcgccagaacgcctgatgctggacaacttcctcgatcatctggcgcactggaatccggtgctgctggcagtggatgaagcgcactgtatctcccagtgggggcacgatttccgcccggaatacgccgcgcttggccagcttcgtcagcgcttccccgagctgccgtttatggcgcttaccgccacggcggacgacaccacgcgtcaggacatcgttcgcctgctggggctgaacgacccgtatattcaggtcagcagcttcgaccgcccgaacatccgctatatgctgatggagaagttcaagccgctggatcagctcttacgctacgtgcaggagcagcgcggaaagtccggcatcatctactgcaacagccgggcgaaggtggaagacaccgccgcgcgtctgcaaaaccgtggctttagcgccgcggcctatcacgccgggctggagaaccatatccgcgccgacgtgcaggagaaattccagcgcgacgacctgcaaatcgtggtcgcaacggtggcgttcgggatggggatcaacaagcccaacgtgcgctttgtggtgcatttcgacattccgcgcaatatcgaatcctactatcaggaaaccggccgcgccgggcgtgacggcctgcctgcggaagcgatgctgttttacgatccggcggatatggcgtggctgcgccgctgtctcgaggagaaaccgcaggggcagttgcaggatatcgaacggcacaagcttaacgcgatgggggccttcgccgaagcgcaaacctgccgccgtctggtgctgctcaactactttggtgaagggcgtcaggcaccgtgcggcaactgcgatatctgcctcgacccgccgaagcagtacgatggcctgatggacgcgcgcaaagcgctctcgactatcggacgcgtgaaccagcgcttcgggatgggctacgtcgttgaagtgctgcgcggggctaacaaccagcgtatccgcgatatgggtcacgacaaactgccggtttatggcatcgggaaagaccagagccacgagcactgggtgagtatcatccgccagctgatccatctcggctttgccacgcagaacattgcccagcactctgcgcttcagctgaccgaagcggcgcgaccggtcctgcgtggcgaggttgaactgaagctcgccgttccgcgcgttgtcgccctgaagccgcgcgtgatgcagaaatcctacggcggtaactacgatcgcaagctgttcgccaagctgcgtaagctgcgtaaagccattgcggatgaagagaacatcccgccatacgtggtgttcaacgacgcgacgcttatcgagatggccgagcaaatgccgctcagcgccagcgagatgctcagcgtcaacggcgtcggcacgcgtaagctggagcgctttggtaaagagtttatggcgctcatccgttcccacgctgatggtgatgatgaggagtag

SEQ ID NO: 117088 - DNA, 621 bp, Enterobacter cloacae
atgttaatgctatttctcaccgtggcgttagtgcacatcgttgcgctgatgagccctggccctgactttttcttcgtgtcacaaacggccgtcagccgctcccgcaaagaggcaatgatgggtgtgctcggtattaccatgggcgtcatggtctgggcggcggttgcgctgctcggtctgaacctgatcctggcgaaaatggcgtggctgcataacatcatcatggtcggcggcggtctgtacctgtgctggatgggctaccagatgctgcgcggggcgctgaagaaagaagagaaaaagccggaagagccaaaggttgagctggcaacgggcggccgtagctttgtgaaagggctgctgaccaacctggcgaacccgaaagcgattatctacttcggctctgtgttctcgctgtttgtaggggataacgtcggcgcgggcgcgcgctgggggatcttcctgctgatcgttgttgagacgttcgcctggtttaccgttgtggcaagcctgtttgccttaccggcgatgcgtcgcggctaccagcgcatcgcgaagtggatcgacggctttgccggcgcgctgttcgccggcttcggcattcatctcatcatttctcgctaa

SEQ ID NO: 117089 - DNA, 621 bp, Enterobacter cloacae
atgaccttcgaatggtggttcgcctacctgctgacatccatcatcctcagcctttcacctggctcgggcgcaatcaacaccatgaccacctccattaatcacggctatcgcggcgcggcggcgtcaatcgccggtttacagaccgggcttggcattcatattgtgctggtggggattggtctgggcacgctgttctcccgttcggtgctggccttcgaggtgttgaaatgggctggcgcagcgtatcttatctggctgggtattcagcagtggcgcgccgcaggctcgattgatctgcatacgctctcccggacgcaaacacgcggccacctgtttaaacgcgcggtgttcgttaacctgaccaacccgaaaagcatcgtgttcctcgccgccctgttcccgcagtttatcgtgccgcatcagccacaggtgatgcagtacgtggtgctgggcgcgaccaccattattgtcgatatcattgtgatgattggttacgcgacgctggcgcagcgaattgcggcgtggatcaaagggcctaaacagatgaaggccctgaacaaagtctttggttcgctgtttatgctggttggcgcgctgcttgcgtcagcgcgtcatgcttag

SEQ ID NO: 117090 - DNA, 993 bp, Enterobacter cloacae
atgtttcagcagaaaaaggactgggaaacacgagaaaacgcatttgctgctttctccatggggccgctgaccgatttctggcgccagcgtgaggaagatgagtttatgggcgtcggggaaatcccggtacgcttcgttcgtttccgtgatgaaaaaaatgaccgggtgattgtggtctgccccgggcgcatcgaaagctatatcaaatatgccgagttggcgtatgacctgttccatctgggctttgatgtgttaattatcgaccatcgcgggcaggggctttctggcaggatgttgccggatacccatcgcggccacgtggataacttcagcgattacgtcgacgatctggccgcgttctggcagcaggaagtgcagcccggaccgtggcgcaagcgttatattcttgcccactccatggggggcgcgatctcgacgttgtttttgcagcgccataagcaccagtgtgacgccattgcgctgaccgcgccgatgtacggcattgtgatacgttttcctgactggatggtgcgccatctgctggactgggctgagggccatcagcgcattcgagaaggctatgccatcggaacaggacgctggcgggcattgccatttgccatcaacgtgttaacccacagccggcagcgttatcgccgcaacctgcgtttttatgccgatgaaccgcgtctgcgggtcggcggccccacctggcactgggtgcgggaaggtattcatgccggtgagcaggtgctggcgggcgtaggcgatgatgacacgccgacgctcctgatccaggcggaagaagagcgtgtggtggataaccgcatgcatgaccgctattgtgaacttcgcgccgctgcgggccatccctgtgaagggggtaaaccgctggtcatcaacggtgcgtaccatgagatcctttttgaaaaggacgctatgcgctcagtcgcgctcaacgccattgttgaatttttcaacaggcataactga

SEQ ID NO: 117091 - DNA, 801 bp, Enterobacter cloacae
atgtaccaggttgttgcatctgatttagatggcacgctgctttcccccgaccacaccctgtcgccttatgcgaaagagaccctaaaactcctgactgcccgcggcgtgaactttgtgttcgccaccggtcgccaccacgtggacgtggggcagatccgcgataacctggagatcaagtcgtacatgatcacctctaacggtgcgcgcgtacatgacacggacggcaacctgatttttacccataatctcgatcgtgacatcgccaccgatttgttcggcattgtgcataacaacccggatatcgtgactaacgtttaccgcgacgacgagtggtttatgaaccgccatcgcccggaagagatgcgcttcttcaaggaagccgtattccagtactcactgtacgagccgggtctgctggagccggaagggatcagcaaggtattcttcacctgtgtaaatcatgaggagttactgccgctggagcaggcgatcaacgcccgctggggcgaccgggtgaacgtgagcttctccacgctgacctgtctggaagtgatggcgggcggggtgtccaaaggtcacgcgctggaagcggtagcgaaacggctgggctttgatctgaaagactgtatcgcctttggcgatggcatgaacgatgccgagatgctctccatggcgggtaaaggctgcatcatgcagaacgcgcaccagcgcctgaaagatctgcacccggagctggaagtgatcggcaccaacggcgataacgccgtgcctaagtatctgcgcaaactgttccttgaataa

SEQ ID NO: 117092 - DNA, 900 bp, Enterobacter cloacae
gtggcgctactcattatcaccactatcctgtgggccttctcctttagtctgattggcgaataccttgccggatcggtcgacagctacttctcggtactgatgcgcgtggggctggcggcgctggtgttcctgccgttcctgcgtacccgcgggcagtcgctaaaaacgatactgctgtacatgctggtaggcgtgatgcagctcggcatcatgtacctgttcagcttccgggcctacgtttacctgtccgtctcggaatttctgctcttcaccgtgctgacgccgctctacatcacgctgatttatgaattgctcagcaggcgccgtttgcgctggggatatctgctgagcgctgcgctggcagtcattggcgcggcgattattcgctatgacaaggtaagcgatcacttctggaccgggctgatgttcgtccagctcgctaatatcagctttgccatcgggatggtgggttacaaacgtctgatggagacccgcccgatgccgcagcataacgcgtttgcgtggttctatatgggcgcggcgattgtcgcggtagcggcgtggtttctgctcggcaatccgcaaaagctgccgaccacctccgtgcagtggagcgttctggtctggctgggcgtggtggcgtcggggctgggctattttatgtggaactacggcgctacgcaggtagacgccggaacgctggggatcatgaacaacgtgcacgtgccggcggggctactggtgaacctcgccatctggcaggagcagccgcactggccgagtttccttattgggggaacggtgatcctggcttcgctgtgggtacatcgccgctgggtcgctccgcgctccgcacaaacggaagatggtcgcacgcgtggttccgcgctgagcgaataa

SEQ ID NO: 117093 - DNA, 954 bp, Enterobacter cloacae
atgatcgagattaaacacctgaaaacgctacaagcgttgcggaactgcggttctcttgcggcggcagcggccacgctgcaccagactcagtctgccctttctcaccagttcagcgatctggaacaacgcctcggcttccgtctttttgtgcgcaagagccagcctttgcgctttacgccgcagggcgaaattttgcttcagctggcgaaccaggtgctgccgcagattgccagcgcgttgcagtcatgcaacgagccgcagcagaccaccctgcgcatcgccattgagtgtcacagctgtattcagtggctgacccccgcgcttgagaacttccgccagaagtggccgcaggtggagatggacttcaaatccggcgtcacgtttgatccgcagccgtcgcttcagcagggtgagctggatctggtgatgacctcagatattctgccgcgcagcggtctgcactattcgccaatgtttgattttgaggtgcgtctggtgctggccccggaccatccgctggccgctaaaacgcgtatcacgccggaagatctggcaacggagacgctgctgatttacccggtacagcgcagtcgtctggatatctggcgccatttcctgcaacccgcgggcatcagcccacagctgaaaagcgtggataacacgctgctgttaattcagatggtggcggccagaatggggattgcggcgctgccgcactgggtggtcgagacggttgaacgccagggtctggtggtcaccaaaaccctgggtgaaggactgtggagccggctgtacgccgccgtgcgcgacggcgagcagcgtcagccgattacggaagcgtttattcgctcagcgcggaaccacgcgtgcgaccatcttccgtttgtgcggagcgcggagcgacccagcggcgatgtacccacagcgaagccaggatcaccgttcccccaataa

SEQ ID NO: 117094 - DNA, 2262 bp, Enterobacter cloacae
atgacaatccgcactcacactctcggtttccctcgcgttggtctgcgtcgcgagctgaaaaaagcgcaagaaagctactgggcgggtaacgccacccgcgaagaactgctggcggtggggcgcgagctgcgcgcgcgtcactgggatcagcaaaaacaggcgggcgtagacctgctgccggtgggcgatttcgcctggtacgaccatgttctgaccaccagcctgctgcttggcaacgtgccggctcgtcatcagaacaacgatggatcggtggatatcgataccctgttccgcatcggccgtggccgcgcgccagcgggtgagccagcggcagcggcggaaatgaccaagtggtttaacactaactatcactatatggtgccggagttcgttaagggccagcagttcaaactgacctggacccagcttctggatgaagtggacgaagcgctggcgctgggtcaccaggtgaaacccgtgctgctggggccggtcacctacctgtggctgggcaaagtgaaaggcgagcagttcgaccgcctcagcctgctgaacgatattctgccggtttataagcaggtgctgattgagctgggtaagcgcggtattcagtgggtgcaaatcgatgaaccggcgctggtgcttgagctgccgcaggcgtggctggatgccttcaaaccggcgtatgacgcgctcacgggccaggtgaagctgctgctgaccacctatttcgagggcgtaacgccgaacctcgacaccattaccgcgctgccggttcagggtctgcacgttgatctcgttcacggcaaagacgatgtggcagagttgcacaagcgtctgcctgcggagtggctgctctctgccggtctggtgaatggtcgtaacgtctggcgtgccgatctcaccgggaaatatgcacaaatcaaggacattgtcggtaaacgtgaattgtgggtagcctcttcctgttccctgctgcacagcccgatcgacctgagcgtggagacccgactcgaccctgaggtgaaaagctggtttgcctttgccctgcaaaagtgtgaggagctggctctgctgcgcgacgcgttgaacagcggcgacacggcagcgattaccgactggagcgccccgatccaggcgcgccgtcactcgacgcgcgtgcataacccggcggtggaaaaacgtctggcggccatcactgcccgggacagccagcgccagagcccgtatgaagtgcgcgccgaagcccagcgtgcgcgctttaacctgcccgcatggccgaccacaaccatcggctccttcccgcagactaccgagatccgcggcctgcgcctggacttcaaaaagggcaatctggatgcgaatcactaccgcaccggcattgcggagcacatcaaacaggcgatcgtcgagcaggaacgtctgggtctggacgtgctggtgcacggcgaggccgagcgtaacgatatggtggaatacttcggtgaacacctggacggctttgtctttacccagaacggctgggtgcaaagctacggctcccgctgcgtgaagccgccggtggtgatcggtgacgtcagccgcccggaagcgatcaccgtggagtgggcgaagtatgcccagtctctgaccgacaaaccggtaaaaggcatgcttacggggccggtgaccattctctgctggtcgttcccgcgtgaagatgtatcccgggaaaccatcgccaaacagatcgccctggcgctgcgtgatgaagtggcggatctggaagcggcggggattggcatcattcagatcgacgaaccggcgctgcgtgaaggcttgccgctgcgtcgcagcgactgggatgcttatctgacgtggggcgtggaggcgttccgcctcaacgcggccgtcgcgaaggacgacacgcagatccacacccacatgtgttactgcgaatttaacgacatcatggactccattgccgcgctcgacgccgatgtgatcaccatcgagacctcgcgttcagacatggagctgctggagtcgttcgaagagttcgactacccgaacgaaatcgggccgggtgtgtatgacattcactcccctaacgtgccgagcgtggagtggattgaaacgctgctgcaaaaagccgcccggcgcattccggcggaacgcctgtgggtaaacccggactgcggcctgaaaactcgcggctggcctgaaacccgcgcggcgctggcgaacatggtgcaggcggcgcagaatttgcgtcaggcgtag

SEQ ID NO: 117095 - DNA, 807 bp, Enterobacter cloacae
atgactgaaaaaatcggttttgcacctgctgcggccccgcatgcttcaaccatcgtctcaacccctgaagaggccattaccgcaggcgagacctccattccctcccagggagagaacatgccagcgtaccacgcgcggccaaaatccgccgatggcccgctgcccatcgtgatcgtggtgcaggaaatatttggcgttcatgaacatattcgcgacctctgccgccgtctggcgctggaaggttacctggccgttgcgccggaactctatttccgtcagggcgatccgaatgattacagcgacatcccgacgctgttcagcaacctggtcagcaaagtgccggacgcgcaggtgctggccgatctcgaccacgttgccagctgggcggcgcgcaacggtggcgacccgcaccgtctgatggtgaccggcttttgctggggcggacgcattagctggctgtatgccgcgcacaatccgcagctgaaagccgctgtggcctggtacggtaaactggtgggtgaaaagaccctgaactcgccgaaacatccggttgatatcgccaccgatttaaatgccccggtgctagggctgtatggcggccaggataccggcattccgcttgataccgtcgagaccatgcgccacgcgctgcgggcggcaaacgcgaaggccgaaatcgtggtgtacccggatgcgggacacgcgtttaatgccgattatcgtccgagctatcacgcagaatcggcgaaagatggctggcagagaatgctggcgtggttcagccagtacggcgggaagaaagcgtaa

SEQ ID NO: 117096 - DNA, 762 bp, Enterobacter cloacae
atgtctaagtctgatgtttttcatctcggcctcactaaaaacgatttacaaggggctacgcttgctatcgtccctggcgatcctgagcgtgtggaaaagatcgccgcgctgatggataagccggttaagctggcagcgcatcgcgaattcaccacctggcgcgcagagctggacggtaaagcggtgatcgtgtgctctaccggtattggtggcccgtctacctctatcgccgttgaagagctggcgcagctgggcattcgtactttcctgcgcatcggcaccacaggcgccattcagccgcacatcaacgtgggcgacgtgctggttaccaccgcatccgtgcgtctggacggggcaagcctgcactttgcaccgatggaattcccggcagtggccgatttcgaatgcaccaccgcgctggttgaagccgcgaagtccgtgggcgccaccacccacgtgggcgtaactgcctcttccgataccttctacccgggccaggagcgttacgacaccttctctggtcgcgtggtgagccgtttcaaaggctccatggaagagtggcagtcgatgggcgtcatgaactacgaaatggaatctgcgacgctgctgaccatgtgcgcaagccagggtctgcgtgccggtatggtggcgggcgttatcgtcaaccgtactcagcaggagatcccgaacgctgaaaccatgaagcagactgaaagccatgcggtgaaaatcgtggttgaagcggcgcgccgcctgatctaa

SEQ ID NO: 117097 - DNA, 1458 bp, Enterobacter cloacae
gtggatatctcaatcctgatttatgcagtgattgcgctggtgagcgtgggaattggctggctcatttccggctaccagcatgcgcagcagaaagccgaacagctggcagagcgcgaagagatcgtcgctgaacttagcgcgacgaaacaacagcttgcgctgagtgaccactggcgcgacgaatgcgaactgctcaataacgaactgcgcaatctgcgtgatatcaatacctcgctggaggccgatctccgtgaagtgaccacccgtcttgagtccacccaactgcacgccgaagacaaaatccgtcagatgatcaacagcgagcagcgtcttagcgagcagtttgagaacctcgcgaaccgcatttttgagcacagcaatcgccgcgtggatgagcagaaccgccagagcctgaacagcctgctgacgccgctgcgtgaacagctggacggctttcgccgtcaggtacaggacagctttggtcaggaggcccgcgaacgccacacgctggcgcatgaaattcgtaatctccagcagctgaatgcgcagatggcgcaggaggcggttaacctgacgcgcgcactgaaaggtgataacaaagcgcagggaaactggggcgaagtggtcatgacgcgtgtgctggaggcctctggcctgcgcgaaggatacgaatacgaaacgcaggtcagcattgagaacgatgcgcgctcgcggatgcagccggatgtcattgttcgtctgccacagggcaaagatgtggttatcgacgccaaaatgacgctggtggcctatgagcgctacttcaacgcggaagatgactacacccgcgaaacagcgttgcaggagcacattgcctccgtgcgtaaccatatccgtctgctgggcagaaaagattatcagcagttgccggggctgcgatcgctggattatgtgctgatgttcattccggtcgagcctgcgttcctgctggcactcgacagacagcccgaactgatcaccgaagcgctgaaaaataacattatgctggtcagccccaccacgctactggtggcgttacgtaccattgccaacctgtggcgctatgagcaccaaagccgtaacgcgcagcagattgccgatcgcgccagcaagctgtacgacaaaatgcggctgtttgtggacgatatgtcctcggtggggcaaagcctggatcgcgcgcaggataactaccgccaggcgatgaaaaaactctcctccgggcgtggcaatttgctggcgcaggcggaggcgtttcgcagcctgggggtggaagttaaacgcgagattaatccggaactggtggagcaggctaccgctcaggacgaagagtttcgtctgcgtgaaggcgacggtaagcaaaatagccgcaatgaagacaacgatttagcggcgagtttatcccccgaagcgcagccggcgcgtttctttcacggtggttga

SEQ ID NO: 117098 - DNA, 756 bp, Enterobacter cloacae
atggttgacgattcacaagacacaacgcactttggctttcagactgtcgccaaagcgcagaaagctgacatggtggcccacgtatttcattccgtggcggcgaagtacgatgtgatgaatgatttgatgtcatttggcattcatcgcttgtggaagcgcttcactattgattgcagcggcgtgcgccgtggacaaacggtgctggatttagccggaggcacaggggatctgaccgctaaattctcccgtctggttggcgaaaccggccgcgtggtgctggcggatatcaacgactccatgctgaaaatgggacgcgaaaagctgcgtaatatcggcgtggtaggcaacgttgaatatgttcaggccaacgccgaagcgctgccgttcccggacaatacgttcgactgcatcaccatctctttcggtctgcgtaacgttaccgataaagataaagcgctgcgctccatgtaccgcgtgcttaagccgggcggtcgacttctggtactcgagttttctaaaccgattatcgacccgctgagcaaagcttacgatgcctattccttccacgttctgccgcgcatcggcgagctggtggcaaacgatgcagaaagttaccgttatctggccgagtccatccgaatgcacccggatcaggacacgctgaaagcgatgatgcaggatgcggagtttgaaaacgtggaatacttcaatatgacggcgggtgtcgtcgcgctgcatcgtggttacaagttctga

SEQ ID NO: 117099 - DNA, 606 bp, Enterobacter cloacae
gtgcccattaaacccttagtcaccgctggcatcgagaatgtgctgaatgcctttctgtatcgcgctccggcgctgaaaaccgcacgtcagcggcttaacggaaaggtgctgcgcatcgttttaaaggagttctcgacgccgcttgtgttggtcttcagcgaacgccagcttgacgttctgggtgagtgggaaggcgaggctgactgctcggtgattacgcacatgagcgtattgccaaaactgcgtgaccgtcagcagatgacggcgcttattcgcagcggtgagctggaggtcgaaggcgatattcaggtggtacagaacttcgttgcactcagcgatcaggctgaattcgacccggcggaactgatggcgccctatatcggcgacatcgcggctgaaggtataagcaaaacgctgcgcacgggttccgctttccttcgtaaaggtctgctccgtcaacagcgctacgctgccgaggtgctgaccgaagagtggcgtatggcgccggggcctttagaagtcgcctggtttgcagaagagaccgcggcagttgagcgcgcagttgatgcgttaaccaaacggctggaaaaactggagggcaaatga

SEQ ID NO: 117100 - DNA, 1641 bp, Enterobacter cloacae
atgacgcctggtgaaattcggcgcctctattttatcgttcgcacctttttgagctacgggctcgacgagcttatccccagaatgcgtatcaccctgccgcttcggctttggcgtcgcacgctgttctggatgccgaatcgccataaggatcaggagctgggcgcacgcctgcgtcttgcgttacaggagctgggcccggtctggatcaagtttgggcagatgctctcaacacgtcgcgaccttttcccaccgcagattgccgatcagctcgcgctattgcaggaccgcgttgctccgtttgacggagagagagcgaagaaacaaatcgaagaagcgatgggcaatatccccatcgagacctggtttgatgatttcgatattcagcccctggcctctgcctctattgcgcaggttcacaccgcgcgcctgaaggaaaatggcaaagaggtggtcatcaaagtgattcgtccggatatcctgccggttatcaaagcagacatgaagctgatttatcgcctggctcgctgggtgccgcgtctgttgccggatggtcgccgtctgcgtccgctggaagtggttcgggaatacgaaaaaacgctgattgacgagcttaacctgctgcgtgaatcggcgaacgccattcagctgcgtcgaaactttgaagacagcccgatgctgtatgttcctgaagtctattctgactattgcagtcagaacatgatggtgatggaacgtatctacggtattccggtctcggacgtggcggcgctggaaaaacagggcaccaacatgaagctgctggccgagcgtggcgtgcaggtcttctttactcaggttttccgcgacagcttcttccatgcagacatgcatccgggcaacatcttcgtcagctatgagcacccggaagatccgaaatacatcggcatcgactgcggtattgtcggctcgctaaataaagaggataagcgctacctcgcagagaactttatcgctttcttcaatcgcgactaccgtaaggtggccgagctgcacgtggattcaggctgggttccgccagataccaacgtggaagagtttgaatttgcgatccgcaccgtctgtgagccgatttttgaaaagccgctctcggagatctctttcggacacgtcctgctcaacctgttcaacaccgcacgccgattcaatatggaagtgcagccgcaattagttttacttcagaaaacattactttacgttgagggcgtaggccgtcagctctatcctcagttagacttgtggaaaaccgcgaaaccgttcctcgaatcctggattaaggatcaggtcggaattccagctctgattcgctcgcttaaagagaaaggcccgttctggattgaaaaaatgcctgaaattcctgaactggtttacgacagtttgcgtcagagcaagaaccttcagcacagcatggataaaatcgcgcacgagcttcaatccagtcgcgtgcgtcaggggcagtcccgctatctcttcggaattggcgcgacgctgctgataagcggcacgttgctgttgatcaatcgtccggactgggaaatgatgccagcctggattatggctgccggtgtggttgtctggcttgctggctggagaaaaacgcgctga

SEQ ID NO: 117101 - DNA, 255 bp, Enterobacter cloacae
atgggtggtatcagtatctggcagttagtgatcattgccgtcatcgttgtgctgctgtttggcacgaaaaaactcggatcgattggttccgacctgggcgcgtcaatcaaaggcttcaagaaagccatgagcgatgatgagaataagcaggaaaaaaccagtcaggatgctgattttaccgctaaatccatcgccgataagcaggacgaagccaaaaaggaagaggctaaacgtcacgataaagagcaggtgtaa

SEQ ID NO: 117102 - DNA, 543 bp, Enterobacter cloacae
gtgttcgacattggttttggtgagttactgctggtctttgtgattggtctgattgtgttggggccgcagcgtttacccgttgcggtgaaaaccgtcgtgggctgggtgcgggcgcttcgctcgctggcaactaccgtgcagaacgagctggcgcaggagctgaagcttcaggaatttcaggacagcctgaaaaaggttgaaaaggcgagcatggacaacctgacgccggagctgaaagcatcaatggatgagttgcgcgaagcggcggaatccatgaagcgttcttacagcattaacgatcctgagaaggcgagcgatgaagcaaacaccatccacaatccggtggtgaagggtagcgaagagcagcgcgagggtgtaacgccttccagcgcggagcatcaggctgcttcgccagagcaatcgccgcaggagcccgaagtgaaaaagcaggtgccgccggaagagcccgtggtcaaaacggctgaggtaaaacccgccgcgcccgtttccgaatcatccccctcgtcgagtgataaagcgtaa

SEQ ID NO: 117103 - DNA, 771 bp, Enterobacter cloacae
atggcagtagatgatactcaaccgcttattacgcacctcattgagctgcgtaagcgcctgttaaactgcattattgcggttttcctcatttttttatgtctggtctattttgccaacgatatctatcaggtggtttccgcgccgctgattaaacagatgcctctgggcgcgacgatgattgcaacagacgttgcttcaccgttctttaccccgatcaaactgaccttctgggtgtcgttgattgcctctgcgccggtcattttgtatcaggtctgggcatttgtggcgcccgcgctgtacaagcatgaacgcaagctggttattccgctgctggtgtccagttcgctgctgttttatatcggcatggcgttcgcctacttcgttgtcttcccgctggccttcggcttcctgacgcataccgcaccggaaggggtacaggtgtcgacggacatcgccagctacctcagcttcgtgatggcgctgtttatggcctttggtgtcgccttcgaggtgcccgtagcaattgtcctgctctgctgggtgggggtgaccacgcctgacgatctgcgtaagaagcgcccgtacatcctggtgggggcatttgtcgtaggtatgctgttaacgccaccggacgtcttctcgcaaaccttactggcgatacctatgtactgcctgtttgaagtcggcgtgttcttcgctcgtttctacgtcggaaaggggcgtacccgggacgaagaagacgagccgtctgaagagactactaaagaataa

SEQ ID NO: 117104 - DNA, 783 bp, Enterobacter cloacae
atgtttgatatcgggcttaacctcaccagcgcccagtttgcgaaagaccacgatgaggtggtggcgcgcgcctttgccgccggcgtgggtgggctgctactgacgggaacgaatctgcatgagagtgagcaggcacggcagctggcgcaacgctatcaacactgctggtccaccgcaggcgtgcatcctcatgacagcagccagtggacgcatgaaagcgctgaggcgcttcatcgtctggcacaaacgccagaagtggttgccattggcgaatgcgggcttgatttcaaccgtaacttctcgacacctgaagagcaggagaaggcatttaccgcccagctcgcgctggcagcagagctggagatgccggtgtttatgcactgtcgcgatgcgcatgaacgttttatggcgctactggaaccctggctggagaaactgccgggcgcggtgttgcactgctttacgggctcccgtcaggaagcgctggattgcctgaaccgcgggctgtatttgggtatcacgggctgggtctgcgatgagcgtcgtgggctggaactgcgtgagctgttacccgttatcccggccgatcgtttgctgctggaaacggatgcgccgtatctgttgccccgggatatgcagcccaaaccgccatcacgacgtaatgaaccggcctacctggggcatattgctgagcgagtggcgcactggcgcggagaagatgcccagtggctggcagcacaaaccgatgataacgtgcgtcgtctgttcggcgtgcagttctaa

SEQ ID NO: 117105 - DNA, 525 bp, Enterobacter cloacae
atgcttgcgccccgaacaatgggaagagtgattatgcaggcctggtatttactgtattgcaaacgcgggcaacttcagcgcgcgcaggaacatcttgaacgtcagtctgttaactgcctgacacccgtgatcacgcttgaaaaaatgcagcgtggaagacgcacgaccgtcagtgagcctctgttcccgaactatctgttcgtcgagttcgaccccgaagtgatccacaccacgacgatcagcgccacgcgcggcgtcagccattttgtgcgttttggcgcccatccggcaagagtaccgtcatcggttattcatcagctttctgtctaccagcagcctgaagatattaccgatccggaaaccccttatgccggcgacagcgtggtgatcaccgaaggcgcctttgaagggttacaggccatcttcgctgagccggacggtgaagcgcgctccatgctgctgctcaacctgctgaacaaagaggtgttgcagagcgttaaaaacaccgatttccgcaaagtttag

SEQ ID NO: 117106 - DNA, 1497 bp, Enterobacter cloacae
atgattaactgcatgaaataccacgatctacgcgacttcctggcgctgctggaaaagcagggcgaactcaaacgcattacgcttcctgttgatccgtatctggaaatgacagaaatcgctgaccgcaccctgcgcgcgggcggcccggcgttgctgtttgaaaacccaaaaggctacgccatgccggtgctgtgcaacctgtttggcacacctcgccgcgtggcgctggggatgggacaggaagatgtcacggcgttacgtgaagtgggcaaactgctggcctttcttaaagagccggagccgccaaaagggttccgcgacctgttcgacaagctgccgcagtttaagcaggtgctgaacatgcccaccaaacgcctgcgcggtgcgccgtgccagcaaaaagtgctggaaggcgatgcggtggatctgaccaaaattcccatcatgcagtgctggcctgacgatgccgcaccgctgatcacctggggcctcaccgtgacgcgtgggccgcataaagagcgtcaaaacctcggcatttatcgccagcagctgattggcaagaacaagctcatcatgcgctggttgtcccatcgcggtggggcgctggatttccaggagtggtgcgcggcccatccgggcgaacgcttcccggtttccgtcgcgctgggtgccgatccggcaaccattctgggcgcggtgacgcctgttcctgatacgctgtctgaatatgcctttgcagggctgctgcgcggcaccaaaaccgaagtggtgaagtgcatctccaatgacctggaagtaccggccagcgcagagattgtgctggaaggttacattgaacagggcgagctggcgcccgaagggccgtacggcgaccacaccggctattacaacgaagtggataacttcccggtgttcaccgtcacccacattacccagcgtgaagatgccatctatcactccacctataccggccgtccaccggatgaaccggcggtgcttggcgtggcgctgaacgaagtgttcgtgccgatcctgcaaaagcagttcccggaaattgttgatttttatctgccgccggaagggtgttcgtatcgcctggcggtggtgacgatgaagaagcagtatgccggtcacgctaagcgcgtgatgatgggcgtatggtctttcctgcgccagtttatgtataccaagtttgtgattgtctgcgatgatgacgtcaatgcccgcgactggaatgacgtcatctgggccatcaccacgcgtatggatccggcgcgtgatacggtgttagtggaaaacacgccgattgattacctggactttgcctcgccggtttccggccttggctcaaaaatgggactggatgccacgaacaaatggcctggcgaaaccgaccgtgaatggggtcgcccgatcaaaaaagatcctgccgtgaccgcgcgaattgacgcgatctgggacgagctggccataatgaataacggtaaggcagaataa

SEQ ID NO: 117107 - DNA, 702 bp, Enterobacter cloacae
atgacaaccttaagctgtaaagtgacgtcggtagatgctattaccgacaccgtatatcgcgtccgtttggttcctgaagcggccttctcattccgtgccggtcagtacctgatggtcgtgatggacgagcgtgataagcgtcctttctctatggcctcaacgccagcagagaaggaatttattgagctgcatattggtgcgtctgagcttaacctgtacgcgatggccgtgatggaccgcatcctgaaagagcgtgaaatcgtggtcgatattcctcacggcgaggcctggctgcgtgaagacgaagaccgtccgctgatcctgattgccggtggcacgggcttctcatatgtccgctctattctgctgaccgcgctggcgcgcaacccgaatcgcgatatcaccatctactggggcggccgtgaagagaagcatctttacgatctgtctgagctggaagcgctgagcgtaaatcatccaaacctgcgcatcgagccggttgtcgagcagccggaagagggctggcgcgggcgcagcggtacggtgctgactgcggtattgcaggatcacgggacgctggccgggcacgatatctacattgccggtcgctttgaaatggcaaaaattgcccgcgacctgttctgcaacgagcgtgacgcgcgggaagatcgtctgtttggcgatgcgtttgcgtttatctga

SEQ ID NO: 117108 - DNA, 1620 bp, Enterobacter cloacae
atggctcattttgcgcagtccccctcttttattttgcatcaggtcacctgtcagtttgcgacgggcgatatcctttttggtccactgaatctttctctggatgcgtcagtgtgcgcgctggttggccgcaacggcagcggcaaaacacggctgctgcggctgctggcaggggttgatgaacccgccagcggtcatattgagcgctttggtacacacgtctatgtggcgcaacagcaggatatttctgcggataccacgcttgccggactgcttggttacgacgcgatctttgcggcgcgcacgcgcatcgacagcggtcattatgaacccgacgatctcgacacgctcgacggttactgggatctggctgaacggctgagccaggcttttatcgctgcaaaacttcccccttttgacccgaataaacgcgcggcagaactgagcggcggcgagcgcattcgtgctttgctgtgcagcgcattcaccgcagatgctgattacctgctgctggacgaaccgaccaaccacctcgacaggcaaggccgcgtgtggttctacgagcagctttcccggtatcagggcggggtactggtggcctctcacgaccgtgagttgctggcccaggtaccgcgtatccttgaactgagcgcgttgggcttgcgcagctacggggggaattatgctgactatcgaacccagcgtgatgctgagcaactggctgcccgcgccgcgctggagcatgctgccaccgaacgcaagcgtacccgcgcccgtatgcataaagagcatgacgacagcctgcggcgttcagccaaaacgcttcgcacggtcgacagccttaacatcgcctcgtttgaacgggtcaaatacaaaggggcggcgaaagagcgtattggttcctggaaaaaacagcatagcgatcaaaatcatgctctgaacgctgcgttcaaccaggcacgcgagcgggttgaagaggataacgcggtgatgtttaccctgccgggcagtgaaatcccggaaggaaaacaggtactggtgctggaagaactggtgcttccgcacgtgcctgtctccccgataaactggcgaatggatggcccgatgcgcgtggcgctacgcgggccgaacggctgtggaaaatccacgctgttgaaagtgatgttgggcaaaacagcccctgtcacgggaacctgtaaggtctccgtcaggtgtgcgtatctcgatcagcatctttcccggctggatctgtcgcagtcggtgatgacacaccttagcctgggcaatacgccgctcgaagagggggcgctgcgtacccgtttagcgcagcttcagttgggcgcagagaaagtgacactaccactggccgaactgagtggcggcgagcgcctgaaggccgcgctggcctgcgtattgtggcgtgaagcggcaacgcagctgttgcttctggatgagccgaccaaccatcttgatctggcctctgttcaggccattgaagcggccttagccgattaccccggcgcgctgctggtggtgtcgcatgatgaagcctttctggcagggctgaagctgacgcatgaactggtatgggaagagacgggatggcgatgtgaaagcctgtaa

SEQ ID NO: 117109 - DNA, 288 bp, Enterobacter cloacae
atggaattaaaagatcctgagtttgagctgctgagcagcctggaacagattatttttaaagatgtaccgccgacggttaccctgaatcaaaagtccaatccttttagtgaatttgagcgtttacgcaaaggatcgggcctgaaaacagatgaattcgcaagagcgatgggtgtcagcgtagcgatggtgctggagtgggagtcaaaacgtgaaaaacctaccccagccgagctaaagctgatgcgcctgatccaggcaaaccctgaccttcgcaagcagttagcctga

SEQ ID NO: 117110 - DNA, 711 bp, Enterobacter cloacae
atggcgacaggaaagtcctgctctcgctggtttgcgcctattgcggcgttgttgatggttgttagcctgagtgggtgtttcgataaagaaggcgatcagcgcaaagcgtttatcgattttctacagaatacagtgatgcgtagcggcgagcgtttaccaacgctgactgcggatcagaaaaaacagtttggtccattcgtgtcggattacgccattctgtatggctattcacagcaggtaagccaggcgatggattccggtattcgcccggtagtggatagcgtgaatgccatccgcgttccacaggattatatgacccagcgcgaaccgctgcgccagtcaaatggcgcgcttggggtactgagccagcagctgcaaaatgccaaaatgcaggctgatgcgtcgcgttccgcgttgaagcagggcgaggatctcaaaccggtctatgaccaggtgtatgagaaagtcgtgaccaagccgtcaaacgccttgcaaccgctgatcccggcggcgcaggtctttactcagcagctggttcaggtgggtgactttattagtgaacaaggtacgcaggtgagcttcgtctctaacggtatccagttcccgacctcccagcaggcgagccagtacaacgcgctgatcgggccgctagcgtcccagcatcaggcctttagccaggcctggagcgcagcggtcgctgctacggaataa

SEQ ID NO: 117111 - DNA, 213 bp, Enterobacter cloacae
atgtctgctaaaatgactggtctggtaaaatggttcaacgctgataaaggtttcggcttcatcactcctgacgatggctctaaagacgtgttcgtacacttctctgctatccagaacgatggctacaaatctctggatgaaggtcagaaagtttccttcaccatcgaaagcggcgctaaaggcccagcagctggtaacgttgtaagcctgtaa

SEQ ID NO: 117112 - DNA, 975 bp, Enterobacter cloacae
atgaagccgtccgtcattttgtacaaagcactgcctgaagatctgcaaaaacgcctggaggaacactttaccgttacccgggtaaagaacctcagcccggaaaccgtggcgcagcacgccgacgcgtttgccagcgccgagggcctgctgggttcgagcgaaaaggtggatgcagcgctgctggagaaaatgccgaagcttcgtgctacctcaaccgtttcggtgggatacgacaatttcgacgtggatgcgctaaacgcacgcaacatcctgctgatgcacacgccgcatgccctgacggaaaccgtcgccgacacgctgatggcgctggtgctcagcaccgcccgtcgcgtggtggaagtggccgagcgcgtgaaagcgggcgaatggacgaaaagcattggcccggactggttcggcgtggacgttcatggcaaaacgctggggattgttgggatgggccgtatcggtctggcgctggcacagcgcgcgcattttggcttcaacatgcccatcctgtataacgcacgccgtcaccacagtgaagctgaagaacgtttcaacgcccgctactgcgagcttgatacgctgttgcgggaagccgactttgtctgcctgatcctgccgctgacggatgaaacgcgtcatctcatcggcaaagcggcctttgaaaagatgaagaagtcggccattttcatcaacgcgggtcgtggtccggtggtcgatgagaaggcgctgattgaggccctgcaaaacggtgagatccacgcagccggtctggacgtgtttgaacaggagccgctgccggtggattctccgctactgaccatgccgaacgtcgtcgccctgccccacatcggctctgccactcatgaaacacgctacaatatggcggcgaccgccgtggataatctgattgccgcgctcggcggtaaagtggataagaactgcgttaacccgcagatacaacagtag

SEQ ID NO: 117113 - DNA, 1281 bp, Enterobacter cloacae
atgaacagttcgaccaatgcagtaaaacgctggtggtacatcatgccaatcgtgtttatcacgtacagcctggcgtacctggatcgtgccaacttcagtttcgcatccgccgccgggatcaacgaagacctcgggatcaccaaaggggtctcctccctgctgggtgccctcttcttcctgggttatttcttcttccagatccccggcgcgatttacgctgaacgccgcagcgtgcgaaagctcattttcatctgcctgatcttgtggggtgcctgtgcttcgcttactggcgtggtgaataacatacctgctctggcggccattcgctttattctcggcgtggttgaggcggccgtcatgccagcaatgctgatttacatcagtaactggttcacaaaatctgagcgttcacgtgctaatacgttcctgatactcggtaacccggtcaccgtgctgtggatgtcggtggtttccggctatctgatccagtccttcggctggcgcgagatgttcatcatcgaaggggttcccgcgattatctgggccttctgctggtgggtgctggtgaaagataagccagcccaggcgaaatggctttctgaggacgaaaaagccgcactccaggcacagctggataaagagcagcaggggctgaaagcggtgcgtaactacggcgaagccttccgctcccggaatgtcatcctgctgtgcgcacagtattttacctggagcattggcgtgtacggctttgtgctgtggctgccgtcgattatccgcagcggcggtgaaaaccttggcatggtggaagtgggctggctgtcatccgtgccttacctggctgcgaccatcgcgatgattatcgtctcctgggcatcggacaagctgcaaaaccgtaagctgttcgtctggccactgctgctgatcgctgcttttgccttcattggctcctgggccgtaggcgcaaaccacttctgggtctcgtacactctgctggtgattgcgggtgcggccatgtatgccccgtatggtccgttctttgccatcatcccggaaatgctgccgcgtaacgtcgcagggggcgcgatggcgttgatcaacagtatgggcgcgctgggttcgttctttggctcgtggtttgtgggctatctgaacggcaccaccggcagcccgtcggcctcttacatctttatgggggtggcgctttttgcctcggtatggcttactttgattgttaagcctgctaataatcaacagctacccgtcggcgcacgccacgcctga

SEQ ID NO: 117114 - DNA, 939 bp, Enterobacter cloacae
atgcacaagacgctggatgtcatcaccattggcgaggccatggcgatgtttgtcgccaccgaaacgggcgagctgagcgcagtggagcacttcattaaacgcgtggcaggtgccgagctgaatgttgctaccggacttgcgcggctggggctgaatgtcggctgggtaagccgcgtgggaaatgacagctttggccattttattctcgactcactgaaaaaagagggcattgatgccgcaggcgtgaccctcgacggacgctttgcgacgggctttcagctgaaatctaaagttgaaaatggaaccgatcccatcgtggagtatttccgcaaaggctcagcggcaagccatctctccgtggatgattatcacgccgcgtatttatcctccgcgcgccacctgcacctgagcggcgtggcggcggcgctctcgaccagctcgtacgatttactggatcacgcggcttcggcaatgaaagcacagggcaaaacgatctctttcgatcctaacctgcgcccggtgctgtggaaaagcgaagcggagatggctgagaaactaaaccgactggcgtttcaggcggactgggttctgccgggcataaaagagggaatgatcctcactggcgaaagcacgcccgaaggcattgctgatttttacctcaacagaggggtaaaagccgtggtgctgaaaaccggtgccgacggcgcatggttcaaaactgccgacggtgagcaaggcgctgtcgctgcggtaaaagtcgacaacgtggtcgataccgtgggcgcgggcgatgggtttgccgtcggggtcatcagcgccctgctggagggcaaaccgctgtcgcaggccgtggcgcgaggcaacaaaattggttcgctggcgattcaggtgcagggcgacagcgaaggattaccaacacgagcagagctcggcgtctaa

SEQ ID NO: 117115 - DNA, 735 bp, Enterobacter cloacae
atggtggtcaccgccgcgtatggtgcggatcaggtgcgacaggcaggcggtcaacgggcaatacttcccgttattgccggcgcaggagctgatggcgttgaaatccgccgcgagctcttcagcaacgacgagttaatggccctgcctgcgctcggcgagtccattgaactgctgggtttactggcgtgctactccgccccggcccccctgtttatgcccgatggcaccctcaacacggatctcccgcgctaccttagcgaagccagcgccctgaacgcgctgtggcttaaagtctcgctgggtcatttcagcgacaaacagccgcttgaagccctgcgcgcactgctggatgaaagcggcatgacgctggtggtggaaaacgaccagaccgactgcgggcagctcgcgccgatgcagcgcttcaaagccgcctgccgggtaatggcgctgccggtcacgctgacgttcgatatgggcaactggctgtgggttggcgactctccggaagaggctgcacgtcagctggctcccgccgtgagctatattcatgtgaagtccgcagtcccgcataaggcgcagttccgcgccgtcgcgccggatcagaccgattctcgctggcgggatctgcttaatcaactccctgccgatgcgccacgcggtatcgaatttccgctggaagggacggatctcaccgccgtcacccgccattacgtcaacctgctgcgcgaggagtaa

SEQ ID NO: 117116 - DNA, 1017 bp, Enterobacter cloacae
atgatcaaaccaacccgggccaccatcagcgacgtggcgaaagccgccaaaaccggtaaaaccagcatttcacgctacctcaacggcgagaaacacctgctttccgatgcgctgctggcacgaatcgaacaggccattgccgatctcgactaccgtcccagcctgatggcgcgcggcctcaagcggggccgcacccgtctgattggcctcatcatcgccgatatcaccaacccctattccgttaacgtcctcagcggcatcgaagcggcgtgccgtgaaaaaggctttaccccgctggtctgtaacaccaataacgaggttgatcaggagctgcattacctcgatctgctgcgcagctatcaggtggaagggattgtggtgaatgccgtcgggatgcgagaagaggggctaaatcgtctgcaacaatcgtctctgccaatggtgcttattgaccgaaaaatcccggaatttgcctgcgatgtggtcgggctggataacacccaggcggctaccaccgccactgagcacctgattgaacagggcttcgaagccattttattcctgagcgaaccgctgggcatggttaacacccgccgcgaccgcctggcggcatttcgtgccacgctggcgcgatatcccggcgtgatcgccgagaatgccgaaatccccctgcatgaagccgggcagctggataataccctgcgccagttccatacccgccatcggggtatgcgcaaggcggtgatctccgcgaacggggcgctgacgcttcaggttgcccgctcgcttaaacgcattggcctgcactggggcagcgacatcggcttactcggctttgatgaactggagtgggcagaacttgctggcgtaggcatcaccaccctcaaacaacccacctggcagatcggctatgccgcggttgaacaagtggttcgccgcattgaaggcacccgcgacgccgtacgcgagcaggtgttttccggcgaactgatcgttcgcggctctactgcccgttaa

SEQ ID NO: 117117 - DNA, 663 bp, Enterobacter cloacae
atgaaaaaacgcgtactcgttattgccgctctggtgagcggcgcactggctgtttctggctgcacaaccaacccttacaccggtgaacgcgaagcgggcaaatccggcattggcgcgggtattggttccctggtgggcgctggcgttggcgcactctcctcctccaagaaagatcgcggcaaaggtgcgctgattggcgcagcggcaggcgcagctctgggcggcggcgtgggttattacatggacgtgcaggaagcaaaactgcgtgacaaaatgaaaggtacgggcgtgagcgtgacgcgcagcggtgacaacatcatcctgaacatgccaaacaacgtgacctttgacagcagcagcgcgacgctgaaacccgcaggcgcaaacaccctgaccggcgtggccgcagtgctgaaagagtacaataaaactgccgtgaacgtgattggctacaccgacagcaccggcagccaggatctgaacatgcgtctgtcccagcagcgcgccgattccgtggccagctcgctgatcgcccagggcgtagaagcgaaccgcatccgcaccagcggcatgggtccggctaacccgatcgccagcaacagcacggcggaaggcaaagcgcagaaccgccgcgttgagattacgttaagcccggtgcagtag

SEQ ID NO: 117118 - DNA, 2328 bp, Enterobacter cloacae
ttgagcacctcaacaaaaaccattctgaccgccgcccactgggggccgatgctggtcgaaaccgatggcgacactgtgctgtcgtctcgcggggctttgccttcgcgccatctcaactctttacagaccgtcgttcgcgatcaggtacacagtaaaacccgcgtccgctggccgatggtgcgtaaaggctttctggcgtcaccggataagccgcagggtattcgtgggcaggatgagttcgtacgcgtgagctgggacgacgcgctggcgctgatccatacccagcataaacgcattcgcgacagctatggcccgtcgtccatttttgccggctcctatggctggcgctcgaacggcgtgctgcataaggccgcaaccctgctgcaacgctatatgagcctggccggaggatacaccggccatctgggcgattactcgaccggcgcggcgcaggcaatcatgccgtatgtcgtgggcgggaatgaggtttatcagcagcagaccagctggccgctggtgctggagcatgcggaggtggtggtgctctggagcgccaacccgctcaataccctgaaaattgcctggaatgcgtccgacgagcagggcgtttcctactttgatgcgctgcgcaaaagcggcaagcgcatcatctgtatcgatccgatgcgttctgaaacgctggatttcttcggcgacagcgccgagtggatcgcgccgcatatgggcaccgacgtggcgatgatgctgggcatcgcccacaccctggtggagaacggctggcacgatacggaatttctggcgcgctgcaccacgggcttcgataaatttgccgactacctgacgggacaaaccgacggtatcgccaaaaccgcagagtgggctgcggcgatttgtggcgttgatgccgttaaaatccgcgaactggcgacgttattccatagccgtgtcacgatgctcatgtccggctgggggatgcagcgccagcagtttggcgagcagaagcactggatgctggtgacgctcgccgcgatgctcgggcagattggcacacccggcggcggttttgggctttcctatcactttgctaacggcggcaacccgacgcgaaaagccgcggtgctggcctccatgcagggctcagtgcagggtggcgtggacgcggtagataaaattccggtggcacgcattgttgaagccctggagaacccaggcgggttttatcagcacaacggccaggatcggcatttcccggatattaagtttgtctggtgggcgggtggggccaacttcacccatcaccaggatactaaccgcctgatccgcgcctggcagaaaccggagctggtggtgatctcggagtgcttctggaccgcgtcagcgaaacatgccgatatcgttttgcccgccacgacctcgttcgagcgtaacgatctcaccatgacgggggattacagcaatcagcatatggtgccgatgaagcgcgtcgtggctccccgggatgaagcgcgggatgattttgatgtctttgccgacctgagtgaaatgtgggaagcgggcggtcgggagcgtttcaccgagggcaaaaccgatctgcaatggctggaaacgttttaccagattgccagccagcgcggggctgcgcagggcgtgacgctgccgccattcgctgagttctgggaggcgaatcaactcttcgaaatgccggaaagcgagcagaatgcgcggtttgtgcgctttgctgacttccgtcgcgatccggagaatcacccgctaaaaaccgaaagcgggaagattgtgatctacagcgaacgcatcgccagctttggctacgcggactgtccgccacatccggcgtggctggagccggacgaatggcatggcaatgcgcagccggggcagcttcagctgctgtctgcccatcccgcccatcgtctgcacagccagctcaactattcggctttgcgcgagcagtatgcggtggcgggtcgtgagccgattgcgctgaacagcgatgacgcaaaggcgcgggggattaaccacggcgacctcgttcgggtctggaacgcgcgcgggcaggtgctggcaggcgccgtggtgagtgacgggatccgccctggcgttttctgcattcatcagggcgcatggccggatctggcgctggacgagggcggtatttgtaagaacggcgccgtaaacgtgctgaccaaagatctccccagctcgaagctggggaatggctgcgcggggaatacggcgctggcatgggtggagaaatatgaggggccggcgcttacccttacggcgtttgatccgcctgccagctcatga

SEQ ID NO: 117119 - DNA, 441 bp, Enterobacter cloacae
atgatccgcaaatggcaaagtgaggacaccgctccgcttttgagtctgtggctggagagcaccaccgaggcgcatccgtttatcgacgcaagttactggcaagcgaatgaagcggtagtgcgggatgaataccttcccgccgccgagacctgggtctgggaagaaaacggtaccctgttcggttttatcagcgtcatgcagttccagttcgtgggggcgttgtttatcgccccggcgttcatcggaaaggggatcgggcgtgcgctgctgaaccacgttcagcagcactatccgtatttaactctggaggtgtatcagaaaaacgtgcgggcggtgaatttctatcatgctcagggttttcgcatcgaagacagcgcctggcaggatgatacccaacacccgacgtggatcatgagctggcaggcggatcaaacgccgtaa

SEQ ID NO: 117120 - DNA, 582 bp, Enterobacter cloacae
atgcaacgttgcggctgggtaagccaggatcagctttatatcgattatcacgacaaggaatggggcgtaccggaaaccgacggtaaaaaactgtttgaaatgatttgccttgaaggccagcaggccggactgtcgtggatcaccgttctgaaaaagcgtgagaactatcgcaaagccttccaccagttcgatccggctgcggttgccgccatgaccgacgacgacgtggaaaggctggttctggataccggtatcatccgccatcgcggtaaaattcaggccattattggtaacgcgcgtgcttatctggcgatggagcaaaacggcgaacccttctcagcattcgtctggtcgtttgtggataacgagccgaaggtgacgcaggccgccacgcttgcagagatcccaacgtcgacccccgcctcagatgccctgtcgaaagcgctgaaaaaacgcggctttaagtttgtgggcaccaccatctgttactcctttatgcaggcctgcgggctggtcaatgaccacattacgggctgcttctgccatccggagggccaccatgatccgcaaatggcaaagtga

SEQ ID NO: 117121 - DNA, 585 bp, Enterobacter cloacae
atgacatatatcgccgaactcggctctttctggagtcgctttgatgatgataaaaaaatcagtggtcgccatgctgcttctggcctggtgggtgtttcagtctgcctgcttttttgtaacaccgcttttgcgtggcaacaggaatatatcgtttcagatgctcaaagtaatacgatggaacgctatacatgggacgccgatcaccaacctcgttatgaagatattctcgcggagcgtattaaccgcacgcagaatgctgcggggtttaccctgaacgacccatccggttcagatgcggaaaccgttctgagcgttggctggaattttcccgtggcgggacatttcaccaccgggcccgtaatggcgtggcgcactgatggcgctccctccgcaccagtgaatgcgtttgaggatacaaccaccacgcagtcgcttaccgatccactctggcatgccagcgtgaactcattggggtggcgtgtcgatacgcagtatggtgatttacacccctgggcgaagatcagctataaccagcaaactgaagaagaatatttatatacgctgggattgagcgccaaattttaa

SEQ ID NO: 117122 - DNA, 1203 bp, Enterobacter cloacae
atgaacacatcaacttataaccgcacgcgttggctgacgctattcggcaccatcgttacccagttcgcactgggatcggtctatacctggagcctgtttaacagcgccctgtctgataagatcggcgcgccgataagccaggtggcgttctccttcggcttgctgagtcttgggttagcaatttcctcttccgtggcgggcaaacttcaggagcgcttcggcgtgaagcgtgtaaccatggcctccgggatcttgctgggcgtgggcttcttcctgacggcatattccgacaacctgatgatgctgtggctgagcgccggggtgctggtggggctggcggacggggcaggttacctgctgacgctgtctaactgcgtgaagtggttcccggagcgtaaagggcttatctccgcgtttgccattggttcatatggcctgggcagccttggcttcaaattcatcgatgcgcatctgctggcctcggtggggcttgagaaaacctttatgatctggggcgtgattgtgctggtgatgatcctcttcggcgcaacgctgatgaaagacgcgccgcagcaggaagtgaaaaccgttaacggtgtggtggagaatgatttcacccttgcacagtccatgcgtaaaccgcagtactggatgctggcggtgatgttcctgacggcctgcatgagcggtctgtatgtcatcggcgtggcgaaagatatcgcgcagggaatggtgaaactggacgcggcgacggcggcgaacgcggtaacggtcatctccattgctaacctctcgggtcgtctggtgctcggtatcctgtctgacaaaatcgcccgcatccgcgtgattacgctggggcaggtcatctctctggtgggcatggcggcgctgctgtttgcaccgctgaacgaagcgacattctttgcggcgatagcctgcgtagcctttaactttggcggtaccattaccgtcttcccgtcgctggtgagcgagttcttcggcctgaacaatctggcgaaaaactacggtgtgatttatctcggcttcggtatcggcagtatttgcgggtcgctgattgcctcgctgtttggtggcttctacgtgacattctgcgtgatatttgccttgttgattatttcactggcgctgtccaccacgattcgtcagccgcaacgcgaggtctataaagaagcgcatgcatga

SEQ ID NO: 117123 - DNA, 1695 bp, Enterobacter cloacae
atgaaatatatcaggtctcttacccagcaaagattgtgtctgatgctggctgtctatatcggtttgtttctgaatggcgcggtgctgttcagaagagtggaaggttattttgaacacctcaccgtaagaaacgggattttcgccgcgattgaagtgtttggctcaattctggcaaccttcttcctgctacgtctgctctcgctttttggcagacgtacatggcaggttctggcctcgctggtggtgattatctctgccgccgcaagctattacatgacattcatgaatgtggtcattggctacggtattgtggcctcggtgatgaccacggacatcgacctctcgaaagaggtagtggggcaagggttcatcatgtggacgattttgacctgcctgatcccgctcttctttatctggagtaatacctgtcgctataccctgttacgccagctgcgtacccgtgggcaacgcatccgcaacgtcgccgtcgttcttctggcgggtctgctggtatgggcgcctattcgcctgatggaaaaacagcaaaagcggatcgaaaaagcgacaggcgtagatatgccaagctacggcggcgtggtggctaactcgtatctgccgtctaactggctgtcggcgctaggtctctatgcctgggctcaggcggacgaatccagcgatgtgaaatcgctgattaacccgaccaaaaagttcacctaccaggctccggctgacggactggatgatacttacgtggtcttcgttatcggcgaaacgacgcgctgggatcatatgggtattctcggttatgaccgcgataccaccccgaaactggcgcaggaaaagaacctggtggcataccgcggctactcctgcgataccgccacgaagctttcgttgcgctgtatgtttgttcgtgagggcggtgcgagtgataatcctcagcgcactctcaaagagcaaaacgtgtttgctgttctgaagcagcttggatttagctccgatctgttcgccatgcaaagtgagatgtggttctacaccaacaccatggcggataacatcgcctaccgcgagcagattggcgccgagccgcgtaaccgcggaaagaacgttgatgatatgctgctgctctctgagatggaacagtcgctgaaaaaccatccgcagggtaagcaccttattgttctgcataccaaaggttcacactacagctactatcagcgttacacgcgcgatttcgccaaatggacgcctgagtgcgtcggcattaacaagaactgtagcaagcaggagctgatcaatgcctatgataactcgattctgtatgtggataccttcctcagccgggtgatcgaccagcttcgcgataagaaagcgattgtgatttacgcggccgaccacggcgagtccatcaacgagaaagagcatttacacggcacgccgcgtaagctggccccgcctgagcagttccgcgtgccgatgatcatgtggatgtcggataagtacctggaatccccggacaaagccaaaatgtttgcccatctgaaacagcaggcagagatcaaggtaccgcgccgtcacgttgagctgtacgacaccattatgggttgtctcggctatacctcaccgaacggtgggattaacgaaaacaacaactggtgtaaactccctgataacaccacaaaagccgcgcagtag

SEQ ID NO: 117124 - DNA, 1608 bp, Enterobacter cloacae
atgagtatttccttgaagaagtcagggatgctgaagcttggtctgagcctggtggccatgaccgttgcagcaagcgtacaggcaaaaaccctggtttactgttctgaaggctctccggaaggctttaacccacagctctttacctctggtacgacttacgacgcaagctctgtaccgatctataaccgtctggttgaatttaaaaccggcaccacggaagtaattcctggcctggctgaaaagtgggatatcagcgaagacggtaaaacctataccttccacctgcgccagggcgtgaagtggcaggacagcaaagaatttaaacctacgcgcgactttaacgccgacgacgttgtgttctccttcgaccgtcagaaaaatgcccagaacccgtaccataaagtgtctggcggcagctatgaatacttcgaagggatgggtctgccagacctgatcgctgaagtgaaaaaagtggacgataaaaccgttcagtttgtgctgacgcgtccggaagcgccattcctggctgacctggcgatggacttcgcctcgattctctctaaagagtacgcggacaacatgctgaaagccggcaccccggaaaaagtggacctgaacccaatcggtaccggcccgttccagctgcttcagtaccagaaagattcccgtattctgtataaagccttcccgggctactggggtaccaagccgcagatcgaccgtctggtcttctccatcacgcctgacgcatccgtgcgttacgcaaaattgcagaaaaacgaatgtcaggtgatgccgtatccaaacccggctgacatcgcgcgcatgaagcaggacaaaaatatcaacctgctggagcaggcgggcctgaacgtgggttatctctccttcaacaccgagaagaaaccgttcgatgacgtgaaagtgcgtcaggcgctgacttacgcggtgaacaaagaagcgatcatcaaagccgtttaccagggcgcgggcgttgcggccaagaacctgatcccaccaaccatgtggggttataacgacgacattaaggactacacctacgatcctgagaaagcgaaagcgctgctgaaagaagcgggccaggacaaaggcttcaccgtcgagctgtgggcgatgccggtacagcgtccttacaacccgaacgcacgtcgtatggcggaaatggttcaggctgactgggcgaagattggcgtacaggccaaaattgtgacctacgagtggggcgagtacctgaagcgcgctaaagcgggcgaacaccaggcggtcatgatgggctggaccggcgacaacggggatccggacaacttcttcgcgaccctgttcagctgtgcggcagcgaaagacggttccaactactctcgctggtgctacaagccgtttgaagatctgatccagccggcgcgtgcgaccgacgatcacaacaaacgtattgaactgtacaagcaagcgcaggttgttatgcacgatcaggccccggcgctgattgttgctcactccaccgtgtacgagccagtgcgtaaagaagtgaagggctacgtggttgatccactgggcaaacaccacttcgaaaacgtatctgttgaataa

SEQ ID NO: 117125 - DNA, 1020 bp, Enterobacter cloacae
atgttgcagttcatcctccgacgtctgggactggttatcccgacgtttatcggtatcacccttctcacttttgccttcgtccatatgatcccgggtgacccggtaatgattatggcgggcgagcgtggtatctcccctgaacgtcatgcgcaactgctggctgaactcggccttgataagccgatgtggcagcagtatctccactatatctggggtgtgttgcacggcgatttagggatttcactgaaaagccgtcttccggtgtgggacgagttcgtaccgcgctttaaagcgacgctggaactcggtatctgcgccatgatcttcgcgaccgcggtagggatccccgttggcgtactggctgccgttaagcgtggctctattttcgaccacaccgctgttggcctggcactgaccggctactccatgcctatcttctggtggggcatgatgctgatcatgctggtctcggtgcagtggaacctgacgccggtctccggacgcgtcagcgacatggttttccttgacgacaccaacccgttaaccggctttatgctgattgatacggcgatctggggcgaagagggcaacttcattgatgcggttgcgcacatgatcctgcctgcaatggtgctgggcaccatccctctggcggtgatcgtgcgtatgacccgttcctccatgctggaagtgctgggcgaggattatattcgtactgcccgcgctaaaggcctgacccgtatgcgcgtcatcatcattcatgccctgcgtaacgctatgctgccggtggtaaccgttatcggtttgcaggtcggtacgctgctggcgggggcgatcctgaccgaaaccatcttctcctggccgggtcttggacgctggctgattgatgcgctgcaacgccgtgactatccggttgtgcagggcggtgtactgctggtcgcgacgatgattatcctcgtcaacctgctggtcgatttgctgtacggcgtggtgaacccgcgtattcgtcataagaagtaa

SEQ ID NO: 117126 - DNA, 984 bp, Enterobacter cloacae
atggcgttattaaatgtagataaattatccgtgcactttggcgacgaaggcacaccgtttcgcgccgtggaccgcatcagctacagcgttaatcagggcgaagtggtcgggattgtaggagagtcgggctccggtaagtcagtgagttcgctggcgattatggggctgattgactaccccggtcgcgtgatggcggaaaatctggagttcaacggtcaggatctgaagcgcatttccgaaaaacagcgccgccagctggtgggcgcggaagtggcgatgatcttccaggaccccatgaccagcctgaacccatgctacaccgtcggtttccagattatggaagccattaaggtgcatcagggcgggaataagaaaacccgtcgccagcgtgctatcgatctgctgaacctggtggggatacctgacccagcatcgcgtctggacgtttacccgcatcagctttccggcggcatgagccagcgcgtgatgatcgccatggcgattgcctgtcgaccaaaactgctgattgcggatgaaccaactaccgcgctggacgtaaccatccaggcgcaaatcatcgagctgctgctggagttgcagcagaaagagaatatggcgctggtgctgattacgcacgacctggcgctggtggcggaagcggcacacaaaatcatcgtgatgtatgcgggtcaggtagtggagaccggaagttcgcacgatatcttccgcgcgccgcgtcacccgtatacgcaggcgttactgcgcgcgctgccggagtttgcccaggacaaagcgcgtctggcgtcactgccgggtgtggttccgggtaaatatgaccgtccgcagggctgcctgctgaatccgcgctgcccgtatgcgacggataaatgccgcgccgaggagccagagctgaatctgctggccgatggtcggcagtcaaaatgccactacccactcgatgatgccgggaggccaacactatga

SEQ ID NO: 117127 - DNA, 1014 bp, Enterobacter cloacae
atgagtacgcacgaggccaccacgcaacagccgctgttgcaggctatcgacctgaaaaaacattacccggtgaagaaggggatttttgcccccgagcgcctggtaaaagcgctggacggcgtctccttcagccttgaacgcggtaaaacgctggcggtcgtcggggagtcgggctgtggaaaatccacgctgggccgtctgctgacgatgatcgaaacgccaaccggcggcgagctttactatcagggccaggatctgctcaagcacgatccgcaggcgcagaagctgcgtcgtcaaaaaatccagattgtgttccagaacccgtacggttctttaaacccgcgtaaaaaagtggggcagattctggaagagccgctgctgattaacagcaatctgagcaaagagcagcgtcgtgaaaaagcgctggcgatgatggcgaaggtggggcttaaaaccgagcattacgatcgctacccgcatatgttctctggcggtcagcgtcagcgtattgccatcgcccgtgggctgatgcttgacccggacgtggtgattgccgatgagccggtctcagcgcttgacgtgtccgtacgtgcgcaggtgcttaacctgatgatggatttacagcaggatctgggactgtcgtacgtcttcatctcccatgacctgtccgtggttgagcacattgccgatgaggtgatggtgatgtatctgggacgctgcgtggagaaggggacgaaagatcagatctttactaacccgcgtcatccgtatacgcaggcgctgctgtctgcaacgccgcggctgaacccggatgaccgccgggagcgcattaagctgaccggcgagttgccaagcccacttaacccgccgccgggatgtgcgttcaacgcccgttgccgtcgccgcttcggcccgtgcacgcagttgcagccacagctgaaggattatggcggacagctggtggcctgcttcgcggtcgatcaggatgaaaacggcgaaaagccgcaggcataa

SEQ ID NO: 117128 - DNA, 927 bp, Enterobacter cloacae
atgacgccctatcttcagtttaaccgtagccagtgggcagccctgcgtgactccgtccctatgacactgacggaaggtgaaatcgcacggctaaaagggataaacgaagatctctccctggaagaggtggcagaaatctatctccccctttctcgcttgcttaacttctatatcagctccaatttgcgccgtcaggccgtactggaacagttcctcggcacgaacggtcaacgtattccttatatcatcagtattgcgggcagcgtggcagtgggtaaaagtaccaccgcgcgcgtgctacaggcgctgctgagccgctggccggaacaccgcagcgtggagctgatcaccaccgacggcttcctgcatcccaacgaggtgttgaaagaacgcggcctgatgaaaaagaagggcttcccgctctcttatgatatgcaccgcctggtaaagtttgtttcagatctaaaatcgggcgtacctcacgttaccgcgccggtttactcgcatctgatctacgaccgcatcccggatggcgacaaaacggttgtgcagcccgacatcctgattctggaaggcttaaacgtcctgcaaagcgggatggattatcctcacgatccgcatcatgtgtttgtctctgactttgtcgatttctcaatttatgtcgatgcgccggaagatttgctgcaacgctggtatatcaaccgcttcctgaagttccgcgaaggcgcgttcaccgacccggattcctacttccacaactacgcccagctctctgaagaagaggctatcagcgtggcgaccgggctgtggaatgagatcaactacgtcaacctcaaagagaacatcctgccgacgcgcgaacgcgcaagcctgatcctcaccaagagtgagaaacacgccgtcgaccagattcgtttacggaagtag

SEQ ID NO: 117129 - DNA, 435 bp, Enterobacter cloacae; identical to SEQ ID NO: 19847

SEQ ID NO: 117130 - DNA, 1026 bp, Enterobacter cloacae
atgtctgctgctcatctcggtttcccgacggaaaccgttgttgtcttcgtggtgatggccgttggggcgatgtttatcgacctcttcatgcaccgtcacgataaaccgatctcgctgaaaagcgcggtcatgtggtccatcttctgggtcatgatggcgatggccttcgccggattcttatacgtgcaccacggcgcggagatggccagtctgttcctgaccggctatgcgctggaagaggtgctctccgtcgacaacctgtttgtgatgatggcgatcttcgcctggttcggcgtgccggatagatatcgtcaccgcgtgctctactggggcgtgctcggggcgattgtgttccgtggtatttttgttgccattggcaccagcctgctgagcctgggaccgtatgttgaggtcatttttgcgctggtcgtcggctggacggcggtgatgatgctgaaacgcaatgaagagagcgatgaagtagaagattactccaaccatctggcgtaccgcctggtgaaacgcttctacccggtgtggccaaaaatcagcagccatgcgtttatcctgacccagaaagaggtggatgccgaactggagaaacctgaaaacaaggatgtgatggtaggccgcgtgaagaaggcgaagcgctacgcgacgccgctgctgctctgcgtcgcggtggtggagctgtccgacgtgatgttcgccttcgattccgtacccgcaatcattgccgtcagccgtgagccgctgatcatctacagcgccatgatgttcgcgatcctcggcctgcgtaccctctacttcgtgctggaagcgctgaagcagtatctggtgcatctggagaaagcggtagtgttactgctgttcttcgtggcgttcaagctggggctgaatgcgaccgaccacttctggcatcacggttataacatcggcgccacggcaagcctgtttgtggtgctgggggtactggcgctggggattattgcgagcgtgatgttcccgggaaaacgtgaggcctga

SEQ ID NO: 117131 - DNA, 663 bp, Enterobacter cloacae
atgaccaatatgattgccgacgaagccgtggcgaagtccagcgtgctctctgtctttgactttgatggtacgttgacgcaccacgacagttttatcccgttcctgcgctttgcctttggcaagcgctactttgctggccgactggtgcgcatggccctgcctacgctgcactgtgtgcgccgcaagctgacgcgagatgagctgaaagaggtgttgatcaaaaccttcctgacgggggtggatgagcactggttacgtcagcaggcggaagccttctgtgaaaaatactggaacaagctgatgcgcccggaaggtgtgctggccgtcgccaacgaggtcaattccggtgcggaagtgacgatttgctctgcttccccggcgctggtattgcagccgtgggccgataagctcggcattaagctgattggcacgcagctggaagtgaaagacggcaagctgaccgggcggatcaccggccacaactgccgttgtgcccagaaggtggcgaggctggagaaggtgtatggggatttgaacgcgtatcacctgcgcgcctggggcgacacgcgtggcgaccacgagttgctggcggcggcgcaggatccgcactggcggcattttcatcatccgagcaagcgccgaaattcaccaattaagggttag

SEQ ID NO: 117132 - DNA, 795 bp, Enterobacter cloacae
atgaaaattgatttaacggggaaagtagcgctggtgaccgcgtccaccggcggtattgggtttgccatcgcccgcgggctggcggagagcggtgcggaagtgatcgtgaacgggcgcagcgtcgactcggtgaacaaaggcattcaggcgctacagcaggtggtgcctggcgtacaggtccgtgccgccatcgccgatctgagctcgcaggagggcgttgacgaactgctcagggtcgcctcgcacgtcgatattctggtgaataacgccgggatctatggccagcaggatttttattccaccgacgacgagacctgggaacgctactggcagaccaacgtgatgtccggcgtgcgcctctctcgtgccctgctgcccggcatggtacaaaagggctggggtcgggtagtgtttatctcgtcggaatcggcatgcaatattcctgcggatatgatccactatggcgtgacaaaaaccgcccagctctcgctggcgcgcggtctggcgaagttcgtggcaggcagtggcgtgacggtgaacagcgtgctgccgggcccgacaatgtcggacggttttgccgcgatgatgaaagacgagatcgaaagaaccggtaaatcgctggaacagctggcgaaagagttcgtgatggcgaatcgccccagctcggtgatccagcgcgccgccacggtggaagaagtggcaaatatggtggtatatgtctgttccatgcaggcctccgcgacttccggcgcggcgctgcgcgttgacggcggcgtggtggatgacattgtttga

SEQ ID NO: 117133 - DNA, 882 bp, Enterobacter cloacae
atgcacaagacgacgctcgaacaatgggccttgctggagagagtcatcgaggcgggcagcttcgctaaggcggcggaagagacccaccgcagccagtcctcggtcagctataacctgtcgcttttgcaggaacggctgggcgtggcgctcctgatgacagagggacggcgtgccgtgcagacaccggcgggtgagctgttgctgaatcaggttaaaccgctgctgaaagccttcgcctatgttgaaacgcgcgctgcgaccctgcgcagcgggatgcgaacccgtatcgacctgatggtagacagtatttttccgcgcagccggctgttcgcgattttgcgccagtttcagcagctgtacccgcaaacgcaggtgcggcttaccgaggtgctggaaaacagccgcgcggatgcgctcaatgatgaagccgacgtgatggtcttaacccgccgccaggacattaccggcctgggggaatggctgatgaatatcgattttgttgccgtcgcgcatcacgctcacccgctgtttgcgctggatacaccgcttaacgacgagatgctacgaccgtggccgcgcattcagatcgcagacagccagcccaccgctcactctaccggggagtcgtggaccttctccaccatcgatgccgcgatcgaagcggtgatgtatcaggttggatacggctggttaccggaagaacgcattcagaccccgctccagcagggcatccttaaaacgctgccgctcagccacggcgtacgtcgcgccacgccgctgcacctcatcgtcaaacgctccctcagcccgctggacgagcaggttgagacgctgttgcgcctttttaaacaggagccgtcatcgtcaactgctacgctttaa

SEQ ID NO: 117134 - DNA, 507 bp, Enterobacter cloacae
atgagcaccttcgataaacatgatttaagcggcttcgtcggtaaacatctggtatatacctacgataatggctggaactacgaaatttacgttaaaaacgaaaacaccctggactaccgtattcacagtggtctggtgggcaaccgttgggtgaaagatcagcaggcctacattgtccgtgttggggagagcatctataaaatttcctggacggagccaaccggtaccgacgtgagcctgatcgtgaacctgggagacagcctgttccacggcaccatcttcttcccgcgctgggtcatgaataatccggaaaaaaccgtctgcttccagaacgatcacattccactgatgaatagctaccgtgatgccgggccagcgtatccaaccgaagtgattgatgaatttgccaccatcaccttcgtgcgcgactgcggtgcgaatgacgacagcgttattgcgtgcgcggccagcgagttgccaaaaaactttcctgataatttaaaataa

SEQ ID NO: 117135 - DNA, 1140 bp, Enterobacter cloacae
atgcgtgattttttgcctttttcccggccctcaatgggcgcggaggaaatcgccgcggtccaggaggtagtaacctccggctggatcaccaccgggccgaaaaatcagatgcttgaagaggcgttctgtacgctgacgggaaaccgtcatgcgattgccgtctcctctgccacggcggggatgcacgtcaccctgatggcgatggggattggtcccggcgatgaggtgattacgccctccctgacctgggtatcgacgctgaatatgatcgtgctgctgggtgccataccggtgatgatcgacgtcgacagagacacgctgatggtgacgcctgaagcggtcgacgccgccgttacgcctcgcaccaaagccattgtgccggttcattatgcgggtgcgccgtgcgatattgacgccatccgcgccgtcggtgaacgtcacggtattcctgtcattgaagacgcggcccatgccgccggaacgtactaccacagccgtcatgtgggctggcggggcaccgcaattttctccttccacgccatcaaaaacatgacctgcgccgaaggtgggctggtggtgacggatgacgagcagctggcgcaaaacatccgtagcctgaagttccacggtctgggcgttgatgcctatgaccgccagacccatggccgcgcgccgcaggccgaggtcatcaccccgggttttaaatacaacctcgcggatatcaacgccgcgctggcgctggtgcagctcggcaagctgggcgaagccaacaggcgccgtcgcgacattgccgaccgctatcggcttgaactctcggatacccctttccagccgctgcgcattccgtcctggccgcatctgcacgcctggcacctgtttatcattcgcgtggatgaggcccggtgcggcctctcgcgtgatgccctgatggccgcgctgaaggagcagggcatcggtacgggcctgcatttccgtgcggcacatacgcaaaaatactaccgcgagcgtttccctgatgtgtcgcttccgaactctgaatggaacagcgcgcgtatttgttctctccctcttttcccggacatgacccatgacgacacaacccgcgtcattaccgcgctccatcagcttgcaggacattga

SEQ ID NO: 117136 - DNA, 984 bp, Enterobacter cloacae
atgttcagtgcgccgcctgtacaaaaagtttccgtggtgatcccggtctataacgagcaggagagcctgccggaactgatccgccgcacgactgccgcctgcgagacgctcggcaaagcttatgaaattctgctggtggacgacggcagcagcgacgactccgcgcggatgctgaccgacgccgcgcaagcggagggcagccacattgttgccgtactgctcaaccgtaactacggccagcactcggcaattatggccgggttcagccacgttacgggcgatctggtgatcaccctggatgctgatctgcaaaacccgccggaagagatcccgcgtctggtcgccaaagccgacgaaggctacgacgtggtcggcaccgtgcggcaaaaccgccaggacagcctgttccgtaagctggcgtctcgcaccatcaaccgtctgatccagcgcaccaccggtaaagcgatgggcgactacggctgcatgctgcgcgcctatcgccgccacatcgtcgacgccatgctgcactgccacgagcgcagcaccttcattccgattctggcgaacacctttgcccgtaaagcgacggagatcccggtgctgcacgccgagcgcgagcacggggagtcaaaatacagcttcatgcgtctgatcaacctgatgtacgacctgatcacctgcctgaccaccacgccgctgcgcctgttgagcgtgttcggcagcgttatcgcgctggccgggtttgcgctttccgttctgctggtcgttctgcggctggtctttggtccccagtgggcggcggaaggggtctttatgctgtttgccgtgctgttcacgttcattggcgcccagttcatcggtatgggtctgctgggtgagtacattggccgtatttacaacgatgttcgcgcgcgtccgcgctattttattcaacgtgttgtccgtcaggagcacctggcatctcaagaggaaaaccacccatga

SEQ ID NO: 117137 - DNA, 1983 bp, Enterobacter cloacae
atgaaaaccgtcgtctttgcctatcacgatatgggttgcacgggcacgcaagccttgctggacgcaggcttcgacattaccgccatcttcacccatccggatgttgccggggaaaaccacttcttcggctcggtggcgcgtattgcggctgaacacggtattccggtttacgccccggacgatgtgaaccatccgctgtgggtggatcgcattcagaaactcgcgccggacgtgattttctctttctactaccgcaatctgctttgcgacgacatcctgagcgtggcgacaaaaggcgcatttaacctgcacggctcgctgctgcctgcctaccgtggccgtgcgccgctgaactgggcgctggttaacggtgaaacggaaaccggcgtaacgctgcacaaaatggtacgccgtgccgatgcgggcggtatcgtggcacagctgaaagtgggcattggcgctgatgaaacggcgctggagctgcaccacaagctctgcatcgccgcgcaaagcctgcttcgcgacgcgctgccgacgatccgtcaggggacttttaccgaaaccgcgcaggacgaaagcaaggcaagcagttttggtcgccgcacgccggaggacgggcgactggactgggcgaaaccggcgcgtcagctgcataacctggtgcgcgccgtgaccgacccgtggccgggcgcgtacagcttcgccggggtcagtaaatttatcgtctggaaatcccgcgtgcgtgaggacattccggcggcaaaaccgggcaccgtcatctccgtctctccgctgattgtgagctgcggcgagcaggcgctggagatcgtcaccggacaaacggataacgggctgtacgtgcagggggcgcagctggcgcagtctcttgggctggtggcgggggcgctgatcaccagcgcgccggtggtggcgatcaaacgccgcacgcgcgtcttaatcctcggcgtgaacgggtttatcggtaaccatctgaccgaacggctgctggaagacgacaattacgagatctacggtctcgatatcggatccgatgcgatcggtcgattcctcactaatccccgtttccacttcgttgaaggggacatcagcatccattccgaatggatcgagtaccacatcaaaaaatgtgacgtggtgctgccgctggtggcgattgccaccccgattgaatacacccgtaacccgctgcgcgtgttcgaactcgatttcgaagagaacctgaagattatccgcgactgcgtgaaatacgataagcgcatcatcttcccgtcgacgtcggaagtgtacggcatgtgtaccgacaataacttcgatgaagacacctccagtctggtggtcgggccgattaacaagcagcgctggatctactccgtctccaaacagctgctggaccgcgtgatctgggcatacggtgagaaagaggggctacgctttaccctgttccgcccgtttaactggatggggccgcgcctggacaacctgaacgccgcgcgtatcggcagctcccgcgctatcacccagctgatcctcaacctggtggaaggttcgcccattaagctgattgaaggtggcaaacagaaacgttgcttcaccgatatcagcgacggtattgaagcgctgttccgcatcatcgaaaacaaagacggccgctgtaacggagagatcatcaacatcggtaacccggacaacgaagcgagcatccgcgagctggcggaaatgctgctggcaagctttgaacgtcacccgctgcgcagccagttcccgccgtttgccggtttccgcgaagtggagagcagcagctactacggcaagggttatcaggacgttgagcaccgcaagccgagcatccgcaatgcgaagcgctgcctgaactggacgccgacggtgaagatggagcagaccattgatgaaacgctcgacttcttcctgcgcaccgtggagctgtcggaacaggcatcatga

SEQ ID NO: 117138 - DNA, 903 bp, Enterobacter cloacae
atgaaaaaggtcggtttacgcattgacgtcgacacctttcgcggcacgcgcgagggtgtgccgcggctgctggaactgctgagcaaacacaacgtgcgcgcgacgcttttcttcagcgtcgggccagacaatatggggcgtcacctgtggcgcctggttaaaccggcctttctgtacaaaatgctgcgctcgcgcgcggcatcgctctacggctggaatatcctgctggccggaaccgcatggcccggcaggcgcatcggcgcggaaaatgaagcgatcatctgcaaggccgcgcagcatcatgaagtggggctgcacgcctgggatcaccatgcctggcaggcctgggcgggcgtgtgggatatcccccgcctggcgcgtgaggttgagcgcggcgtgctggagctggaagccattaccggccagcctgtgcgctgttccgccgtggcaggatggcgggccgaccagcgcgtggtgaaggccaaagaacactttgcctttcgctacaacagcgattgccggggcaccggaccgtttttaccgctgctgggggaaaaccgaaccggcacggtgcagattccggtcactcttccgacgtgggatgaagtggtcgggcgcgaggtgagtgccgacaggtttaaccgttacattctggatgcgatgcaccgcgatgccggtacgccggtttataccatccatgccgaagtggaaggcattgcgtatcagcaggatttcgacgcgttgcttgcgctggcggcgcaggagggcattcagttctgcccgttaagccagctgttgccggacgatcctggcacgctgcccctgggaaaaatcgtccgtcgtgaaatggctggccgggaaggctggcttggctatcaacaaaccgtgagcccggcactatga

SEQ ID NO: 117139 - DNA, 1644 bp, Enterobacter cloacae
atgaaaacagcccgctatggcctgacgcttctcgccctgtttgtcgtttactacctccttccggtcaaccttcgcctgttatggcagccagatgagacgcgctatgcggaaatcagccgcgaaatgctggcctccggcgattgggtggtcccgcatttcctcgggctgcgttactttgaaaaacccattgccggttactgggtgaacagcatcgggcaatggctatttggacacaccaattttgccgttcgcgcgggggcgatattcggcaccgggctgacggcgctgctggtgatctggctggcctggcgtctctggcaggataagcgggtggcgatcttctccggcctgatcttcttaaccctgttcctggtctatggcatcggcacctacgccgtgctggatcccattatcaccctctggctggtggcggctatgtgcagcttctggctggcttcgcaggcgaaaacgatagccggaaaagcggggggctacattctgctggggctggcctgcggcatgggcgtcatgaccaaaggcttcctggcgctggcggtaccggtgattggcgtgctgccgtgggtgattgcgcaacgacgctggaaggaggtgctggttttcggctggctggcgatcctcagctgcgtacttatcgtcctgccctgggggctggcaatcgctcagcgtgaacccgatttctggcgttacttcttctgggtggagcatatccagcgctttgcccggagcgatgcccagcataaagcgccgttctggtactatctgccgttcctcatcgcgggaagtctgccgtggctggcgatgctgcccggcgcgctgcgcctgggatggcgagacagagaaaacgagagggcggggctttatctgctgggctggatcgtgatgccgctgctgttcttcagcatcgccaaaggcaagctgccgacctatatcctgccgtgctttgcgccgctggcgatcctgatggcgcgctacgcctgcaccgtcgctgaaaaagcgttacgtattaacggtgggatcaatatcgcgtttggcgtgcttggcatgctggcggcgctggtggtatcgccatgggggcttgctaaacatccagtctggacaccggtcgaattgtacaaagtcttctgtgccgtggtggcgtttctggtctgggcctcggtgggctggtttacccttaaaaatccgcagcgctggtggctggcggcgctttgccctgccggactggccctgctggtgggttttgcgatcccggaccgggtagtggattctaaacagccgcagtcgctggtggattccgttcgcgagccattacagatgagtaaattcgtcctggcgaacaacgttggtatagcctccgggctggcgtgggagcttcagcgtaatgacatcattttgtatgggcagagcggtgagctgaaatatggcctggattatccggacgctaaggggcgttttgtgagcaaagatgatatcgcgcactggcttgaagcgcatcgtcagcagggaccggtgtcgctggtgatcctgctgtcgaaaaacgacgacctggcccgcgccgggctgccaaaaccggacaacctgacgattcaggggcgtctggcttacctgcaatatctgccgcagtga

SEQ ID NO: 117140 - DNA, 324 bp, Enterobacter cloacae
atggcctggatctggctggtgctggcaagcctgttgagctgcgcaggtcaactgtgccagaaacaggcgacccgggcaggcggcggtcagcaggtcgccctgtggcttgggctggccctgctgatgctgggtggcgggatggttgcctggctggtggtattgcagcatctgcccgtcggggtggcgtaccccatgctgagccttaactttgtctgggtaacgctggcggcaaaaatcgtctggcatgagcctgtcccgctacgtcactggctgggcgtcgggttgattatcgtcggggttattttgctgggaggaagcctgtga

SEQ ID NO: 117141 - DNA, 384 bp, Enterobacter cloacae
gtgaacggtgcgtgttgggcgttatgcagcgtagtgttagtcagcgtggcgcagctgctgctgcgtcatgcgatggtgacgctgcccccgatgagcgacgctttctgggcagccctctggcatatagcccccggtacgggcgcgctgatgctggggctgacaggctattgcgcctcaatgggctgctggtatctggcattgcatcgtatggcgctcagcaaagcgtatgccttgctgagcctcagttacatcctggtgtggagtgctgcaattttactgcccggctggggagaatacttttcctggcgcgggctggcgggcgtcggcttgattatactcggcgtgctggtcatttttatgccgcagaaataccggagtaagtaa

SEQ ID NO: 117142 - DNA, 594 bp, Enterobacter cloacae
atgtaccagtttgtactgggaaagatctccacccttagcgcggacccgctggcgtcaacgctcgcagacatggcacctcagggtgcacgacacgcttcctggcttgcaggccggacgctgctcgccagaaccttatccccctcaccgcttcccgagataatttacggcgagcagggaaaaccggccttcgctaacggccatcctctgtggtttaacctgagccacagcggggacgacattgccctgctgatgagcgatgaaggtgaagtgggctgcgatatcgaagtgatccgcccgcgggaaaactggcaggcgctggcgaatgccgttttcagcctcaccgaacatgacgagctggaacgtgaagcgccggaagagcagctttccgcattctggcgcatctggacgcgcaaagaggcgatcgtcaaacagcgtggcggcagcgcgtggcagattgtcagtattgacagcaccgcccagaccctcccggtcagtcagctacgcttcggctcgctgagcctggcggtctgtacccctacgcctttcaccttaacggcggaagcggttacttactccggtatttctgcggcataa

SEQ ID NO: 117143 - DNA, 1230 bp, Enterobacter cloacae
atgacccgccgggtagtgattacgggcatgggcggcgtcaccgcgttcggcgaggactggccgaccatctcgcgccgtctgcgcgagtatgaaaatgcggtgcgtaccatgacggagtggcaggcgtatgacggcctgcaaaccctgctcgccgcgccgattgaagatttcactctccccgctcactatacccgtaagcgcattcgcgccatgggccgggtgtcgctgctctctacccgcgccaccgagctggcgctggagcaggcgggactgatcgacgacgcggtgctgaccaacggtcagaccggcatcgcctacggctcgtcgaccggcagcaccgggccggtcagcgagtttgcctctatgctcaccgaaaagcacacccacaacatcaccggcaccacctacgtgcagatgatgccgcacaccacggcggtgaataccgggctgttctttggcctgcgcggacgggtgatccccacctcgagcgcctgtacctctggcagccaggcgattggctacgcctgggaagcgattcgtcacggctaccagacggtgatggtggcaggcggcgcggaagagctgtgcccgtcggaagcggcggttttcgataccctgtttgccacaagccagcgtaacgacgcgccaaaaaccacgccgtcgccgtttgacgttcagcgcgatggcctggtgattggcgaaggggcgggcacgctggtgctggaagagctggatcacgccagagcgcgcggggcgacaatctatggcgagatcgtgggctttgccaccaactgcgatgcggcgcacatcacccagccccagcgtgaaaccatgcaggtgtgtatggcgcagtcgctggcgatggcgggccttggccctcaggagattggctacatttctgcccacggcacggcaaccgatcgcggggatatcgccgaaagtcaggcgaccgccgccattttcggcgacagcgtgcccatctcttccttaaagagttatttcggccataccctgggtgcctgcggcgcgctggaagccttgctgagtctgcacatgatgcgggagggttggttcacgccaacgctcaatttaagacaaccggatgagcaatgcggcgctttagattatattatgggggaaacccgcccgattgattgcgaatttattcagagcaataactttgcctttggcggcatcaatacctcgataatcattaaacgctgggcgtaa

SEQ ID NO: 117144 - DNA, 729 bp, Enterobacter cloacae
atgagatccgtactggtcaccggcgccagcaaaggcattggccgcgctatcgcccttcagcttgcggcggacggttacaccgtcggcgtgcattaccatcgtgatgaagcgggcgcgcaggagacgctggaagcgattgtccaggcaggcggcgcgggccgtttactcaccttcgacgtgggcaaccgcgagcagtgccgcacggtgctggaacaggagatcgctgaccacggcgcgtggtatggcgtggtcagtaacgccggtattacccgcgacggtgcttttccggcgctcagcgacgatgactgggacagcgtgatccacaccaatctcgacagtttttataacgtcattcatccctgcattatgccgatgatcggcacccgcaagggcgggcggatcatcaccctgtcgtcggtgtcaggcattatgggcaaccgtgggcaggtgaactacagcgcggcgaaagccgggatcatcggcgccaccaaagcgctcgccaccgagctggcaaaacgcaaaatcaccgtcaactgcatcgcgccggggctgatcgataccggcatgatcgagatggacgaagccgcgctgcacgcggcgatgtcgatgatcccgatgcagcgtatgggccaggccgaggaggtcgccgggctggcgagttacctgatgtcggataaagcaggctatgtgacgcgtcaggtgatttcgattaacggaggcatgctatga

SEQ ID NO: 117145 - DNA, 474 bp, Enterobacter cloacae
atgcgctacttacctcccggggattatcttcctcacgacacgccgatgctgctgcttgagagcgtggaaaacgtcaccgatgaccgcgccgtttgcagcgtgacggtgaacgatcggggcgttctggctccgttcctggacgcggacggcaacctgcctggctggtttgcgctggagctgatggcccagaccgtgggcgtctggtctgaatggcaccggatgcaaaaagggctgccgcactgtgcgctgggcatggtgctgggcgcgcgcgagctggtgtgcgacgcagggcattttgccgcaggctgcacgctgaccatcaccatcgaacgtctgatgcaggatgaacgctttggcagcttcgagtgcgccattcatgcggataatgtctccctcgccacgggccgcgtgaacaccttccagccgagcgaggatgaattaaccacacttttcaaccagggaacaccatcatga

SEQ ID NO: 117146 - DNA, 1167 bp, Enterobacter cloacae
atgatttacctttctgccgttggcatggtcaacgcactcggcaactcggctgatgaaatagcggcgaacctgatcgctggtgtggcccccgggatgcgccagcgtgcaggctggctacagggcttacccgaggccgtgctggggggcgtggagggtgaacttccccctgtccccgggtctttttctgcgcatcgcagccgcaacaaccaactgctgctggcggcgctggcgcaaatccggcccgccgtcgatgcggccattgcgcgcgtggggcgcgaccgcgtggcggttgttctgggcaccagcacctccgggctggacgagggtgatgagtacgtgcgccgcgcgcagaacggcgagagcagcccgcagtggcaatatccgcagcaggagctgggcgatccgtcgcgctttctcgcccgctggcttgcgctggacggcccggcgtataccatctcaaccgcctgctcctccagcgcgcgggcgatcgtcagcggtcgtcgtctgattgacgccgggctggtggacgtcgccatcgtcggcggggccgacagcctgagccgcatgccggtcaacggcttcaacagcctggagtccttctccccaaccctgtgcgaaccgtttggccgccaccgtcgggggatcaccattggcgaagcggcggcactgatggtgctgacccgcgagccgggcgaggttgcgctcctgggcgcgggggaatccagcgatgcgtaccatatttccgccccgcatccgcagggcgaaggggcgatccgcgccatcaaccaggcgctgaacgaggcgggcatgacggcggcggacgtcggctatatcaacctgcacggcaccgccacgccgctgaacgatcgcattgaggcgcaggtgatccacgatctctttggcgaccgcgtgccgtgcagctccacgaaacatcttaccggccacacgctgggcgcagcggggatcaccgaggccgccctgagctggctgatcctgacccgagacctgccgctgccgccgcaggatttttcccgctacgcgccagacgacaccctgcccgccttcggcctgctgcaccagagcgcaccgctgaataaaccggcgatcctgtcaaactccttcgcgtttggcggcaacaacgccagccttctgctggggagggtatga

SEQ ID NO: 117147 - DNA, 579 bp, Enterobacter cloacae
atgacccgtttcattcgcctggtggcagtgatgctggccctgctgctggcggggtgtagccatacgacgaaccgcgatgatgcacgccctcaggcctggctccagcccggcacccgcgtcacgctgcccccgccgggcatcacgcctgccatccgcgcgcagcagttgcttaccggcagttttaaaggccagacccagtcgctgctggtaatgcttaacgccgatgaaaataaagtgacgcttgccggcctctcctccgtcgggatccgcctgttcctcgccacctacgacgacaccgggatccacaccgagcagtcggttgtgatgccgcagctgccgcccgccagccaggtgctggccgacgtgatgctgagccactggccgctcagcgcctggcagccgcagttgccgaaaggctggacgctgaacgatactgacaccagacgcgaactgcgcaaccccgatggcaaactggtcacggaaattgtctacctgaaccgtaacggcaggcgcgaaccgattagcattgtgcagcacgcttttcactaccacatcaccattcaatatctgggtgactga

SEQ ID NO: 117148 - DNA, 2322 bp, Enterobacter cloacae
atgcagaacgccagcgctttgccgcaccgtaacgccctgcgcccggcgctgctgtgggccgcggtatgcctgatcctgctgggcgtgctgctgtcgctgctgcccggcgcgcggctgaacagcagcgtgctcgccatgctgccgaaacagacgctcggcgcgatccctcccgctctcaacgacggatttatgcagcgcctcgaccgccagctcatctggctggtcagccccggcaaacagccggacccgcgcgtggcgcagcagtggttaaccctgctgcaacgcagccaggcgctgagtgtcgtaaaaggtccgctggacgccgccgggcaacaggcctggggagatttcttctggcaacaccgcaatggcctggtcgatccggccacccgcgcccgcctgcaaaacggcggtcaagcacaggcccagtggatcctgtcccagctctactccgccttttccggcgtgagcggcaaggagctgcaaaacgatccgctgatgctgatgcgcggcgcgcagctcgcgctggcgaaaaacagccaaaagatgcagctgatggacggctggctggtgacaaaagatgcggccgggaactactggtatctgctgcacggcgagctggcgggctcatcgtttgatatgcagcaaacccaccagctggtgaccacccttaacgcgttgcagcagacgctgaaaagccagtatccacaggcgcagctgctctcgcgcgggacggtgttctacagcgattacgccagccaacaggctaaaaacgatatttccacgcttggcgtcgccacggtgctcggggtgatcctgctgattgtgtcggtgtttcgctccgtgcgtccgctgctgctgagcctgctctccattgccatcggcgcgctggcggggacggtcgtgacgctgctgctgttcggtgaactgcacctgatgacgctggtgatgagcatgagcatcatcggcatctcggcggactatacgatttactacctcacggagcggatggtgcacggcgcggaacactcgccctggcaaagcctggcgaaagtacgtaacgcgctgctgctggcgctgctgaccaccgtcgtggcgtatctcttcatgatgctggcccccttcccaggcattcgtcagatggcggtgttcgccgccgcagggttgagcgcctcgtgcctgacggtaatgttctggcatccgtggttatgtcggggcatgccggtccgcccggtccccctgagagggatgatgcagcgctggctgaacgcctggcgcgacagtaaacccctctctgtcgggctgccggtagcgctggcgctgctctccgccatcgggatcgccagcctgcgggtggatgacgatatcgcccggcttcaggcgctgccgcaggacattctggcgcaggaaaaaaccatcaccgccctgaccgggcaaaatgtcgatcagaagtggttcgtggtgtacggcgcgtcggctcaggaaacgctggagcggctggaggcgtttaccccggcgctggcgcaggcgcaaaaagccggtgaattaacccgctggcgcaccctgccgctgaactcgctggcgcggcagaacagcgatctgcatcttctgcgtaacgccgcgccgacggtgatgaaaatgctgcaaagcacggggctgaagaccagtgaaccgaacctgaacgccatgcctgtcagcgtggaagcgtggctcgccagcccggccagcgagggctggcgtttgctgtggctgacgctgccggacggcaaaagcggtgtgctggtcccggtcgatggcgtcagaaacagcgccgcgctcggcgaactggccgcccgccatcccggggtcgtctgggttgaccgtaaggccagcttcgacagcctgtttgcgctctaccgctcgctgctgacggggctgctgggcgtggcgctggcggtgattgcctgcggcgcgatgctacgcctcggctggcgaaaagggctggtggcgctggtgccgtccgtgctgtcgctgggcggcgggctggcggcgctggccatgacgggccatccggtgaacctgttttccctgctggcgctggtgctggtcctcggcattggcattaactacacgctgtttttcagcaacccgcgcggcacaccgctgacctccatgctggcgattaccctcgccatgatgactaccctgctgacgctggggatgctggtgttcagcaccactcaggccatcagcagctttggcattgtgctggtgagcggtatcttcaccgcgttcctgctcgccccgctggcgatgccgtctaacaaagagaacttaccatga

SEQ ID NO: 117149 - DNA, 606 bp, Enterobacter cloacae
atgaaatggataacgctactcgcgctgctggtaagcccgctggtgaacgcgatcacgctggatgaactgcaacagcggtttgcggagcaaccagtggtacgcgcacacttcgaacagacccgcacgatcaaggacatgcctcagcccctgcgctcgcagggggagatgctgatcgcccgtgacaatggcctgctgtgggatcaaaaagcgccgttcccgatgacgctgctgctggatgacaaacggatggtgcagatcgtcaacggtcagtcgccgcagaccattaccgccgacactaacccgcagatgttccagttcaaccatctgctgcgggcgctgttccaggccgaccgcaaggtgctggaagagaacttccgcgtcgatttcaaagacctgggcgaaggccgctggtcgctggtgctgacgcccgtcaccacgccgctggacaagattttctccacccttgatttgaagggcgcgatctatctggaatccattcgcctgaacgataagcagggcgacacgacggatatcgccctctcccgccaccaactgacgcccgcccgcctgaccgatgcagaacgccagcgctttgccgcaccgtaa

SEQ ID NO: 117150 - DNA, 423 bp, Enterobacter cloacae
gtgctgaccgatccccgctttacggctgaagttgaaatcaccgttccgttccacgatgtcgatatgatgggcgtggtgtggcacggcaactacttccgctactttgagattgcccgcgaagcgctgctcaaccagtttgattacggctatcgccagatgaaagcgtccggctacgtctggccggtggtggatacccgggtgaaataccgcgacgcggtgaccttcgagcagcgcattcgcgtccgcgcccacattgaagaggttgaaaaccgtctgcgcatcgcctatcaaatcttcgacgcgcaaaccgggaaacgcaccaccaccggctacacgattcaagtggcggtggaagaagcaagccgggagatgtgctttgtcagcccggccattctgttcgaacgcatggggatcgcgccatga

SEQ ID NO: 117151 - DNA, 1692 bp, Enterobacter cloacae
atgtcagtaaccttccgtccctgcgtgctgatcccctgctacaaccacggggcgatgatggcttcggtgctggcgcgcctggcgcctttcgatctgccctgtctggtggtggacgacggcagcgatgaaaccacgcgccgcacgcttgaagcgctggcggcggatcgtccgcagatgacactgctgcggctggccgaaaacagcggcaaaggcgcggcggtgatgctggggctgaaagcctgcgccgatcgcggcttcacccacgccgttcaggtggacgctgacggccagcacgctatcgaggacattcccaaactgctggcgctggccgggcgtcatcccgatgcgctcatttccgggcagcccgtttacgatgactcaatcccccgttcgcgcctgtacgggcgctggataacgcacgtctgggtctggattgaaaccctctccctgcaactgaaagacagtatgtgcgggtttcgcgtttacccgatagccccggttctgcgccttgcagcaaccacgccgctcggcaggcgaatggattttgataccgaagtgatggtgcgcctctactggcagggcaacaccagctattttctgcccacccgcgtgacctatccgccggacggggtatcccattttgatgccctgaaagacaacgtgcgcatctcgttgatgcatacccgtctgtttctcggcatgctgccgcgcattccttccctgctgatgcgtcgccgctcgcagcactgggcgcagcagcaggaggtaaaaggattatggggcatgcgcctgatgctgcgcgtctggcagttgctggggcgtaaggcgtttaccgccctgctgtggccggttaccgccgtctactggctgaccgcccgctctgcgcgtcaggcgtcgcagcagtggctggcgcgggttaaaacggtgatggcacagcggcaaatgccgcccctcgcgcggctaaacagtttttcccacttcctgcgcttcggtcatgccatgctgaataaagtggccagctggcgcggcgaaatgaaactccatcgcgatctggtctttgcgccaggcgcgcaggaggcgctggggctcgacgatcctcagggcaaactgctgctcgcgtcgcatcttggcgatgtggaagcctgccgtgcgctggcccagcgcgaaggggcgaaaaccatcaacgcgctggtcttcagcgacaacgccagacgctttaagcaggtgatggaggagatggcgccgcaggcgggcattcacctgatgccggtcaccgacattggcccggagactgccatcctcattaaagagaagctggatcgcggcgaatgggtggcgatcgtgggcgatcgcatcgccgtcaccccgcagcgcggcggcagctggcgggtgatatggagcgaatttatgggccagcccgcgccgttcccgcaggggccgtttatcctggcgtccattttgcgctgcccggtggtgctgatttttgccctctgtcagcagggaaagctgaccctgcactgcgagccgtttgccgacccgctgctgctgccgcgcggcgaacgccagcaggcgctacagcagaccgtcgaccgctatgcgcagcggctggagcattacgcgctcttgtcgccgctcgactggtttaattttttcgatttctggcagctgccagaggtcaacgagaaggagtaa

SEQ ID NO: 117152 - DNA, 351 bp, Enterobacter cloacae
atgaagatccctgaaatcgggcgcctccagcccgatccacagcatctggagataaccttttatcttgatcctgacctgctctggtttaagggacatttcgccgtacagccgctgctgccgggcgtggcgcagctcgactgggtgatgcattacgccgccgcgctggcgtcgggctaccgttttcacagtattcagaacgtgaagttcgccgccccgctgttgccggagaacacggtcacgctgctccttgcctggcagcctgaacgccagttgctgacctttagctaccagcgccatgcgggtaacgagcgccacaccgccagcagcgggaagattcgcttatgtcagtaa

SEQ ID NO: 117153 - DNA, 1347 bp, Enterobacter cloacae
atgcttaaccctcttccgcttagccagtggctcagtgcgccccgccctgacgacacccctgtcgcctggcaggacgaccatctctggacgcttggcgatctgcgccacgacgtcactcagttggtcgacacgctgcgtcgtgaagatggcgagcgctgggcgttgtgcatcgaaaacggttatctgtttattgtcgcgctgctggcgacgctgcatgcgggtaaaacgccggtcctccccgggcacagccgggcggcgcagcttaacgaacagcgggcgctgttcagcggcgtcctgagcgacaccacgctcgattttcaggggcgacagctgcgggtggcttccgcgcagcgggcaggccatcccttttcaccgctgcctgccatcggtgagatgcgcacgatcgagctttacacctccggctcgaccggcacgccgcagcgggtcagtaagccggtggtcagccttgatcgtgaggctcgtctgctggcggcgcattttggcgagcgtctggcgggctgtcacgtcgtggcttccgtggtgctgcaccacctgtatggcctgacgtttcgtgttgtcttacccatggcgctcggcctgccgctgcatgccagcctgctcaactatgccgagcagctctctgcccttcccgacgataaacgctatcttttcatcagcagtccggcgtttctcaagcggctggacgcgtcgctgacgccgccccccgtcaacctgctcgtctccgccggcggcgcactgccctggctggaggtcgccgcggttcaggcctggctcaacgtctggccggatgaaatatacggcagcacggaaacgggcgtaatggcctggcgctaccgtcaggaggaaagcacgcgctggcagccttttcccggcgtggcgtttcacggcgatcgcgtgacgtcgccgctgatccccgaggcggagggaatcgtgctggatgatatcctgcacttcacggctgacgggcagttcagcctcgtcgggcgtcgtggtcgggtggtcaaaattgaagataagcgcatttcactcgatgacattgagcaccgcctgctggcgctggacggcatccgcgaggccgccgcgctgacggtgacgcgcggcgggcgtcagggcattggcgtattgctggtgctgaatgaagcggtgcgtcagcaacacgaacagagcaaaacagcgcaggagctcgcctggcgacgcgcccttcgcccctggcttgaaccggttgccgtaccgcgctactggcggatcgttgatgaaatcccggtcaacagcatgaacaagcgcgtgactgcgcagctacaggagttgtttcatgaagatccctga

SEQ ID NO: 117154 - DNA, 600 bp, Enterobacter cloacae
ttgtggaacagcttcagcgcgacgcgtaacgtgcgttcgattccagttcttcccgccctgacggggctgatgctgctggcatggccgtttttgatcggcttcgggctggcgaataatagcctgcacgggatactgcccgtgatggcgctggtgctgctgttgcgcgtctgccaggcccgtcggcagggcggccccctgcgttatctgttcgtgagcgtggcgctggctggcatagcgctttgcgcggcgagctacgtcctgcacgcgcaccagtgggtgctgttatatccagtggtggtgaatctggtgatgctggtggtgtttggcggttcgctgtggacggcaatgcctgtcgttgaacggctggcgcgcctgcgtgaaccggatctctcccccgtcggggtacgttacacgcgccgggttacccaggtctggtgcggcttttttattatcaacggggcgatcgcgctgtttaccgtattacacgccgatatccgtctgtggacgctgtggaatgggatgattgcctatctcctgatgggcacgctgatggctggcgagtgggtggtgcgacaacgggcgatgaaaaacgatgcttaa

SEQ ID NO: 117155 - DNA, 252 bp, Enterobacter cloacae
atgacagaacaacaaacgatttatcaggaagtctctgcgcttcttattacgctgtttgaaatcgccccggaggatattacccctgaggcacgtctttacgaggatctggacctcgacagcattgatgccgtcgatatggtggtgcacctgcaaaagaaaacgggccataaaatcaagcccgaaaccttcaaagcggtgcgcacggtgcaggacgtcgtggacgttgtggaacagcttcagcgcgacgcgtaa

SEQ ID NO: 117156 - DNA, 258 bp, Enterobacter cloacae
atgcaagcgctctatcttgaaattaagaatctcattatctctacgctgaatctggaagaacttaccccagaggatattgatacagacgccgcgctctttggcgacggcctcggtctggactcaatcgacgcccttgagctggggctggcggtaaaaaatcagtacggcgtagtgctttctgccgaaagtgacgagatgcgtcagcacttctattccgttgccacgctcgcggcttttatccatcaacaacgcgcctga

SEQ ID NO: 117157 - DNA, 816 bp, Enterobacter cloacae
atgagagggttacgttcccgcctcgatcggatatggcggatgctgatgaccggattgtgcttcgtcctgttcggcctcggcgggctgacgctgtcgctggtgtggtttaacctgctgctgattttccagcgcgaccgcactcaacgtcgccgcctggcacgccgcactatttctgccagttttcgcctgttcctcgcggtggtacgcggtgcaggggtactggattaccgtttcaacaacctggacgttctgcgcgccgagcggggctgtctggtgattgcgaatcatccctcgctgctggactacgttctgctggcgtcggtgatgaacgaaaccgactgtctggtgaaaagcgcgttgctgcgtaacccgttcgtcagcggcgtgatccgcgcggctgactatctgattaacagcgaagccgacacgctgcttgccgcaagccagcagcgtctggcccagggcgacaccctgcttatcttccctgaaggcacccgcacccgggtgggggaagccatgaccctgcaacgtggggcggcgaatatcgccgttcgctgcaacagcgccgtgcgcgtggtggtgatccactgtagcgaacggatgcttgataaacagagcagctggtataacgtgccccccaacaaacctgttttcaccgtggatgttcgcgaacgcatcaacattcatgatttttatgatgcgagtcagcacgaacccgcgctggcagcaaggcagttaaaccggcatatgcagcatcagttaacaaccggtcttcaatctttgtcaggaacgaaagatgcaagcgctctatcttga

SEQ ID NO: 117158 - DNA, 723 bp, Enterobacter cloacae
atgaaatttacacttacccttatcgactggcaggcaagagcgccaggactcagcgatgccgacgaatggcaggcatggtcacgccggtctgacgccatcgatcccgctgcaccgctggcgaaactgaccgatctgccgatgatgaccgcccgccgcctgaattcaggcagcaggctggccgtcgatcttggcctgatgatgctgcgcaaacaccgcatcgatgccgtcgtctacagcagccgtcatggggagctggagcgcaatttccgtattctccaggccctggcggcagaacagcccgtttcccccaccgattttgccatgtcggtacacaactcggcggtcggcaatctcactatcgccgcgcgtcagcctgttgtctcttcgtcggtttccgccggtatggataccttccagcagagcttgtgcgacgtgctgagcctgctgcatgcgggctactcccgcgtgttgctggtggatttcgacggtctgctgcctgatttttatcacgccgggctgccgccgcagatgcccgtctggccctacgcgctggcgctggtgattgaggcgggaaatacgctcagctgtgaaacgcacgtcaaccgcacgcctgaagagcccgcgctgccgcaaagcctccagttcctgcgccattacctgcgggacgagcgccagtttaccctgccgggcgagcgcctgctgtggcaatggacgcgccaatga

SEQ ID NO: 117159 - DNA, 1050 bp, Enterobacter cloacae
atgactgccagcccgcccgacaaagccggacttcatattttattaaaacttgcctgcctggtggttatccttgcgggtatccacgcggcggcggatatcattgttcagcttctgctggcgctgtttttcgccattgtgctcaacccgctggtgacatggtttttacgccgcggcatcagccgcccggtcgcgattaccattgtggtgatggtgatgctggttgtcctgacggcgctgttcggcgtgctcgccgcctcgctgagcgaattttccaccatgctgccgcagtacaataaagagctgacgcgcaagctggtcgatcttcagcgcatgttgccgttcgtgaatctgcatatctcaccggaacggatgctgcgtcggatggattccgagaaggtgatgacctacgccaccacgttgatgaccgggctttccggggcaatggccagcattctgctgctggtgatgacggtggtgtttatgctgttcgaagtgcgccacgtgccgtataaactgcgttttgccctgaacaatcctcagatccacattgccggcttgcaccgcgcgctgaagggcgtatccaaatatctggcgctgaaaacgctgttaagcctgtggaccggcgtgatcgtctggctggggctggtactgctggacgtgcagttcgcgctgatgtggggcgtgctggcctttttactaaactacgtacccaatatcggcgcggtgctttccgccgttccgccgatgatccaggcgttcctgtttaacggtttttatgagtgcatgctggtaggggcgctgttccttgtcgtgcatatggtgctgggtaacattctcgagccgcgcatgatgggccaccgtctgggcatgtcgacgatggtggtgtttttatcgttactgatctggggatggctgctgggtccggtgggcatgctgctctccgtgccgctcaccagcgtctgtaaaatctggatggaaaccacgaaaggaggcagtaaactcgccattcttctgggtccgggtcggccaaaaagccgtttgccgggataa

SEQ ID NO: 117160 - DNA, 558 bp, Enterobacter cloacae
atgcgcaatctggttaaatatgtcgggattggcctgctggttgttggccttgcagcctgtgataacagcgacaccaaaacgcctgctcagggcgcgtcagcagaaagcaacgccaccggtcagccggtgagcctgatggatggcaaactcagtttctctctgcctgcggacatgaccgaccagagcggtaagctgggtacccaggcgaacaacatgcacgtctattccgatgccaccggccaaaaagcggtgattgtgatcgtcggtgacgataccagcgaagatctgggcgtgctggccaaacgcctggaagatcagcagcgcagccgcgacccgcagcttcaggtggtcaccaacaagtctgttgaactgaaaggccacacgctgcaacagctggacagcatcatctctgccaaaggccagaccgcctactcctccgtggtgctcggcaaggtggacaataaactgctgaccatgcagatcaccctgccggcagacaatcagcagaaagcgcagaccgccgctgaaaacatcattaacaccctcgtgatccagtaa

SEQ ID NO: 117161 - DNA, 666 bp, Enterobacter cloacae
atgaactcctttacacaatcgcagcgcgtcaaggcgttgttctggctttcgctatttcatctgctggtgatcatctccagtaactatctggtacagctccccatctccatttttggtttccataccacctggggcgcgttcagtttcccgtttattttccttgccacggatttaaccgtgcgtatttttggcgcaccgctggcgcggcggattatttttgcggtgatgatcccggcactgtttgtctcctacgccatctcctcgctgttttacatgggcagctggcagggcttcgacgcgctgacgcacttcaacctgtttgtcgcgcgtattgccgccgccagctttatggcttatgccctcgggcagatcctcgatgtccacgtgtttaaccgcctgcgtcaaaaccatcgctggtggatggcgccaacggcctccacgctgttcggtaacgtgagcgatacgctggccttcttcttcatcgccttctggcgcagcccggacgccttcatggcagaacactggatggaaatcgctctggtggactacgcctttaaggtgcttatcagcctggtcttcttcctgccgatgtacggcgtactgttgaatatgctgctgaaaaggctggcagataaatctgaaatctccgcattgcaggcaggttaa

SEQ ID NO: 117162 - DNA, 243 bp, Enterobacter cloacae
atgaccgacctgttttccagcccagaccacacgcttgatgctcagggcctccgctgcccggagccggtaatgatggtgcgcaaaaccgtgcgcaacatgcagaccggcgaaacgctgctgatcgtcgctgacgacccggctaccacccgtgatatccccggcttttgtacctttatggaacatgaactggtggcgcagcaaaccgagaccttgccgtaccggtatttgattcgtaaggggtaa

SEQ ID NO: 117163 - DNA, 972 bp, Enterobacter cloacae
atgaaaacgaccctcaagccgttactggccgcgctgtgcctgtctgcttttgcctgcaccgtttctgcccagaccatcaaagccgccgatgtgcatcccgaaggctacccgaacgtggtggcggttcagcacatgggtgaaaaactcaaacaacaaaccgatggcaagctggagattaaggtcttccccggcggcgtgctgggggatgaaaagcagatgattgagcaggcgcagatgggggcgatcgacatgatccgcgtctccatggcgccggtggctgccattctgccggatatcgaagtgtttacgctgccctacgtattccgcgatgaagaccacatgcacaaggtgatcgacggggatatcggcaagcagatcggcgacaaactcaccgccaacccgaaatcgcgtctggtcttccttggctggatggattccggcacccgtaacctgatcaccaaagagccgatcgtcaaaccggacgatctgaaagggaagaaaatccgcgtgcagggcagcccggtggcgctggccacgctgaaagcgatgggggcgaactcggtggcgatgggcgtcagcgaggtttacagcggcatgcagaccggggtgatcgacggcgcggagaacaacccgccaacctttatcgcccacaactatatgccggtcgccaaaaactatacgctgagcggccacttcatcaccccggaaatgctgctctattccaaagtgaaatgggacaagctcagcgctgacgaacagcaaaagatcctggcgctggcccgcgaagcgcagttcgagcagcgcaagctgtggaatgcgtataacgaccaggcgctggcgaaaatgaaggccggcggggtgcagttccacgacattgataaaacggtgtttatcaaggcgacagagccggtgcgcgcgcagtatggcgataagcatcaggatctgatgaaagccatcgctgacgtccagtaa

SEQ ID NO: 117164 - DNA, 510 bp, Enterobacter cloacae
atgtccgaactctacctgaagtggatggaccgtctgtacctgttcgccatggcggtggcgggtatttcgctgttggtgatgacgattgtcatccccatcggcattttttcacgctacgtgcttaatcgcggcgaatcctggccggagccgatcgccattatctgcatggtgacgtttacctttatcggcgcggcggtgagctaccgcgccgggtcgcatattgcggtcaacatgctcaccgaccgcctgcccgcgtcgctgcaaagagtgtgcgcgcggatggtggatctgctgatgctgctgatttcaggcctgatgtgctggtacagctactggctgtgcgtcgagctgtgggagcagccggtggcggagtttccgcttctgacctccggcgaaagctatctgccgctacctgtcggatcggccattttgatcctgtttgtgcttgaacgcctgctgtttggctcgcaggaaaaccgtccggtcgtgctgatcggcaatcacagttaa

SEQ ID NO: 117165 - DNA, 1287 bp, Enterobacter cloacae
atggatgcgtttgttttgttattcaccctcgccattttgctggcgctggggatgccggtggctttcgccgtcgggttaagcgccgtggcgggggcgttgtggatcgatctgccgctggaggcgttgatgatccagatcaccagcggggtgaataaatttaccctgctggcgatcccgttcttcattcttgccggggcgatcatggcggaagggggcattgcccgacggctggtcaacttcgcgtacgtttttgtcggctttattcgcggcgggctgtcgctggtgaacatcgtggcatcaacgttcttcggcgcgatttccggctcgtcggtggcggatacggcgtctatcggcagcgtgatgatcccggagatggagaagaagggctatccgcgcgaatacgcggcggcggtgacggccagcgggtcggtgcaggcgatcctgatcccgcccagccacaactcggtgatttactccctggcggcagggggaacggtctccatcgccacgctgtttatcgcgggcgtgctgccgggcctgctgctgggcgtgagcctgatggtgctctgcctgtgcttcgcccgcaagcgcggctatccgaagggggacaaaatcccgttcaggcaggcgctgaaaatcatgctcgatgccctgtgggggctgatgacggtggtgattatcctcggcgggatcttgtccgggatattcacggcgaccgaatctgccgccgtggcctgcctgtgggcgttcttcgtcaccatgttcatttaccgcgattacaagtggaatgaactgccgaagctgatgtgtcgcacggtgaaaaccgtcaccatcgtgatgattttgattggctttgccgcggcgtttggcgcggtaatgacctacatgcagctgccgatgcgcatcaccgaattcttcacgtcgctctccgataacaaatacgtgatcctcatgtacctcaatatcatgctgctgttgattggcacgctaatggacatggcgccgatcatcctgatcctgaccccggtactgctgccggtgaccaactcgctggggatcgatccggtgcatttcggaatgatcatgatggtgaacctggggattgggctgatcacgccgccggtcgggtcggtgctgttcgtggcgagcgcggtgagtaagcagaagatcgagcacgtggtgcgggcgatgctgccgttttacggtatgttgctggtagtgctggggatggtgacatacatcccggcgatatcattgtggttgccgggggtgctagggatgcagtga

SEQ ID NO: 117166 - DNA, 2172 bp, Enterobacter cloacae
atgtcgactccagaaacacctaaaaaagttccccaattctcggcacttaagctcagcccggttccgccaaaagaggactgctgctgcgagggtgcgtgcgaaacccggaccgaagcgctgcctgaaaacggcaatcactacagctgggtggtcaacggcatggactgcgcggcctgcgcccgcaaagtggaaaatgcagtgaagcaggtgccgggtgtgaaccacgttcaggtgctgttcgctaccgaaaagctgctggtcagcgccgaaaacgacgtcagcagacaggttgaagccgccgtcagcaaagcgggttataccctgcgcagcgaaacggcgcccgcagaaaaaacgtccccgctaaaagaaaatctgccgctcattaccctcatcatcatgatggccctgagctgggggctggagcaaatcaaccacccgttcggcaacctggcgtttatcgccaccacgctggttggcctgttcccgattgcgcgtcaggcgctgcgtctgatgagaagcggcagctggtttgccatcgaaacgctgatgagcgtggcggctatcggggcgctgtttattggcgcgacggcggaagcggcgatggtgctgctgctgttcttaattggcgaacgccttgagggctgggcggcgagccgggcgcgtaaaggggtgagcgcgctgatggcgctgaagccggaaaccgccacgcgggttattcatggtcagcgtgaaacggtcgccatcaataccctgcgcccgggcgacgtgattgaagtgcccgcaggcggacgtctgccagccgatgggaccctcattaccgccaccgcgagctttgacgaaagcgccctgaccggggaatccatcccggtagcgcgcgcggcaggtgaaaaggtgcctgcgggcgccaccagcgtcgaccgactggtgctgctgacggtcctttccgaaccgggcgacagcgccatcgaccgcatcctcaggctgatagaagaagccgaggagcgccgcgcgccggtagaacgctttatcgatcgcttcagccggatttacacccccgccatcatgctggtggcgctgctggtcaccgtcgtcccgccgctgttcttcggcgcgccgtgggagggctggatttacaaagggctgacgctgctgctgatcggctgcccgtgtgcgctggtgatatccaccccggcggcgattacctcagggctggcggcggcggcgcggcgcggggcgttgattaagggcggcgcggcgctggaacagctgagccagattcagcacatcgccttcgataaaaccggcacgctgacggttggcaagccgcaggtgaccggcgtgtatccgcaggacatcagtgaagacgagttgcttatactggccgccgccgttgaacagggctccacccaccctctggcgcaggcgattgtgcgtgaagcgaaggggcgcgggctgaacatccctccggcaaccgcccagcgagcgctggtcgggtcggggattgaggctgtggtcgaaggcaaaaaagtgctgatcgccgcggcaggcgcgtacccgaatccacaggttgaggcattagagcaggccgggcagacggtcgttgccgtgatgcaggacggtgtaccgatgggcatgctggcgctgcgcgacaccctgcgtgacgatgcgaaagacgccgtcgacgcgctgcacaggctgggggtacagggcgtgatcctgaccggtgataacccgcgtgcggcggcggcgattgccggcgagctggggctggagtttaaggccggattgttgcctgcggataaagtcagcgcggtaaccgagctgaacggtcatgccccgctggcgatggtcggggacgggataaacgacgccccggcaatgaaggcttccaccatcggcattgcgatgggcagcggtaccgacgtggcgctggagaccgccgacgcggcgctgacgcacaaccgcctgaccgggctggcgcagatgatagatcttgcgcgggcgacgcgggctaatattcggcaaaacatcggcattgcgctgggtctgaaggggattttcctggtcaccacgctgctcggcatgaccggactgtggctggcggtactggcggatacgggggcgacggtgctggttacggcgaacgcgttgcggctgttgcgccgtcggtaa

SEQ ID NO: 117167 - DNA, 627 bp, Enterobacter cloacae
atgctttggtcatttatcgctgtctgtttttccgcatggctttacgtcgatgcgtcttaccgtggcccagcctggcagcgctggttgtttaaacccgtcacgctattactcctgctgttgcttgcctggcaggccccgatgtttaacgccgttagctatcttgtcctcgcggggctgtgtgcttccctgattggcgatgccttaaccctgctgccgcgccagcgcctgctgtacgccgtgggggcattcttcctgtcgcatctgctctataccatctactttgccagccagatgacgctctccttcttctggccgctgccgctggtgctgctggtgattggcgccctgctgatcgcggtgatctggtcgcgtctggaagagatgcgtctcccggtctgtacgtttatcgccatgacgctggtgatggtgtggctggctggcgagctgtggttcttccgtccgaccgctccggcaatgtctgcgttcttcggtgccgcactgttgctgttgggtaatatcgtctggctgggcagccactatcgccgccgcttccgtgcggataatgcgatttccgccgcctgttactttgccggacacttcctgattgtgcgttcgctgtatatctaa

SEQ ID NO: 117168 - DNA, 360 bp, Enterobacter cloacae
atgagcaagatgccgctgtttttcattatcgtggtggcgattatcgtcattgccgcctcgtttcgcttcgtgcagcagcgccgtgagaaggccgacaatgacgccgcgccgctgatgcaaaagcgcgtggtggtgacgaacaagcgtgagaagccgcttaacgaccgccgctcccgccagcagcaggtgacgccagcgggcacaacgatgcgctatgaagcgagctttaagccggaaaccggcgggctggagatgaccttccgcctggaggcgcagcagtaccaccagctgacggtgggggagaaaggcacgctgagttacaaagggtcgcggtttgaaggttttacacctgagcagtaa

SEQ ID NO: 117169 - DNA, 282 bp, Enterobacter cloacae
atgccagtactgattaacgtagggcgcgtgctgatgctgggcgtctgggcatttttgattttgaatctggtgcacccgttcccacgtccgctgaatatctttattaacgtggcgctgatttttaccgcgttcatgcatgccttgcagatggtgatgctgaaaaacggtctgccgaaagatggcccaccgatgaccggctggcagcagctgcgggtgtttattttcggcgtgtttgagctgctggtgtggatgaagaagtttaaggcgcaggtgaagaagtaa

SEQ ID NO: 117170 - DNA, 603 bp, Enterobacter cloacae
atgaagaaacccacccgcgccccggccggtcaaattcgcattatcggcggtcagtggcgaggccggaaattaccggtgccggacagccccggtttacgccccaccacggaccgcgttcgcgagacgctgtttaactggctcgccccgtctatggtagacgccaactgcctggactgcttcgccggaagcggtgcattggggctggaagcgctgtcgcgttatgccgccagcgccacgctgctggagatggagcgcggcgtcgcgcagacgttgcagcaaaatctggctacgctgaaggcaaccaacgcgaaagtggtgaataccaacacgctgagcttcctcgcccaacaggggacgcccttcaacgtggtgtttgttgacccgccgttccgtaaagggctgctggaagagacattatcgttgctggaaaaaaatggctggctggcagacgacgcgctgatttacgttgaaagcgaagtggaaaatggcctgccgcccgttcccgttcactgggatctgcaccgcgagaaggtcgccggccaggtggcttatcgtctgtatcaccgtcaggcacaaggaggatccgatgccagtactgattaa

SEQ ID NO: 117171 - DNA, 1461 bp, Enterobacter cloacae
atggcaaaacaaaaaaaacgtggcttcttttcctggttgggtttcggtgaaaaagagcaagaaacagaacagaaaaccgaagaacagcaggttgtagaagagccgtcaaagcctgaaacgcctgtcgaaaccgctgcggttgtcgaagcggaagagccagcccacagcaaagaagagattgaatcctttgccgaagaggtggttgaggttactgaacaggttcaggagagcgaaaaaccagagccggttatcgttgaaacccttaacgaagcgccgcaggccactatcgaacacgaagagctgccgctgccggaagaggtgaaagctgaagaggtttctgccgaagagtggcaggccgaagcggaaaccgttgaaattgttgaggcggtggaagaagaagcggcccttgagccagagctgaccgacgaagagctggaagcccaggcgctggcggcggaagcggctgaagaagcggtcatcgtcgtgccggtggaagcgcaggccgaagaagagatcgttcaggagcaagaaaaaccgactaaagaaggtttcttcgcgcgcctgaagcgcagcctgctcaaaaccaaagaaaatttaggttccggatttatcagtctgttccgcggcaaaaagatcgacgacgatctgtttgaggagctggaagagcagctgctgattgcggacgtgggcgtggaaaccacccggaagatcatcgccaacctgaccgaaggggcgagccgcaaacagctgcgtgacgccgaggcgctgtacggcctgctgaaagacgagatgggtgaaattctcgcaaaagttgacgaaccgcttaatattgaaggcaaaatgccgtttgttatcctgatggttggcgtcaacggcgtgggcaaaaccaccaccatcggcaagctggcgcgccagtttgagcagcagggcaaatcggtgatgctggcggcgggcgataccttccgtgcggcagcggtggaacaacttcaggtgtggggccagcgcaacaatattccggttattgcacagcacaccggcgcggattccgcgtccgtgattttcgatgccatccaggcggcgaagtcgcgtaacgtggacgtgctgattgcggataccgcagggcgtttgcagaacaaatcgcacctgatggaagagctgaagaaaatcgttcgcgtcatgaagaagctggacgaagatgcaccgcatgaaattatgctgactatcgacgccagcaccggacagaacgccatcagccaggcgaaactgttccatgaagcggtaggactgaccgggatcgcgctgaccaagctggacggtaccgcgaaaggcggggtgatcttctccgtggccgaccagttcggcattcctatccgttacatcggtgtgggcgagcgtattgaggatttacgtccgtttaaagcggacgactttattgaggcactatttgcccgagaggactaa

SEQ ID NO: 117172 - DNA, 666 bp, Enterobacter cloacae
atgattcgctttgaacacgtcagcaaggcctatctcggcgggagacaagcgctacagggggtgacattccacctccagccaggcgagatggcattcctgaccggccattccggcgcggggaaaagtaccctgctcaagctgatctgtgggatcgagcggccaagcgccgggaaaatctggttcagcggccatgaaattagccgtcttaagaaccgtgaagtgccgttcctgcgtcgtcagattggcatgattttccaggatcaccacctgctgatggatcgcacggttttcgataacgtcgcgatcccgctgattattgctggcgccagttacgatgatatccgccgtcgcgtttcggcggcgctggataaggtcgggctgctggacaaagcgaagaacttcccgatccagctctccggcggtgagcagcagcgcgtgggtatcgcccgcgcggtagtgaacaagcctgccgttttgctggcggatgaaccgaccggtaacctggacgatgccctctctgaagggatcctgcgtctgtttgaggaatttaaccgcgtgggggtcacggtactgatggcgacgcacgacatggggctgatctcccgccgttcgtaccgcatgctgaccctgagcgacgggcatttgcacggaggccacggtgaataa

SEQ ID NO: 117173 - DNA, 1056 bp, Enterobacter cloacae
gtgaataagcgtgatgcaatgaaccagattcggcagttcagcaaccggtttgaccgtttccgcaagcctcagggcggcggggacggcaatcgcaatgcgcctaagcgtgccaaagcggcaccgaaaccgaactcccgcaaaaccaacgtctttaacgagcaggtgcggtacgccttccagggcgcgttgcaggatctgaaaagcaaaccgctggcgacgttcctgacggtgatggtgattgccatctccctgacgctgcccagcgtctgctacatggtttacaaaaacgtaaaccaggcggcgtcccagtactatccgtcgccgcagatcaccgtttatctggataaagccctcgacgataacgcggcggctcaggtggtggggcagattcaggccgagcagggcgtggagaaggtgaactatctttcccgcgatgaagcgctgggtgagttccgcaactggtccggattcggcggcgcgctggatatgcttgaagagaacccgctgcccgccgtggcggtggtgatcccgaaactcgatttccagggcacggattcgctcaacaccctgcgcgaccgcattacccgcattaacgggattgatgaagtgcgcatggacgacagctggtttgcccgtcttgccgccctgaccgggctggtaggacgcgtgtcggcgatgatcggcgtgctgatggtggcggcggtgttcctcgtcatcggtaatagcgtgcgcctgagcatcttcgcccgtcgcgataccatcaacgtgcagaaactgattggcgcaacggatggtttcatcctccgcccgttcctttacggcggcgcgttattaggtttttctggtgcatttctttcattgatattgtcagaaattttggtgatgcggctgtcgtctgccgtgactgaagtggcgcaggttttcggaactaagtttgatatcagtggcttagggttcgatgagtgcctgctgttgctgctggtgtgctccatgatcggctgggtggcggcatggctggcaacggttcaacatttacgccactttactcccgactaa

SEQ ID NO: 117174 - DNA, 858 bp, Enterobacter cloacae
atgaccaaagaaatgcaaactttagctttagcccctgttggtaacctggaatcttacatccgggctgcgaacacctggccgatgttaacggctgaggaagaaaaggagcttgctgaaaagctgcattaccagggcgatctggaagcagctaaaacgctgatcctgtctcacctgcgctttgttgttcacgttgctcgtaattatgcgggctacggcctgccgcaggcggacctgattcaggaaggtaacattggcctgatgaaggcggtacgtcgctttaacccggaagtgggtgtgcgactcgtatccttcgccgtgcactggatcaaagcggaaattcacgaatacgtcctgcgtaactggcgtattgtgaaagtcgccacgacgaaagcgcagcgcaaactgttcttcaacctgcgtaaaaccaagcagcgtctgggctggttcaatcaggatgaagtggaaatggtggcgcgcgagctgggcgtttccagcaaagacgtccgcgagatggaatcccgtatggccgcgcaggacatgacgtttgatatgtctgctgacgatgacgcgtccgacagccagccgatggccccggttctgtatctacaggataaaacctctaactttgctgacggcattgaagaggataactgggaagaccaggcggcgaacaagctgaccttcgcgatggaaggcctcgacgagcgtagccaggatattattcgtgcccgctggctggacgaagataacaagtccacgttgcaggaactggccgaccgctacggcgtctccgctgaacgtgtgcgtcagcttgagaaaaacgccatgaaaaaacttcgcgccgctatcgaagcgtaa

SEQ ID NO: 117175 - DNA, 1266 bp, Enterobacter cloacae
gtgaaaaataacgaactgaacgaccggcgtttacaggcgacgccgcgcggtatcggcgtcatgtgtaacttctatgccgataaagccgaaaacgccacggtgtgggacgtggaaggtaacgagtatattgattttgccgccgggatcgccgtgctgaataccgggcatcgccatcctaaagttatcgccgccatcgaaaaacagcttcacgcctttacccataccgcttatcaaatcgtcccctatgaaggttatgtggcgcttgccgagcgcatcaaccagcgcgtacccatagaggggccagccaaaaccgccttcttctcaacgggggcggaagcggtcgaaaacgcggtgaaaatcgcccgcgcgtacaccagacgtcccggcattatcaccttcggcggcgcgttccacggccgtacctttatgaccatggcgatgaccggcaaagtggcgccctataagctcggcttcggcccgttccccggctcggtgtaccacgcgcaattccccaacagcctgcacggggttagtaccgccgaagcgctaaaaagcctggagcgcatcttcaaagccgatatcgcgcccgatcaggtggcggcaatcattattgaaccggttcagggcgagggcgggttcaacgtcgcgcccgctgattttatgcaggcgctgcgtgccctgtgcgatacccacgggattttactgattgccgacgaagtgcaaaccggcttcgcccgtaccggcaagctgttctccatggaaaaccactgcgtgaagcccgatctgatcaccatggcgaaaagcctggcgggcgggatgccgctctctgccgtctctggccgggcggaggtgatggatgcgcccgccccgggcgggctgggcggaacctacgcgggtaacccgctggcgattgcggcggcccatgcggtgctggatgtgattgacgaggacgatctctgcacccgcgcggcgcatctcgggcatcatctagtcgaggtgctgaataaagcgaaggatggctgtccgtatatcgccgatatccgtgggcagggctcgatggtggcggtagaatttaccgatccgcaaaccggacagccgtcgcccgaatttacccgtcaggttcaggagcgcgcgttgaacgaagggctgctgcttttgagctgcggcgtttacggcaacgttattcgcttcctctacccgctcaccatccccgaagtgcagttccgtaaagcgctggatattatttccgcctcgctgacacgataa

SEQ ID NO: 117176 - DNA, 1095 bp, Enterobacter cloacae
atgaagggtaaagcgttactggcaggatgtatcgcgttggcattcagcactatggcccaggccgatattaaagtggccgtggtgggcgcgatgtccggtccggtagcacagtacggcgaccaggaatttaccggcgcggaacaggcggttgcagacattaatgctaagggcggcatcaagggcgaaaagctgcaaatcgtaaaatatgacgatgcctgtgacccgaaacaggcggtcgcggtggcgaacaaagtggtaaacgacgggatcaaatacgttatcggtcacctgtgctcctcttccacccagcccgcgtctgacatctacgaagacgaaggcattctgatgatcacgccggccgcgacggcgccagagctgaccgcgcgcggctataagctgatcctgcgtaccaccggtctggactccgatcaggggccaaccgccgcgaaatatatcgtggaaaaagtgaagccgcagcgcatcgcgattgttcatgacaaacagcagtacggcgaaggcctggcccgtgcggtgcaggataacctgaaaaaagcgaacgccaacgtggtgttctttgacggtatcaccgccggtgagaaagacttctcgaccctggtcgcgcgtctgaagaaagaaaatatcgatttcgtttactacggcggctaccacccggaaatggggcagatcctgcgccaggcgcgtgcggcgggtctgaagacgcagttcatggggccagaaggtgtcgcgaacgtttccctgtctaatatcgcgggtgaatccgctgaagggctgctggtgaccaaaccgaagaactacgaccaggtgcctgcgaacaaacctgttgtcgatgccatcaaggcgaagaaacaggatccaagcggtgcgttcgtctggaccacctacgcagcgttgcagtctctgcaagcgggcctgaaccagtcagccgatccggcggagattgccacctggctgaaagcgaactcggtggaaaccgtgatggggccgctgtcctgggatgagaagggcgatttgaagggcttcgagttcggcgtgtttgactggcatgccaacggcacggcgactgacgcaaaataa

SEQ ID NO: 117177 - DNA, 384 bp, Enterobacter cloacae
atgaaactgactatcgtgcgtctggtgacctttagcgaccaggatcgtatcgacctgggcaagatctggccggaatattccccttcatcgctggccgtcgatgaaaaccaccgcatctatgccgcgcgttttaatgaacgtctgctggccgccgtccgcgtaacgctgagcggcacggaaggggcgctggactccctgcgcgtgcgcgacgtgacccgtcgtcgcggggtcgggcagtatttaattgaagaggtgatccgcgaaaacccgagcgtaacctcctggtggatggccgacgtgggcgtagaggatcgcggcgtgatggcggcgtttatgcaggcgttagggtttacggcgcaggcgaacgggtgggagaagcgctaa

SEQ ID NO: 117178 - DNA, 1110 bp, Enterobacter cloacae
atgaaaaggaacgcgaagacgttaatcgcggggatggtcgcactgtcgatctcgcatgccgctatggcagacgacattaaagttgcggtagtgggggcgatgtccggccctgttgcccagtggggtgacatggagttcaacggcgcgcgtcaggccatcaaagatatcaacgccaaaggcggcatcaaaggcgacaagctggtaggcgtggagtatgacgacgcctgcgatcctaaacaggccgtcgcggtcgccaacaaaatcgttaacgacggtatccagtacgtcatcgggcacctgtgttcttcctccacgcagcctgcgtctgatatctacgaagacgaaggcattctgatgatcaccccgggtgccaccaacccggaactgacccagcgcggctaccagcacatcatgcgtaccgccggtctggactcctctcaggggccaaccgccgccaaatacatcctcgaaaccgttaagccgcagcgtatcgccatcattcatgataagcagcagtacggcgaaggcctggcgcgttccgtgcaggatggcctgaaaaaaggcggcgcaaacatcgtcttcttcgacggcattaccgctggtgagaaagacttctccgcgctgatcgcccgcctgcaaaaagagaatatcgacttcgtttactacggcggctactacccggaaatggggcagatgctgcgccaggcgcgcgccaccggcctgaaaacccagtttatggggccagagggcgtcggtaatgcctccctgtccaacatcgcgggcgattctgccgaaggcatgctggtgacgatgccaaaacgctatgaccaggatccggcgaataaggctatcgtggatgcgctcaaggcgcagaagaaagatccgagcggtccgtacgtctggatcacctacgcggccgtgcagtctctggccaccgcgctggaccgtaccggcagtaaagagccgctggatctggtgaaagatttaaaagcacacggggcgaacaccgtgattgggccgctgaactgggatgagaaaggcgatctgaagggatttgagtttggtgtctttaagtggcacgccgacgggtcttcctcggtcgccaaataa

SEQ ID NO: 117179 - DNA, 927 bp, Enterobacter cloacae
atgtccgagcagtttctctacttcttgcagcagatgtttaacggcgtcacgctgggaagcacctacgcgctgatcgccatcggctacacgatggtttacggcattatcggcatgatcaacttcgcccacggcgaggtgtacatgatcggtagctacgtctcctttatgattatcgccgcgctgatgatgatgggcatcgacagcagctggctgctggtggccgccgggtttgtcggcgcgattgtgatcgccagcgcctacggctggagtattgaacgggtggcctaccggccggtgcgcagctccaaacgcctgatcgcgctgatctccgccatcggtatgtccattttcctgcaaaactacgtcagcctgaccgaaggttcacgcgacgtagcgctgccaagcctgtttaacggccagtggattgtgggggccagcgaacacttctctgccaccatcaccaccatgcagctggttatctgggttgtgacctttattgccatgctggccctgaccctgttcatccgctactcccgcatgggacgcgcctgccgcgcctgcgcggaagatctgaagatggcgagcctgctcgggattaacaccgaccgcgtgattgccctgaccttcgtgatcggcgcagcgatggcggcggtggctggcgtgttgctcggccagttctacggcgtaatcaacccgtacatcggctttatggccgggatgaaagccttcaccgcggcggtactgggcggcatcggcagcattccgggcgcgatgatcggcggcctgatcctgggcgtggccgaagcgctctcctcggcgtacctgagcaccgaatataaagatgtggtgtcgtttgccctgctgattctggttctgctggtaatgcctaccggtattctgggccgtccggaggtagagaaagtatga

SEQ ID NO: 117180 - DNA, 1278 bp, Enterobacter cloacae
atgaaaccgatgcattttgcgatggcgctgctctctgccgccatgttcttcgtcctggcgggcgtctttatgggcgtccagttaggactggacggcacgaagctggtggtggataccgctcccgacatccgctggcagtgggtgtttatcggcaccgcggtggtgttcttgttccagctgttgcgtccgctgttccagaagacgctgaaaaacgtctccgggccgaaattcgtcctgccggcgatcgacggtacaacggtgaaacagaagctgttcctggtggcgctgctggtggctgccgtagcgtggccgtttatggtctcgcgcgggacggtggatattgccaccctgaccatgatctacgtgattctggggctcggtctgaacgtggtggtggggctgtctggcctgctggtgctgggctacggcgggttctacgccatcggcgcttacaccttcgcgctgctgaaccactattacggcctcggcttctggacctgtctgccgctggcggggctggtctctgccgcggcgggcttcctgctcggcttcccggtgctgcgcctgcgcggtgactatctggcgattgtgaccttaggcttcggcgaaatcgtccgtattctgctgctcaacaataccgaagtgaccggcggtccgaacggcatcagccagatcccgaaaccgaccttcttcggcctggagttcagccgtaccgcccgtgaaggcggctgggataccttcagcaatttctttggcatcaagtacgatccgtccgaccgcgtgatctggctctatctggtggcgctgctgctggtggtgattaccctgttcgtgatcaaccgtctgctgcgcatgccgctgggccgcgcctgggaagcgctgcgcgaagatgaaatcgcctgccgctccctgggcctgaacccgacccgcatcaagctgaccgcatttaccatcagcgccgcgtttgccggtttcgccgggacgctgtttgccgcacgtcagggcttcgtcagcccggaatcgttcacctttgccgaatccgcctttgtgctggcgattgtggtgctcggcggaatgggctcgcagttcgccgtgatcctcgcggctatcctgctggtggtctcccgcgagctgatgcgcgactttaacgaatacagcatgttaatgctgggtggtttgatggtgctgatgatgatctggcgtccgcagggtctgctgccgatgacccgtccacagctgaagctgaaacgcacacaggcgaaaggagagcaggcatga

SEQ ID NO: 117181 - DNA, 765 bp, Enterobacter cloacae
atgaagcctttattatccgttaacggcctgatgatgcgctttggcggcctgctggcggtcaacaatgtgaatctggatctgcacaagaaagagattgtctccctgattggcccgaacggcgcgggaaaaaccacggtctttaactgtttgaccggcttctacaagccgacgggcggcaccatcatgctgcgcgaccagcaccttgaagggctgccgggccagcagattgcccgcatgggcgtggtgcgcaccttccagcacgtgcgtctgttccgcgagatgacggtgattgagaacctgctggtggcacagcatcagcagctgaaaaccgggctgttctccggcctgctgaaaaccccggcctttcgccgcacgcaggaggaggcgctcgaccgcgccgcgacctggctcgaccgtatcggcctgctccagcacgccaaccgccaggcgagcaacctcgcttacggggatcagcgtcgccttgagatcgtgcgctgcatggtgacccagccggagatcctgatgctcgacgaaccagcggcaggtctcaatccgaaagagaccaaagagctggacgagctgattgccgagctgcgcgaccatcacgacaccaccatcctgctgattgagcatgacatgaagctggtgatgggcatttcggaccgtatctacgtggtaaaccagggcacgccgctggcaaacggcacgccggaagagatccgcaacaacccggacgtgatccgcgcataccttggtgaggcataa

SEQ ID NO: 117182 - DNA, 714 bp, Enterobacter cloacae
atggaaaaagcgatgttaacgttcgacaaggtcaacgcgcactacggcaagatccaggcgctgcacgacgtcagcctgcacatcaatcagggcgaaatcgtcaccctgattggcgccaacggcgcgggtaaaaccacgctgctcggcaccctgtgcggcgacccgcgcgccaccagcgggcggattgtgtttgacggcaaagatattaccgactggcagacggctaagatcatgcgtgaagcggtggcgattgtcccggaagggcgccgcgtattctcccgcatgacggtggaagagaacctggcgatgggcggtttcttcgcccatcgggatgaattccagacccgcatcaagtgggtgtacgaactcttcccgcgcctgtgggagcgtcgtattcagcgagcgggcaccatgtccggtggcgagcagcagatgctggcgattggccgcgcgctgatgagccagccgcgcctgctgctgctggacgagccgtcgcttggtcttgcgccgatcattatccagcagattttcgacaccatcgagcagctgcgcaaagaggggatgaccatcttcctcgtcgagcagaacgccaaccaggcgctgaagctcgctgaccgtggctacgtgctggagaacgggcgcgtggtgctctccgataccggtgacgcgctgctggcgaacgaggcggtgcggagcgcgtacctcggaggctaa

SEQ ID NO: 117183 - DNA, 1317 bp, Enterobacter cloacae
atgacatcgttacgacacacagctttgggtctggcactgggtctggcttttgcgacgaacgcaatggctgtgaccaccattccgttctggcattccatggaaggggagttgggtaaagaggttgactccctggcgcagcgtttcaacgacacccacccggattacaaaattgtgccggtgtacaaaggcaactacgagcagagcctgagcgcgggcatcgccgccttccgtaccggtaacgcgcctgcgctgttacaggtttatgaagtgggcaccgccaccatgatggcctccaaagccatcaagccggtctatgaagtgttcaaagaagcaggtattaacttcgatgaatcccagttcgtaccgaccgtctccggttattacaccgattccagaaccggccacctgctgtcccagccgtttaacagctccacgccggtgctgtattacaacaaagacgccttcaaaaaagccggtttagatccggagcagccgccaaaaacctggcaggatctggcggagtacaccgcgaagctgaaagcggcggggatgaagtgcggctacgccagcggctggcagggctggatccagattgaaaacttcagcgcctggcacggcctgccggttgccacccaaaataacggcttcgacggtaccgacgcggtgctggagttcaacaagccggagcaggtgaagcacatcgcgctgctggaagcactcaacaagaagggcgacttcagctacttcgggcgtaaagacgaatccaccgagaagttctacaacggcgactgtgccattactaccgcctcgtccggctcgctggcggatatacgtcactatgccaaattcaactacggcgtgggcatgatgccgtacgacgctgacgttaaaggcgcgccgcaaaacgctatcatcggcggggcgagcctgtgggtgatgcagggtaaagacaacggcacctacaaaggcgtggccgagttcctcgacttcctggcgaagccggaaaacgccgccgagtggcaccagaagaccggctatctgccgatcaccaaagccgcgtacgacctgacccgcgagcagggcttctacagcaagaacccgggcgcagacatcgcgacgcgccagatgctgaacaagccgccgttgccgttcaccaaaggcctgcgtctgggcaacatgccgcagatccgcaccatcgtggatgaagagctggaaagcgtgtggaccgggaagaaaacgccacagcaggcgctggacgctgcggtagagcgcgggaatcagctgctgcgccgctttgagcagtcgaccaaatcgtaa

SEQ ID NO: 117184 - DNA, 888 bp, Enterobacter cloacae
atgtcctcatcccgtccggtgttccgttcccgctggctgccgtacctgttggtcgcaccgcagctggtcatcaccgttatcttctttatctggcctgcgggcgaagcgctgtggtactcggtacaaagcgtcgatccgttcgggctttccagccagtttgtcgggctggacaactttaccgcgctgttccacgacagctactacctggactccttctggacgacgatcaaattcagtgcgctggtcaccgtgagcggtcttgtcgcgtcgctgtttttcgccgcgctggtggattacgtggtgcgcggcagccgtctgtatcagaccctgatgctgctgccctacgccgtggctcctgccgtggccgccgtgctgtggatcttcctgtttaacccagggcgcgggctgattacccacttcctgggcgagtttggctacgactggaaccacgctcagaacagcggtcaggcgatgttcctggtggtgttcgcctcggtgtggaagcagatcagctataacttcctgtttttctttgccgcgctacagtctatcccgcgttcgctggtggaggccgccgccatcgacggtgcagggccggtgcgccgcttcttccggctgtcgctgccgctgatcgccccggtgagtttcttcctgctggtggttaacctcgtgtacgccttcttcgacaccttcccggtgattgacgccgccaccgcgggcggcccggtgcaggcgaccaccacgctgatttacaagatctaccgcgaaggctttgccggacttgatctctcagcgtctgccgcgcagtccgtggtgctgatgttcctcgtcatcatcctcacggtggtgcagttccgctatgtcgaaagtaaggtgcgctaccaatga

SEQ ID NO: 117185 - DNA, 846 bp, Enterobacter cloacae
atgattgagaaccgtcgcgggctgacgattttcagccataccatgctgattttagggattatcgtcatcctgttcccactgtacgtggccttcgtcgccgccacgctggacaccaaagcggtgttcgacaccccgatgacgctgatcccgggcggacaccttttcgaaaacatgaagaccatctggacccagggcgtgggcgccaacagcgcgccgttctggctgatgatgctcaacagcttcatcatggcgtttggcatcaccgtcggcaaaattacggtgtcgatgctctcagcgttcgccattgtctggttccgctttccgctgcgtaacctgtttttctggatgattttcatcaccctgatgctgccggtagaggtgcgtatcttcccgacggtggaggtgatcgccaacctgaagatgctcgacagctacgcgggcttaaccctgccgctgatggcctcggcgaccgccaccttcctgttccgccagttctttatgaccctgccggatgagttgattgaagccgcgcgcatcgacggggcctcgccgatgcgcttcttccgcgacatcgtgctgccgctgtcgaaaaccaacctcgcggcgctgtttgtgatcacctttatctacggctggaaccagtatctgtggccgttgctgatcgttcaggacgtcaacctcggcaccgccgtggcaggcatcaaaggcatgatcgccaccggcgaaggcaccaccctctggaaccaggtgatggcggcgatgctgctcacccttatcccacccgtagtcattgttttagccatgcagcgcgcgtttgtccgcggcctggtcgatagcgagaaataa

SEQ ID NO: 117186 - DNA, 1071 bp, Enterobacter cloacae
atggcaggtttaaaattacaggcagttaccaaaagctgggacggtaaaacccaggtcattcagccgctgacgctcgacgtggcggacggggaatttatcgtgatggtcggcccgtccggctgcggaaaatccaccctgctgcgtatggtggccgggctggagcgcgtaacgtccggggatatctggattgaccgccagcgcgtcactgagatggagcccaaagatcgcggcatcgcgatggtgttccagaactatgccctctatccgcacatgagcgtggaagagaacatggcctgggggctgaaaatccgcggtatgggcaaaggtcatatcgaggagcgcgtgaaagaggccgcgcgcattctggagctggacggcctgctgaagcgccgtccgcgcgagctttccggcggccagcgtcagcgcgtggcgatggggcgcgccatcgtgcgcgacccggcggtattcctgttcgacgaaccgctgtcaaacctcgacgccaaactgcgcgtgcagatgcgccttgagctacagcagctgcatcgccgcctgaaaaccacgtccctctatgtgactcacgatcaggttgaagccatgaccctcgcccagcgcgtgatggtgatgaacaaaggcatcgccgagcagattggcaccccggtggaggtctacgaaaaaccggccagccgttttgtggcgagctttatcggcagcccggcgatgaacctgctggacgggcggatcaatgcggcgggaacccacttcgagctggaaagcgggatggcgttgccgatcaactggtactatcgtggctacgccgggcgtaagatgacgctcggtatccgcccggagcatattggtttgacgtctcaggcggacggcggcgtgccgctggtgatggatacgctggagatgctgggcgcagacaacctggcgcacgggcgctggggcgagcaaaagctggtggtgcgcctgccgcatcaggagcgcccgaaggcaggcagcacgctgtggctgcatatgccggaaaatcacctgcacttatttgacggtgaaacaggacaacgagtatga

SEQ ID NO: 117187 - DNA, 741 bp, Enterobacter cloacae
atgagcaactggccttacccccacatcgtcgcccaccgtggcggcggtaaactggcgccggaaaacaccctggcggcaattgacgttggcgcgcgctacggccacacgatgatcgagttcgacgccaagctgtcgaaggacggcgaaattttcctgctgcacgacgacaatctcgaacgcaccagcaacggctggggcgtggcgggcgaactgccgtggcgtgacctgctgaaggtggatgccggtagctggtacagcggcgaatttaaaggcgaaccgctgccgctgctggcggaagtggcggaccgctgtcgtcaacacggcatgatggccaacatcgaaatcaaaccgaccaccggcaccgggccgctgacgggtaaagtgattgcccttgccgcgcgcgagctgtgggaagggatgaccgcgccgctgttatcgtcgtttgacatcgacgcgctggaagccgcacaggccgccgttccggagttgccgcgcgggctgctgctggatgagtggcgagaagactggcgcgcgctggcgacccgcttaggctgcgtgtcgatccacctcaaccataagctgctggatgaagcgcgcgtgacgctgttgaaggaggccggtctgcatatcctggtgtataccgtcaacaaaccccagcgtgcagccgagctgctgcgctggggcgtggacagcatctgtaccgatgcgattgaccagatcgggccgaactttatttattaa

SEQ ID NO: 117188 - DNA, 372 bp, Enterobacter cloacae
atgaaacgattactgatcctgaccgcgctgcttccgttcgccgcgctcgcacagccaatcaacaccctgaacaacccgaaccagccgggctacgtcattccgagccagcagcgtatgaagacggagatgatgagccagcaacagcagcagaaagggatgctcaatcagcagttaaaaacgcagacccaggtgcagcagcagcacctgcaaaaccagatgaataccaacacccagcgcgtgcagcagggccagatgcgggagcagccgctgccaaactcaaacggtgggatgttagggggaggggtgtcgcaaagcagcggtcagcagcacatgctgccgacccagcagaacggcagtatgcttaataaataa

SEQ ID NO: 117189 - DNA, 1746 bp, Enterobacter cloacae
atgatgaaaccaacctttttgcgctgggtcgccatcgctgcgctgatggcaggcggcacatttaccgtggcggccaacccgcccgccgctcctccggtctcttacggcgtggaggaggatgtttttcaccccgtgcgggcgacgcacggcatggtggcctcggttgacgcgctggcaacgcaggtgggcgtcgatattcttaaacagggcggtaacgcggtggatgcggcggtcgcggtgggatatgcgctggcggtgacgcatccacaggcggggaacctgggcggcggcgggtttatgatgctgcgcaccaaagacggtaaaaccacggccatcgacttccgtgagatggcgccgaaccaggcctcccgcgatatgttcctcgacgatcagggcaatccggacagtaaaaaatctctgacctcgcaccttgcctccggcacgccgggcaccgttgcgggcttctcgctggcgctggaaaaatacggcacgctgccgctgaataaagtggtgcagcctgccatcaagctggcgtgcgacggcttcgtcgtcaacgacgcgctggcggacgacctcaaaacctacggcagcgaagttattcccaatcatgagaacagcaaggctatcttctggaaagacggcgagccgctgaaaaagggcgataagctggtgcagaagaacctcgcaaaaagtctcgaactgattgccgaaaacggtccggacgccttctataaggggccgattgccgatcagattgccgatgagatgcagaagaacggcgggctgatcaccaaagcggatctggcggaatataaggcggtggagcgcgagccgatcagcggcacctatcgcggctacgaggtcttctccatgccgccaccgtcctccgggggcattcacatcgtgcagatcctcaatattctggaaaacttcgatatgcacaagttcggcttcggtagcgccgatgccatgcaggtgatggcggaggcggagaagcgcgcctacgctgaccgctcggaataccttggcgatccggacttcgtgaaggtgccgtggcaggcgctgaccaacaaagcctatgccaaatcgattgccaacgagatcgacatcaacaaggcgaagccgtcgagcgagatccgccccggcaagctggcgccgtatgaaagtaaccagaccacccatttctcggtggtggataaagacggtaacgcggtggcggtgacctacacgcttaacaccactttcggcaccggcattgtggcgggcaacagcggtattttgctgaacaacgagatggatgacttctctgccaaaccgggcgtgccgaacgtctacggcctggtcggcggcgatgcgaatgcggtcgggccgaagaagcgcccgctgtcgtccatgtcgcccaccatcgtggtgaaagacggcaaaacctggctggtgaccggcagccctggcgggagccggattatcacaaccgtgctgcaaatggtggtgaacagtatcgactttgggatgaacgtcgccgaagcgaccaatgcgccgcgtttccaccaccagtggctgccggacgagctgcgcgtggagaagggctttagcccggacaccctcaagctgcttgagcagcgcgggcagaaggtggcggtgaaggaggcgatgggcagcacccagagcattatggtcgggccggacggggcgctatttggcgcatcggacccgcgttcggtggatgatttaacggcggggtattga

SEQ ID NO: 117190 - DNA, 489 bp, Enterobacter cloacae
atgagtgagatagtgatacgccacgctgaaccgaaagattacgacgccattcgtcagatccacgcccagccggaggtgtaccacaacacgctacaggttcctcatccttcaatggaaatgtggcaaatgcggctaggcgagcagccgggcattaaacagctggttgcctgcattgatgatatcgtggtcggccacctcaccattgatgtcgcccagcgaccacgccgcagccacgttgcagatttcggtatctgcgttggcgcgcagtggcataaccgcggcgtggccagcgcactgattcgcaccatgatcgatatgtgcgacaactggctgcgcgtcgaccgcatcgagttaacggtgtttgtggataacgaaccggcaatcgaagtgtacaaaaagcacgggtttgagattgaaggcaccggcaggcgctacgccctgcgcaacggcgagtatgtggatgcgtattatatggcgcgtatgaagtag

SEQ ID NO: 117191 - DNA, 1038 bp, Enterobacter cloacae
atgacactacattgcgcatttattggatttggcaaaagcaccacgcgttaccaccttccgtatgttctcaaccgtaaagatacctggcacgtggctcatatctaccgccgccgcgcgaagccggaagaacagtctccgcagtattctcacattcatttcaccagcgatcttgatgaagtgcttaatgacccgcaggtgaagctggtggtggtctgtacccacgctgatagccactttgactacgcgaaacgcgcgctggaagcgggtaaaaacgtgctggtggaaaagccgttcaccccgaccatcgccgaagcgaaggagctgttcgcgctggcgaaaagcaaagggctgaccgtcacgccgtaccagaaccgtcgctttgacagctgcttcctgacggcaaaaaaggcaattgaaagcggcaaactcggcgagatcgtggaaatcgaaagccacttcgattactaccgcccggtggcggaaacccagcccggactgccgcaggacggatctttctacggtctcggtgtgcacaccatggaccagatcatctccttgtttggccgcccggaccacgtggcgtatgacatccgcagcctgcgcaataaggccaacccggacgatacctttgaagcgcagctgttctacggcgacctgaaagccatcgtaaaaaccagccatctggtgaaaatcgactacccgaaatttatcgttcacggcaagaaaggctcctttatcaagtacggtattgaccaacaggagaccagcctgaaggccaatatcatgccgggtgaaccgggctttgcggcagatgattccgtgggcgtgctggagtacgtgaacgacgagggcctggcggtcagggaagagctgaagccggaaacgggcgactatggacgcgtctacgatgcgctgtatgacaccctcaccaccggcgcgccgaattatgtcaaggaatctgacgttctgaccaatctggaaatccttgaacgggccttcgagcaggcctcgcctgccacggtaaccctcgccagataa

SEQ ID NO: 117192 - DNA, 696 bp, Enterobacter cloacae
atgatctacttacgcaaagcaaacgaacgtggtcacgcgaatcatggctggctggactcatggcattcattctcgtttgccgactactacgacccgaactttatgggcttctccgcactgcgcgtgattaacgacgacgtgattgatgcaggccagggcttcggtacccacccgcacaaagacatggaaatcctgacctatgtgctggaaggggcggttgagcaccaggacagcatgggcaacaaagagcaggttccggcgggcgagttccagattatgagcgcgggtaccggggtgcgtcactctgagtacaacccgagcaaaacggaaaaactgcacctgtatcaaatctggatcattccagaagagaccggcatcacgccacgctacgagcagcgccgcttcgacgcgaaacagggcaaacagctggtgctgtccccggatgcgcgtgaaggttccctgaaagtgcatcaggatatggagctgtaccgctgggcgctggcgaaagatgaacagtctgtacaccagattgccgccaaccgccgcgtgtggatccaggtggtgaaaggtgaagtgtccatcaacggcaccaaagcgacaaccgccgatggcctggcagtctgggatgagcaggcgctctccgtgcatgccgacagcgaaagtgaaattctgctgtttgacctgccgccagtctaa

SEQ ID NO: 117193 - DNA, 996 bp, Enterobacter cloacae
atgaaaaagaaacgccccgtacttcaggatgtcgccgatcgcgtcggtgtgaccaaaatgacggtcagccgttttttacgtaacccggaacaggtttccgtggcgttgcgtggcaagattgccgccgcccttgatgaactgggttatatccccaaccgcgcgcccgatattctctccaatgcgaccagccgtgcggtaggcgtcctgcttccttccttaaccaaccaggtattcgccgaagtgctgcgtggcatcgaaagcgtcaccgatgcgtttggctatcagaccatgctcgcccactacggatacaagccggaactggaagaggaacgtcttgaatcgatgctttcctggaacattgacggcctgattttaacggaacgtactcacaccccgcgcacgctgaaaatgattgaagtggcaggcattccggtggttgaactgatggacagccagtcgccgtgcctcgacatcgccgtggggttcgataactttgaagcggcgcgtcagatgacggcggcgatcatcgcccgcggtcatcgccatgtggcctatctgggtgcgcgtctggatgaacgtactatcatcaaacagaagggatacgagcaggcgatgctcgacgccggtttgaccccgtacagcgtgatggtggagcaatcttcttcttacacgtcgggtattgagctgatgcgtcaggcgcgacgcgagtatccgcaactggacggtattttctgcaccaacgatgaccttgcggtcggcgccgcgtttgagtgccagcgtctgggtttaaaaatcccggatgatatggcgattgccggcttccacggccacgacattggccaggtgatggagccgcgtctggcgagcgtcctgaccccgcgtgaacgcatgggccgcattggcgcagagcgcctgctggcgcgcattcgtggtgaggcagttaccccgaaaatgttagatttaggtttcaccttgtcaccgggtggatctatttaa

SEQ ID NO: 117194 - DNA, 528 bp, Enterobacter cloacae
ttgagcacgactaatcacgatcaccacgtttacgtcctgatgggcgtgtccggtagcggtaaatctgccgtggcgagcgaagtggcgcatcaactccaggctgcgtttcttgatggtgacttcctccatccgcgcagcaacatcatgaaaatggcttccggcgagccgctgaacgacgacgaccgcaaaccgtggttgcaggcgctgaatgacgccgcgttcgcgatgcagcgcaccaataaagtctccctgatcgtctgttccgcgctgaaaaaaacctatcgcgatctgctgcgcgatggcaacccgaacctctctttcatctacctgaaaggcgatttcggggtaattgaaagccgcctgaaggcgcgtaaaggccacttcttcaaaacccagatgctggtcacgcagttcgaagcgttgcaggagccgggtgctgacgaacaggatgtcttagtggttgatatcgatcagccgctggaaggtgttgttgccagcaccatcgaggttattaataaaaggcagtaa

SEQ ID NO: 117195 - DNA, 1341 bp, Enterobacter cloacae
ttgagtacattaacgctagttttgacagcagtgggttccgtattgctgctgctgtttttagtgatgaaggcacgtatgcacgccttcgtggctttgatggtggtttctattggtgccggtctcttttccggcatgccgctcgacaaaatcgcggcgacgatggaaaaagggatgggcggcacgctcggcttcctggccattgtggtggcgctgggcgcgatgtttggcaagattttgcacgagacgggcgcggtcgatcagattgcggtcaagatgctgaaatccttcgggcacagccgtgcgcactacgcgattggtctggccggtctgatttgcgcgctgccgctgttctttgaagtggcggtggtgctgctgattagcgtggcgttctccatggcgcgccatactggtaccaacctcgtgaagctggtcattccgctgtttgcgggcgtggcggctgcggcagcgttcctgctgccggggcctgcgccgatgctgctggcctcccagatgcatgctgactttggctggatgatcctgattggcctgtgcgcggcaattccggggatgattatcgccggtccgctgtggggcaacttcatcagccgctacgttgagctgcacattccggatgacatcaccgagccgcacctgggcgagggcaaaatgccatccttcggcttcagtctgtcgctgatcctgctgccgctggtgctggtgggcctgaaaaccatcgctgcgcgctttgtgccggtggggtcaaccgcttacgaatggttcgaatttattggtcatccgttcaccgcgatcctggtggcgtgtctggtagcaatttacggcctggcgatgcgtcagggcatgccgaaagaccgcgtgatggagatctgtggtgccgcgctgcaaccggcggggattatcctgctggtgatcggggcgggcggcgtgtttaagcaggtgctggtggattccggcgttggtccggcgctgggcgaagcgctgaccgggatggggctgccgattgcggtcacctgtttcgtgctggccgcggcggtacgtatcattcagggctccgcgaccgtagcgtgcttaaccgccgtgggtctggtaatgccggtgattgaacagctgaactactccggtgcgcagatggcggcgctctctatctgtatcgcgggtggctcgattgtggtttctcacgttaacgacgcgggcttctggctgttcggtaaatttaccggcgcaaccgaagcgcaaaccctgaaaacctggacgctgatggaaaccatcctcggcacgacgggtgcggttgtcgggatgattgcgtttacgctgctgagctaa

SEQ ID NO: 117196 - DNA, 594 bp, Enterobacter cloacae
atgagtgaaatcatttccgcagcggttttattgatcctgattatggatccgctcggtaatctgccgatcttcatgtcggtgctgaagcataccgagccgaagcgccgccgggcgatcatgatccgcgagctgctcatcgccctgctggtgatgtttatcttcctgttcgccggtgaaaaaatcctcgctttcctgaacttacgcgccgaaacggtctccatttccggcgggatcattttgttcctgattgctattaagatgattttcccgagcgcggagggcagcagcagcggcctgcctgcgggtgaagagccgtttatcgtgccgctggcaattccgctggtcgccgggccaacgattctggcgacgctgatgctgctgtcgcatcagtatccgaatcagatgagccatctggtgattgccctgctgatcgcctggggcgggacgtttattatcctgttgcagtcgtcgctgttcctgcgcctgctgggtgagaaaggggtaaacgccctggagcgcctgatggggctgattctggtgatgatggcaacgcagatgttcctggacgggatccgggcgtggatgaaagggtga

SEQ ID NO: 117197 - DNA, 1104 bp, Enterobacter cloacae
atgaaaaacgttggttttatcggctggcgcggtatggtcggctctgtactcatgcaacgcatggttgaagagcgcgatttcgacgccatccgcccggtcttcttctccacttcccagctcggccaggctgcaccgtcctttgggggtaccacaggcacgttgcaggatgcttacgatctggaagcgctgaaggcactcgacattattgtgacctgccagggcggcgattataccaacgaaatctatccgaagctgcgtgaaagcggctggcagggctactggattgatgcggcctcttcgcttcgcatgaaagacgatgccatcattattcttgacccggttaaccagagcgtcatcaccgacggcctgaacaacggcgtgaaaacctttgttggcggtaactgcaccgtcagcctgatgctgatgtccctcggcggcctgttcgcacaggatctggtggagtgggtctccgtggcgacctaccaggcggcctccggcggcggcgcgcgtcatatgcgtgagctgctgacccagatgggccagctgcaccagagcgtcgctgccgagctggcagacccggcgtccgccatcctcgacatcgagcgtaaagtcactcagctcacccgcagcggcgagctgccggtggataactttggcgtaccgctggccggtggcctgatcccgtggatcgacaaacagctggataacggccagacccgcgaagagtggaagggccaggctgagaccaacaaaatcctcggcaccgcgaacaccattccggttgacggtctgtgcgtgcgtatcggcgcgctgcgctgccacagccaggcctttaccattaaactgaaaaaagatgtgtctattccgaccgtggaagagctgctggccgcacacaacccgtgggcgaaagtggtgccaaacgatcgcgatatcaccatgcgcgaactgaccccggcagccgttaccggcacgctgaccaccccggttggtcgtctgcgcaagctgaacatggggccggagtacctctccgcgttcaccgttggcgatcagctgctgtggggtgcagccgagccgctgcgccgtatgctgcgccagctggcgtaa

SEQ ID NO: 117198 - DNA, 2187 bp, Enterobacter cloacae
atgtccgatcgtatttcgagagacgtgattaatgcgcttattgcgggtcactttgccgaccccttttctgtgctagggatgcaccgtacagaggccggactggaagttcgggcgctgttaccggatgcaacagaagtgtgggttatcgaacccaaaaccggccgcaaggtgggtaatctggaatgcctcgactcgcgtggcttcttctcgggcgtcatgccccgccgtaaaaatccttttcgttatcagcttgccgttatctggcacggtcagcaaaacctgattgacgatccctatagcttcggcccgctcttaaaagagatggacgcctggctgctgtccgaagggacccatttacgcccctacgaaacgctgggtgcccatgcagataccatggacggtatcaccggcacgcgttttgccgtatgggcgccaaacgcccagcgcgtctccgtcgtcgggcagttcaactactgggacggtcgtcgtcaccccatgcgtctgcgccgggaaaccggcatctgggagctgtttatccccggcgcgcacaacggtcagctctacaaattcgagatgatcgatgccaacggcaagctgcgcattaaatctgacccgtacgcctttgaggcagagctacgcccgaataccgcctcgctgatttgcggcctgccggagaaggttgtccagagtgaggagcgcaagcaggccaaccgctttgatgcgccaatctccgtctatgaagtgcatctcggctcgtggcgtcgccacaccgataacaacttctggctgagctatcgcgagctggcggaccagctggtgccgtacgccaaatggatgggctttacccatctggagctgctgccgatcaacgaacacccatttgacggcagctggggctatcagccaaccgggctgtatgcgcccacgcgccgcttcggcacgcgcgatgacttccgctatttcatcgatgccgcgcacgccgccgggctgaacgtgatcctcgactgggtgccgggccacttcccgtcggatgattttgcgctggcagagttcgacggcacaaagctgtacgagcacagcgacccgcgcgaaggctatcaccaggactggaacacgctgatctacaactacggtcgccgtgaagtatcgaactacctggtcgggaacgcgctgtactggatcgagcgcttcggcattgatgccctgcgcgtggatgcggtggcgtcgatgatctaccgcgactacagccgcaaagagggggagtggatcccgaacgagtatggtggccgtgaaaacctcgaagcgattgagtttctgcgcaacaccaaccgcattatcggcgagcaggtggaaggcgccgtgaccatggcggaagagtccaccgacttcccgggcgtttcccgtccaccggcaatgggtggtctgggcttctggtacaaatggaacctcggctggatgcacgacacgctcgactacatgaagctcgacccggtttatcgtcagtatcaccacgataagctcaccttcgggttgctctataactacaccgaaaacttcatgctgccgctgtcgcacgatgaagtggtgcacggcaagaaatccattctcgaccgcatgccgggcgacccatggcagaagtttgccaacctgcgcgcttactacggctggctgtttgctttcccgggtaaaaagctgctgtttatgggcaacgagttcgctcagggccgcgaatggaaccacgatagcagccttgactggcatctgctggaaggtgcggacaactggcaccacggcgtacagcgtctggtccgtgacctgaacctgacctatcgccaccacaaagcgctgcacgagctggacttcgatccgtacggctttgagtggctggtggtggacgaccacgagcgctcggtgtttgtctttgtgcgccgcgacaaggcgggtaacgagatcattgtcgccagcaacttcacgccggtgccgcgcgaacactaccgcttcggcattaaccagccgggcaaatggcgcgaaattctcaataccgactccatgcactaccacggcagcaacgcgggtaacggtggcctggtgcagagcgatgccattgaaagccacggccgtccgaactccctgagcctgacgctgccgccgcttggcacaatctggctggtgcgggagggtgaatga

SEQ ID NO: 117199 - DNA, 1974 bp, Enterobacter cloacae
atgacgcagcttacggcaggtaaacccgaaccgctcggggcgagttttgacggaaagggggtgaacttcacgctcttttccgcccatgcggagcgggtggaactctgtgtgtttgacggggaaggtaacgagcaccgttacgatttaccggcgcgcacaggggatacctggcatggctacctggccggaggacggccggggatgcactacggttttcgcgtacacggcccctgggagccctctcaggggcactggtttaacccggcgaagctgctgattgacccgtgcgcgcaccgtgtggacggtgagtttaaagatgactcgctgttccacgttggctacggcgaacctgaccaccgcgacagcgcgcccgtcgcgcccaaaagcgtggtggtgcacgatctctacgactgggaagacgatgccccgccgcgcacgccgtggggcaacaccgttatttatgaagcccacgttaaagggctgacatatctgcacccgtcaatccctaaagagatgcgcggcacctacaaagcgcttgggcatccgacgatggtcgcgtacctgaagcacttagggatcaccgcgctggagctgttgcccgtggcgcatttcgccagcgagccgcggctacagcgtcttgggttaagcaactactggggctacaacccgctggcgatgttcgccctcgacccgggctacgcggtgcagccggagaaggcacgggatgagtttcgcgatgcggtgaaggcgcttcacgcggcgggtatcgaggtcattctggacgtggtgctgaaccacagtgcggaaagcgatcttgacggcccgacgctctcacagcgcggaatcgataaccgtagctattattggatcagggacgacggcgattacgagaactggaccgggtgcggtaacaccctcaacctcagtcatccggccgttacgcattacgcgtacgagtgcctgaaatactgggttgagacgttccacgtggacggttttcgcttcgacctggcgccggtgatggggcgcaccccggcgttcagccagcaggcgccgctgtttgaggccatcaaaaactgcccggtgctctcaaaggttaagctgatcgcggagccctgggacatcggagagggcggttatcaggtggggaatttcccgccgctgtttgccgagtggaacgaccacttccgcgatgccatccgccgcttctggctgacgcgcgatctgtcgctgggggagtttgccggtcgctttgccggctccagcgatctcttcaagcgtgacggcaaacgtccgtcggccaccattaacctgctgacggcacacgacggttttacgctgcgcgactgcgtttgtttcaatcagaaacacaatgaggcaaacggcgaggagaatcgcgatgggactaacaataaccatagcttcaaccatggtatagaagggttaggcggaagtctggatgtgatcgagcggcgacgcgccagcgttcatgcgctgctgacgacgcttttgttgtcgcagggcacgccgatgctgctggcgggcgatgagcacggccacagccagcacggcaacaacaacgcctattgccaggacaacaccctgacctggctcgactggggagaagcgaatagcgggctgacccatttcaccgcggcgctgatccatcttcgccagcgcatccccgcgctcaccgccgaccgctggtgggaagagggcgacggaaacgttcgctggctgaataaagacgcgcaaccgttaagcgcgcaagagtggcaacacgccataccctgtctgcaaatcctgctttcggatgcatggctggtgacgctgaacgcgacggatgacgtcgcagagattgttttacctgacggggaatggcgagccattcctccctttgccggagcggataatccggttgttatggctgtctggcacgggcctgcgcacggagtgtgcgtattccaaagatga

SEQ ID NO: 117200 - DNA, 1296 bp, Enterobacter cloacae
atggttagattagagaagaacgatccgttaatgttggcgcgccagctaccattaaaaacagttgccctgatactcgcgggcgggcgtggtacccgtctgaaagatttgaccatcaagcgcgccaaaccggccgttcactttggtggtaagttccgtattatcgattttgcactttccaactgcctgaactcaggcattcgccgtattggcgtcattacccagtatcagtcgcacacgctggtgcagcacattcagcgcggctggtcattcttcagcgaagagatgaacgaatttgtcgatctgctcccggcgcagcagcgcgttcacggggagaactggtaccgcggcacggcggatgccgtgacccagaacctcgacatcattcgtcgctacagcgcggaatacatcgtcatcctcgccggggaccacatctacaagcaagattactcccacatgctgatcgaccacgtcgaaaaaggggcgcgctgcaccgtggcgtgtctgccggtgcctgttgcggaagcaaccgcgtttggcgtgatgcatgtagatggcgatgacaagattatcgactttgtcgaaaaaccggcgaacccgccaaccatgccgggcgacgacaccaaatcgctcgccagcatggggatctatgtctttgatgccgattatctttatgaactgctggaagaggacgacaaagacgaaaactccagccacgacttcggtaaagacatcatcccgaaaatcaccaaagctggcatggcgtatgcacatcccttcccgctgtcctgcgtgcagtcagacccgaatgcggaaccttactggcgcgacgtcggtacgctggaagcctactggaaagcgaacctcgacctggcgtccgtcacgcctgagctggatatgtacgaccagaactggccgattcgcacgcatatggaatcgttgccgccggcgaagttcgttcaggatcgctccggcagccacggcatgacgctcaactcgctggtttctggcggttgcattatctccggttcggtggtggtgcagtccgtgctgttcccgcgcgtgcgtataaactcattctgtaatatcgattcggcagttctgctgccggatgtctgggtagggcgctcatgtcgtctgcgtcgctgcgttatcgatcgtgcctgcatcattcccgaagggatggtgattggggaaaacgcggaagaagatgcgcgtcgtttctaccgttcggaagaggggatcgtgttagtaacacgggaaatgttgcggaagctgcaaatcaaacaggagcgatga

SEQ ID NO: 117201 - DNA, 1434 bp, Enterobacter cloacae
atgcaggttttacacgtatgttctgagatgttcccgttgttaaaaacgggcggcctggcggatgttcttggtgcattaccagcggcgcaaatcgccggaggggtggatacccgcgtgttgttgcccgcttttccggatatccggcgcggtattcccgatgcaaaggttgttacccgtcgcgagaccttcgcgggacgtatcaccctgctgtttggacattacaatggcgtagggatttacctgattgatgccccgtatttatacgatcgacccggcagcccgtatcacgataccaacctgtacgcctataccgataacgtgatgcgctttgccctgctcggctgggtgggggcggaaatggccgtcggactggatccgttctggcgtccgaacgtggtgcacgcgcatgactggcatgcggggctggctcctgcgtatctggcggcgaaggggcacccggccaaatcggtgtttacggtgcacaacctggcgtatcagggcatgtattacgcgcatcatatgaatgacatcgatctgccatggtcgttctttaacatgcacggactggagtttaacggacagatttcgttcctgaaggcgggtctgtactacgccgaccacatcacggcggtcagcccaacctacgcgcgggaaattacccagccggagttcggttacggtatggaagggctgctgcaacagcgccaccgtgaaggtcgcctgtcgggcattctgaacggcgtggatgaacagatctggaatccggaaacggacctcctgctggcggcgcgctatggtcgcgactccgtggaggacaaagcggagaacaagcgccagctacagattgcgatggggctgaaggtcaacgacaaggtgccgctgtttgcggtggtcagccgcctgaccagccagaaagggctggatctggtgctggaagcgctgccgggattactggagcagggcggccagctggcgctgctcggcgcgggcgacccggtattgcaggaaggtttccttgcggccgcggcggaacatccggggcaggtgggcgtgcagattggctatcacgaagcgttctcgcaccgcatcatgggcggcgcggacgtgattctggtgccgagccgcttcgagccctgcggcctgacgcagctctatggtctgaaatacggcacgttgccgctggtacgccgcacgggcgggctggcggatacggtgtctgacagctccctggaaaacctggcggacggtatcgccagcgggtttgttttcgaggacagtaatgcctggtcgctgcttcgggcgatccggcgtgctttcgtcttgtggtcccgtccatccctgtggcgttacgtacaacgtcaggcgatgtccatggactttggctggcacgttgcggcgcagtcctaccgcgacctttatcaacgcttgatgtaa

SEQ ID NO: 117202 - DNA, 2448 bp, Enterobacter cloacae
atgaatgctccatttagctactcttcccccacgctcagcgttgaggcgttgaaacactccatcgcctataagctgatgtttaccattgggaaagatcccgttattgccaacaaacatgagtggctgaacgccacgctgtttgcggtgcgtgaccgtatggtcgaacgctggctgcgctccaaccgcgcccagctttcgcaggagacgcgacaggtgtattacctgtcgatggagtttctgattggtcgcaccctctccaatgcgctgttatcgctcgggatttatgacgacgtcaaaaacgcactggaagagatggggctggatttagaagagctgattgacgaagagaacgacccggggctgggtaacggtggtctcgggcgtcttgccgcctgtttcctcgattcactggcgacgctggcgctgcccgggcgcggctacggtattcgctacgactacggtatgttcaagcagaacatcgtggatggtcgtcagaaagagtctccagactactggctggagtacggtaacccgtgggagttcaagcgccacaacacgcgctacaaggtgcgttttggcgggcgtattcagcaggaagggaaaaaatcccgctgggtggaaaccgaggagatcctcgccgtggcctatgaccagatcatccccggctacgacaccgatgcgaccaatacgctgcgcctgtggaacgcgcaggccagtagcgagatcaacctgggtaaattcaaccagggtgactacttcgcggcggtggaagataaaaaccactccgagaatgtgtcacgcgtcctgtatccggatgactcgacctactcaggccgcgagctgcgcctgcgtcaggagtatttcctcgtctcggcaacgattcaggatatccttagccgtcactatcagctgcacaaaacctatgcgaatctggcggaaaaaaccgccattcacctcaacgatacccatccggtgctgtcgatccctgagctgatgcgcctgctgattgacgagcataagttcagctgggatgacgcgtttgaagtaacctgccaggtgttctcgtacaccaaccatacgctgatgagtgaagcgctggagacgtggccggtggatatgctcggcaaaattctgccgcgccatctgcaaatcatcttcgagatcaacgactacttcctcaagaccttgcaggagcagtacccgaacgataccggtctgctgagccgcgcctcgatcattgatgaatccaacgggcgtcgcgtacgcatggcctggctggcggtggtgatcagccacaaggtgaacggcgtgtcagagctgcactcgaacctgatggtgcagtccctgtttgcggacttcgcgaagatcttcccgacgcgtttctgcaacgtgaccaacggcgtcaccccgcgccgctggctggcgctggcgaaccagccgctctccgacgttctggatgagaacattggccgcacctggcgcaccgatttgagccagttgagcgagctggagcagcacattgatttcccgacggtgaataaagcggtacgggaagccaagctgctgaacaagaagcgtctggcggtctggctggcgatgcatctgaacgtggtggcgaacccgaaagcgctgttcgacgtgcaaatcaaacgtatccacgagtacaagcgtcagctgatgaatgtcctgcacgttattacccactacaaccgcattaaggctgacccgacggcggagtgggtgccgcgcgtgaaaatctttgccggtaaggcggcgtccgcgtactacatggcgaagcacatcattcatctcatcaacgatgtggcgaaggtggtgaaccacgatccggacattggcgataagctgaaggtcgtgtttatcccgaactacagcgtgagcctggcgcagctgattattccggcggcggatctctctgagcagatttccacggcggggacggaagcatccggcaccagcaacatgaagtttgccctgaacggcgcgctgactatcggcacgctggacggcgcaaatgtcgaaatgctggagcatgtgggcgcggagaatatctttattttcgggaatacggcggaagaggtggaggcgctgcgcaagcagggctactcgccgcgtgagtattatgaagaggatgacgagttacgccaggtgctgacgcaaatcgccaccggcgtgtttaaccctgaggagcccggacgctatcgcgatctggtggactcgctgattaactttggcgatcactatcaggtgctggcggattaccgcagctacgtggattgtcaggataaggtggacgaactgtaccgtcagcaggagaagtggaccagcgccgcgatgcataacatcgccaacatgggatacttctcgtcggacaggaccatcaaagagtatgccgagaatatctggcatattgatccggtgcggttgtaa

SEQ ID NO: 117203 - DNA, 1509 bp, Enterobacter cloacae
atggaaaccaaagatctgattgtgataggcggtggcatcaacggtgccggtattgcggttgatgccgcaggacgcggtttatccgtgctgatgctggaagctaacgatctcgcctgcgcgacgtcgtccgccagctccaagctgatccacggtggcctgcgctacctggaacactacgaatttcgcctggtcagcgaagcgctggctgaacgcgaagtactgctgaaaatggctccgcatctggcgatcccgatgcgtttccgtctgcctcatcgcccgcatctgcgtccggcgtggatgatccgcattggtctgtttatgtacgatcatctgggtaaacgcaccagcctgccgggttcgacaggtttgcgttttggctcagagtcggttcttaaacctgaaatcgtgcgcggtttcgaatattccgactgctgggtggacgatgcgcgtctggtgctggctaacgcgcagatggtcgagaagaaaggcggcgaggtgaaaacccgtacccgcgcgaccgccgcacgccgcgaaaacggcctgtggattgtggaagcggaagacgtggataccggtgagaagtttagctggaaagcgcgcggcctggtgaacgccaccggcccgtgggtaaaacagttcttcgatgacggtatgcacctgccttctccgtacggcatccgcctgatcaagggcagccacattgtggtgccgcgcgtgcatacccagaaacaggcttatatcctgcaaaatgaagacaagcgcattgtgtttgtgatcccgtggatggacgagttctccatcatcggcaccaccgacgtggagtacaaaggcgatccgaaaaacgttgagatcgacgagagtgaagtcagctacctgttgaaagtgtacaacgcgcactttaagaaacagctggcgcgcgatgacgtggtctggacctactccggcgtgcgtccgctgtgtgatgacgagtctgactcaccgcaggccatcacccgtgactatacgcttgatattcatgacgtggacggtcaggcgcccctgctgtcggtatttggcggtaagctcaccacctaccgtaaactggcggagcacgcgctggagaaactggcgccgtattacaaaggcatcggcccggcgtggacgaaaggcgccgtgctgcctggcggcgatatcggcgataaccgcgacgattacgccgcgaagctgcgtcgccgcttcccgttcattaccgaaggaatggcgcgccactatgcccgtacctacggcagcaacaccgaactgttcctcggcgaggcgaaagagattgccgatctgggcgagcattttggccatgagctgtacgaagcggaactgcgctatctggtggaacacgaatgggtgcgccgtctggacgatgctatctggcgtcgtactaaagaagggatgtggctgaatgccgagcagcagtctcgcgtggcgcaatggttgcaacaacatgcgggaaagcgtgaattgtcgttggcgtcgtaa

SEQ ID NO: 117204 - DNA, 333 bp, Enterobacter cloacae
atggatcagtttgaatgtattaacgtagaagaagcccatcagaagatgcaccagggacaagcggtgctggtggatatccgcgatccgcagagctttgcgatgggccacacgccgggcgcgttccatctcaccaacgacacgctgggcgcgtttatgcgcgataacgacttcgataccccggtgatggtgatgtgctatcacggcaacagtagtaaaggcgcggcgcagtatctgctccagcagggttacgacgcggtgtacagcgtcgatggcggcttcgatgcctggcatcgtcatttcccggcagaagttgaatacgcgtttgagcgctga

SEQ ID NO: 117205 - DNA, 831 bp, Enterobacter cloacae
atgttgatgatcacctcttttagcaacccgcgcgtcgcccaggcgtttgtcgactatatggcgacgcagggcattatcctgactattcagcagtatacacagacggatgtctggctggcagacgaaagccaggccggccgcgtgaatgacgagctggcgcgttttctggaaaacccgggcgacccgcgttatctggcggcaagctggcaatccggccagaccggcagtggcctgcactatcaacgttttccgtttctcgccaccctccgcgagcgcgcagggccgtttacgctgcttttgatggcagcctgcatcatcgtcttcattattatgagcgtggtgggcgaccagagcgtgatgattgccctcgcatggccgtacgatccctccctgcaatttgacgtctggcgctacttcacgcatgcgctgatgcacttctcggtgatgcatatcctctttaacctgctgtggtggtggtatctcggcggggcggtggagaagcggctcggcagcggcaagctgattgtgatcacccttatcagcgccctgttaagcggctacgtgcagcacaaattcagcggtccatggtttggcgggttatccggcgtggtgtacgccctgatgggttacgcctggctcagaggcgagcgcgacccggatagcggcatctatttacaacgtggattaataacctttgcgttaatatggcttattgccggatggtttgatctgtttggtatgtctatcgccaatggtgcgcacgttaccggcctggcggttgggctggcgatggcgctggccgatacgctccatgcgcgaaaacgaacataa

SEQ ID NO: 117206 - DNA, 759 bp, Enterobacter cloacae
atgaaacaaacacaacgtcatgacgccattatcgaactggtaaaaaaacagggatacgtcagtactgaagagctggtggagcagtttgccgtcagcccgcaaaccatccgtcgtgacctcaacgacctggccgatcagaaccgtattctgcgtcaccacggcggcgccgcgctgccgtccagctcggtgaacacctcatggcatgaccgtaaggcgacgcaaacggcagagaaagagcgtatcgcccgtaaagtggcgagccagatcccgaacggcgcgacgctgtttattgatatcggcaccacgccggaagcggtcgcccatgcgctgctgaaccacgagaacctgcgcgtggtgaccaacaacctgaacgtggccaacacgttgatgcagaaagacgatttccgcatcatcctcgcgggcggcgaactgcgtagccgcgacgggggcattatcggcgaagcgacgctcgattttatctctcagttccgcctcgacttcggcattctggggatcagcggcatcgacagcgacggctcgctgctggagtttgattaccacgaggtgcgcaccaagcgcgcgatcattgaaaactcacgtcacgtgatgctggtggtggaccactccaaatttggccgtaacgcgatggtcaacatgggcagcatcagcatggtggatgcggtttacaccgacgtaatgccgccggcgggcgtgatgcaggtaattaaggataacaatttgcagctggaattgtgctag

SEQ ID NO: 117207 - DNA, 2706 bp, Enterobacter cloacae
atgttgattccgtccaaattaagtcgcccggttcgtcttgaccatactgtggtccgcgagcgcctgctggctaaactttccggtgcgcataatttccgactggcgctggttacgagtcctgcgggttatggaaaaacaacgctcatttcgcaatgggcggcaggtaaaagcgatcttggctggtactccctggatgaaggggataaccagcaggagcgttttgccagctatttaattgccgcgattcagcaggcaaccaacggacactgcgtcaccagcgaggtgatggtgcaaaagcgccagtacgccagcctgtcctctcttttctcccagctgtttatcgagctggccgaatggcatcgcccgctgtatgtggtgattgatgattatcatctgatcaccaacccggttattcacgagtccatgcgtttcttcctgcgccatcagccggaaaacctgacgctggttgtcctgtcgcgtaaccttccgcagttgggcattgccaacctgcgcgtgcgcgatcagctgctggaaatcggcagtcagcagctggcctttacccatcaggaagcgaagcagttctttgactgccgcctgacgtctccgattgaggcgtcggaaagcagccgcctgtgcgatgacgttgccggctgggccacggcgcttcagctgattgccctctccgcgcggcaaaacaacagcccgacgcatcagtccgcacgccgcctggcgggcatcaacgccagccacctgtcggattatcttgtggatgaggtactcgacagcgttgacctctccacccgccatttcctgctgaaaagctccctgctgcgttccatgaacgatgcgctgattgtacgcgtcaccggcattgaaaacgggcagcttcagctcgaagagattgaacgtcagggtctgttcctgacgcgcatggacgatcccggcgaatggtttagctaccatccgctgtttggcagcttcctgcgccagcgttgccagtgggaactggccgcagagctgcctgacattcaccgcgccgccgccgaaagctggatggcgcaaggtttcccgagcgaagctatccaccatgcgctggccgccggggatgccggtatgctgcgcgatattctgctcaaccacgcgtggggactgttcaaccacagtgaactgacgctgctggaagagtcgttaaaagcgctgccgtgggaaagcctgctggagaatccgcgtctggtgctgctccaggcctggctgatgcagagccagcatcgctacagcgaagtgaacaccctgctggcgcgcgccgagcaggagatggaaagtgagatggataccaccctgcatggcgaatttaacgccctgcgtgcgcaggtggcgattaacgacggtgaccctgaggaagccgaacggctggcgatggtcgcgctggatgagctgccgctggcgaatttttacagccgtattgtggccacctcggtacacggcgaagtgctgcactgtaagggcgatctcacgcgttcgctttcactcatgcagcaaaccgaacagatggcgcgccgccacgatgtctggcattacgccctctggagcctgatccagcaaagcgagattttatttgctcagggattcctgcaagccgcctgggaaaatcaggagaaagcgttccagctgatccgtgaacaacatctggaacagctgccgatgcacgagttcctgttgcgtattcgcgctcagctgctgtgggcatggtcgcgtctggatgaagcagaaagctgtgcccgccagggtctgaatgttctttcaagcttccagccgcagcagcagctccagtgtctggctctgctggtgcagtgctcgctggcgcgcggcgacctggataatgcccgcaaccatcttaaccgcctggaaaacctgctcggcaacgggcagtaccatagcgactgggtgtccaacgccgataaggtgcgggtgatttactggcagatgaccggcgataaaaagtccgccgccaactggctgcgtcatacgcctaaaccggaatttgccaataaccacttcctgcaaagccagtggcgcaacatcgctcgcgtgcagatcctgctgggtgactttgagcctgccgagattgtgctggaagagttaaacgaaaacgcccgcagcctgcgcctgatgagcgatttaaaccgcaacctgctgctgttaaaccagctttactggcaggcgggccgtaaaaacgatgcccagcgcgtactgctggaagcgttacagctggcgaaccgcaccgggtttatcagccactttgtgattgagggtgaagtgatggcccagcagctgcgccagctgattcagctcaacacactgccagaactcgatcagcatcgcgcccagcgcattctgcgcgagattaaccagcaccaccgccacaagtttgcgcacttcgatgagaactttgttgaacgtctgctgaaccatccggaagtgccggagcttatccgcaccagcccgctcacccagcgtgaatggcaggtgctggggctgatctattccggctatagcaacgagcagattgccggtgagctggcggtggcggcgaccaccatcaaaacgcacattcgcaatctgtatcagaagctgggcgtagcgcaccgacaggatgcggtgcagcatgcgcagcagctgttgaagatgatgggatatggagtgtag

SEQ ID NO: 117208 - DNA, 2394 bp, Enterobacter cloacae
atgtcacagcctactttcaacaaagctcaatttcaggctgccctgacgcgtcagtggcagcgttttggccttcatgctgcaaacgaaatgacgcctcaccagtggtggcaggcggtgagcggggcgctcgcagagcagctggacgctcagcctgtgacgaagcccgtgaaaggccagcgtcacgtcaactacatttcaatggagttcctgattggccgtctgacgggtaacaatctgctgaaccttggctggtatcaggaggtcggtgacgtgctgaaagaacacgacatcaacctgaccgatctgctggaagaagagattgatccggcgctgggtaacggcggtctgggacgtctggcagcctgcttcctggattccatggcaaccgtgggccagtcggcgattggctatggcctgaactatcagtacggcctgtttcgtcagtcatttgccgacggccatcagatggaagcgccagacgactggcaccgcaatacctatccgtggttccgccacaacgcgcagctggatgtgcaggtcgggattggcgggaaagtcacgaagcagggactctgggaaccggcgttcaccattaccggtgaagcctgggacctgccggtactcggctaccgtaacggcgtggcgcagccgctgcgcctgtggcaggcgaagcacgcgcatccgtttaacctgaccaaattcaacgacggtgatttcctgcgcgccgagcagcaggggatcgacgccgagaagctgaccaaagtcctctacccgaacgataatcatctggcgggtaaaaagctgcgtctgatgcagcagtacttccagtgcgcctgctccgtggcggatattctgcgtcgccaccacctggcgggccgcaagctggctcagctgccggacttcgaagttattcagcttaacgacacgcatccgaccattgccatcccggagctgctgcgcgtgctgatcgacgagcatcagctgagctgggacgacgcctgggccatcaccagccgcaccttcgcctacaccaaccacaccctgatgccggaagcgctcgagtgctgggatgagaagctggtgaaaacgctgctgccgcgccatatgcagatcatcaacaagattaacgaccagttcaaaacgctggtggagaaaacctggccgggcgataaggccgtctgggcgaagctggccgttgtgcacgacaagcaggtgcgcatggcgaacatgtgcgtggtcagcggctttgcggtgaacggcgttgccgcgctgcactcggatctggtggtgaaagatctcttcccggaataccaccagctgtggccgactaagttccataacgtgaccaacggcatcacgccgcgtcgctggattaagcagtgcaacccgctgctggccggcctgctggacaagaccctgaagaaagagtgggccaacgacctggaccagctcatcaacctggaaaaacaggccgacaacgcgaagttccgcgagcagtaccgcgccattaagctggagaacaaggttcgtctggccgagtttgtgaaaatgcgcaccggaattgagatcaacccgaatgcgattttcgatatccagatcaaacgactgcacgagtacaaacgtcagcacctgaacctgctgcacattctggcgctgtacaaagagatccgcgagaacccgcaggccgaccgcgtcccgcgcgtgttcctgttcggtgcgaaagcggcgccgggctactacctggcgaaaaacattatccttgccattaataaagtggcggcggcgatcaacagcgatccgaaagtgggcgacaagctgaaggtggtgttcctgccggactactgcgtttctgcggctgaaatgctgatcccggcggcggatatttccgagcagatctctaccgccggtaaagaagcgtccggtaccggcaacatgaagctggccctgaacggcgcgctgaccgtcggcacgctggacggtgcgaacgtcgaaatcgccgagaaggtcggcgaagagaacatctttatcttcggccatactgttgaagaagtgaaagccatcaaagccaaagggtacgacccggtgaaatggcgtaaaaaagataaagtgctggatgcggtgctcaaagagctggaaagcgggaagtacagcgacggcgacaagcacgcgtttgaccagatgctgcacagcatggacaaacagggcggcgacccgtacctggtgatggctgacttctcggcttacgttgaagcgcagaagcaggtcgacgtgctgtatcgcgaccaggatgcctggacccgcgcgtgtatcctgaacaccgcgcgctgcggtatgttcagctctgaccgctcaatccgtgattatcaggctcgtatctggcaggcaaaacgctaa

SEQ ID NO: 117209 - DNA, 2079 bp, Enterobacter cloacae
atggagagtaaacgtctggacagtgccgcgcaggcggcgggaattagcctcagttacatcaatgcgcacggcaaaccgcagtctattggtgcggacaccaaaagacgtttgctggatgccatgcacaaaaccgacgcgaaagcgtcgggtgcgccggtgccgaacgtcaaggtctttaccgcgggcaaaaagatgccgctggcggtggaagggcgcggcgagttcagctggctgctcaccaccgaagaggggcatcagcacaaaggccatgccaccggcggcaaaaccctcaaccttccggcgaagctgccggagggctaccacacgcttacgctgacccgggacgaccagcgttttcactgtcgggtgattgtggcgccaaagcgctgctatgagccgcaggcgctgcgtgaaggcaaaaagctgtggggcgcctgcgtgcagctctataccctgcgttcggacagcaactggggcattggcgattttggcgacctgaaaaagatgctggcatctgttggtgagcgcggcggcgcgttcatcggcctcaacccgatccacgtcctctatccggcgaatccggaaagcgccagcccgtacagcccgtcttcccgtcgctggctgaacgtgatttacatcgacgttaacgcgttagacgatttcaaaaacagcaaagaggcgcaggcgtggtggaagcttgagaccacgcaacagctgctgaaacaggcccgcgatgcggactgggttgattacgcctccgttaccgcgctgaaaatggcggctctgcgtctggcctggaagggctttgcgaagcgtgacgacgagcagatggcagccttccgccagtttgtgatgcaggaaggtgagagcctttactggcaggcagcgtttgatgcgctgcatgcgtatcaggttcaggaggacgagatgcgctggggctggccggtgtggccggaagcctatcagtccgttgataccccggaagtgaaggcattctgtgagacgcatgccgacgaggtggatttctatctctggttgcagtggctggcgtacagccagtttgccgcctgctggcaggtgagccagggctataacatgccgatcgggttgtatcgcgatctggctgtcggcgtggcggaaggcggggcggaaacctggtgtgaccgtgaactttactgcctgaaagcttctgtgggggcgccgccggatattctgggcccgcttggtcagaactggggcttaccgccgatggatccgcacgtgatggcggcgcgtgcctacgagccgtttatcgacctgctgcgcgctaacatgaagaactgcggtgcgttgcgtatcgaccacgtgatgtccgtgctgcgcctgtggtggatcccgtacggtgaaacggctgaccacggggcgtacgtgcagtatccggtggacgatctgctctcaatcctcgcgctggagagtaaacgtcatcagtgcatggtgattggcgaagatctcggtaccgtgccggtggaaattgtcagcaagctccgcgacagcggggtttactcctacaaagtgctctattttgaaaacgaccatgagaaaaccttccgcgcgccgaaagcgtaccctgaacagtcaatggcagtcgcgacgacgcatgatcttcctacgctcagaggctactgggaaagcggcgacctgacgctcggcaaaacgctgggtctctacccggatgaagaggttctgcgtgggctgtatcaggatcgcgagctggcgaagcaggggctgctggatgcgctgcataagcatggctgtctgccgaagcgcgccgggcataaggcgtcgctgatgtcgatgacgccaacgcttaaccgtggcttacagcgctatattgccgacagcaacagcgcgttgctcggtctgcaaccggaagactggattgatatggcggagccggtaaacatccccggcaccagctatcagtacaaaaactggcgtcgcaagctgtccacaacgcttgaagcgatgtttgccgatgacggggtgaacaggttgattaaggatttggataaacggcgaaaagcagccgcgaagaagtga

SEQ ID NO: 117210 - DNA, 1317 bp, Enterobacter cloacae
atgccattagtcatcgtcgctatcggtgttgtgttattactgctcttgatgatccgcttcaaaatgaacggatttatcgctctggttctggtggcacttgcagtcggtctgatgcagggaatgccgctggttaaagttatcagctccattaaagccggtgtcggcggtacgctcggcagcctggcgctgatcatgggcttcggcgccatgctcggtaaaatgctcgcggactgcggtggcgcacagcgtattgccaccacgctgatcgacaaatttggtaagaagaacattcaatgggcggtggtgttaaccggttttaccgtcggtttcgcgctgttctatgaagtgggcttcgtgctgatgctgccgctggtgttcaccatcgccgctgccgccaacatcccgctgctgttcgtgggtgtgccgatggctgcggcgctgtccgtcacccacggtttcctgccgccgcacccgggcccaacggctatcgccaccatcttccatgccgatatgggtaaaaccctgctgtttggtacgattctggcgatcccgacggtgattctggcaggcccggtgtatgcgcgcttcctgaaaggcattgataagcctatcccggaagggctgtacagcgccaaaacctttactgaagaagagatgccaggctttggcgtcagcgtctggacctcactggtaccggtgatcctgatggcgatgcgtgccatagcagagatggttctgccgaaaggtcacgcgttcctgtccgttgcggagttcctgggcgacccggtgatggcgacgctgattgcggtcctgatcgccatgttcaccttcggtcttaaccgtggccgttccatggatcagatcaacgacacgctgacttcttccatcaaaatcattgccatgatgctgctgatcatcggcggtggcggcgcgttcaagcaggtgctggtcgacagcggcgtggataaatacatcgctgccatgatgcatgaaaccaacgtctccccgctgctgatggcatggtctatcgccgcggtgttgcgtatcgcgctgggctctgcgaccgttgcggcgattaccgcgggcggtatcgttgcgccgctgattgcgaccacgggcgtaagccctgagctgatggttatcgcggttggttccgggagcgtgattttctcccacgtgaacgatccgggcttctggctgttcaaggagtacttcaacctgaccatcggtgaaaccatcaagtcctggtccgcgctggaaaccattatttcggtgtgcggtctggtcggggtgctgctgttgaatatggtggtttga

SEQ ID NO: 117211 - DNA, 576 bp, Enterobacter cloacae
atgatccgtatttccgattctgcacaagcgcactttgccaaactgctggcaaatcaggaagaagggacgcagatccgcgtgtttgtgatcaatccaggcactccgaatgcagaatgtggtgtctcttattgtcctccggatgctgtggaagcaactgacactgcccttaaatttgaacagctcaccgcgtacgttgatgagctgagcgcgccgtatcttgaagatgcggagattgatttcgtcactgaccagctgggttctcagctgacgctgaaggcgccaaacgcgaagatgcgtaaagtttctgacgatgccccgctgatggagcgtgtggaatatctgctgcaatcgcagatcaacccgcagctggccggccacgggggacgtgtttccctgatggaaatcaccgaagatggtctggcgatcctgcaattcggcggcggctgtaacggctgctccatggttgatgtaaccctgaaagaagggatcgagaagcagctgctgaacgaatttccggaactgaaaggcgtgcgcgatctgaccgagcaccagcgcggcgagcactcttactactga

SEQ ID NO: 117212 - DNA, 681 bp, Enterobacter cloacae
atgctaacagtgcccggcttgtgctggctatgccgaatgccacttgcgatgagcgcgtggggcgtctgttccgtttgtacgcgagcactgggttacctgaagggctgtacgcaatgcggcttgcctgccgtaagccagacgctcccctgcggccgttgcctgaaaaaagcgccgccgtggagcgcgctggtggcggtggatgattacgttttgccgctgagtcgtctggttcatcagtttaagttttccagccagactgcactggcgcagcccctggcacgcctgttgttactggcggtattacaggcgcgaagaacgcgcgggctgccgccggtcgacacgcttgtgaacgtgccactgtttcagcgtcggcactggcggcggggatacaatcagagcgacctgctgtgtcgtccgcttgcccgctggctgggttgccggtaccccgcctctgcgctgaaacgtactcatgccactgccgttcagcaccggctcaacgcccggtcgcgcaaaaggaacctgaaaaacgcctttcgccttgaattgccggtcaacggcctccatatcgcgattgtggatgatgtcgtcaccacgggcagtaccgtggctgaactttcccgactgcttttgcaaagcggcgccgcgtcagttcaggtatggtgtctgtgccgtaccttgtag

SEQ ID NO: 117213 - DNA, 783 bp, Enterobacter cloacae
atgaagacgctgtggtggcagaccgttgggacgggaaattgtcatcttgtgctgctgcacggatggggactgaacgccgaagtgtggcgttgcataagtgaggaactggcctcgcaattcacggtacacctggtggatctaccgggctatggccgcagccacggctacggcgcgatgacgctcgacgacatggcggagcaggttctggaagcggcgccgcaaaaagccgtctggctcggctggagcctgggggggctggtggcaagccagattgcgctgcgccatcctgagcgggtccaggcgctgatcaccgttgcctcatcaccctgtttcagcgcccgcgaggcgtggccgggcatcaaacctgaggtgctggccgggttccagcatcagctgagcgaagacttccagcggacggtggagcgtttcctggcattacagacgatgggaacagaaaccgcccgtcaggatgcgcggacgctgaagcagacggtgctttctctgccgatgccggaggttgaggtgctgaacggagggctggaaatcctgaaaacggtcgatctgcgcgagccgctggcgtcgttaacggtgccgcatctgcgtatttatggctatctggatggactggttccgcgcaaggtggttccgctgctggatgcgctgtggccggagagtaaatcaatggtggttgccaaagcggcacatgcgccgttcatctctcatcctgctgagttttgttcggcgctgtccggttttatcagcgaagcgtccaccactccctga

SEQ ID NO: 117214 - DNA, 237 bp, Enterobacter cloacae
atggcatcgttgattcaggttcgtgacttactggcgttacagggacgaatggaggcgaagcagctcagcctcagcctgcatacgccgcagccgatgatcgatgccatgctggaaaggctggaggccatggggaaagccgtgcgcattcaggaagagccggacggttgtctgtccggcagttgtaagagttgtcctgaaggtaaagcttgtctcagggagtggtggacgcttcgctga

SEQ ID NO: 117215 - DNA, 2319 bp, Enterobacter cloacae
atgaaaaaattaactattggcttaattggcaatcctaattccggcaagacaaccttatttaatcagttaactggcgcacgccagcgtgtgggaaattgggcaggcgtgacggttgaacgcaaagaaggccagttcaccacgacagataatcaggtcacgctggttgatttaccggggacctattccctcaccacgatttcatcccagacctctctcgatgagcaaattgcctgccactatattctgagcggcgacgcggatctgcttatcaacgtggtggatgcctctaacctcgaacgaaatctgtatctcacgttacagctgctggagctgggtattccctgcatcgtggcgcttaacatgctcgacatcgcggagaagcaaaagctgcgcatcgacgtcgatgccctctccgcccgtctgggctgcccggtggttccgctggtttccacccgcgctcgcggcattgacgccctgaagctggcgattgaccgccacacgggcaatgccgacgtcgaactggtgcactacgcccagccgctgctgcgcgaagccgggcagctggcgcaggagatggataacagcatgcccgccagacaacgtcagtggcttggcctgcaaatgctggaaggcgatatctacagccgcgcctacgcaggcgatgcggcggataagctggatgtcgcacaggctcgccttagcgacgagctggatgacccggccctgcacattgcggatgcgcgctatcaggccatcgccgctatctgtgacgtggtcagcaatgcattaaccgctgaacccagccgcttcaccgccgccgtggataagattgtgctcaaccgcttcctcggtttaccgatctttttactggtgatgtatgtgatgttcctgctcgccattaacatcggcggtgcattacaacctatctttgatggcggctctgtcgctatcttcgtgcacggtcttcagtggctgggctacaccctccacttcccggaatggttgaccatcttccttgcgcaggggatcggcggcgggatcaataccgtcctgccgctggtgccgcagatcggcatgatgtacctgttcctctccttccttgaggattccggttacatggcgcgcgccgccttcgtgatggaccgcctgatgcaggcgctggggctgccgggcaaatccttcgtgccgctgattgtcggctttggctgtaacgtgccgtcagtcatgggcgcgcgtacgctggatgccccgcgcgaacgcctgatgaccatcatgatggcgccgttcatgtcctgcggcgcgcggctggcgatcttcgcggtctttgccgcggcgttctttggtcaggaaggggcgctggccgtcttctccctgtatgtgctgggtatcgtgatggctattctcaccggcctgatgctgaagcacaccatcatgcgtggcgaagcgtcgccgttcgtgatggaactgccggtttatcacgttccgcatctgaaaagcctgattattcagacatggcagcgcctgaagggcttcgttctgcgcgccggtaaggtgattgtggtggtcagcattttcctgagcgccctgaacagcttcactctgagcggccaggccgcggacaacattaatgactctgccctggcctccgtcagccggatcattacgccggtcttcaaaccgattggcgttcaggaagacaactggcaggcaaccgtgggcctgttcaccggcgcgatggcaaaagaggtggttgtcggcaccctgaacacgctttacaccgcggaaaacatccaggaagaggagtttaatccggcagcgttcaacctcggcgatgaactgcttggcgcggtggaagaaacctggcagagcctgaaagacaccttcagcctgagcgtactggcgaacccgattgaagccagcaaaggcgacggcgaaatggcgaccggagcaatgggcgtgatgggccagaaatttggcagcgcgtcggcggcctacagctacctgatcttcgtcctgctctatattccgtgcatctcggtcatgggcgccattgcccgtgagtccagccgcggctggatgggcttctccattctgtgggggctgaacattgcctactcgctggcgaccgtgttttatcaggccgtcaattacagccagcatccgcgctacagcctggtctgtatcctcgcggtgatcctgtttaacgtgatggtgattggcctgctgcgccgggcgcgtagccgcgttgacgttaacctgctggcaacgcgcaaaaccccgacgacctgctgtagcagccctgcgggcgactgtcactga

SEQ ID NO: 117216 - DNA, 228 bp, Enterobacter cloacae
atgcaattcactccagacagtgcgtggaaaattatcggttttacccgtgagataagcccggcctatcggcagaagctcctgtcactgggcatgctacccggctcatcattccaggttgtgcgcgttgcgccgttgggcgatccagttcatatcgaaacccgacgcgttaatctggttctgcgtaaaaaagatctcgcattaattgaaattgaatctttatcccgttaa

SEQ ID NO: 117217 - DNA, 2331 bp, Enterobacter cloacae
atgatgaaagagtcgctctgccgcattattgcgggtgaacttcaggccagagccgaacaggtagaagctgccgttcgcctgcttgatgaagggaacaccgtgccgtttattgcacgttatcgtaaggaagtcaccggcggtctggatgacacgcagctgcgaaacctggagacccgtctgggctatcttcgcgagctggaagaccgacgtcaggcgatcctcaaatctatcggcgagcagggcaagctgaccagtgacctggaaaaagccattaacggtaccctgagtaaaaccgagctcgaagacctctatctgccgtacaaaccgaagcgccgcacgcgcgggcagattgcgatcgaagccggccttgagccactggccgatctgctgtggaacgagccgtctcacgatccggaaaccgaagccgccaaatttatcgacgccgataaaggcgtagcggacaccaaagctgcgctggacggcgcgcgctatattctgatggagcgcttcgccgaagacgcggcgctgctggccaaagtgcgtgattacctgtggaagaacgcgcatatcgtctccaccgtggtgtccggcaaagaggaagaaggcgcgaaattccgcgactacttcgatcaccacgaacccatttctaccgcgccgtctcaccgcgcgctggcgatgttccgcggccgtaacgaaggcgtgctgcaactctccctgaatgccgatccacagtttgacgagccgccaaaagagagccactgcgagcagatcattatcgaccatctgggcctgcgcctgaacaacgccccggcggacagctggcgcaaaggcgtggtgagctggacctggcgcatcaaggtgctgatgcacctcgaaaccgagctgatgggcaccgtgcgcgagcgcgccgaagacgaagcgatcaacgtcttcgcccgtaacctgcacgacctgctgatggcggcgccagctggcctgcgcgccaccatgggtctcgatccgggtctgcgtaccggcgtgaaggtggccgtggttgacggcaccggcaagctggttgccaccgacaccatttacccgcacaccggtcaggcagcgaaagcggctgtcgtcgtcgccgcgctgtgcgagaagtacaacgttgagctggttgccatcggtaacggtacggcgtcccgagaaactgaacgtttctatctcgacgtgcagaagcagttcccgaaagtgacggcgcagaaagtgatcgtcagtgaagcgggggcatctgtctattccgcctcggaactggcagcgcaggagttcccggatctggacgtttccctgcgcggcgcggtctctatcgcccgtcgtttgcaggatccgctggcggagctggtgaagattgacccgaaatccatcggcgtgggccagtatcagcacgacgtgagccagacgcagctggcgcgtaagctggatgcggtagtggaagactgtgttaacgccgtcggcgtggacctgaacaccgcttccgtgcccctgctgacccgcgtggcgggcctgacccgtatgatggcgcagaatatcgtcgcctggcgtgatgaaaacggtcagttccagaaccgccagcagctgctgaaggtgagccgtctggggccgaaagcatttgagcagtgcgcgggcttcctgcgcatcaaccacggcgataacccgctggatgcctctaccgttcacccggaagcctatccagttgtcgagcgtatcctggccgccacccggcaggcgctgaaagacctgatgggcgacagcagcgcgctgcgtaacctgaaagcggtggatttcaccgacgaacagttcggcgtgccgacggtcaccgacatcatcaaagagctggaaaaaccgggccgcgatccgcgtcctgagtttaaaaccgcgacctttgctgagggcgtagaaaccatgaacgacctgctgccgggcatggtgctggagggggcggtaaccaacgtcaccaactttggcgcgtttgtggatatcggcgtgcatcaggatggtctggtgcatatctcttccctcgccgacaagttcgttgaagatccgcacaccgtggtcaaagcgggcgacatcgtgaaggtgaaagtgctcgaagtggatctccagcgcaagcgtattgccctgaccatgcgtctggacgagcagccgggcgacactaacgcgcgccgtggcggtaatggcggtggccgtgaacagcagcgtccggcagcgaaagccgcgaagccacgcggacgtgacgcacagccggcgggcaacagcgcgatgatggatgcgctggcagcggcgatgggtaagaaacgctaa

SEQ ID NO: 117218 - DNA, 474 bp, Enterobacter cloacae
atgaaaacgcctctgatcacccgtgaagggtacgagaaactcaaaaaagagatggattacctgtggcgcgaagagcgtccggaagtgaccaaaaaagtcacctgggcagcaagcctgggcgaccgcagcgagaatgcggactaccagtacaataaaaagcggctgcgcgaaatcgatcgccgggtacgctacctgacgaagtgcctcgagaatctcaaaattgtcgattactccccgcagcaggaaggtaaagtcttcttcggcgcgtgggtcgaaattgaaaacgacagcggcgacaccctgcgttttcgtatcgtcggctacgatgaaattttcggtcgtaaggattacatttctatcgactcacccatggcccgcgccctgctgaaaaaagaggtaggcgatttagccgttgtccagacgcctgcgggtgaagcaagctggtacgtcaacgaaatcgagtatgttaaatag

SEQ ID NO: 117219 - DNA, 720 bp, Enterobacter cloacae
atgcaagagaactacaaaattctggtcgtagatgacgacatgcgcctgcgtgcgctgctggaacgttatctgaccgagcagggcttccaggttcgtagcgtcgcgaacgcggaacagatggatcgtctgctgacgcgtgaatccttccacctgatggtgttggacctgatgctgcctggcgaagatgggctctctatttgccgccgtctgcgcagccagagcaacccgatgccgatcatcatggtgacggcgaagggtgaagaagtcgaccgcattgtcggccttgagattggcgctgatgactacattccaaagccgttcaacccgcgtgaactgctggcgcgtattcgcgccgtgctgcgtcgtcaggcgaacgagctgccgggcgcgccgtctcaggaagaggccgtcattgcattcggtaagttcaagctgaacctcggcacccgtgaaatgttccgtgaagatgagccaatgccgctcaccagcggtgagtttgcggtgctgaaagcgctggtcagccacccacgtgagccgctctcccgtgacaagctgatgaacctggcgcgtggtcgtgaatactccgcgatggagcgttctatcgacgtgcagatctctcgtctgcgccgtatggtggaagaagatccggcgcatcctcgttatattcagaccgtgtggggtctgggctacgtgtttgtcccggacggctctaaagcatga

SEQ ID NO: 117220 - DNA, 1347 bp, Enterobacter cloacae
atgaggcgaatgcgcttctcgccgcgaagttcgtttgcccgcacgctgttattgatcgtcaccctgctgtttgtcagcctggtgacgacctacctggtggtgctgaactttgcaatcctgccgagccttcagcagtttaataaggtgctggcatacgaagtgcgtatgctgatgaccgacaaactgcaactggaggacggcacgcagttggttgttcccccggcgttccgtcgggaaatctaccgtgagctgggcatttctctctactcgaacgaagcggcggaagatgccggcctgcgctgggcgcagcactatgaattccttagccagcagatggcgcagcagcttggcggcccgacggaagtgcgcgttgaggtcaataaaagctcgccggttgtctggctgaaaacctggctgtcacccaacatctgggtgcgcgttccgctcaccgagattcatcagggcgacttctcgccgctgttccgatacaccctggcgatcatgctgctggccatcggcggcgcatggctgtttattcgtatccagaaccgaccgctggtcgacctggagcatgcggcattgcaggtcggtaaaggtattatcccaccgccgctgcgtgagtatggcgcatcggaagtgcgctcggtaacgcgtgcgtttaaccacatggcggcaggcgttaaacagctggcggacgaccgtacgctgctgatggcgggggtcagccatgaccttcgcaccccgctgacgcgtatccggctggcaacagagatgatgggcgagcaggatggttatcttgcagagtccatcaacaaggatatcgaagagtgtaacgccatcatcgagcagtttatcgactacctgcgcaccgggcaggagatgccgatggagatggcggatctgaacgcggttctgggcgaagtggttgccgccgaaagcggctacgaacgtgaaattgcgaccgaccttcaggcaggtgagattcaggtacgtatgcatccgctctccattaaacgcgcggtggcgaatatggtggttaacgcggcgcggtacggcaacggctggatcaaagtcagcagcggtacggaactcaaccgcgcctggttccaggtggaagacgatggcccgggcatcaagcctgagcagcgtaagcacctgttccagccgttcgtgcgcggcgacagcgcgcgcagcaccagcggaaccggcttaggcctggcgattgtgcagcgtattgttgataaccataacggactgctggaaattggcaccagcgagcggggcggtttgagcattcgtgcgtggttaccggtgccggttttacgggggcaggtgaaagagagttaa

SEQ ID NO: 117221 - DNA, 1617 bp, Enterobacter cloacae
atgcgtgttaatggtttaaccccgcaagatctcaaggcttatggtattcacgacgtccaggaaatggtctacaaccccgattacgatacgctgtatcaggaagagctcaatccggcactggaaggatacgagcgcggtgtgttgacgaacctgggtgctatcgccgtcgatacgggtatttttaccggtcgttcgcctaaagataagtatatcgtccgagacgacaccacccgcgatacgctgtggtgggctgataagggcaaagggaagaacgataacaaaccgctctccccggaaacctggcagcatctgaaaggacttgtcacccatcagctttccggcaagcgtctgtttattattgatgcgttctgcggcgctaacgccgacacccgtctctccgtacggttcattactgaagtggcctggcaggcgcatttcgtgaagaacatgttcattcgtccgaccgatgaagaactgcaagacttcacccctgactttatcgtgatgaacggcgcgaaatgcaccaacccgcagtggaaagagcagggtctgaactccgaaaacttcatcgccttcaacctgaccgagcgtatccagttgatcggcggtacctggtacggcggcgaaatgaagaaagggatgttctcagtcatgaactacctgctgccgctgcgcggtatcgcctccatgcactgctcggcgaacgtcggggaaaaaggcgatgtagcagtgttcttcggcctttccggcaccggtaaaacaacgctgtccaccgatccaaaacgtcgtctgattggcgacgatgaacacggctgggatgatgacggcgtgtttaactttgaaggcggctgctacgcgaagaccattcgcctgtcggaagaggcagagccggatatctaccacgcgattcgccgcgatgcgctgctggaaaacgtcaccgtgcgtgccgatggttctatcgacttcgacgatgcctcgaaaacggaaaacacccgcgtctcttacccgatctaccacatcgagaacatcgtcaagccggtatcgaaggcgggtcatgccacgaaggtgattttcctgaccgcggatgcgttcggcgtgctgccaccggtttcccgcctgaccgccagccagacgcagtaccatttcctctccggctttaccgctaaactggcgggtaccgagcgcggtgtgaccgagccaaccccaaccttctccgcctgcttcggcgcggcgttcctgtcgctgcacccaacgcagtacgcggaagtgctggtgaaacgcatgcaggcatccggcgcccaggcgtacctggtgaacaccggctggaacggtacgggcaaacgtatctccatcaaagatacacgcgccatcatcgacgcgattctggatggttcgctggataacgctgagacctttacgctgccgatgttcgatctggcgatcccaacagcactgccgggcgtggatacgcgtatcctggatccgcgtaacacctacggttcaccggaacagtggcgtgagaaggctgaatcgctggcgaaactgtttatcgaaaacttcgagaagtataccgacaccccggccggtgctgcgctggtgagtgcgggaccaaggtaa

SEQ ID NO: 117222 - DNA, 879 bp, Enterobacter cloacae
atggcccaacacgaccaattacaccgctatctgtttgaacaattcgccgtgcgcggcgagctggtcaccgtatccgaaacctggaaacagattctggaaaaccacaactacccgctgccggtgaaaaccctgttgggcgaactgctggttgccaccagcctgctgaccgccacgctgaagttcgctggcgatattaccgttcagttgcagggtgatggcccgatgtcgctggcggtgatcaacggcaataaccagcagcagatgcgcggcgtggcgcgcgttcagggcgatatccctgaaaatgcggatctgaaaacgctggtcggaaatggctacctggttatcacgatctcgcctgaagagggtgagcgctatcagggcgttgtcggtctggaaggcgacacgcttgccgcctgcctggaagattacttcatgcgttccgaacagctgccaacccgcctgttcatccgcaccggtgaagtggatggtcagcctgctgccggtggtatgctgcttcaggttctgcctgcgcaggatgcgcagaccaatgatttcgagcatctggcaacgttgacggaaaccatcaaagcggaagagttgttcaccctgtcggcgaccgacgtgctgtggcgtctgtaccacgaagaagaagtgacggtttacgatccgcaggatgtggaatttaagtgcacctgctctcgcgagcgttgtgctggcgccctgaaaacgctgccggatgaagagatcgacagcatcatggcggaagacggtgagatcgatatgcactgtgattactgcggtacgcactacgtgttcaattccatggatatcgcggagatccgcaataacgcctctccggcggacccgcaggttcactaa

SEQ ID NO: 117223 - DNA, 402 bp, Enterobacter cloacae
atgaaagaaaaaccctctgatggggtaagactggataaatggctgtgggccgcccgtttttacaaaacgcgcgcccttgcccgtgaaatggttgatggcggaaaggtgcattacaacggtcagcgcagcaaaccgagcaagctggttgaactgaatgccacgctaacgcttcgccagggcaacgatgagaaaacggtggtggtgaaagccattaccgagcagcggcggcccgcaaccgaagccgttttgctgtatgaagagacggccgaaagcatagagaagcgcgagaaaaccgcgctggcgcgcaagatgaatgcgctgaccatgcctcacccggaccggcgaccggataaaaaagagcgccgcgatctgatgaaatttaaacacggtgagagcgagtaa

SEQ ID NO: 117224 - DNA, 684 bp, Enterobacter cloacae
atgcatcttaatatcgactggcaggcggtcgatacagtcctgcttgatatggacggcacgctgcttgatctcgcctttgataactatttctggcaaaagctggtcccggaaacatacggtgaacagcaggggatctccccggcggaagcgcaggaattcattcgttcgcaatatagcgcggtgcagcatacgctaaactggtactgtcttgactactggagcgagcgactcggtttggatatttgtgccatgaccaccgcccagggcgcacgcgccgtactgcgcgacgatacggtcccgttcctggatgcgctgaaagcctgcggtaagcgccgcattttgctgacgaatgcgcatccccataacctggccgtgaagctggaacataccggtcttgcttcacaccttgatttattgctttccacccacacatttggttatccgaaagaggatcagcggttgtggcatgccgtggtggaagagaccggtttacagccggaacgcacgctgtttattgacgacagcgagccgattctggattctgcggccgcttttggcattcgctattgtctgggcgtgaccaatccggattccggcctggctgaaaaaagctatctgcgacatccggggctgaacgactatcgccggatgatcccctcactcactgtgaaggagacgccatga

SEQ ID NO: 117225 - DNA, 2139 bp, Enterobacter cloacae
atgagcaccattttgatttttctcgctgctgtgctggcctgcgcgtcgattgcggtgtgggtattcaggcgccgcgtacatcgccgttatcggctgccctttttgaacgcgtttgccggggcaaacacgcgcaagctttcgccagaggaacgcagcaccgttgagcagtatctcgacacgctgaaccgatcccggctttcgcctggccctaccggcgccagcgccgcccccgtatcgctcaacctgaacgcccaaagtgacaccgttctgtgcgtaacgcgctccattacccgctacggcattacaaccgacgatcccaacaagtggcgttactatctcgactctgttgaagtgcacctgcctcccttctgggagcagtatattaacgacgaaaacagcgtcgagctcatccataccgatacgctgccgctggttatctccctcaatggtcatactctgagcgaatatgttcaggaagcgccacgctttgcgctggaacgcgcaagcggaacgcaggcctctattcgcggtgaagagactgagcagatcgaactgctgaacatccgccaggagacgcatgaagagtacgtcctgagccgcccggatggcattcgcgaagcggtgttgattgtcgcctcgttcctgctctttttcatctgcctgctgacgccggacgtgtttgttccgtggctcgcgggtggcgcagtactgcttctggccgccgggctgtggggcatatttgctccgccggcaaaaacgtcattacgcgaaattcactgcctgcgcggaaccccaaaacgctggggactgttcggtgagaacgatcaggaacatatcaacaatatctcgctcgggatcatcgatcttatctatccgcgccactggcagccgtggatagcgcaggaccttggccacaaaacggatattgatatctatctcgaccgccacgttgtacgccaggggcgctacttatccctgcacgacgaagtgaaaaacttcccgcttcagcactggctccgcagcgcggtgattgccggtggtgccgcgttaatcttcgtcatgctgctgctcttcgtgccgctggatatgccgattaaatttaccctgtcgtggatcaaaggggcgcaaactgtggaagccaccagcgtacagcagctcgaagaagcgggtgtacgcgtgggagatacgttgcgcctcaaaggcaccgggatgtgtaatatccacacgccgggcgcctggaacacgcgccagaactcgccgttcgcgccgttcgactgctctcagatcatctggaatgacgcctctccgctgccgctgccggaatcggatgtggtcaacaaggccactgcgctcacccagacgattaatcgccagctccatccaaaaccggatgatgattctcgcgtcagccctgccctgcgttcggctattcagaagtcgggcatggtactgctggatgactttggcgaaatcgtcctgaaaacagaggatctctgttccgcccaggatgactgtatccggctcaagaacgcgctggtcaacctcggcaacagcaaagactgggacgcgctggtgaaacgcgccgaagcgggacgcctggacggtgtgaacgtgcttctgcgtccggtcagcgccgagtcgctggataacctggtggcgacctctaccgcccccttcgtgatgcgtgaaaccacccgtgctgcccaggcgcttaacagcccggcgcccggcggttttgtgattgccagcgatgaaggcagcgacctggtggatcaaccttatccgcaggtttcgctctatgactatcctgcccaggagcagtggagcgaattccagcgtctggcgcagatgctgatgcagacgccattcagcgcggaagggatcgtcaccaccctctttaccgacgccaacggcacgcgtcatattggcctgcaccgtatgccggatagcgctggcctgtggcgctatatagggacatccctgctgctgattgcaatgctggcgtgcattgtctggaacggttatcaggccgtacgccgctatcagcgttcccgcacgcggctggcagaaatccaggcctactacgaaaattgcctgaacccgaaactgatctcctcttccgagagcctgatcggataa

SEQ ID NO: 117226 - DNA, 561 bp, Enterobacter cloacae
atgaccaaacccttacaaaagcccaccattctgaatgttgaaaccgtcgcgaaatcgcgtctgtttaatgtcgaaagcgtggatctggagttcagcaacggtgtgcgtcgtgtttatgagcgtatgcgcccctcctcgcgtgaagcggtgatgattgtgcccatcgtcgacgagcacctgatcctcattcgtgaatacgccgtgggcacagaatcctacgagctgggtttctccaaaggactgatcgacccgggcgaaacggtgtttgaagcggcaaaccgggagctgaaagaagaggtcggttttggcgcgaaagagctgacgttcctgaaaaagctgagcatggcaccgtcctatttctccagcaaaatgaacatcgttgtcgcggaagatctctatcctgaatcgctggaaggagacgagccggaaccgctgccgcaggttcgctggccgctggctcatctgatggatttgctggaagatcctgactttaacgaggcgcgcaacgtgagcgcactgttcctggtgcgggaatggctgaaggggcaggggcgtttgtag

SEQ ID NO: 117227 - DNA, 2553 bp, Enterobacter cloacae
gtgaagttcgtaaagtatttattgatccttgcagtctgttgcattctgctgggagcaggctcgattattggtttgtacaaatatgtcgagccgcaactccctgatgtcgccacgcttcgtgatgtgcggcttcagatccctatgcaggtctatagcgccgatggtgaactgatggcgcaatacggcgagaaacgtcgtatccctctgaccttaaatcaaattccacccgtgatggtgaaggcttttatcgccaccgaggacagccgtttttacgagcaccacggtgtcgatccggtcggtattttccgtgcggcaagcgtggcgctgttctccggtcatgcctctcagggggcaagtaccattacccagcagctggcgcgtaacttcttcctcagcccggaaaagacgctgatgcgtaagatcaaagaggtgttcctcgcgatccgcattgagcaactgctgagcaaagacgagatccttgagctttacctcaacaagatctatctgggctaccgcgcctatggcgtaggggctgcggctcaggtctattttggtaagccgatcgatcagctcacgctgagcgaaatggcgaccattgccggcctgccaaaagcgccatccacgtttaacccgctctactcgctggaccgcgccaccgcgcgccgtaacgtggtgctgtcgcgtatgttgagcgaaggctatatcagccagtctgagtacgataaggcgcgcagcgacgttattgacgccaattaccatgcgccggaaattgctttctctgcaccgtatctcactgaaatggttcgccaggagatggtgagtcgctacggtgataaagcgtatgaagatggttatcgcgtctataccaccgtgacccgcaaggtgcagcaggctgcccagcaggcggtgcgtaataacgtgatggattacgatatgcgtcacggctatcgcggcccgtccaacgtgctgtggaaagtgggtgaaggcgcatgggacagtaaaaaaatcacggattccctgaaagcgctgccgacctatggcccgctgcgtccggcggtcgtcacccaggccgatccacaggaagcagtggcgatgatggccgatggcacatccgtttcgctgcgcatggagggtgtccgctgggcgcgtccataccgttctgacacccttcaggggcctacgccacgtaaagtgaccgatgtcgtacaaaccggacaacaaatctgggtgcgtcaggtcggcgatgcctggtggttggcgcaggtgccggacgtaaactctgcgctggtctccatcaatccgcagaacggcgccgtgatggcgctggttggcgggttcgatttcaaccagagcaaatttaaccgcgcgacccaggcgctgcgtcaggttggttcgaacatcaaaccgttcctgtataccgcggcgatggataaggggctgactctcgccagcattctcaacgacgtgccaatttcccgctgggatgccggtgcgggctctgactggcagccgaagaactctccggcgcaatacgctggccctatccgcctgcgccagggccttggccagtcgaagaacgtggtcatggttcgcgcgatgcgtgcgatgggcgtggattatgcggcagagtatctgcaacgctttggcttcccggcgcaaaacatcgttcatactgaatctctggcgctcggctccgcgtcctttacgccgctccaggttgcgcgtggctactcggtgatggcgaacggcggcttcctggtcgatccgtatttcatcagcaaaatcgagaacgatcagggcggcgtactgtttgaagcgaaaccgaaaattgcctgccctgaatgcgatattccggtgatttacggcgacacgccaaaatccaatgtcctggaaaacaaggatatggaagatgtggcgatctctcaggaacgtcagaatctggcggtgccgcagcctcagctggaacaggccaatcaggcgctggtcgcccagagtggcgcgcaggagtatgccccgcacgtgatcagcacgccgctgtcgttcctgattaagagcgcactgaacaccaacatctttggcgaaccgggctggcaaggcaccggctggcgagcgggccgcgatttgcagcgccacgacatcggcggcaaaaccgggacaaccaacagttcaaaagatgcctggttctcaggttatggcccgggggttgtcacctccgtctggattggttttgacgatcaccgccgcgatctggggcgcaccaccgcctctggcgcgattaaagatcagatttccggatacgaaggcggcgcgaagagtgcgcaacctgcctgggatgcatacatgaaggccgttctcgagggcgtaccagagcagccgctaacgcctccaccgggcgtggtgacggtgaatatcgaccgcagtaccggacagctcgcgaatggcggtaacagccgtgccgagtatttcatcgagggtacgcagccaaccacgcaggcagtgcatgaggtgggtacagagatcattgataacggcgagacgcacgagctgttctga

SEQ ID NO: 117228 - DNA, 774 bp, Enterobacter cloacae
atggcttttaaaacgtggcaaacaggcgttcatattcaacaggataaggtggttgcggtagcgctgaccagagagcgggccggatggcgtttacggcgctggtgggcggtgccgctgtcggacggcgttatcggggaaggcaaaatacttaagccagaacagctggttaacgcattacgtggctggcggaaaacattgccgcactcgcatcgggtatttctctcatttccggcgacgcgcgttctgcaacgcgcgttgccccgtccatccgttaccttgcgtgacagcgaacagctcacctgggtaggcgccgcattagcgcgtgagctggagatgcccgccgatacgctctgctttgactacgcgcatgatacgttcagcaacacttttcaggttaccgcagcgcaaaacagagaggtcgataccctgttgacgctggcgaacgcgctgcgtttgcgtctggcagcaatcgccccggatgccggcgcgctggctaatcttctctctgctgttgcccccgcccggtgcgtcgcctggagagatcaacaccagtggctatgggcgatgcgtcaccagtgggggcggcgctacaccacagaagcggcgacggtgaatgaactggcggcgctgcttgcgctttctccttctgatatcgccgtgtttgatgctggccgcgaaccctgggaagcggtgacgctgtgccagccgccgctgccggaatgcggtgctgattacaccgtcgccctggcgctggccatgagcgaggcgccgtaa

SEQ ID NO: 117229 - DNA, 492 bp, Enterobacter cloacae
atgagcatacccaatcttttaccctggcgtcggcagcaacgtaatcagcgcctgcgtttctgggggctgctgtttgctggctcactgctggtgatgctggcgggaggtatcagcctgcgggcgacgcagtctctcgcgttacaggcgttgcagagcgaactggcggggacgcgtgcagtgcagaaggtattgaaagcccgtcagccgcagtcagcggggcagaaaaccccttcgccgccgtctgatccggcctggcaacctgcgctggagtcccttgccagcgcaatgccccggcaggcgtggctgacggcgctgcgttatcagccaccctcgctgaccctgaccggctataccacctcactgccagcgctctccgccatgaccgatgccctgaaaagggtgacgggatttaacctcggaccggcaggcgaaatgcaacaggatagccaggggcgatggatgttctcttttcaactacatagccggaggtag

SEQ ID NO: 117230 - DNA, 453 bp, Enterobacter cloacae
gtgggtatctggtatcaacgctggactgatgcacgtccttcccggcgcgtcctttgctggttgatcgcatcggggcttgttgcgtgggcaatttggggactgctgctcaggcccgctgctctgcgttacgccgatattcaggcgcaggccatcagtgcgaagcgaatcaacgcctcgctgtggccagaggccggacggcgagtagtggttacgcaagtgacgccctcgcagcccttttctcccctggcttttcagcgtgagggcgcaaggctggtgtactggaagccgcagcagcgtgggggagagctggcgctggatgcctcctggggcgcggttccggcgctcttttcccggctggcgcttgagaacgcgcgggtgagtgcgttttccatcaccccacagggcaaacgcctacgcctcagcctgcaactggagatcggtcatgcgcagtaa

SEQ ID NO: 117231 - DNA, 1239 bp, Enterobacter cloacae
gtgaagataaggatagggctgttactggcggcactcagccagcccctgtgggccgcgacgccaaaaccggtcaccctgctggtggatgatgtcccggtggtgcagatattacaggcgctggtggggcaggaggatcgcaatctggtggtgtcgccggatgtcagcggttcgctttcgctgaatttaacgcgggtgccctggagacaggcgcttcagacagtagtgaacagcgccgggctggtattgcgggaagagggcggcattttttatgtgcatacggcggcctggcaacgggagcaacagacgcgtaaagagcaggagcgggcccagcgtctgcttgacgccccgctgcactctcacagcattccgtttgcttatgcggatgcagccgaattgcaaaaagcggcagaaaagctcttaagcccgaaaggcagtctctccgtcgacaagcgcaccaaccgtttcctggtcagggataaccagacggtggtggatatgctccagcgctgggctgtgcagatggatctgcccgtcgagcaggtggaactggcggcgcagattgtgaccatcagtgaaaaaagcctgcgtgaactgggggtgaaatggaacctcgctgacgcaacggaggccggtaaggtgggtcaggtcacgacgctgggggcggacctgtcggtggccagtgcaaccacccacgcagggtttaacatcgggcgcatcaacggcaggatgctggatcttgagttgtcggcgcttgagcaaaagcagcaggtggatatcatcgccagcccgcggctgctggcgtcgcacatgcagccggccagcatcaagcagggcagcgaaatcccgtatcaggtttccagcggcgaaagcggggcgacatccgttgaatttaaagaagcggtattaggcatggaggtcacgccggtggtcctgccgggtggtcgcgtgcgcctgaaactgcatatcagtgaaaatatgcccggccaggtgctgcaacaggcagacggcgaaacgctggcgatcgataagcaggagatcgaaacgcaggtagaggtaaaaagtggggaaacgctcgcgctgggcgggatcttttcgcaaaagaataaaaccggacgcgacagcgtgcccgtgctgggcaacattccgtggctgggtcagctgttccgccatgacggaaaagataacgaacggcgcgagttagtggtgtttatcacgccacgtctggtcagtattcagtaa

SEQ ID NO: 117232 - DNA, 261 bp, Enterobacter cloacae
atgggtaacgatccccgcaatgattttgcattcagtttgttgcagatgtttgacgtggggcatgaattagcatacaaggagtaccgatttgagttggacttacgtcttatttccttatgcgccgggaacggtgatttaatcagttgccaaacaagccggagtattgagataatttttcgtctgactctcgctctattgcaaatgaggtttcagttcatgtcctgctacgccgggtgtctgcgcagcggggattaccattaa

SEQ ID NO: 117233 - DNA, 522 bp, Enterobacter cloacae
atggcagagaaacgcaatatctttctggttgggcctatgggtgccggcaaaagcactattgggcgtcagttagctcaacaactcaatatggaattttacgattctgatcaagagattgagaaacgaaccggagcggatgtgggctgggtcttcgacgtagaaggcgaagaaggtttccgtgaccgagaagaaaaagtgatcaacgaactcacggaaaaacagggcattgtgctggcaactggcggtggctctgtaaaatctcgcgaaacccgcaaccgtctctccgcccgtggcgtagtggtctatcttgagacgaccatcgaaaaacagctggcacgcacgcagcgtgataaaaagcgcccgttgttgcaggttgaaacaccgccacgtgaagttctggaagctttggccgatgaacgcaatcctctgtacgaagagattgctgatgtgaccattcgtactgacgatcaaagtgctaaagtggttgcaaaccagattattcatatgctggaaagcaactga

SEQ ID NO: 117234 - DNA, 1089 bp, Enterobacter cloacae
atggagaggattacagttactctcggggaacgtagttaccctatcaccatcgcggctggtttgtttaacgacccagcttccttcttaccactgaaagcgggtgatcaggcgatgctggtcaccaacgagacgctggctccgctttatctcgaccgtgtacgtcacctgcttgagcaggcgggcgtgaaggtcgacagtgtgattctgcccgatggcgagcagtacaaaagcctgacggtactggataccgtctttaccgcacttctgcaaaaaccgcacggtcgtgatacaacactgcttgccctgggcggcggcgttgtgggcgatctgaccggttttgcagccgccagctatcagcgcggcgtgcgctttattcaaattccaaccacgttgctctcacaggtcgattcttctgtgggcggtaaaacggcggttaaccatccgctcggcaaaaacatgattggcgcgttctaccagcctgcctcggtggtggtggatctcgactgtctgaaaaccttgccagcgcgcgaactggcgtccggccttgcagaagtgatcaaatacggcattattcttgacggggaattcttcacctggctggaagagaatatggatgcgctgctgcgcctcgacgggcaggcaatggcctactgtattcgccgttgttgtgagctgaaagcagaagtcgttgccgcagatgagcgtgaaaccggcttacgtgctttactgaatctggggcatacgtttggtcatgcgatcgaagccgaaatgggctacggtaactggcttcacggtgaagctgtcgctgccggaatggttatggcggcgcgagcctctgaacgtctggggcagttcaggccggaagagacagcacgtatcatcgcgttgcttaaacgtgctggcttgccggtgagtggtccgcaggaaatgtctgcgcaggcgtaccttccccacatgatgcgcgataaaaaagtattggcaggtgagatgcgtctggtactcccgcttgcaatagggaaaagtgaagtgcgcggcggagtgccgcacgaagtcgtacttggcgctattgctgattgtcagcaggcgtaa

SEQ ID NO: 117235 - DNA, 1305 bp, Enterobacter cloacae
atggatgaattcaaaccagaagacgagctgaaacccgatcccagcgatcgtcgtactggtcgttctcgtcaatcttcagaacgtgataacgagccgcagatcaattttgacgatgtcgaactggatgcagacgatcgtcgcccttcgcgtagccgtaacgcgcgaaatgagcgagaagacgaggagtatgaatccgaagaagagttaatggatgaacagcctgttgaacgtcgtccgcgcaaacgtaaaaaagcggtagcggcaaaaccggcctcccgtcagtacattatgatgggccttggcgttctggtgctggtcttgctgattgtcggcattgggtccgcgctaaaagcaccttctaccaattctaccgagcagacggcgtctgccgagaagagcattgacctgtctggtaacgatgcgagcaaccaggcgaatggcgctcagcctgcgccgggcaccacttccgcagagcagaccgcaggtaacaccagcgctggccaggatatctctctgccgcctgtctctgcgaccccgactcagggccaggcgcctgcgacgcctgaaggtcagcagcgtgttgaagttcagggcgatctgaacaatgcgctgatgcagccgcagaatcaggagcaggttaacgctgccgtggtgaactccacgctgccaactgaaccagccaccgttgcgccagttcatggcagcaatgcccagcagcaaacggcgacaacggaaaccaaaccgcgccagacgcagactgcgccacgccaggagcgtaagcaggctgtgattgagccgaagcgtgagacgaaaccgcaaaccgtggcaaaagcgccagaaacgaaagcgccagcgcagaccaaacctgctgtgagccagccggttaaagcgccaacgcctgcggcaaccactgcaccgaaagcaacggcgaccacaaccgcgcctgctgcaacaacaccttctgcaacaacacctgcggctcccgcagccaaaacgggcgctgcatcaggtaaaacgacgggcaacgtgggttctttgcagtcggcctcttccagcaactacacccttcagctgagcagttcgtctaactatgacaacctcaacgcctgggcgaagaaatcgaatctgaaaaactacgtggtttatcagacgacccgtaacggtcaaccgtggtatgtgctggtgagtggtatttatgcttccaaagatgaagcaaaacgtgccgtttccacgctgccagccgacgtgcaggcgaaaaacccgtgggcgaagccgattcatcaggtgcaggccgatctgaagtaa

SEQ ID NO: 117236 - DNA, 813 bp, Enterobacter cloacae
atgaaaaaaaatcgcgcttttctgaaatgggcaggggggaaataccccctgctcgacgatattaaaaagcacctgccgaaaggcgagtgtcttatcgagcccttcgtgggtgctggatcggtgttcctgaataccgatttttctcgttatatcctggcggatatcaacagcgaccttatcagcctctataacatcgtcaaactgcgtaccgatgagtatgtggaagaggcgcggaagctgtttacgccagagaacaacaacccggacgtctactatcagttccgcgctgagtttaatcaaagccaggatccgttccgtcgcgcgctgttgtttctttatctcaaccgccatggttacaacggtctgtgccggtataatctgcgtggcgagtttaacgtgccgtttggccgctataagcgtccctacttcccacaggacgagctgtatcactttgctgaaaaagcgcagaatgccgagttctactgtctctcctatgaagagtgcatggatctggcgggcgtaaactcggtggtctactgcgacccgccttacgcgccactgtctgccacggcaaatttcaccgcctaccacaccaatagcttcagcccggccgagcaggctcgtctggctgagatggcggaaaagctggtcagcaaaagaattccggtgttaatttcgaatcacgacacgcctgatacgcgcgaatggtacaaagccgcgaagcattttcaggtaaaagtgcggcgtagcattagcagcaacggcggcacacgtaaaaaggtggacgaacttctggcgctttatcgaccctga

SEQ ID NO: 117237 - DNA, 678 bp, Enterobacter cloacae
atgaaacagtttttgattgccccctcaattctgtcggccgattttgcccgcctgggtgaagacactgccaaagctctcgcggctggcgcggatgtcgtccatttcgacgttatggataaccactacgttcccaacctgaccatcggtccgatggtgcttaaagcgctgcgtaactacgggatcaccgcgcccattgacgtgcatctgatggtgaaaccggttgaccgcatcgtgcctgatttcgccgcggcgggtgccagtatcatcactttccacccggaagcctccgaacacgttgaccgcacgctacagctgatcaaagagaacggctgtaaggcgggactggtctttaacccggcgaccccgctgagctatctcgactacgtgatggacaagctggacgtgatcctgctgatgtccgtcaacccgggctttggtggtcagtcatttatccctcagaccctcgacaaactgcgtgaagtgcgccgccgtatcgatgagtctggctatgatattcgtctggaagtggacggcggcgtgaaggtcaataacatcggtgagattgcggcggcaggggcggatatgttcgtcgcaggctccgccatcttcgatcaaccggattacaaaaaagtcattgatgaaatgcgccgtgaactggcgaaggtaagtcatggataa

SEQ ID NO: 117238 - DNA, 762 bp, Enterobacter cloacae
atggataaattgcaggctattcggggtgtagcatttgacctcgacggcacgctggtcgacagcgcgccaggattaacccgcgccgtcgatcaggcgctatatgcccttgaactccccgttgcaggcgaagagcgcgtcgtgacgtggattggtaacggtgcagacgtgctgatggagcgcgcgctgtcctgggctcgtcaggagcgtgcctctcagcgttccgcgcaaggtaaaccgagtgttgaccacgcggatattccccaggatgagcagcagcgtattctgcgcaaactgttcgaccgtttctacgaagagaccgtcgaagagggtagcttcctgttcccggatgtcgctgaaacgctgagcgcgctacatgccaaaggcatcccgctgggactggtgactaacaagccgacaccgttcgttgcgcctctgctggaagcgctggatatcgcgaaatacttctccgtaattgtgggcggcgatgacgtgcagaataaaaagccgcatccggaaccgctattgctggtggcaggaaaattatccttagcgcctgcggagctgctctttgtcggggattcccgcaatgatattctggctgccagagcggcaggttgcccgtcggttgggttgacctacggctacaactacggtgaagccattacgttgagtgagccggacgttgtgttcgaccacttcaaagatttgttgcccgcactcgggctctcgcacagtgaacatcaggaattgaataatgactaa

SEQ ID NO: 117239 - DNA, 1005 bp, Enterobacter cloacae
atgactaagcccatcgtttttagtggcgcacagccttcaggtgaactgaccattggtaactacatgggtgcgttacgtcagtgggtgagcatgcaggatgactaccactgcatttactgcatcgtggatttgcatgctatcaccgcgcgtcaggatcccgagaagctgcgcaaagcaacacttgatacgctggcgctgtacctggcgtgcggtatcgatccagagaagagcaccattttcgttcagtctcacgtgccagagcacgcgcagctgggctgggcgctgaactgctacacctatttcggcgagctgagccgcatgacccagttcaaggataagtctgcccgctactctgaaaacatcaacgccggtctgtttgactatccggtgctgatggcggccgacattctgctgtaccagaccaaccaggtgccggtgggtgaagaccagaagcagcacctggagctgagccgcgatattgcccagcgcttcaatgcgctttacggtgacgtgttcaaagtgcctgagccgtttattccgaaatccggcgcgcgcgtgatgtcgctgctggagccgaccaaaaagatgtccaagtctgacgataaccgcaacaacgttatcggcctgctggaagatccgaaatcagtggtgaaaaagctcaagcgtgcggtgaccgactccgacgagccgccagtggtgcgctacgacgtgcagaacaaagcgggcgtgtctaacctgctggacattctctccggtgtgaccggacagagcatccctgagctggaaaaacactttgaaggcaagatgtacggccacctgaaaggcgaagtggcagacgccgtttccggcatgctgaccgagttgcaggagcgctatcaccgttaccgtaacgacgaagctttcctgcaaaaagtgatgaaagagggcgcggaaaaagccagcgcgcgcgcctccgaaaccctgaaagcggtgtacgacgctattgggtttgtggcgaaaccttaa

SEQ ID NO: 117240 - DNA, 171 bp, Enterobacter cloacae
atgttcaaactggcaaaagctgccgttctggtcggcctgttatcaactctgacggcctgcaccggtcacgttcaaaatactaaaaataattgcagctacgattacctgcttcacccggcgatctccatttcgaagatcatcggcggttgcggcccggcggcacagcagtaa

SEQ ID NO: 117241 - DNA, 1374 bp, Enterobacter cloacae
gtggatcacctgccgattttttgtcaattacgcaaccgcgactgcctgctcgtgggcggcggcgatgtggctgaacgcaaggcacgcctgctgttagaggcgggcgcccgactgaccgtcaacgccctcactttcgccccacagtttgacgtctgggcgcaggaagggatgctcacccaggtgcagggcgaatttgatgaatccctgctggatacctgctggctgaccatcgccgcaacggataacgatgatgttaaccagcgcgtcagcgacgcctgcgaagcgcgccgcatcttctgtaacgttgtggatgcgccgaaagaggcgagctttatcatgccgtcgattattgaccgttcaccgctgatgattgcggtgtcgtccggcgggcgctcgcccgttcttgcccgtctgctgcgggaaaaactggaagccgtgctgccgcagcatcttggtcagattgcccaatacgccggggagctgcgctcccgcgtgaagcaaaccttcgcaaccgtgggcgaacgccgtcgcttctgggagaagttctttgtcaacgacaggctggcgcagtcccttgccaatcaggacaccaaagccgttgaagagacgaccgaacagctcctgagcgagccgctggaccatcgcggtgaagtggtgctggtgggcgcaggtcccggcgatgcgggcctgctgacgctgaagggtctccagcagatccagcaggcggacatcgtggtgtatgaccgtctggtctctgatgacatcatgaatctggtgcgccgcgatgctgaccgcgtgttcgtcggcaaacgggcaggttatcactgcgtaccgcaggaggagatcaaccagaccctgctgcgggaagcgcaaaaaggtaagcgcgtggtgcgcctgaaagggggcgatccatttatctttggtcgcggcggcgaagagctggaaaccctgtgcaacgcgggtattccgttctccgtggtgccgggcattacggcggcgtccggctgttctgcctattccggcattccgttaacccatcgcgactatgcccagagcgtgcgcctggtgacgggccacctgaaaaccggcagcgaactggactggcataatctggccgctgaaaagcagacgctggtgttctatatggggctaaatcaggcagccacgatccaggcgaaactgctggagcacggcatggaagcagatatgccggtcgcactggtggaaaacggcaccgccattacgcagcgcgtggtcgatggcgtgctgacgcagttgggcgagctggcgcagcaggttgaaagcccggcgctgattgtggtgggtcgcgtggtagccctgcgcgaaaaactgaactggttctccagccactaa

SEQ ID NO: 117242 - DNA, 327 bp, Enterobacter cloacae
atgagccagtgggtaaacatctgcaatattaacgacattctgccagcaaccggcgtctgtgccctgctgggcaacgagcaggtggcgattttccgccctcgccacgatgaacaggtctatgccatcagcaatatcgacccgttcttcgaggccagcgtgctctcccgcggtctgattgcggagcaccagggcgagctgtgggttgccagcccgctgaaaaagcagcgcttccgcttaaccgacggactctgcatggaagatgaaagcttctcggtcaaacactacgacgtccgcgtaaaggacggcgaggtgcagctgaaagcgtaa

SEQ ID NO: 117243 - DNA, 2544 bp, Enterobacter cloacae
atgagcaaagtcagactcgctatcatcggtaacggcatggtcggccaccgctttattgaggatcttctcgataaagccgatgctgagcagttcgatattaccgtgttctgtgaagaaccccgcaaggcgtacgaccgtgtgcacttgtcttcctacttctctcaccataccgccgaagagctctctctggtgcgtgaagggttctacgagaagcatggcgtaaaagtgctggtgggcgaacgcgctatcaccatcaaccgtcaggagaaagtgatccactccagcgccggacgtacggttttttacgataagctgatcatggcgacgggctcgtatccgtggatcccgcctattaaagggtcggaaacccaggattgcttcgtttaccgtaccattgaagacctcaacgccattgaatcctgcgcacgtcgaagcaaacgcggcgcggttgtcggcggtggtctgctgggtctggaagcggcaggcgcgctgaaaaacctcggcgttgaaacccacgtcatcgaatttgccccgatgctgatggcggaacagctggaccatatgggtggcgaccagctacgccgtaaaatcgaaagcatgggcgtgaaggttcacaccagcaagaacaccaaagagatcgtgcaggaaggcaccgaagcgcgtaaaaccatgcgctttgcagatggcagcgagctggaagtggatttcatcgtcttctccaccggtattcgcccgcgcgataagctggccacccagtgcggtctggccgttgcgcagcgcggcgggatcatgatcaacgatacctgccagacctccgatccggatatctacgccatcggcgaatgcgccagctggaataaccgcgtatacggtctggttgcaccagggtacaaaatggcgcaggtcgccgttgaccatatcctcggcagcgaaaacgccttcaccggcgcagacatgagcgccaagctgaagctgctgggcgtggacgtgggcggtattggtgatgcgcatggccgcaccccgaactcccgcagctatgtttatctggacgaaagcaaagaagtctacaaacgtctcatcgtcagccaggacaacaaaaccctgctcggggcggtgctggtgggtgataccagcgacttcggtaacctgctccagctggtgctgaacgccattgagctgccggagaacccggacgcgctaatcctcccggcgcacgcctccagcggtaagccgtccatcggcgtggataaactgccggacagcgcgcaaatctgttcctgcttcgacgtgaccaaaggcatgctgatctccgccattaacaaaggctgccacaccgttgcggcgctgaaggcggaaaccaaagccgggaccggctgcggcggatgtattcctctggtcacccaggtgctgaacgccgagctggcaaaacagggcattgaagtgaacaacaacctgtgcgagcacttcgcttactctcgccaggagctgtatcacctgatccgcgtggaaggcattaagtccttcgacgaactgctggagaaacacggccagggctatggctgtgaagtatgtaagccaaccgtcggttccctgctggcgtcctgctggaacgaatatgtgctcaaaccagaacacactccgcttcaggacaccaacgataacttcctggccaatattcagaaagacgggacttactcggtgatcccgcgttctgccggaggggagattaccccggaagggctggtcgccgtgggccgtatcgcccgtgagtttaacctgtacaccaaaatcaccggctcccagcgtatcggcctgttcggagcgcagaaagatgacctgccggaaatctggcgtcagctgattgaagcgggctttgaaaccggtcacgcgtacgccaaggcgctgcgcatggcgaaaacctgcgtgggcagcacctggtgccgctacggcgtgggcgacagcgtgggcttcggcgtagagctggaaaaccgctacaaaggcatccgtacgccgcacaaaatgaagttcggcgtctcagggtgtacccgtgaatgtgcggaagcacaggggaaagatgtgggtatcattgccacggagaaaggctggaacctgtacgtgtgcggtaacggcgggatgaaacctcgccacgcggatctgctggccgccgatctcgatcgcgatacgctgatcaaatacctcgaccgcttcatgatgttctacattcgtaccgccgataagctgacccgtaccgcgtcctggctggataatctcgaaggcggcatcgactacctgaagtcggtcattatcgacgacaagctgggtctgaatgaacagctggaatccgagatgactcgcctgcgcgaggcggtgatctgcgagtggaccgaaaccgtgaacacgccagcggcgcagacgcgcttcaaacactttatcaacagcacccagcgcgacccgaacgtgcaggtggtaccggagcgcgaacagcatcgtccagcgaccccgtatgaacgtattccggtgatgctggtggaggaaaacgcatga

SEQ ID NO: 117244 - DNA, 1185 bp, Enterobacter cloacae
atgactaacagcaatcgcatcaagctcacatggatcagcttcttctcttacgccctgaccggcgcgttggtgatcgtcaccgggatggtgatgggaaatatcgcagactacttccagctgcccgtttccagcatgagtaataccttcaccttcctgaacgcggggatcctgatctctattttccttaatgcctggctgatggaaatcgtgccgctgaaaacgcagctgcgtttcggcttcgtgctgatggttgccgccgtggcgggcctgatgctgagccacagcatcgccctcttctctgccgccatgttcgtgctgggtctggtgagcgggatcaccatgtcgatcggtacattcctgattacgcatatgtatgaaggccgccagcgcggcgcgcgtctgctgttcaccgactccttcttcagcatggccgggatgattttcccgatggtcgccgcgtatcttctggcgcgcagcattgagtggtactgggtgtacgcctgcattggtctggtttatgtcgcgatctttgttctcaccttcggctgcgagttcccggtgctgggcaaaaaagcgcagactacgtccgagccggttgcgaaagaaaaatggggtatcggcgtactgttcctctccatcgccgcgctgtgttacatcctcggccagctgggctttatctcctgggttcctgaatacgcgaaaggtctgggcatgagcctgaacgacgcgggtaaactggtgagcgatttctggatgtcttacatgttcggcatgtgggcgtttagctttatcctgcgcttcttcgacctgcaacggatcctgaccgttctggcgggtctggcaaccgtgctgatgtatctgttcatcaacggttccccggagcatatgccatggttcatcctgaccctgggcttcttctccagcgcgatttatacctcgatcatcacccttggctctcttcagaccaaagtggcctcgccaaagctggtgaacttcgtgctgacctgcggcaccatcggcaccatgctgaccttcgtggtcacgggcccgattgttgcgcacagcggcccgctggcggcgctgcataccgctaacggtctgtatgcagtggtattcatcatgtgcttcgtgctgggctttgtgacccgtcaccgtcaacacaacccggcaacagctacccactaa

SEQ ID NO: 117245 - DNA, 573 bp, Enterobacter cloacae
atgctcaaatcaacactggcggctgtcgcagctgtgtttgctctttctgccgtttcccctgctgcgctggcagccaaaggagacccccacgtcctgctgactacctctgcggggaatattgagctggagctggatagccagaaagcccctgtttcggtgaaaaacttcctcgactacgtgaacagtggtttttataacaacaccacgttccaccgcgtgatcccgggctttatgattcagggtggcggttttaacgagcagatgcagcagaaacagcccaacccgcccatcaaaaatgaagcagacaacggcctgctgaacaagcgcggcaccatctccatggcgcgtacggcggacaaagacagcgccaccagccagttcttcctcaacgtggctgataacgccttcctggaccacggtcagcgcgactttggctacgcggtgtttggcaaagtggtgaaaggcatggacgttgcggataagatctctcaggttcagactcacgatgtcggtccataccagaatgtgccgactaagcctgtcgtcattctctccgcgaaagtgttgccataa

SEQ ID NO: 117246 - DNA, 585 bp, Enterobacter cloacae
gtgaaaaaactcaccgacaagcaaaaatcccgtctctgggagcaacaacgtaatgtcaattttcaggccagctgcctccttgaaaaaggtaagggtcccgctaaacctgatatcgagacgctggaactggggccttccgcaccgggtttaccccatctgtgtcttattcactgccatttattccgcaacgaaatgaaaggcgcgggcgagctgcgcaccgccgatatttctaagggcgacattcctttttgccatttcgagtacatcgagaaagtgggtaatgagctgatggcttcgctggaaagtgataaatatctggtgggccttcagaaagaagagtttacagacagaatcagtcattactactgtgaaatcaacatgctacatccgtttattagcggtaatggcgtggcccagcggatcttctttgaacaactggctatccatgcgggctatgtgctgaactggcaggggatcgacccggacgactgggcagccgccaaccagagcggggcaatgggggatttgaccgccctgaacgccatctttgccaaagttgtgagcgaagcgcgggaatctgcgtaa

SEQ ID NO: 117247 - DNA, 564 bp, Enterobacter cloacae
atgattctgctgattgataactacgattcctttacctggaacctttaccagtatttttgtgagctgggggcagaggtggttgtccgccgtaacgatgagatcgcgctggctgacattgacgcgctggcaccccagaaaatcgtgatttcgccggggccgtgtaccccttcggagtctggcatctcgctggaggtcatccgccactatgcgggcaaactgccgattctgggcgtctgcctgggtcaccaggccattgcgcaggtctttggcgccaccattgtccgtgccgcgaaagtcatgcacggcaaaacctcaccgatcacgcacaccggtaccggcgtattcctggggctaaacaatccgttaaccgtgacgcgctaccattctctgatcattgatccgccgaccctgccggcctgctttgaggttaccgcctggagcgagacgcaggagatcatgggcattcgccaccgcgagtacgatctggaaggggtgcagttccacccggaaagcattctcagcgaacaggggcacgcgctgctggccaatttccttaatcgctga

SEQ ID NO: 117248 - DNA, 1221 bp, Enterobacter cloacae
atggcaactgaacaactagcaattacccgcgcgacatttgatgaagtgatcctgccgatttatgcaccggctgagtttatcccggtgaaaggcagaggcagccgcgtctgggatcagcagggcaacgagtatgttgatttcgcaggcggtattgcggtgacggcgctgggccattgccatcctgcgctggtggacgcgctgaaaacacagggcgaaacgctgtggcacaccagcaacgtgttcaccaacgaaccggcgctgcgtctggggcgtaagatcatcgatgccaccttcgccgaacgcgtgctgtttatgaactccggcaccgaagccaacgaaaccgcctttaagctggcgcgctactacgcaaccacgcgtcatagcccgtacaaaaccaaaatcatcgccttccataacgccttccacggtcgctccttctttaccgtttccgttggcggccagccgaagtattccgacggctttggtccgaaacctgcggatatcatccacgtgccgtttaacgatctgcacgccgttaaagcggtgatggacgatcacacctgtgccgtggtggtcgagcccattcagggggaaggcggcgtcacggcggccaccccggaatttctgcaagggctgcgcgagctgtgcgacgagcaccaggcgctgctggtgtttgatgaagtgcagtgtgggatggggcgtaccggagacctgtttgcttatatgcactacggcgtaacgccggatattctgaccagcgcgaaagcgctcggtggcggtttcccggtcagtgcggtgctcaccacccaggatatcgcttccgcatttcatgtgggctcacacggctctacctacggcggtaatccgctggcgtgcgccgtggcgggtgcggcgttcgacatcattaatacgccggacgtcctgaatggcgtgaatgcgaaacgcgacctgtttgtgaaacatctccagcagattgatgaacagtttgatgtcttcagcgacatccgcggcatggggctgctgatcggcgccgaactgaagccgcagtacaaaggccgcgcgcgcgatttcctgcacgccgccgcgcacgaaggggtgatggtgctcaatgccgggccggacgtgatgcgctttgcgccatcgctggtggtggaagacaaagacatcgaagacggactaacccgttttgccgcggcggtcgcgaagatcgtcagaggctaa

SEQ ID NO: 117249 - DNA, 2088 bp, Enterobacter cloacae
atgtggcgcaggctgatctatcacccggaagttaactacgcactacgacaaacgctggtgttgtgtcttcccgtggccgtgggcctgatcctcggacatcttcagcaaggcctgctgttttccctcgtgcccgcctgctgcaacattgccggtctggatacaccgcataaacgcttttttaaacgtctgattattggcggctgcctgtttgccggctgtagccttgccgtacaactcttactggcccgcgacattcctctgccgttgatcctgaccgtgctggcgatgacgctcggcgtcaccgccgaaatcagctcgctgcacgcccggctgcttcccgcgtcgctgattgccgccatcttcaccttaagccttgcgggcaatatgccggtgtgggagccattgctgatttacgccctcggcacgctatggtacgggctgtttaactggttctggttctggctgtggcgggaacagccgctgcgcgaatccctgagcctgctctacgtgcagcttgctgaatactgcgaagcaaaatacaccctgctcactcaacataccgacccggaaaaatccctgccgccgctgctggcgcgccagcaaaaagtggtggatctgatcagccagtgctatcagcagttgcacatgcttgccgccaacaaaaatcatgaatacaagcggctgctgcgaaccttccaggtcgggctggatttgcaggagcatatctccgtcagccttcataatccggaagaggtgcaaaagctggtggagcgcagccatgcggaagcggtgatccgctggaacgcgcagaccgtcgcggcccgcctgcgggtgctggctgacgatatcctctatcaccgctacccgacgcgctttaacatggacaaacagctcggcgcgctggaaaagattgcgcgtcagcacgcggataacccggtcgggcaatttgctgcctggcatttcagccgcatcgcccgggtgttacgcacccagcgcccgctttatgcccgggacctgatggccgataagcaaaaacggctgccgctgctgcccgcgctcaaaagctatctatcactgaaatcttccgccctgcgcaatgccgcgcggatcagtgtgatgctgagcatcgccagcctgatgggaatggccctgcacctgccgaaaccctactggatcttaatgaccgtgctgtttgtcacccagaacggctatggcgccacgcgggtgcgcattctgcatcgggcgggcggtacgatggcggggctgattatcgcgggcgtgacgctgcactttcacgtgccggaaggctataccctggccggtatgctggcgatcacgctggtgagctacctgatcatccgcaaaaactacggctgggccatggtgggctttacggtcacggcggtgtataccctgcaactgctcacgcttaacggggaacagtttattattgcccggctggtcgatacgctaattggctgcctgatcgcctttggcggcatggtctggttgtggccgcagtggcaaagcgggctgctgaggcagaacgcccacgacgcgctcgaagccgatcagcaggccattcgtcttattctgagcgatgacccgcagccctctccgctggcctacgagcgcatgaaggtcaaccaggcgcataacgccctgttcaactcccttaaccaggccatgcaggagccgggctttaacgcgcactatctggctgacatgaagctgtgggtcacgcacagccagtttatcgtcgagcacatcaatgccatgacgacgctggcgcgggagcacacgatgctgacgccggatctggcgcagcgctatttgcagtcgtgtgaaattgcgttgcagcgctgtcagcagcgtctggagtatgacgcgccgggcgagtcaggggattcgaacattctggaagcgccggagacgctgacccatgggccgatgagcaccctggagcagcatttgcagcgcgtgctggggcatctgaacaccatgcacaccatttcgtcggtggcatggcgtcagcgcccgcatcacgggatttggttaacgcgtcggttaaaacgaaccgcgtattag

SEQ ID NO: 117250 - DNA, 633 bp, Enterobacter cloacae
atggtgcttggcaaaccgcaaacagacccgactctcgaatggttcttgtctcattgccacattcataagtacccatcaaagagcacgctgattcaccagggtgaaaaagcggaaacgttgtattacatcgttaaaggctcggtggccgtgctgatcaaagatgaagaagggaaagagatgatcctttcttatctgaaccagggcgattttatcggtgaactgggcctgtttgaagaaggccaggaacgtagcgcctgggttcgtgcaaaaacagcatgtgaagtggctgaaatttcttacaagaaattccgtcagctgattcaggtcaaccctgacatcctgatgcgtctttcttcccagatggcacgccgtctgcaagtgacctctgagaaggtgggtaacctcgccttcctggacgtgaccggtcgtatcgcgcagacgctgttgaacctggcgaaacagccagacgccatgacccaccctgacggtatgcaaattaaaattacccgtcaggaaatcggtcagatcgtcggctgctcccgtgaaacagtgggccgtatcctgaagatgctggaagaccagaacctgatctctgcccacggtaaaactatcgtggtctacggaacccgttaa

SEQ ID NO: 117251 - DNA, 405 bp, Enterobacter cloacae
atgcaagcgcgtgtgaaatgggttgaagggttaacgttcctgggcgagtctgcttccgggcaccaggttttgatggatggcaactccggcgataaagcgccaagcccaatggaaatggtgctgatggcggcaggcggatgcagtgcgatcgacgtggtgtcgatcctgcaaaaaggccgtcatgacgtgaccgattgtgaagtgaagctgacgtcggaacgtcgtgaagaggcgccccgcctgtttacgcatattaatctgcactttatcgtcaccggcaaagaattgaaggatgcggcggtctcgcgtgcggttgacctgtctgcggagaaatactgctctgtggcgctaatgctggagaaagcggtaaaaatcacccattcttatgaagtgatcgcggcttaa

SEQ ID NO: 117252 - DNA, 870 bp, Enterobacter cloacae
atgtctgccagacatccggttattgccgttacgggttcgagtggggcgggaaccactaccaccagcctcgccttccgcaagatcttcgcccagcttaacttacgggcggcagaggtagaaggcgacagctttcaccgctacacgcgcccggagatggatatggccatccgcaaggcgcgcgatctgggtaaacacatcagctacttcggcccggaggccaatgacttcggcctgctggagcaaaccttccgtgaatacgggcaaagcggtaccgggcagtcccgcaagtatctccacacctacgatgaagccgtgccctggaaccaggtccccggcacgttcacgccctggcagccgctgccggaaccgactgacgtgctgttttacgaaggattgcacggcggcgtggtgacgcctcagcacgacgtggcgcgccacgtggatttgctggtgggggtggtgccgattgttaaccttgagtggatccagaagctgacgcgtgacatgagcgagcgcggccattcgcgagaggcggtcatggactcggtggtgcgctccatggaagattacatcaacttcctgacgccgcagttctcccgaacccacattaacttccagcgcgtccccacagtggacacctccaacccgttcgctgcaaaaagcatcccttccctggacgagagctttgtggtgatccacttccgcaacctggaaggcattgattacccctggctgctggcgatgctacagggttcgtttatttcgcacatgaatacgttagtggtgcccggcggaaaaatggggctggcaatggagctgatcatgacaccgctggtgcagcggctgatggaaggaaagcagatcgcgtga

SEQ ID NO: 117253 - DNA, 219 bp, Enterobacter cloacae
atgattattccctggcaggatctctctcccgacacgctcgataatctgattgaaagctttgtcttgcgcgaaggcaccgattatggtgaacatgaacgttcgcttgaacaaaaggtcaacgatgttaagcgccagcttaaaagcggcgacgtggtgctggtatggtccgaactgcatgagacggtcaatatcatgccccgcaacgcgtttcacggctga

SEQ ID NO: 117254 - DNA, 1020 bp, Enterobacter cloacae
atgactcaaatcattccctcagacttcgacattgcagccgaagagagcgcagagttcgtgcccatgcgcggtgtggctaaccctcacctgcaaaccatgctgccgcgcctgatccgccgcaaggtacagttcaccccgcactggcaacgcctggatttgccggatggcgactttttggatctcgcctggagcgaagatccggatcgggccagacataaaccccgtctggtggtgtttcacggtctggaaggcagcctgcacagcccttacgcacacggtctcattgaggcggcgaaagcccgcggctggcttggggtagtgatgcattttcgcggatgcagcggcgagcctaatcgtcagaaacgtatttatcactcgggtgaaaccgaggacggtacctggttcctgcgctggctaagagacaatttcggcgaggcgccaacggcagcggtggggtattcgctgggcggcaatatgctggcctgcctgctggcgaaggagagcgacgccgtaccgctggatgcggcggtgatcgtctctgcgccctttatgctggagcagtgcagctatcatatggaaaaggggttttcgcgagtgtaccagcgctacctgctcaacctgctgaaagccaacgccgcgcgcaagctgaaggcctatccggatacgctgcctgtgacgctgcaacagctcaaacgcgtgaagcgcctgcgcgagtttgatgatttgatcacctcgaaaattcacggctttgccgatgcgattgactattaccgtcagtgcagcgccatgcctttactgaaccaaatcacgaaacctacgctgattatccacgccaaagatgatccgtttatggatcatcactcgattccggcgcccgatcatctgccgggcaacgtggagtatcagctcacccaattcgggggacacgtcggctttgtcggcggcacgctgcgtcggccaaaaatgtggcttgagacgcgtattcccgactggttaacggcttatctggacggtaaataa

SEQ ID NO: 117255 - DNA, 1656 bp, Enterobacter cloacae
atgttatctgggcaaacacccacccggcaatggaacacccgacgcagtgagaaagcgcgtcgtctggcgtccgtaccggtgcagggcaaggtactgccaaccggcgatcttgtcgccatgctggaaaaactgatcgcaccaggcgacaaagtcgttctggaaggcaacaaccagaagcaggcggatttcctttcccgttcactggcggaagtgaacccgcaaatcgtgcacgatctgcatatgatcatgccgagcgtgggccgcagcgaacatctggacatctttgagaaaggcatcgcccgcaagctggacttctccttctccggtacgcaaagcctgcgaatctcccaactgctggaggatggtcagctcgaaatcggggcgattcacacctacatcgaactctactcacgtttatacgtcgacctatcgccaaacgtggcgctgattgccggttttaaagcggaccgcaaaggcaacctctataccggggcgagtaccgaagatactccggcgctggtggaagccgccgcgttccatgacggcatcgtcatcgcgcaggtgaacgagctggtggacgacgagtgcgacctgccgcgtgtggatattccgggctcgtggattgattttgtggtggttgccgataagccgttctttatcgaaccgctcttcacccgtgacccgcgcctgatcaaacaggaacatatcctgatggcgatgatggcgattaaaggcatctacgctgaacaccaggtgcagtccctgaaccacgggattggctttaacaccgcagcgatcgagctgctgctgccaacctacggcgaacagctcggactcaaaggcaaaatctgtaaacactggaccctgaacccgcatccaacgctgatcccggccatcgaaagcggctgggtggagagcgtccactgcttcggcggcgagctgggaatggaagagtacatccgcgcccgtcctgacgtgttctttaccggtgccgacggctccatgcgctctaaccgcgccttctgtcagctggcaggtcagtacgcggtcgatatgtttatcggctccacgctacaggtcgacggttacgctaactcctcaaccgtgactcgcggccgtctttccggcttcggcggcgcgccaaacatgggccacgatccgcacggtcgtcgccacgccacaccggcctggctgaacatgatcaccgagcctgacccgatgcagcgcggtaaaaagctggttgtgcagatggtggaaaccttccaggcgggcgtgaagccaaccttcgtggaaaaactcgacgccgttgaggtcgcgaaagcctccggtatgccgctggcgccggtcatgatttacggcgatgacgtcacccacgtgctgacggaagaggggattgcttacctctaccgggcgaaagatctggaagagcgtcgcgccatggtcgccgccgtggcgggtatcaccgatatcggtctgggcgttgacgccaaacgcgtggcggaactgcgccagagcggcaaggttgtgtatccggaagatatgggcattcgtcgtaccgatgccacccgttcgctgctggcggccggtagcgtcgcggacctggtggaatggtccggcggtctttacaacccacctgcgaaattccggagctggtaa

SEQ ID NO: 117256 - DNA, 858 bp, Enterobacter cloacae
atgaaacttctgccccagatccaggttgaaggcggtgccgaatggctggcgcgaaccgccacgcagtgtctgattgacgaagcacgtttaagcccgaagcccggtctggtggacagccgggggaacggcgcgcaccacgatttatcgcttgcgctgatggagcgctccgctcacagcctgacccccacgtttcaggcgctggcgcagcagagctggcagcgtccggcggatattgccctcaggcaaaccgttggccgcctgggtcgcgaaggtgaacggcagatgatggccgctaccgacggcgtgaacacgcaccgtggcgcgatctgggcgctgggattactggtgagcgcggtggcgatgctgggcggcgatgcccgggcgcaaaccgtcgcgaacaccgccgctcagctggcgaagctgccggatgacgcggcgccgaaagtgttcagcaaggggttacgcgtcacgcaccgctaccgtgtaccgggcgcgcgtgaagaggctcagcaggcgtttccgcacatcatgcagcgcgcgctgccgcagcttcgcctcagccgtctcaacggcagcagcgaaacgcaggccagactcgacgcgctgatggcgatcatgacctcgctcaccgacacctgcgtgctgtcgcgcgccggcatggaggggctggacgccatgcagaacggcgcccgtgcggtgctgaacgccggaggatgcgcaaccctcgcggggcagcaggcgctggcgcggttagaccgtcagatgctggcgcttaacgcctcgccgggcggagccgcagacctgcttgccgccacgctgtttcttgaccgcgccgaaacgccctattcaaagcattaa

SEQ ID NO: 117257 - DNA, 300 bp, Enterobacter cloacae
atggaaaaaatcacattgaccgtgcccgccagccgcgaagtaagcggcagggcgctggcaggggtcgtcggttccggggatatggaggtgcttttcaccgccgaaccgggccagaccttaaccattgatatcaccacctccgtcgacaacagccgcgggcgctgggaggcattgttcaaccgcctgcaaaccgtcagcagcctgcccgcaggtaagctgaccatccacgacttcggcgcgacgccgggcgtggcacgcattcgtatcgaacaggtttttgaaggggtgaactatgcgtga

SEQ ID NO: 117258 - DNA, 834 bp, Enterobacter cloacae
atgcgtgatgacagcagctttatcgaattaaaagcgcgccagcgtgcgcaggcgctactcgacgacggcagctaccgcgaactgctggatccatttgaaggcattatctctccgtggcttgggccacaggggattgttcctcaggccgatgacggcatggtggtcgcgaaagggaccatcaacggccagcctgcggtggtggtggcgattgaaggcaccttccagggcggcagcatgggcgaagtgtccggcgccaaaatggcggcagcgctggagctggcggcggaagataaccgcaacggcattccgactcaggcggtgctgtgcctcgaaaccggcggcgtacgtttgcaggaagccaacctcggcctggcggcgattgccgatatccacgccgcgatcgttgacctgcgtcgctataccccggtcgtcgggattgtcgccgggaccgtgggctgcttcggtgggatgtctatcgccgcggcgctgtgcagctacctgattgtgacccgcgaagcgcggctcggcctcaacggtccgcaggttatcgagcaggaagcgggcattgaagagtatgactcccgcgaccgtccgtttatctggagcatgaccggcggcgaagtacgctttgaaagcgggctggtggacgcgctggtgggcgacggcgtgaacgcggtgaaagccgcgatgaacgaagccatcgccaaaggcgtaccggcgaaacatcgcaccgataactacgacgattacctgaaccgtctgacgaatttcgacacccgcaaacaggccgatgccgaacagattaaagcgctttttgcccgggaggtgaaatga

SEQ ID NO: 117259 - DNA, 804 bp, Enterobacter cloacae
atgatgactaactcaattagccgtggcgaactctggctggaaactctggccccgaacgcgaaacgtctggaggggttatgcccgtccgtgcaggccgcagacggcgagctaaacggtgaaacggtgcgttttgtcaccgtggtgccggacgccaacaaccacttcccgcgcgcggcgcagggtgaagtcggcctgctggaaggatggacgctggcaaaagtggtcagcgaaaccgtcgccgccgacgcagataaagccgtgaagcgcccgattgtggcggtaatcgacgtcccaagccaggcctatggccgtcgcgaagaggcgtttggtatccaccaggcgctggccggcgccgctgccgcctacgctaatgcgcggctggcgggtcatccggtgattggtcttatcgtcggtaaggccatgtccggcgcgtttctggcgcacggctaccaggctaaccgtctgattgccttcaacgataaaggcgtgctgatccatgccatgggcaaagagtctgcggcgcgcattacgctgcgtaccgttgaggcgctggaaaaactggctgcaaccattccgccaatggcgtatgacatcagcaactacgccacgctggggctgctttccgacctgctggatatcagcaatccggatgcccctaccgaaagcgatctgacgcgggtgaaaaccaccctgcaacaggccatcagcgacgctcgtcaggacaccacgttgaaaaaccgtctgggtgctgacaaccgccgcagctcggcgctcgtacgtgaacgtatgcgagccagctggtaa

SEQ ID NO: 117260 - DNA, 960 bp, Enterobacter cloacae
atgacttacgtaattgttcatgctcttgcaccgattttcgtcatcatgctgctgggattctgggccggtaaggcaaagatggtcgataacaaaaatgtttccctgctgaatatcttcgtgatggattttgcactcccggctgcgctgttcagcgccaccgtgcaaaccccgtggaccggcatcgtggcgcagtcgccgctgatcctggtgctcaccctggcgatgtggatcacctatgcggtcatctacttcctcgcgacgaaagtgtttaaaaaatccccgcaggatgcggccgtgctgacgcttaccgtcgccctgccaaactacgcggcgcttggcctgccgattctgggcagcgtgctgggcgaaggcccttcaacctcactgtccgtggcggtctccatcgcctgtggttcagtgttgatgaccccgttctgcctgctgattctggagcgtgagaaagcccgcgccgaaggcaataactcgggttcaacgctttccatgctgccggtgctgatgtggcgttccattaaaaaaccgatcgtgatgggcccgctgctgggtgtgatcctgtccgctatcggcatcaaaatgccggagctggtactggcggcgattaaaccgctgggactgtctgcgaccgctgcggcgttgttcctgaccggggtgatcctctccgcgcgtaaacttcagatcaacaccatggtgatcacttccactatcgccaagctgctgatccagccagcgattgcctggggtatcgttttaatcttcggtctgcacggttctgtggcgatcaccgccatcctgatgattgcgctgtccgcgggcttctttggcgtggtgttcggtaaccgctttggcgtgcagtcgccggatgctgaagccgtgctgctgttgagctccgtactgtgtatcctgtcgctgccgctgtttatctcgctgacttcaggaatgtaa

SEQ ID NO: 117261 - DNA, 618 bp, Enterobacter cloacae
atgaccacaacattacgcccacacgacctcatctggcttaccgcgcgcgacgccctggaagggattaccgaatcctgggtggacgcggcctggcatgccggactaccggtagtggtgcggcgtgatgttgataatgaaggccgtattcccgttggcgtgcgcggattgcgccgcgaccagcgggcggccggatgggtgaagcctgagaacgtgttgcgcgtggtgtcgcccgaagatttgagcgttgccgccgacctgctgcgttcgccgtttatcactcagccgccggttcaggtggcgcttcagcttgcgcagcagtcgtggccgtggacgtgggggataaccggcagtacgggttacgcgctggcgaccggcattccggtgatccacgccgacagcgatctcgatctgctcatccgcgccccgcgtgccgtttcccctgaggcgtttactggctggcaggctcagctcagccgtgcgttgtgccgggcggatacgcaggtggacacgcccgagggcggattcgcgctggcggaatggttacgcgacggcaaaacgctgctaaaaacgcaatgtggaccgcgcctggtggcggatccatggcacagggaggagtaa

SEQ ID NO: 117262 - DNA, 897 bp, Enterobacter cloacae
atgaaaatactgtttacctttccggggcagggcacacagcatgaaggtatgctgcaaaacctgccgggaacggagctggagcaggcccgtgctgtgctgggggcggaagtcgataccctggacagcgcatgctcgttaacccacacccgtgcggttcagctttcgctgttgattgccggcgtggcgtgggcgcgcgagctggaacgtcgcggcgtgtcgccggatatcgtcagcgggctgtccattggcgcttatcctgcggcggttatcgccggcgcgctggactttacggacgcgctgaagctggtggcgttgcgcggcgatctgatggagcaggcgtatcctcacggctacggcctgacggcaattatggggttgaccctgccgcaggtggaaaacctgattcaggggacaggaacctatattgctaacctgaacgccgaaacgcagatcgtgattgccggagccgatgacggcatggcgcaggtggcggagcgcgccctggcaaaaggcgcgagcaaggctaagcggctggcggtgagcgtaccgtcgcactgtgaactgctggcggaaccggcgcagaagctggtggcagcatttaattcggtcacgctttcacgtccgcgctgtgcgtacctgagcggcagtaccggacgcgtgctctggcagccggagaaaattgccgacgatctggcgatgaatatggcgcgaaccgtgcgctggcaggaggcggtgatttctgctaacgagcgtgaagcgcgtctggcgattgagatgccgccagggggtattctgacctgtctgacgcggcaggcggcgtgggaaggcgaatccatttcgctggagcgcagcggggtggacgtggcggtgcatctggcgggtcggcttcagcggtaa

SEQ ID NO: 117263 - DNA, 933 bp, Enterobacter cloacae
atgggcttcgataccacgagcgagattacattccgtaagctcagcatcttcatgacgttcatggagaagggcaatatcgcacgtaccgccgaaacgctcggcctgagcggtgtcagcgtgcaccgcgcgctgcataccctcgaagagaacgtccgctgcccgctctttgctcacaaagggcgtaacctgattgccctcccctccgcgtggacgctgctggagtattgtcaggaggtgatgcaggtgatggagcgcgggctggaagagtcgcgcaagatcgccggtatcggccagggacggttgcgcgtcggcacgctctactcgctgacgctggaaaccgtgccgcgcctgataatgggcatgaagctgcgccgtccggatctggagatggatctgacgatgggctcgaacgaaaccctgctccatatgctggatgagggatcgctggatgcgattttaatctctatttccgaaagcgatatcgaccgtaacagcctcgaagtgcttcctctgttccatgacgatattttccttgccgcaccggcctctgccacgctgaataccagcggccccgccgatctgcgtgattataaagatcagaagtttgtcgccctagcggaagggttcgccacttacgccgggtttcaggaagcgtttcatatcgccggtttcgagccggagattgtgacgcgcgtgaacgatatcttctcgatgctgagtctggtgcaggcgggggtcgggtttacgctgatgccgggcaggatgaagaaagtgtatgaaaattcggtgcagctactgaagctggcgcagccgtaccagatgcagcagctgatcgcgatcgtctttgcccgcaaccgcgagcaggatccgagcctgcgggcattggccgcggaagggcggatgtatgcgagaagtttgcaggatagtgcctga

SEQ ID NO: 117264 - DNA, 1905 bp, Enterobacter cloacae
atgattgttttctcctcgttacaaattcgtcgcggcgtgcgcgtcctgctggataacgcgactgctaccatcaacccgggccagaaagtggggctggtcggcaaaaacggctgcggtaaatccaccctgctggcgctgctgaaaaacgagataagcgcggatggcggtaactttaccttcccgggcaactggcagctcgcctgggtgaaccaggagacgcccgcgctgagcgaacccgcgctcgactatgttatcgacggcgaccgtgaataccgcaagctcgaagcggagctcaacgccgccaacgaacgcaacgacggccacgccatcgccaccgtccacggcaagctggacgccatcgatgcctggaccattcgctcccgtgcctccagcctgctgcacggtctgggtttcagcaacgaacagcttgaacgcccggtgagcgatttctcgggcggctggcgcatgcgccttaacctggcccaggcgctgatctgccgctccgaccttttgctgctcgatgaaccaaccaaccacctcgatcttgatgcggttatttggctggagaagtggctcaagagctatcagggcactctgattctgatctctcacgaccgcgacttcctcgatccggtagtggataaaatcattcatatcgaacagcaaagcatgttcgaatacaccggcaactacagctctttcgagcgccagcgcgcgacgcgccttgcccagcagcaggcgatgtatgaaagccagcagcagcgcgtggcgcacctgcaaagctttgtggatcgcttcaaggccaaggcgtcaaaagccaagcaggcgcagagccgcatcaagatgctggaacgcatggagatgatcgccccggcgcacgtggataacccgttccacttcagcttccgcgagccggagagcctgccgaacccgctgctgaaaatggaaaaagtgagcgcgggctatggcgatcgcattatcctcgactctatcaagctcaacctggtgccaggttcacgcattggtctgctgggacgtaacggcgccggtaaatcgacgctgatcaagctgctggcgggcgagcttaacccggtcagcggcgaaatcggcctggcgaagggcatcaagcttggttacttcgcccagcatcagctggaatttttacgcgcggatgaatcgccgatccagcacctggcgcgcctggcgccgcaggagatggagcagaaactgcgcgactacctcggcggctttggcttccagggcgataaggtgacggaaaacaccgagcgcttctccgggggcgaaaaagcccgtctggtgctggcgctgatcgtctggcagcgcccgaacctgctgctgcttgatgaaccgaccaaccacctcgatctcgacatgcgccaggcgctgaccgaagcgctgatagagttcgaaggggcgctggttgtcgtatcgcacgaccgccacctgatccgctccaccaccgacgatctctacctggtgcacggcggcaaagtggagccgttcgacggcgatctggaagattatcagcagtggctgacggacgtgcagaagcaggaaaaccagccggaagagtcagcgaaagacaacgccaacagcgcccaggcgcgtaaagatcagaagcgccgtgaagcggaaatgcgcacccagacgcagccgctgcgtaaagagattgcccgtctcgaaaaagagatggaaaagctcaacgccacgcttgctgccgtcgaagagaagctgggcgacagcgaactgtacgatcagagccgcaaagcggagctgacggactgtctgcaaactcaggcgaaagccaaatccagcctcgaagagtgcgaaatggcatggctggacgcgcaggaacagctggaagcgatgctgcaagccgactaa

SEQ ID NO: 117265 - DNA, 552 bp, Enterobacter cloacae
atgtctcagacagcgaaagtgctgctgctgtatgcccatccggaatcacaggactcggtggcgaaccgggtgctgcttaagccggccacacagctcagtaacgtaacggtgcacgatctctacgcgcactatcctgatttttttatcgatattccttacgagcaggaactgctgcgtcagcacgacgtgattgtgttccagcatccgctttatacctacagctgtccggcgctgctcaaagagtggctggaccgcgtgctgagccggggcttctccagcggggtggggggcaaccagctggcgggaaagtactggcggagtgtcattaccaccggtgagccggaaagcgcttaccgtcacgacgggctgaaccgttaccccatgagcgacattctgcggccgtttgagctgacggcggcgatgtgccgtatgcactggatgagcccgattattatctactgggcacggcggcaggatccgaaagcactggcgagccatgccagggcctatggcgaatggctggcgtcaccgattccggcgggaggacgctaa

SEQ ID NO: 117266 - DNA, 1806 bp, Enterobacter cloacae
atggacggttcgaatttactccttgccggggtgctgtttctgtttgccgccgtcgtcgcggtcccgcttgccgcgcgtctcggcattggcgcggtgctgggctatttgctggcggggatcgccattggcccctgggggcttgggtttatcagcgatgtggatgaaattctccacttctccgagctgggcgtggtcttcctgatgtttatcatcgggctggagctgaaccccgccaagctgtggcaactgcggcaatctatttttggcgtcggggcggcgcaggtgttactcagcgcggccattctcgcgggactgctgatgttgacgcagttttcctggcaggccgcggtgattggcgggatcggtcttgcgatgtcgtcgacggcgatggcgcttcagctgatgcgcgacaaagggatgaaccgcaacgaggcggggcagctgggtttttcggtgctgctgttccaggatttagcggtgatcccggcgctggcgctggtgccgctgctggcgggctccggagacgatcatttcgactggatgaagatctccatgaaggtgctggccttcgcggggatgctgatcggcggacggtttttactgcgtccggtattccggtttattgccgcatccggcgtgcgcgaggtattcaccgccgcaacgctgctgttggtgcttggctcagcgctgtttatggatgcgctggggctgtcgatggcgcttgggacgtttatcgccggggtgctgcttgcggaaagcgagtaccgccacgagctggagaccgccatcgatccgtttaaggggctgctgttagggctgttctttatctcggtgggtatggcgcttaatcttggcgtgctctatacccatctgctgtgggttattgcgagtgtcgccgtgctggtggcggtcaaaacgctggtgctgtatgtcctcgcgaggatttacgggctgcgcagctcggaaagaatgcagttttccagcgtgttaagccagggtggagaatttgcgtttgtgctgttttccacggcgtcgtctcagaagctgttcaaagatgaccagatggcgctgctgctggtgacggttacgctgtcgatgatgaccaccccgctgctgatgaagctggtggacaaactgctgtcgcgccgcctgaatcccgcagacgatgaagacgaagcgccgtgggtggaagatgataaaccgcaggtgatcgtcgtgggctttggtcgcttcggacaggtgattggtcgcctgttgatggcgaataaaatgcgcattacggtgctggagcgcgatatcagcgccgtcaacctgatgcgcaaatatggttataaggtgtactacggcgatgcgacgcagcttgagctgttgcgctcggcgggggcagaggctgcggagtccatcgtcatcacctgcaacgatccggaagacacgatgaagctggtggagctgtgccagcagcatttcccgcatctgcatattctggcgcgtgcgcgtggacgtgtggaggctcacgaacttttgcaggcgggtgtgaaacacttctcccgcgaaaccttctccagcgcgctggagctgggacgcaaggcgctggtttcgctgggtatgcatcctcaccaggcgcaacgcgcccagatgcatttccgccggctggatatgcgaatgctgcgtgaactgatgcccgtgcacagcgacacggcgcagatctcccgcgtgcgggaagcgcgtcgcgaactggaggagatcttccagcgtgagatgcaacaggaacgacgccagctcgacggctgggatgaatttgaataa

SEQ ID NO: 117267 - DNA, 201 bp, Enterobacter cloacae
atggctgtacgtaaacgctttatcgcgggcgcaaaatgcccatcctgccaggcgcaagatacactggccatgtggcgtgaaaataatatcgatatcgttgaatgtgttaagtgcggtcaccagatgcgtgaggccgacaaagaagcccgcgatcacgttcgcaaagaagagcaagtgatcggcatttttcatccagactag

SEQ ID NO: 117268 - DNA, 591 bp, Enterobacter cloacae
atgaaagtagcaaaagacctggtggtcagcctggcctatcaggtacgtacagaagacggtgtgttggttgatgagtctccggtgagtgcgccgctggactacctgcatggtcacggttccctgatttccggcctggaaacggcgctggaaggccatgaagttggcgacaaattcgacgttgctgtaggcgcgaacgacgcttacggtcagtatgacgacaacctggttcagcgcgttcctaaagacgtattcatgggcgttgacgagttgcaggttggtatgcgcttcctggcggaaactgaccaggggccggttccggttgaaatcactgaagttgaagacgaccacgttgtggttgacggcaaccacatgctggcgggtcagaacctgaagttcaacgtagaagttgttgcgatccgtgaagcgaccgaagaagagctggctcatggccacgttcacggtgcgcacggtcacgaccatgaccacgatcacggccacgacggctgctgcggtggtcacggccacgaccatggtcatgaccacggccacggtaaaggtggttgtggtaacggcggctgcggttgccactga

SEQ ID NO: 117269 - DNA, 219 bp, Enterobacter cloacae
atgaaggatacaacgatcgaagcgagactggctgagctggaaagccgcctggcttttcaggacatcaccatcgaagaactgaaccagaccgtgacggcccatgagcttgaaatggcaaaactgcgcgatcacatgcgcctgctgacggaaaagctgaaggccacgcagccgtcaaacattgcctctcagtcagaagagacgccaccacctcattattga

SEQ ID NO: 117270 - DNA, 819 bp, Enterobacter cloacae
atgaaatcactgtttaaagttacgctgctggcgaccactatggctgtagcgctcaatgcgccgctgtctttcgctgctgatactgctgcgaagcctgctgcgactacagacagcaaagcggcattcaaaaatgacgaccagaaatccgcctacgcacttggcgcgtctctgggtcgttacatggaaaactctctgaaagaacaagagaaactgggcatcaaactggacaaaaaccagctgatcgcaggggttcaggatgcgttcgcagacaagagcaaactgtctgaccaggaaatcgagcagactctgcaagcgtttgaagcgcgcgtgaaaggcgccgctcagaccaagatggaagcagacgctaaagataacgaagcgaaaggcaaagcctaccgcgacaagttcgctaaagagaaaggcgttaaaacctcttctactggcctgatctataaagttgagaaagaaggtaccggcgacgcgcctaaagacagcgacaccgttgtggtgaactacaaaggtacgctgatcgacggtaaagagttcgataactcttatacccgtggtgagcctctctccttccgtctggatggtgtgatcccgggctggaccgaaggcctgaagaacatcaagaaaggcggtaaaatcaagctggtcatcccaccggatctggcttacggcaaaaccggcgttccgggtatcccggctaactccacgctggtatttgatgtagaactgctggacatcaaaccggcgccgaaagcggatgcgaaaacagacgcaccggctgacgacaaagccgcagcagctaagaagtaa

SEQ ID NO: 117271 - DNA, 723 bp, Enterobacter cloacae
atgtccaggtcgcttttaaccaacgaaaccagtgaacttgatttgctggatcaacgtccatttgaccagaccgacttcgatattctgaaatcctacgaagcggtagtggacgggttagcgatgctcattggttcccactgcgaaatcgtattgcattccctgcaagatcttaagtgttccgctatccgcattgcgaatggtgagcacactggccgtaaaattggttcgccaataaccgaccttgcattgcgtatgttgcatgacatgaccggcgcggacagcagcgtctcaaaatgctatttcacccgcgccaaaagtggcgtgctgatgaaatcagaaacgatcgcgattcgaaatcgcgaacaccgggtaatcggtttgctgtgcatcaacatgaaccttgatgtgccattctcgcaaatcatgagcaccttcatcccgccagaaacgccggacgtgggctcatcggtgaactttgcttcttcggttgaggatctcgtgacccagacgctggagttcaccattgaagaggtgaatgccgatcgcaacgtatccaacaacgccaagaatcgtcagatcgtcctgaacctctatgagaaagggatttttgatatcaaagatgccatcaaccaggtggccgatcgcctgaatatctccaaacacacggtttacctctatattcgccagttcaaaagcggcgacttcctgggacaagacaagtaa

SEQ ID NO: 117272 - DNA, 387 bp, Enterobacter cloacae
atgcgttttgcgttaatggtgacgggcccggcgtacggtacccagcaggccagcagcgcgctacagtttgcccatgcgctgcttgatgccggtcatgaactggcaagcgtcttcttttatcgcgaaggcgtatataacgcgaaccagtttacgtctccggcgagcgatgagtttgacctcgtgcgcgcctggcaaaaattaaacgaaacgcagggcgttgacctgcatatctgcgtcgcggcggcactgcgtcgcggcgtgacggatgtgaccgaagccgaacgccttggtctggcgggggctaacctgcaaccgggcttttcgctcagcggactgggtgccctggcacaggcggcgttgacctgcgacagagtggtgcaattttga

SEQ ID NO: 117273 - DNA, 360 bp, Enterobacter cloacae
atgaagcgcgtagcgtttgtttttacttctgcgccgcatggcagcgcttcaggccgggaagggctggatgcattgctcgcgacatcggctttaaccgaagatatcggcgtcttctttttaggcgatggcgtattccagcttctggcaggccaacaaccgcaggccattcttgcgcgcgactacattgcgacctttaaagttctgccgctctatgacattgaaaccttctatgtgtgcgccgactcgctggccgcgcgtgggttaaacgagaaaacaccgttcgtgctggacgtgacgatcctgacatctgctgcgctgcgcgaacaactctctcactacgataccgttctgactttctga

SEQ ID NO: 117274 - DNA, 288 bp, Enterobacter cloacae
atgctccataccctgagccgttcaccgtggcaatgcgatatcgacacgttactgagcatgctgcgcgaaggtgatgatctgctgctgattcaggatggcgtgcttgcggcgcttgaaggcagccgttttgttgaaatcctcgctaatgcccccataacagtctctgcgctgaaagaggatctggatgcgcggggtctttctggtcaaatttcagccaaaattgacgtggttggctatactgatttcgtcaatcttactgtgacgcacgccagtcaaatgaactggtga

SEQ ID NO: 117275 - DNA, 375 bp, Enterobacter cloacae
atggcaacagttaaccagctggtacgcaaaccacgtgcacgcaaagttgcaaaaagcaacgtgcctgcgctggaagcctgcccgcagaaacgtggcgtatgtactcgtgtatataccaccactcctaaaaaaccaaactccgcactgcgtaaagtatgccgtgtgcgtttgactaacggtttcgaagtgacttcctacatcggtggtgaaggtcacaaccttcaggagcactccgtgatcctgatccgtggcggtcgtgttaaagaccttccgggtgttcgttaccacaccgttcgtggtgcgctggactgctcaggtgttaaagaccgtaagcaggctcgctccaagtacggcgtgaagcgtcctaaggcttaa

SEQ ID NO: 117276 - DNA, 471 bp, Enterobacter cloacae
atgccacgtcgtcgcgtcattggtcagcgtaaaattcttccagatccgaaattcggatcagaactgctggcaaaatttgtaaatatcctgatggtagatggtaaaaaatctaccgcagaagcaatcgtatacagcgcgctggagaccctggctcagcgttctggtaaaaatgaactggaagccttcgaagtcgctctcgacaacgtgcgcccgactgtagaagttaagtctcgccgcgttggtggttctacttatcaggttccagttgaagttcgtccggttcgtcgtaatgctctggcaatgcgttggatcgttgaagctgctcgtaaacgcggtgataaatccatggctctgcgtctggcgaacgaactttctgatgctgcggaaaacaaaggtaccgcagttaagaaacgtgaagacgttcaccgtatggcagaagccaacaaggcgttcgcacactaccgttggtaa

SEQ ID NO: 117277 - DNA, 2115 bp, Enterobacter cloacae
atggctcgtacaacacccatcgcacgctaccgtaacatcggtatcagtgcgcacatcgacgccggtaaaaccactactaccgaacgtattctgttctacaccggtgtaaaccataaaatcggtgaagttcatgacggcgcagccaccatggactggatggaacaggagcaggagcgtggtattactatcacctccgcagcgactactgcattctggtcaggtatggctaagcagtacgaaccgcatcgcgtaaacatcatcgacaccccagggcacgttgacttcaccatcgaagtagaacgttccatgcgtgttcttgacggcgcggtaatggtttattgcgcagttggtggtgttcagccacagtctgaaaccgtatggcgtcaggcaaacaaatataaagttccacgcatcgcgttcgttaacaaaatggaccgtatgggtgctaacttcctgaaagttgttggccagatcaaaacccgtctgggcgcgaaccctgttccgcttcagctggcaattggtgctgaagaaggtttcaccggcgttatcgacctggtgaaaatgaaagccatcaactggaacgaagcagatgcgggcgttaccttcgaatacgaagatatcccggcagagatgcaggacctggctgacgaatggcaccagaacctgatcgaatccgcagcagaagcttctgaagagctgatggagaaatacctgggtggtgaagaactgtctgagcaagagatcaaatctgctctgcgtcagcgcgttctgaacaacgaaatcatcctggtaacctgtggttctgcgttcaagaacaaaggtgttcaggcgatgctggatgcggtagttgactacctgccatccccggttgacgttcctgcgatcaacggcatcctggacgacggtaaagatactccggctgagcgtcacgcaagtgatgacgagccgttctctgcactggcgttcaaaattgctaccgacccattcgtgggtaacctgaccttcttccgcgtttactctggtgtggttaactccggtgacaccatcctgaactccgtgaaagcggcgcgtgaacgttttggccgtatcgtacagatgcacgctaacaaacgtgaagagatcaaagaagttcgtgcgggcgacatcgctgctgctatcggtctgaaagacgtgaccactggtgacaccctgtgtgacccggatcacccgatcattctggagcgtatggaattccctgagccggtaatctccatcgcagttgaaccaaaaaccaaagctgaccaggaaaaaatgggtctggctctgggccgtctggcgaaagaagacccatcattccgcgtatggactgatgaagaatctaaccagaccatcatcgctggtatgggtgaactgcacctggacatcatcgttgaccgtatgaagcgtgaattcaacgttgaagcaaacgtgggtaaacctcaggttgcttaccgcgaagcgattcgcgcgaaagttaccgatgttgaaggtaaacacgctaagcagtctggtggtcgcggtcagtacggtcacgttgtgatcgacatgtacccactggagccgggctctaaccctaaaggttacgagttcatcaacgacatcaaaggtggtgtaattcctggcgaatacatccctgccgttgataaaggcatccaggagcagctgaaagctggtcctctggctggttacccggttgtagacatgggtgttcgtctgcacttcggttcttaccacgacgttgactcctctgaactggcgtttaaactggctgcgtctattgcctttaaagaaggctttaagaaagcaaaaccagttctgcttgagccgatcatgaaggttgaagtagaaactcctgaagagaacaccggtgacgttatcggtgacttgagccgtcgtcgcggtatgctgcgtggtcaggaatccgaagtaactggcgttaagatccacgctgaagttccgctgtctgaaatgttcggatatgcgactcagctgcgttctctgaccaaaggtcgtgcatcatacactatggaattcctgaagtatgatgatgcgccgaacaacgttgctcaggccgttatcgaagcccgtggtaagtaa

SEQ ID NO: 117278 - DNA, 633 bp, Enterobacter cloacae; identical to SEQ ID NO: 32308

SEQ ID NO: 117279 - DNA, 1404 bp, Enterobacter cloacae; identical to SEQ ID NO: 32307

SEQ ID NO: 117280 - DNA, 570 bp, Enterobacter cloacae
atgtttaaagttttaacccgtcgcctgcaatattgtaacgaggtgtccgccagcataaaaaatgccgccccgacacagttgcagcagcttaagacgcagttggctgaagatatggttaagcctgtgggactacataccatgggtattccggcggcggtcagtacgctcggggtgattgtcagtttcgccattccgcaactgtggctggggtatggcgtactcgccgcactcggccagccagcagagcgcgtattcgtgtgggtcgtgctgatcgccctgctcttcgctggcatcaacggagtgacgatgtttatgattggcaaaggtagcatgcgtgccgtgcggttacatcttacgctggcggtgctaagcctggtattaacggcagcctatctgctggccgcgctgagcggtagttcttcttcgggcgtcagtctgaccgcggcgctggtaagtattgtcatgcttgggcttagcggtatctgtatcctctctaccgctttctataagatgctgctatttactttgcataacagagtctggcgcaagcttatcagccagacgcgctaa

SEQ ID NO: 117281 - DNA, 486 bp, Enterobacter cloacae
gtgggacgtgtaacagcaccagagcccttatccagcgtccatcaactggcggagttcgtcagcggagaggccgtgcttgacgaatggctaaaacaaagaggtctgaaaaaccaggcgctcggcgcagcccgagcgtttgtcgtttgtaaaacgggcacgaagcaggtcgcgggattttactctctggctaccggcagcgttaaccatacgcaagcgacaggtaatctgcggcgtaacatgccggatcccattcccgtgattatacttgcccgtctggctgtggatgtctcgttacgcggaaacgggttgggagccgatttactccacgatgcggttttacgctgttatcgggtagctgagaatatcggggtgcgagcgatcatggttcatgcactcactgaggaagccaaagcgttttatatccaccatggtttcaaagcatcgcagactcaggaacggacactgtttctcaggcttcctcagtag

SEQ ID NO: 117282 - DNA, 267 bp, Enterobacter cloacae
atgaaatcagatgttcaactcaatctcagagccaaagaatcccagcgggcgcttatcgatgccgccgcagagatcctccataaatcacgcacggacttcattctggagatggcctgtcaggcagccgagaatgtgatcctcgatcgacgtgtattcaattttaacgatgaacagtacgcagagttcattgacatgctcgatgccccggtcgcggacgatcctgccatagaaaaactgctggcaaggaaaccgcagtgggacgtgtaa

SEQ ID NO: 117283 - DNA, 828 bp, Enterobacter cloacae
atgagccggacattaagcaggttacgcgacgttacaggcgacccgatcctggtgcgcgccgggcgtaacatggtactaaccccgtgggccgaagcgacccgggatcgcgccagacgtgcagtgcacgaggcgagggcggtattgcagccctcaactgaaacgttcagtgcgcaaagtctggcgcgcctttttaccatcagggcaaacgatggttttgtggtggcgtttgggcctgcgcttatagcggctgtggccgacgccgcgccggacgtctgtatacgctttgcgcctaagccggaaaaaacgtcgcgctatcttcgggaagggctggttgatctggagattggcgtccagagcaatatggggcctgaaatacggctgcaacgactgtttgaggatcggtttgtgggcgtcgtgcgtaagggacacccgctggctaagcaggcagaaataggcgtgaaggattatgtcgcctggggccatgtggtagcgtcacccgagggcgcgttgcacggttccgttgacgatgcgctggccgaactggggacaaaacgtaaaatcgccagcgtcgtaccgggatttccgacggcactgtccgtggcgctggaatcggatcttatcaccatgatacccgcgctctatttactcaatcagcaggtaacggaccaggtacatctgttcgagttgccgttcaaaagccgtcgtattacggtatcgcagatgtggcacccaagaatggaacgcgaccctggtcaccgctggctgagagagcaaattcttgcgatatgcggtgtggagaggtcagacataatttcgggctctgtatag

SEQ ID NO: 117284 - DNA, 1392 bp, Enterobacter cloacae
atgatgacgctcttttccagtcaacccggcgacgaaggactgcctggcccggcgcgcgcacgggtgatggccgcaattatgaccaccaccttaatgggcgtgtttgatggcaccatgatcaacattgccctgccctccatggctcaggagatgcaggtacctgccagtattgccgtctggttcgccaacgggtatctgctggcggctgcgatgacgctggcgatattcgcggcgcttgcggcccgcctgggttatcgccccgtatttctggcaggtctgacgacctttaccctgacatcactgggttgcgcgctggcgaatacacccgaagtgcttatcggtatgcgcgtgcttcaggggatcggcggcgcggcgacgctgagtattgcccccgcaatcctgcggtccgtatttcccgggcgattgcttggccgcattctggggttgcacgccctgctcatcgcctccagctccgctatcggcccggtattgggcgggacgatccttcacaccctgagctggcaatggctgtttgcgataaacgttgttcccggcaccctcgccttactgctggcggtcaaagcgctgccgcgggatgcggttcgaaagcaagcgcctttcgacaacccgggcgccatattgtcggcgctgctgttggggtcgacgatcatggcggcgaacagcctccatgacgcgacttatcaccttggcagtctttgctggacaatgctcgctgcgctgagcggcatggcgtttatctggcagatccgccgcgcggataaccccttactgccgccgatgatgtttaaaaatgaacgttttaccctcgcggccttcacgtcgatgattgcttttgtcagccaggggatcacctttattgcgctgcccttcctgtttcagagcgaatacggctacagcccggtgttgtctgccctgctgtttacgccgtggccgctagggatcgtactgattgcgccgcatgcaggccggtgggcagacacgatttcagccccggcgatatccaccctggggctgatgatttttgtcgtcggtttgatcctgctggcaacattacccgaccgcccttcagtgtgggatatctgcctgcggagtctggtgtgcggagtggggtttggctgctttcagagtcccaataaccgggaaatgctctccaacgttattcgtgagcatgcgagctatgcatccggtgttttatccattatgcgcacgttcgggcagtgtcttggcgccgccgccgtggccgttctgctggccgcagatgaaaggtcaattcatgttgcgctgtgggtcgccgccgcagcttctgcggtagcggtcgtcgtcagcgcgagccggttgcgtaaaatcactcatcctgcggaaacaggatga

SEQ ID NO: 117285 - DNA, 996 bp, Enterobacter cloacae
atggaattaacccaacatcaggctgacgcctttgccagaatgccgttgacctatttacgtcaggaatacccgaaccacattatgcatctgctcaacgatgacggcgacgttttgccgcctcgcgagctgcacccgatcttttacggctgttttgactggcactctgcggtgcacggctactggctgctgctgcgttgcctgcgtctctggcccgaactgccgtgccgggaagagatcgtcactctgttcgaagaacacctgaccgacgagaaggtggcgaaggagctggcctattttaccgcgccgttccgcgcgtcgtttgagcggccttatggctacggctggctgctggcgctggcgcaggagctgaaacagtcgtcactgccacaggcggagcgctggtaccagacgctgcaaccgttaacgcgggatattcgtcagcggctggtggattacctcagcaagctcacctatcccatccgcgtcggaacacattacaacacggcgtttgcgctcgcgctggggctggattatgcccgggcggtgacggatgacgggcttgaacaggcgatcctggacgcggcgacgcgcttttatcatacggacacgcaatatccggcgcattatgagccgggcggcgacgagtatatctccggggcgctgaccgaggcgttactgatgagtaaggtggtagagaatttcccggcctggttcgatgcgtttctgcctgaagtgggtgccgtttcagcgctgatgaacccggctgaggtaagcgaccgcaccgacccgaaaatcgcacatctggacgggcttaacctcagccgcgcgtggtgtatgaagcacattgcccgcgctttgctggaaaaccacccggcgcaacaggcgttacaggatgccgttgcgcgccatctctcggcaagcgtggagcatgttgtcggcagtcactacagcggcggccactggctggcgagttttgcgctgctggcgctggagtag

SEQ ID NO: 117286 - DNA, 987 bp, Enterobacter cloacae
atgatgaccctcatcaccattaaccgcgtgtattacctgatcggcttcgtcgtgatgctgctggttgtgatgacccttcgcgaccgcgctaacccgaaacgctataccacggcgctgttctggtttctgttcggcgggatcttcctgtttggcgatctgatggtgcaggagctgggtaagtcgctggcgtatcgcattattggcggcgccgttatcgtgattgcgctgctggccggtttcgggctggtcgggaaggggcactataaaatgtccaccgaggaggagcgtgttgcctcgtcgaaccggctgaaaaactggctgtttttaccggcactgatgatccccgtggtaacggtcatcgggacgctgtttctgaaaggcgtgtcgattggcggcgtttatctgctcgaccagaaacagcttacgctggcggcgctgtgcgtggcatgcgtggcggctatccttaccggctggtggctgacaaaaggtacgccgctgcatgcggtgcgtcagtcgcgtcggctggtcgataccattggctgggcggtgatcctgccgcagatgctcgccatgcttggcggcgtgtttgtggtggcgaataccggagaatcggtacaaaaggtggtcagcctgtttgttaacccggacagccgcttcatgctggtggtcatttactgcgtggggatggcgctgtttaccatgatcatgggtaacgccttcgcagccttcccggtgttaagcgccggtatcgctctgccattcctgattaacgtccatcacggtaacccggcgccgctgctggctatcggtatgtacgctggctattgcggcacgctgatgacgccgatggccgccaacttcaacattgtgcccgccgcgctgctggagctaaaagacaaatatcaggttatcaagatccagatcccgaccgcgttaaccctgctggtggtgaacgtgttcttaatgtatttcctcgtgtttcgctaa

SEQ ID NO: 117287 - DNA, 723 bp, Enterobacter cloacae
atggacagttctacactgttgccacttatcgggattccggtggtggttattggttttgcactgcgtttcaacccgctgctggttgtcgtggtggcggggctggcgacgggcctgctggttggcatggatttcggtatgctgctggaaacctttggcgaaaagtttgtgaatagccgatcgcttgccaccttcattctgatcctgccggtgattggcctgctggagtattacgggctgaaagagcgcgcccaggcctgggtcgcgaagatcgccagcgccacctcggcgcgtatcctgatgctctactttgtcgcccgcgaagggacggctgcgctgggcctgatgtcccttggcggccacgcgcaaacggtgcgtccgctgctggcgccgatggcggaaggggcggccctgaatgaatacggcgaactgccgcagactatccgcgacaaaatcaaagcccatgccgccgcgtgtgacaatatcgcggttttctttggggaagatatctttatcgcctttggcgcggtactgctgattgatgcgttcctgaaagagaacgggatcgaggggatcgaaccgctgcatatcggcctgtgggccattccgaccgctattgcggcactgatcatccatatgacgcgtctgctgcgcctcgacgccagcattcgtcgcgacgtgatggcctggaaagcagagcagggtacgcaggagatcgcaccatga

SEQ ID NO: 117288 - DNA, 549 bp, Enterobacter cloacae
atgacagtaaagaaaaagacgacagcgttaaaccacgacgatattgcggacgggcgaatcgtctcctcccgtcatctcgtctcagagcggtgtgctgaattatcagagctggaatatgcgctgatcatgaccagcaatgcgtttaacaaatggatggtgcgctgcatgaccgcagcgggtgaaccggatatgggggcctttgacgtttcgcttctgcaccacgtgaatcaccgcaaccgcaagaaaaagctggccgacatctgctttgtgctgaacgtggaagatacccacgtggtaacgtatgcgctgaaaaagctggtcaaggcgggatatgtcaccagcgagaaagccggaaaagagctttttttctccaccacggaggagggaaaagcgctgtgcatgaagtaccgggaggtgcgggaggcctgcctgatcaacattcatgcggaaagcggcattccgggagcatcaattggcgagaccgcgcagttactccgcgcgatctcctccctgtatgataccgccgcacgcgcggcggcctcgctttaa

SEQ ID NO: 117289 - DNA, 2076 bp, Enterobacter cloacae
atgccaaaggatacaacgtttgaaattcgggccggtcatggccagcagttgggcgcaaattatgacgggaaaggggtgaacttcgctctgttttccgcccacgcggagcgggtagagctgtgtctgtttgatccttcgggaaaaacagaaatagcccgcctggaactgccggaatatacccatgaggtctggcacggctatgtgccggatctgaaaccgggggcgctgtatggttaccgtgtgtatggcccttacgatccggagaacggtcaccgcttcaatcccaataagctgcttattgacccctatgcccgtgaactggtgggtgacattgagtggaacgatgcccacttcggctatgagctgggacacgatgagctggatctcagctttgatacgcgagacagcgcgccgtttacgcccaaatgtaaggtcatcgaccccaatgccgttgactggcaagactcccgccgacccgatatcccgtggccgcataccgtggtctatgagagccacgtcaaaggttttacccagcttaacccggctattccgcctgaactgcgcggtacgtttgaggggatggggcataaagcgtcggtggagtacatcaaaagcctcggcattacctcggtcgagctgctgccggttcactggttccctgacgatcagcacctgatcaatcgcggcctgaaaaacttctggggctataactcgctcggtttctttgcgccagcgtcccgctattacggcccggcggggatcaagggtttccgcgacatggtgcgtgcctatcatgacgcgggcatcgaggtgatcctcgacgtggtctataaccacacggcggagggcaacgagctggggccaaccctgtcgtttaaggggattgataacttctgctattaccgcaccatgccggatcagcaccggtattacatcaacgacaccggcaccggaaacaccgttaatacttcacacccgcgcgtattgcagatggtcatggactccctgcgttactgggcggaatcgatgcagattgacggtttccgctttgacctcgggaccattctcggacgtgagccggaggggttcgatccgcgcggcggcttcttcgatgccgtgacccaggatccggtgctgtcgaagctgaagctcatcggtgagccgtgggatatcggccccggcgggtatcaggtgggaggcttcccgcctggctggggtgagtggaacgacaaataccgcgatacggtacgtgaatactggaagggggataacgtctctaacgattttgccgcccgtctgttagggtccggtgatttgtacgatctgcgcgggcgtcgtccgtgggccagcgtcaattttattaccgcgcatgacggcttcacgctgaacgacctggtgtcgtataacgagaaacataacgccgataacggggaagataataacgacggacataacgataaccggtcgtataactacggcgaagaggggccgacggagaatccggatatcatcgccacccgcgagcggcaaaagcgcaacttcctcaccacgctcttcttctcgcacggcacgccgatgctgctggcaggtgatgaatttggccggacgcaaaagggcaataataacggctattgtcaggacagcgagatctcctgggtaaactgggaaggactcactgaaaacgacgagaagctgcgcgactttacccgtcagttgattgccctgcgcgcaacgcagccgctgctgcgacgtgaaaactggcgcgacgggctggagatccgctggtttaacgccggcggcggaccgcagcagtcggaacaatgggacgagggttccacccttggtcttgccatcagccgtcccgatcttgagcaggaagagggcgtctggcacgacgtgctgatgctgtttaacccgtttgaaggcacggttccattccagatcccgcagtttggcgaagggggttgggtgctggagctttcgacggcggatgaggcccccacaggggaaatcatcacggaatccgtcgattatgaactggccgggcggagtatgacgcttttccgccgtccttaa

SEQ ID NO: 117290 - DNA, 2469 bp, Enterobacter cloacae
atgatcccttcctctacttaccgaattcagtttcgcaacggcatgaccttcgatcgcgtggtggacctgattccgtatatgaaagaccttggaattagccatctttacgcgtcgcctgttttcaccgcaaccacggattccacccacggctatgacgtgaccgaccccaacgaaatcgacccggcgattggcgggcgggaagggtttgaccgcatggcggcagcgctgaagcaggcggggatggggctgattctggatatcgttcctaaccatatgtcgacctcgctggaaaaccgctggtggcgcgatgttatagaacaaggcaggcagagccgctatgcggcatattttgatatcgactggtcccgaccgctgacgttgccgtttcttggcgacacctttgaagccgagctggagcggggggctatcaccttaaaacgtgacagtgtcaccaacagcgcggcgctggtttactatgataccgcctatccgcttaatcccggcacgtatgccgaaggcaagagcatcgctgagatccacgaggcgcaaaactggcggctgatgtcctggcgggaagcgccgaaacagctttcatggcggcgcttttttgaaatcaccgggctggtcggcgtgcgggtagaggatgaggcggtcttcgcagacacgcaccgcctgatccttgagcttgttcacgacggggttgtcgatggcctgcgcattgaccatgtggacgggcttgccgatccgctgggctatttgcagcgcctgcgtgcggcgaccggaccggattgctacatcacggtagagaagatcctcgccaaaggggaacagcttcctccggagtggccggtctcgggtacaacgggctatgagtttattgcctctctggcggaagtgctggtggatgataccaacctctctcgactggagacgctctacgacgagacgctgggtacgaccgtggacaggcaggcggaacttcgcaaagccaaagggctgatgaccgatcgtaattttgaaggtgaatttaccacgctgctcaaaatagccagcgagctggccgggcataacggcgcccaagtggagcatgagtatatccgccatgccctgcgcgagctgcttatcgcgtttccggtgtatcgcacctacggcaccggagaggggctgacgccaccggatgtggcgctgctcagtcgcgtggtcgccagcgtcgacacctctgaacccgcgctcagcctgatcgtgcgtattctcaccggcgatctgccggaggatgaccacgcgctggcctcgcttttccgcacccgttttcagcaactgaccgggccgctgatggcgaaatcggtagaggatacgctgttctttcgccataacctggagctggccctgaacgaagtcggcgccgacccgacgccgcgcgcgttttcactttcccgttttcatcaggagatgcgtattcgtcttgcccgccagcccgatgcgctgctgggaacctccacccacgacaccaaacgcggcgaggatgcgcgagcgcgactatacacgctgacggaagcgccagatctgtggggggaaaacctggcgcgctggcggcagatgaaccagacgcaggttcgattcctcaacgacggcaccgcgccgaacgccgccgacacctggatgatcttccaggcgctggcgggcgtctggccagccacgctgtcgccagacgatcgtgatggtcttaagtcactggaagagcgtttcctcggctttattgagaaagccctgcgcgaggccaagcagcgtaccgactggatcgacagcaacgaagggtacgagagcgtggtgctggactacgtgcgccatctgctctccccggataacaccctgttcctgcgtgatttcagtgccgcactccagccgtttattcgggctgggttaatgaacagcctgagccagacggtgatcaagctgactgcgccaggcgtaccggacatctaccagggcagcgaagggcttaacttcagcctggtcgacccggataaccgccgcgaaccggatttcaccgcgctggcggaaaacctcagcgtagcggatggaaccatttttaacgatgcgcaacgctggcgagagggcagcgtgaagcagtacgtcaccgccacgctgttacggctgcggccgcattaccccgcgcttttccgctacggcgactggctgccgctgaaggtgaccggcgagcgggaagagaatctgatcgtttatgcccgcataaaagatgacgaggcgctgatcgtcgccgtgccgcgtctggtgtttgatgtcaccgacaatgcgatgctgtgggccaatactacggtggccataccccaggagctggccgggaagcactaccgggatctgtttaccggtgagcgccgccttctgccagagacgctggatttaacgtctgaaaagggatgtttgttggttctgcttacctgcgactaa

SEQ ID NO: 117291 - DNA, 1788 bp, Enterobacter cloacae
atggaattcagaacatgtcgcaggcactggggtgctgagtttatttccgatgacgttgtacgttttcgcgtctgggcagaagggcagaaagatctcacattacgtttaaccgataccgacattcccatggcggcggtgggcgacggttggtttcagattgacgtgcccggcgtcaggcacggtacgacctatcagtttgttttacaggatggaatggcggtgccggatccggcctcacgcgcgcagcaggctgacgtcaacggcccgtcggtggtgatcgacccgcgtcgcagccagcccactcagcgggaatggcaaggacgaccgtgggaagagacggtgatctacgagctgcatatcggcaccttcaccggggaaggaaccttcagggcggccatcgacaaactgccttatctggccgggctgggtattacgcaactggaagtgatgcccgtgtcccagttcgggggcgcgcgcggatgggggtatgacggcgtactgctgtatgccccgcactcggcttatggcacaccggatgattttcatgccttcattgatgccgcccacgcgctcgggctttccgtggtgctggatatcgtactcaaccactttggcccggaaggtaattacctgccgttgctctcgccagcgtttttccatcgggatcgtatgaccccgtggggcaacggtattgcctatgaggttgaggccgtccggcaatacatcgccgaggcgccgttattctggctctcggagtatcatcttgacggtctgcgcttcgacgccatcgaccagatccatgacgacgctgagacccatattcttcccgagatagcgcaacggatccgcgacgcatttccggatcggcatatccatctgaccaccgaagacagtcgcaacttgattttcctgcatccgcgcgatgagcatggtcagacgccgcttttcaccgccgaatggaatgatgattttcacaacgccgcgcatgtcttcgcgaccggggaatcacacgcctattatcaggattttgcctttgagccggagaaaaaactggcgcgggcgctggcagagggctttgtctaccagggggaaatctcgcttcagaccggaaagtcgcgcggggtagagtgtcgcgagcaacctccgcagttttttgtcgattttattcagaatcacgaccaggtcggcaaccgtgcccagggggagagacttatctctctggcaggcgcggataaaacgcgtgtgctgttcgcggcgctgcttatgtcgccccatattccgctgctgtttatgggcgaggagtatggcgaaacgcatccgttcctctttttcaccgacttccacggcgacctggcgaaagccgtgcgggaagggcgcgcgaaagagttcaccggccatgccgggcacgatgaaaccgtaccggaccccaatgacgtaaatacctttatgcggtcgaagcttgactggaacaaggcagacacggaggaaggcagggcgtggctgcacgctacgcgcgaactgattgcgctgcgtcagcgctttatcgtcccgctactgaaacagcggggcgccgtggagggtaacgtcctgcatacggcgctcggcatggttgccgtgagctggcgtttcccgtccggtacgctgtcgctggcgctgaatatcggcaaaaagccgctcgccttaccgaacctgcccggaaaaacgatctttagctggccggaggcagtcgataacctgccgccaaacagcattgttgttcgcttagctgatggagaagcagcgctatga

SEQ ID NO: 117292 - DNA, 528 bp, Enterobacter cloacae
atgcatattcgaaaaggattaagtacagacctcgcccgccttgaatgttgtgatttttctttcaaggttgatgagattgccagagagccatttctcaatggtgatttgcatatcgaggcgctgaccgaaccttatcttaaaacctatgaacttgatatccagacgctggaaaatcattgcgttaatccggattcaatatttcttatcgccgaaacggatgacggtgaaatcgccggttttattaccgcgtcctgcaactggaataaatttatttcggtggattacattgccgtggagcgttcaaaacgccgtacgggcgcggcgcacaagctgatgtccgccacccacgtctgggcgcgaagcctcaatgcgcccggcttacggctggagacgcagaacgttaatgtttctgcctgtcagttctatcgtcactatggatttattctgggcggttacgatcgctatctttacaacgccctgccggaaaaagatgaggtcgcccttttctggtattacatgctggcttga

SEQ ID NO: 117293 - DNA, 885 bp, Enterobacter cloacae
atgtctacaggaaataatcacacgctgcattaccctcgtccaccgtttgctgaacaaccgcaaagggcccccgggctggcatcggaaatgaagccaataccggatcatggtgaaacaagttatatcgggtcaggaaaactggcaggaaaaaaagcgctgattaccggcggtgattccggaattggtcgcgcggtagcgatcgcctatgcccgtgaaggtgcagatgtggctattggctatctcccggaagaggagtccgatgcggcatcggtcattgcgctgattcgggccgaaggccgtaaagcggtcgccattcccggcgacattcgcgtggagtcgttctgcgatacgctggtggaaaaagccgtcgcggaactgggtggcctggatatcctggtgaacaacgctggacgccagcagtactgcgaatcgatcgacgatctcaccacggcagatttcgacgcgacgtttaaaaccaacgtctatgcccccttctggatcactaaagctgcgctgcgccatttgcaggaaggcgccgtgatcatcaacaccacttccgttcaggcgtttaaaccgagcgcgatcctggtggactatgcgcagaccaaagcctgtaacgtggcctttaccaagtctctggctcagcagctggggccgcgtggcattcgggtgaatgccgtcgcgccaggtccatactggacgcctcttcagtccagcggcggtcagccgcagtccaaagttcagaagttcggggaagatacgcccctgggccgaccgggccagccggttgaaatcgcaccgctgtatgtgctttttgcctcagatacctgctcatacgcctccggacaagtatggtgctctgacggcggtaccggcgtgctgtaa

SEQ ID NO: 117294 - DNA, 978 bp, Enterobacter cloacae
atgtttactgtgaaaaaacttgcgttatcaaccctgttgaccggttcggttttattctttcccgcgatccacgcggtggccagcgttccgcagcatgtggtgaaacagcaggccggcggctacagcgttcaggttggcgatacgattgtcaccgcctttacggacggcagcgtgccgcaggacctgcacgccttactgcgccggacgacggcggaaaataccgatgcgttactggccaaaaacttccaggccaatccggtggaagcatcgattaacgcgttctatatcgctatgcccggccacaaaattctggtggacaccggctccggtcagctctttggccccggcaaaggcgggcggctgattgaaagcctggcgacgcagggtatcaggccgcaggacatcaccgatatcctgatcacccacgcgcactccgatcatgcaggcggcctggtcaaagacggtcagcgcgtatttacccgcgcacaggtgtatgtcggcaaaccggatatcgatttcttctttaacgacgagaaccagaaaaaatctggctatgaccagaactacttcgacgtcgcgcacaagaccttaaagccctatctggatgccggaaaagtgaagactttctccgggacggaacagcttctgccgggcatcagcggtacggttcacccgggccacaccccagggtccgcgttctacacgctggagagcaaaggtgaaaaaattacctttgtcggcgacatcattcacgttgccgcggttcagttcccacagcccaacgtgacgattgcttacgatgaggatcaggacggagccgcccgggtacgcaacgcagcgttcgctgagtttgtgaaaaacaaagatctgattgcggcgccacatctgcctttccccgggatcgggtatgtgaagaaaggtgagcgggaaggctacgcgtgggttccggtgacctataccaaccgggacgcccaataa

SEQ ID NO: 117295 - DNA, 585 bp, Enterobacter cloacae
atgcaaactcaccaactgcaagaccgtcaggatcttaacgacctcatgaatggctggatgcaccgcgacctgggcgaatgggagcagctgcgtaatctttttcatccggacggcacaatcgaaattacgtggttcgaagggctcgcgagcgattttgtcgagggttccatgcgtatgggcgcttcagatttgcgcacaaaacatatgattggctcgcccgtcgtcacttttaacgaccgcggcgacaaagcgattcttgaaaccaatgcgatgatcatcgctgaaaatataaaacttaatattggatgcgaatgccacaatcgtttctacgatctggcagaaaagagagagggcgtatggaagctgttccatcgtcagagcatctacgacatgggtattttcacctttccgctgggcccggttgagattgattcaaaaattgctgccaactatccgcgggaatatgccgcgctagcttatctgctggaacaaagcggttttcccctcggccgcgtatttgccacgcgtgacagtgaactagaagcgaatatgaaagcgaacgcaaaaaaatggctggctgtctga

SEQ ID NO: 117296 - DNA, 882 bp, Enterobacter cloacae
atggaactccggcacttacgctattttttggctgttgcagaagaagagcattttggacgcgcggctgagcgactcaatattgttcagcctgcgctcagcatgcagattaaagcccttgaaaccgagttaggcggtccgctgtttatccgcaccagccgtcgtgtggaacttactgaggccggatcgcttcttctcagcgaagccagactgatgctggaacagatggaacacacgcgtctggcagtccagcgtgcgatacggggagagacagggcgtgtacgggtcggttttgccggtaacgccatttttagtggcaaaatgattaccgatgtacgtcgcttccgtaaaacccatccggatgcagaagtcaccattcaggaaatcgctccccagaaacaggtagctgcgatcctcgcagggcatattgatgtcggttatacaccggataacagtacgacagccgatccgcagatcagggtgcagaaaaccggaaactgggagatgataatcgcaatgtgtgacgatcatcccttagccatccatccgcacctctccgttgaaatgctcgccggtcatcccctggtcctgtacgacgcgcatgacgccaatgaaaatctgactttgctgctggcgcagcagctcggggatggtttttgcgtggcacatcgttcaaacagtacgctaagcgttctggcatttgccgcagccgggctcggtctggcgctggttcccgcccccctgcaacaggtgcaaatacccggactgatttaccgcaacctgaatgctcaggcgttgaccgcaaatctggtcatgatcagccgcatgcaggagccaggtaatgcagtgactgcttttctggcaatggctaaccttccctgttga

SEQ ID NO: 117297 - DNA, 924 bp, Enterobacter cloacae
atgacgcacaataagatgccctcctccgatatggatatggacctgatcctgacgctggatgcgttactcagggatcagaatatcacccatgccgccgcgcggctgggcatcagccagccggcgatgtctgcccgccttgcgcgcctgcgcgtcctgttcaatgagccgctgtttatcccttccccacacggacgtggggtgttacctacgccgcgcgccgaggcgctaaggccgcaggtcgcgacggttttgcagggtatatcggcgatgcttgaacccaccacgttcaacgcgcataacagcacccgcacctttgtgattgccctgcacgagaacccggcgctgatgctgggggcagagttgcagaatcagattagcagcgcagcaccaggcatccgcctgcgttttgcgctcccggaaaccccgctgctgccaacgcagatggaaaatggcgatgtggatatttatgtcggcgttaacgcgggggcgcacgatgcatgggtcagacgcaagctgtttgacgatgaatatgccaccgcccagcgtaaaggccatccgcgcggtacggggccgatggatctggaaagctattgcagcctttcccacctggtggtttcatccgagggcgacccgttcgcgggctttgtcgatcagcatctggcggggcttggccaccagcgtaacgtggtgatgtcgacgcaaagctatgcgatggcgcctgcgattgttgccggtaccgatttgctctgcaccctacccagacgtatgttgctacggttcacgcaaacgcttgatatttttccgccgccgctggatctccctccgatcgtcatcggtatgtactggcacccgaaaaacagccaggatccggctaaccgctggctgcgagaacagcttcttcaggccgccggacgtcaggtatga

SEQ ID NO: 117298 - DNA, 138 bp, Enterobacter cloacae
atgatcgaggatgctcatcaattttttcaggacctcagagcgaataatccggtggcaaaccagcgtcagctcgctctcccggagtcggtcaagaatatccacaaagacgacgttttgtacgcatatcgccttcgctga

SEQ ID NO: 117299 - DNA, 633 bp, Enterobacter cloacae
atgcagtttcgactgatgcgcaatttcatcgtggtggcggaagagcttcacatgcatcgggcggcggagcgccttaacatggcgcagccagcgctgagccagcagataaaaacgcttgaagatcgtcttggggtcttgctctttagccgggcgaatcgtcgcctgacgctgacgccagccggtgaggcatttctcagtaaagccagagtcgcgattttaatgaccgatcaggcgattctggatgccagacagacggccagaggggaacagggcgtgctgaatctcggatgtgtttcaagtgcgatattcgacagtaagctacccgccgcgctgcggcttttacatgagaaatggcccgccatcagcctttccatgatgacgggtaacgtgcaaaccctttataccggcgtgcaaagcaaccagctggatgtggccattattcgtgccccgttaccgctattgcctgacgatctgcaaagccgtccatttacaacggaaaaggccgtgctggccttacctcgtcaacacagcctggcgggctccggccgcgctgacgcttgcgtcggtgaaagaggagaagtggatcgccctgcgcgacccggaggggatggggctggagcaatatttctatga

SEQ ID NO: 117300 - DNA, 909 bp, Enterobacter cloacae
atgaaaaaccacatcaacgatctcagaagtgctatcgaactgctcaaacgccatgaaggtcaataccttgaaaccagccatccagtcgatcctgacgcggagctggcgggtgtgtaccggcatattggtgctggcggcacggtaaaacgtccgacgcgcattggcccggcgatgatgtttaacgctattaagggatatcccgactcgcgtattctggtcggaatgcacgccagccgcgagcgggcggcgctcctgttgggctgcgagccctctgaactggcaaaacatgtcggccaggccgtgaaaaacccgattgctcccgttgtggttccggcggcacaggcgccgtgtcaggaacaggtgttttatgccgacgatccggacttcgatctgcgtaaattgcttccggcaccgaccaacacgccgatagatgccggtccgttcttctgtctggggctggtgctggcaagcgatccggaagatgcctcactgaccgatgtcactattcaccgtctctgcgtgcaggagcgcgatgagctctccatgttccttgccgcaggccgccatattgaagtgttccgtaagaaagccgaggaggcgggcaaaccgttgccggtcacgatcaatatgggtctcgatcccgctatctatattggcgcctgtttcgaagcccctaccacgcccttcggctacaacgagttgggggtcgccggcgcgttacgtcagacccccgtagagctggtgcagggtgtggccgtaaatgaaaaagcgatagcgcgtgcggaaattatcatcgaaggcgaactgctgccgggcgtgcgtgtagaagaagatcagcatacccacaccgggcacgcgatgccggaattcccggctactgcggggaagctaacccctccttaccggtaa

SEQ ID NO: 117301 - DNA, 552 bp, Enterobacter cloacae
atgcgtcatcaggcgatcctgcaaaccctggtaggaccgggcgaggagcacaccacgctggccggtttgccaacggaggccagcatccgtaatgcggtggaagaagccatccccggttttctgcaaaacgtctatgcgcataccgctggcggcggcaagtttcttggcgtattgcaggtgaaaaaacgccagccctctgacgaagggcgtcagggtcaggcggcactcatcgcgttagccacctattccgagcttaaaaacattattctcgtcgacgaagatgtggatattttcgacagcgacgacatcctgtgggcgatgaccacccgtatgcagggcgatgtcagcatcacccatctgccggggatccgcggacaccagctcgatccgtctcaggccccggactacagcccctccattcgtggcaacgggatcacctgcaaaacgattttcgactgtacggtgccctgggcgcttaagtcccgctttgagcgtgcgccctttatggaggtagacccgacgccatgggcgcctgaactgtttaaaaaatag

SEQ ID NO: 117302 - DNA, 288 bp, Enterobacter cloacae
atgacagcacatgtttccaacgatcctttgcatggcgtaacgctcgaaatgcaggttaacgcgctggttgcgcgatatggctggaatgaactgggcaaccgaatcaaaatcaactgttttcgcaaggacccgagtgttaaatcgagtctgaagttcctgcgccgcaccccatgggcgcgggcggaagttgaagccctctacctcgactctcttcacgatgacggtaacggggaacaggacgaaccggcgtttaatccctggacggatagccggacacccaggagctaa

SEQ ID NO: 117303 - DNA, 1290 bp, Enterobacter cloacae
atgatgcgacacgtaaaacggactggcgcgctgcttggctgcgcgcttttactggtaagttgcacttccaaaccacccaaatcactcgttaccccgctgccgcaggcgaaacctctacagcagactaacgaacccatgcgcgggatctggctggcgaccgtctcccgtctcgactggcctcccgtgtcatcggtgaatggccgtagcgcggaccagcgtatcgcccagcaacagcgggcgctgacggacaagctcgataagctgaaaaaacttgggatcaacaccgtcttctttcaggtaaaaccggacagtacggcgctgtgggcctctaaaatactgccgtggtcagataccctgacggggactatcggggaagatcccggttacgatccgcttcagtttatgctggatgaagcgcacaagcgcgggatgaaggttcatgcctggtttaacccgtaccgcgtttccaccaacacgaagccgtcgaccatcgccgcgcttaaccgcacctcgtcgcttcatccttccagcgtgtacgtccagcatccggagtggatccgcacctcgggggatcgttttgttctcgacccgggcattcccgacgtgcgggactggataacccaggtggtgatggaagtggtaaatcactaccctgtcgacggcgttcagttcgatgactatttttacaccgagacgccgggggccaccctgaatgatgcctggaccttcaggcgctatggcgaaggatttgcgtcaaaagcggactggcgtcgacacaatacgcagcagttgattgtgcaggtctcaagggcgatcaagcaggctaaacctgaggtcgaatttggcgttagcccggcgggggtctggcgcaatcgctccttcgacccggcaggctcggacacgcgcggtgccgcagcctatgatgaatcctacgctgacacgcgcaaatgggtacagcagggtttactggattacattgcgccgcagatctactggcccttcgcccgcgacgcggcacgttacgatgtgctgacaaaatggtgggctgacgtggtgaaaccgacccatacccgtctgtatatcgggatcgcgttctacaaagtgggcgcgccttccagaaacgaaccggactggacggtgaacggcggcgtaccggagctgaaaaaacagctcgacctcaacgattcactgccagacgttaagggcaccatcctgttccgtgaagactatcttaaccagccgcagacgcaggaggcggtaaattacctccggggacgctggggtagttga

SEQ ID NO: 117304 - DNA, 777 bp, Enterobacter cloacae
atgcttcaacggttagcaaagaaaaaggtgctgttactctctgctctgatggtttcagggctggtcagggcagaggagtcgcttccggatgtggtgaagcacttcagtgaacagcaggacatcaaaatcatcaagaaaattgacgctcccggcggcgcgccagcgtggctggggaaatatcaggacatgggcgtgacgctctttctgacccctgacggaaagcacgtcgtgtctggttatctttatgatgagaaaggaaccaacctcagcgaggcctttttccagaaagagatctacgccccgatgggccgcgagatgtggaaaaagctcaatgcggcgcatcccctgaaagagggcgcggagagtgccccgcgcaaagtcttcgtctttgccgacccgttctgcccgtactgcaagcagttctgggctgaagcgcagccgtgggtgaaggctggcaaggttcagctcaatacgctgctggttgcatttcttaacccgaacagcgggcgtaacgcctccgcgatcctgaatgcgaaagatccggtgtcggcctggaaaacgtacgagctgtccggcgggaaaaagctgccgaaacctgaagctgcggcttaccgggaaaccgttgagatcctgcaaaatcaccagacgctaatggacagtctcggcgcgaatgccacaccggctatttattacctgaatgagcaaaacgaactgcaacaggtcgtgggtatgccagacgcaaaacagcttgaggcgatgttcggaccgaagccgtaa

SEQ ID NO: 117305 - DNA, 507 bp, Enterobacter cloacae
atgaaagccggtgaggtgggggaatcattactgatctcggcactcaatgcctgccgcgcgcggctaaaagccttcattcgcggacggactgcggttcgtgatgatgtcgatgatattcttcaggaagtgacctggcagttgatgaaagtggaacaaccggtcgagaacgtcgccgcctggctgtttcgcgccgcacgaaatgagatgatcgaccgggcgcgaaaaaagcacgaggtttcactgccggggtacctgacagcagatgacgaagactttcctgagcaggagattgcagaaacgttattcggcgtaccgcaaacgccggaggaggagtatctcaacatgctgctatgggaggagttggggcaagccctgtcggaactgccgccacctcagcgcgaggtgtttgaaaaaacggaatttgagggctacagcatgaagatgctggcagaggaaacaggcgacagtgtgcaggcgttattatcccgcaaacacaaagccgtgtga

SEQ ID NO: 117306 - DNA, 414 bp, Enterobacter cloacae
atgagaaattttgatatgcacggaaaaggtcacgggcgtggtttgggccgccatcgtatgggtaagggcatcgtgattggcgcagtcctgttcgtggtgcttggcctgctggtcatgtccctgtggaacgcgttgctcccggccatcctggggattaaagccattggcttctggcaggcgctggggatcctgctgctgagccgcattcttttcggtgggctgggtttccgtcctggtatgttcggtgcgcaccgccgtatgcacgaacaatggatgaatatgagccccgaacaacgtgaggccttcattcagcagcgtcgggcgggatttgggcgccacggtcattgccggtggcacgatggccgggatgaaaagcgagatgataacgctgcgaaagcgccggaagccgagtga

SEQ ID NO: 117307 - DNA, 1551 bp, Enterobacter cloacae
atgtcgttgaaaaaatcatccctgattatcctgttttccctgcttttcttctttgtggccagcactatcaccagcgttgggctcatcattaaaagtaatacttcgctggataatgtgaacaaagaaattcaggtggttctgtccattattgatcccattaaccacagccgaaccctgcgcgtcagggttatggagtatgtgaaaatggtggaagcgggggacgccaccgatctgtctgcgaaactggcctcggttaaagaggcgctgaccaaagccgatagtgcattttcggcgtttatggcctcgccgcgtttgccggacgaagccccgctggtcactgcctaccaggaggcgtggcaaaactaccgtaaccagggactggcgcctctcatcgccgctgccgccgctcacgatgtgtcgcggttcaacgctcttattcccgtggtgtctcaactcgatcgccaatatgaaattgtgctcgatcaggttctctccgttcaccagaagtacgccaaaacgctgaacgaggatgcgagccataatttcgtgtcgggtctggttattatcgcctgcattgcggtgctgttcgtggtggtgatcttcgccgtcagcctgctgatgaaacgcgtggtctttgcgccggtgaacctggcgcgcgagcactgtcgccagattgcggccgggaagctggacgtaccggtaccgatcaagcgtgattccgggaatgaaatcgatcacctgatgtcctcgatggagcagatgcgccaggcgctgctctccaccatttctcaggtgcgcgacgccagccacaccgtgacgcatgcggcgcaggaaattgcctccggcaatatcgacctggcctcccgtaccgagcaacaggcttcggccctgacccagacggccgccagcatggaagagctgagcgcgacggtggcgaataacaccgacaacgttttccaggccggtaagctggtgcaggatgccgtgaaaaatgcccataccggtgaagcggtaacccgtgaagtcatcgaaacgatgaatactatcgcgtccaattcgaagcgtattgaagacatcaccagcgtcatcaacagcattgctttccagactaatattctggcgctaaacgcggccgttgaagcggcgcgtgctggcgcgcaggggcgaggatttgccgtggtagcaagtgaagtgcgcaccctggcacaaaaaagcgcggtggcggcgaaagatattgaaagccttatcgcccagtctgtttccagcgtgaaaaacggtgcacaactggtgaatcgttcgggagaggtgattgattctattatcagctctgtgaataaagtgcatacgctgatggaacagatttcggttgcctcagaagagcagagccgcgggattggtcaggttgggcaggccgtaacggagatggacggtgtgacccagcagaacgcagcgctggtgcagcaatccgccgccgccgcggcctcgctggaggagcaggcgcagcagctttcccagagtatctcgagctttagtttgcctgctacggcgtga

SEQ ID NO: 117308 - DNA, 1017 bp, Enterobacter cloacae
gtgagaaaaacaaaacgcgtcaccattaaagatatcgcggagctcgcgggggtatcaaaagccaccgccagcctggttctgaacggccgcagcaaagagcttcgggtggcggaggagacacgcgagcgtgtgctggcgattgccaaagaacatcattatcagcccagcattcacgcccgttcgctgcgggacaaccgcagccacaccattggtctggtggtgccggaaatcaccaactacgggtttgccgttttttctcatgagctggagaccctctgccgcgaggcgggtgttcagctgctgatctcctgtagcgatgaaaatccgggccaggagacggtggtggtcaataacatggtggcccgccaggtggacgggctgattgtcgcctccagcatgctcaacgacgcggactatcaaaagctgagcgaacagctgcccgttgtgctttttgaccgtcatatgaacgacagttctttgccgctggttctcaccgattcaattaccccaaccgccacgctggtggccgacatcgcgcgccagcatccggatgagttctacttcctcggcggtcagccgcggctttccccgacgcgtgaccgtcttgaagggtttaagcaggggctgcgtgacgctggcgtcgagttacgtccggagtggatcattcatggtaattaccatccgagctccggctacgaaatgtttgccgagctttgcgcacgcctgggccgcccgccaaaagccctttttaccgccgcctgcggtctgctggaaggggtgttgcgctatatggggcaacataatctgctgcaaagcgatatgcgtctggccagctttgacgatcactatctctatgattctctgaccattcctgtcgataccgttcgtcaggataaccgccagctcgcctggcactgctttgatctgattggcaaactgattgaaggggaaacgccggagccgatccagcgtaagctggatgccaccctgcaacggcgatacaagtccgtggagtga

SEQ ID NO: 117309 - DNA, 1407 bp, Enterobacter cloacae
atgaccttatcttcccgctggcctgccgtgttgcaggccgttatgcaaggccagccgcgtgcgctggcggacagccactatccgcagtggcatcccgcaccggtgacagggctgatgaacgatccgaacgggtttatctggtttgccgggcgctaccatctgttttatcagtggaacccgctgggctgcgatcatcgctacaagtgttgggggcactggagctcagcagatctggtgcactggcagcacgagccaatggcgctgattcctgacgaagagtatgaccgcaatggctgttactccggcagcgccgtggataacaacggcgtgctgaccctgtgctataccggcaacgttaagtttgacgatggcggccgcaccgcctggcagtgtctggcggtgcaaaatgacgatggcacgtttgccaaactgggaccggtgttgcccctgccggacgggtacaccgggcacgtccgcgatccgaaaatatggtggcatgacgggctgtggtacatggtgctcggcgcgcaggatcgacagcagcgcggcaaggtgctgctgtttacgtcagccgatttacacacctgggcgtcctgcggcgaaatcgccggtcacggcgtcaacggactcacggacgcgggctatatgtgggagtgcccggatctgtttgagcttgatggcacacacgtcttgatctgctgcccgcaggggctggcgcgcgaaccgcatcgctatctcaacacctatccggccgtctggatgagtggggcatttgattatcaaacgcctgcatttgcgcacggcgagctgcatgagcttgacgccggtttcgaattttacgcgccgcaaaccacggtggcagaagatggccgccgcatcctcatcggctggttgggcgtgccggacggcgaagagatgctccagcctacgcgggctcacggctggatccaccagatgacctgtcctcgcgagctgcgctaccgcgacggtaagctctggcaaaccccggtccgtgagctggaaacgctgcgcgaggatgaacatctctggcagggacgcgccagcgatgccccggtgctggcgggagcgcgtcttgagttcgaactgagcgcatcgagcgtgaacgtggattttgccggcgcgttgcggctgattgtggatgatgaggggatccgtctggaacgcgccagtctgaaaaccacagacacgctgacccgctactggcagggcaatgttcatcatttacgcgtgctgtgcgactgttccagcgtcgaaattttcatcaatcacggtgaaggcgtcatgagcagccgctattttcctgaccatccggcccaggtacgcttcgaaggtgcgtccgatatcacattacgctactggtcgctgcgcagctgcatgatagaatag

SEQ ID NO: 117310 - DNA, 1371 bp, Enterobacter cloacae
atggattttaatcatattgcgcgcgagcttattccgctgctcggtggcaaagagaacattgccagcgcggcacattgcgccacgcgccttcgtctggtgctggtcgatgatgcgcttgccgaccagcaggctatcggcaaggttgaaggcgtgaaaggctgttttcgaaacgccgggcagatgcaggtgatcttcggcaccggggtggtgaataaggtttacgccgcgtttattcaggcggcagggattagcgagtccagtaaatcggaagcggcggatattgcggcccgcaagctgaacccgttccagcgtatcgcgcgtctgctctccaacatcttcgtgccgattatcccggcgatcgtggcctcgggtctgctgatgggcctgctggggatggttaaaacctacggctgggttaatccggataacgcgctctatatcatgctggatatgtgcagctcagcggcgtttattattctgccgatcctgattggcttcaccgccgcgcgggagtttggcggcaacccgtatctgggggcaacgctcggcggcatcctgactcatccggcgctgaccaacgcctggggcgtagcatccggcttccacaccatgaacttcttcggtcttgaaatcgccatgattggctatcagggaaccgtcttcccggtgctgctggcggtgtggtttatgagcattgtggaaaaacagctgcgccgggcgatcccggatgcgttagatctgatcctgacgccgttcctgaccgtcattatctccggcttcattgcgctgttgattattggcccggcgggacgcgcgctgggcgacggaatctccttcattcttagcactctgattgcccacgcgggctggctggccgggctgctgtttggtgggctctattcggtgattgtcattaccggcattcaccacagtttccacgccattgaggccgggctgctgggtaatccgtcgattggcgttaacttcctgctgccgatctgggcgatggcgaacgtggcgcagggcggggcgtgtctggcggtgtggttcaaaacccgcgatgccaaaatcaaagccattaccttaccgtcggcgttttccgcgatgctgggcatcaccgaagcggcaatttttggcatcaacctgcgttttgtgaagccgtttatcgcggcgctgatcggtggtgcggcgggcggtgcctgggtggtgtcggtgcatgtctacatgaccgccgttggcctgacggcgcttcccggcatggcgattgtccaggccagctcgctgctcaactatataatcggcatggtgattgcctttggcgtggcgttcaccgtctctctgctgctgaaatataaaacggactctgaataa

SEQ ID NO: 117311 - DNA, 1518 bp, Enterobacter cloacae
atgtataaaaaacgcagacttgccgtgatgataggcatgctggccgggagtacctctgtttttgcccagacggatatgacacgtatcgaagcgcgcctggcagcgctggagcagcgtttgcaggaggcggaaacccgcgcgcaggttgctgaaaagcgcgcaacggcagcggaacagaaaacacagcagttggtggctgcgcagcaggaagcgcagacctccacacaggcggtggcgcaacgtactacggtgctggaagaaaaagccgaccggacaggcggttttgaatttcacggttacgcccgttccggcctgctgatgaacgacgcggcctccagcagcaaaagcggcccttatctgacgcccgccggggaaacgggcggggccatcgggcgtctggggaacgaagctgatacctacgttgagctgaatgttgagcacaaacagaccctggagaatggtgcgacgacgcgctttaaggcgatgctggccgacggtcagaaaacctataacgactggtcggcagacagcagcgacctgaacattcgtcaggcctttgccgagctgggcaatttgccggactttaccggtgcgctgaagggcagtaccttctgggcgggtaagcgttttgatcgcgacaacttcgacattcactggctggattccgacgtggtgtttctcgccgggaccggcggcggcgtctacgacgtgaagtggaacgatacgctgcgcagtaacttctccctttatggccgtaacttcggcagcgaagaggagatcgacaacaacgttcagaactacatcctcagcatgaatcacttcgccgggccggtgcagatgatggtcagcggcttacgggcaaaagataatgacgaccgtaaggacagcaacggcgatccgattaaaaccgacgcggccaataacggggtacatgcgctggttggtctgcataacgagagcttctacggcctgcgggaaggttccgccaaaacggcgctgctttacggccacggtctgggcgccgaggtgaaaagcattggttcagacggcgcgctgctgtcagaagccgatacctggcgttttgcaagttacggtgtcacgccgctgggcggtggctggcacattgcgcccgccgtgctggcgcaaagcagtaaggaccgctacgtgaagggcgacagctatgagtgggtcacgctcaatacgcgtctgatcaaagaggtgacccagaatttcgccctcgcgttcgaaggcagctatcagtacatggatttaagcccggaaggctacaaggatcgcaatgcggttaacggtagcttctataagctgaccttcgccccgacgttaaaggcgggcaaaattggcgatttcttcagccgtccggagctgcgcctgttcgccacctggatggactggagcagcaagctggataactacgccagcgatgacgcctttggcagcagcggcttcaacgcgggcggggaatggaactttggggtgcagatggaaacctggttttaa

SEQ ID NO: 117312 - DNA, 897 bp, Enterobacter cloacae
atggagacgatctgggtacttggcgatgccgtggtggatctgttgcccgacggagagggcaaactgctgcaatgtcctggcggcgcaccggccaatgtcgcggtaggggttgcgcgtctgggcggcagaagcgcctttataggccgggtgggcgacgaccccttcgggcgttttatgcaaaaaacgcttgcggatgagcaggttaatacagaatggctgcgcctggacccgcagcatcgcacctccacggtggtggtggatctcgataacgacggtgaacgttcctttacctttatggttcgaccgagcgctgatttattcctcgactctgccgatctcccgccattccgcgccggggagtggctgcacgtctgctctatcgcgctcagcgccgaacccagccgttccgcgacgtttcaggcgatgtccgctatcagactggcggggggattcgtcagctttgaccccaatatccgcgccgatctctggcacgatgaagtcgtgctgcgtcagtgtcttgagcgggcattagcctgtgcagatgtggtgaaaatctcggtggaagaactggcgttcttaaccggaaatgcgcaggtccatgaggggctggcggcgctgatgcgcacctgtccggccaggctggtgctggtgacgcagggaaaagagggcgtcaccgcctggcagaaaggtgcgttgacgcactatcctgcatcacccgtggaatgcattgataccaccggcgcgggggatgctttcgtcgccgggctgctgttcggtctggctcgtgatggccaggcccgtctctcagaggtcatcacgctggcgcagcgctgtggggcgctggcgacaaccgcaaaaggggcaatgaccgcgctgccttatcatcacgaactgtaa

SEQ ID NO: 117313 - DNA, 1212 bp, Enterobacter cloacae
gtgctgacaactcttatttatcgaagccagctgagcttaacctgcacctccgcagcgttaagcgcgctggttgaacaggccaggatccgtaatacggagcagggcatctcaggcattcttctctcccgtggacgtgacgttctgcaaattctcgaaggcacggaacagagcgtcgtcgcgctttttaacaccatccgtgcggatgaccggcataccggcgtggtggagctgatgcgcgattacggcccgcgcagacgtttcgaagacgtgggaatgctgctgtttgacctggatgttcagaccccgaaagcggttctggcgtcggttctgcattacagcaagctggaaagctatctgacttctgaggatcgggtcttcaaatttattcagacctttatcaccggcaaaaccgctatcccacccgcttcggactatgagcctgataaatggacgctttcgcgagagcgcgcgccgtttggtaaagggttaggtctgctggcgggacagccctgccagtttgcgctgcaacccattgtcgagccgtccgaaggcaaaatcagttctctcgaagcgcttatacgcggaaacgacggcggcagcccggagcatttcttccgtagtctcgatcgtgaacagatttacgaagtcgacctgcaaaccaaagcctggacctttgcgctggcgcaaaagctcggcatcggcagccacaaactggcggtgaacctgctgccaatgtcgctggttaacgtgccgggcgcggtagagttcctggtaacgcagatcaaaaagcacaatctacagccagagcaggtgatcattgaagtcactgagagcgagatgatctctggcttcaaccagtttaacagcgccattaaacagctgcgcgcggaaggggttgggctggcgatagatgattttggttccggctatgctggtctttcactgctcacccggtttcagccggataagctcaaaatcgacagagagatcgtcagcgatatccacctgagcgggcccaagcaggcgattgtgaagtcgataatcagctgctgcaccgatctggagattacgctggtcgcagaaggcattgagaagatagaagagtggtgctggcttgaatccgccggtattcgccgcttccagggctttttgttcgcccgcccgcagctcaatggcgtaggtgatatccactggccccatcgggtgggttaa

SEQ ID NO: 117314 - DNA, 1476 bp, Enterobacter cloacae
atggcgaatttgccctggcgggtcagcgtgcgcctgatggctctcgcaaaaaaaatagcgatggtcatcgggatcattgtgctcgtgctgctggcggtgcgggtttatctttcgcagcaggggccggctctgcatcactggcacacctggcgggctgatgaaatgtccgtgcaggagatggataacgcgaccttcgcagcgtatgtcgcgcgggaaaacgccatcttcaccgctctcgacgctgaggtgacggcgaaagtcacccccgcagagcgcacgccgctgaaccgttattaccgtcaaagcctggtatggccaggacacttttccccggatgcaaaccggtcgttcgtgctgatgcctgccggaaagccacgcggggcggtggtattgctgcacggtctgacggactcgccctacagcgtcaggcatctggcagagaattatcaaaagcacggctttgtggccgtagtgcctcgtttgcccggacacggcacggcgccgggcgcgctgacagacgttgactgggaggcgtggctggcggcaacgcgccttgcggttcgtgaagcaacacgcctgacggggaacgatctccccctgcatctggtgggctactccaacggtggggcgctggcgatgaaatacgccctcgacgcccttgatgcgcctgaactgcgtaaacctcagcagatcgtgttgctctccccgatgattggcgtcacggcgtttgcgcgctttgccggattcgccgggctaccggccatgttaccggcgtttgccaaagccgcgtggctcaacatttcgccggaatataatccttataaatataattcgttcccggtgaatgcagcacgtcagtcctggctgcttacccaggcgctgcatgagcagataaaccgcgatgttcatgatcacaaactggcgcagtttccgccggtactggcgtttcagtcggtcatggattcaacggtcagtacccgcgccgtggttagcgggctgtttgaccagcttccggcaaacggcagcgaactggtagtttttgatatcaaccaggccgggagtttccgtccactgttcaggccatcgtcctggacggcggtggctgacatgctgcccaaggcaaaaagacgttacagcgtcacaattgtgaccaatgccagccccgacaggtttgatatggtaacaaagacgacgccagcgggtagcacccgggaaacggtgatgccgctgtcggtcgcgtatccgcaggaggtttattccctgtcgcatgttgctattccgttcccgcctgatgacgatctgtatggccgccatcctgaggtgaaaaaccactacggtatcagcctggggacgatagccctgtggggagaaacatcggttctgagcgttggcaaagatgcgctgatgcgcgtgacgtcgaatccgttctacgattatatgcagacgcggatcgacagccgtatcggggagaattaa

SEQ ID NO: 117315 - DNA, 855 bp, Enterobacter cloacae
atgacgaccaaacctgaggtgttgagccgtatcgaagcgacctttagccagctcaccccgagcgaaaagcgggtggcaagctggatgctggcgcacgtcgggcagatcccctttgaaacggcagagagcgtggcactggccacggcaaccagcgggatcaccgtcggacgctttctgcgcaagctgggctatcgcaacctggacgacgccaaaaaaagcctgcgcgatccccaccagccctggggcattaacgagcgtctcgactcctggaagcagcaacagccgctgtcgggtcgccttcagcactccctgtcgctggaggtggacgccattgcccatgtctaccagctggcgcaaagcgaaacgttcaggcaggtggtccagcaacttacccatgccgacgccgtcttcgtgctggggatccagtccacgcgcgggatcgccaatgcgttcttcagccatctggagtatctgcgcccgcgtgtgagctattccgaagggctctccggtagctgggtggagtctcttaactccggctttgcgaacccgtatatcgtgctgacggatacccgcgcctactccgccattgcccgccagtactgccgcgtggcgagcgaaaaaggcctggcgatggcgctgatcaccgatatctggtgcccgtgggcgcgggattatccgattgatttactccaggtgaagaccgataccggccatttctgggattcgctggcgccggtgagctgtctcttcaacctgctgctgtcgggcgttgtggaggcgctgggcgatgcgctgccggaacgtctggcaatcaaccgacaactacaacaagagtttggtcaatttgaacgctaa

SEQ ID NO: 117316 - DNA, 573 bp, Enterobacter cloacae
atgcctgaagagagtcaactgattgatgtggcgaaaacctttcccacgctgcatatcgatctgaaatacgcgaccgccgataacatcactggccgcccgatctaccagcacgccgcgtgcctgttgcatacggatgccgccaccgcgctggcgaaagcgatcagcatcgccgcgctggccggtctgaagctggtggtttacgacgcctaccgcccccagcaggcgcagtcgcaactctgggatgcctgccccaatccggaatacgtggtggatgtcgcaattggctctaaccacagccggggcaccgccattgacgtcacgctgatggatgaacacgacaacgtgctggatatgggcgccgggtttgacgaaatgcacgaccgttctcatgcctggcacccttccgttccgcccgaggcgcagcgaaatcgtctgctcctgaacgccgtgatgtacggcggcggttttgtgggcatcagcagcgagtggtggcatttcgaactgccgaacgccgccagctacccgctgttagatgaccagttcgcctgttatccgaccacacactcactctaa

SEQ ID NO: 117317 - DNA, 1533 bp, Enterobacter cloacae
atgaaaactaagctgcttacaaccctgattgccgctacgctcgccctgagcgcccctctcgcgctggcggcggtgccaaaagatatgctggtgattgggaaagctgccgatccgcaaacgctggatccggcggtcactatcgataacaacgactggacggtgacctacccctcgtaccagcgtctggtgaaatacaagcctggcaccacggaggtggaaggcgatctgtcgacgggctggaaggcgtctgacgaccagaaagagtggacgttcaccctggcagataatgcaaaattctctgacggtacgccggtgaccgccgaagcggttaagctgtcgtttgaacgtctgctgaaaatcaaccagggaccttccgaagcgtttccgaaagatttgaaagtggacgtggtggatgagcatacggtgaaattcaccctcagccagccgttcgccccgttcctctacacgctggccaatgatggcgcgtcgatcgtcaacccggcggtgctgaaagccaatgccgccgacgacgcgcgcggtttcctggcgcaaaacaccgcgggttccggaccgtttatgctgaaaagctggcggaaaggtcagcagctggtgatggtgcctaacccacactggccgggtgaaaagccgcacttcaagcgcgtctcggtgaagattatcggtgaaagcgcctcgcgtcgcctgcaactttcccgtggcgatctggatatcgccgacgccctgccggtagatcagcttgctgctctgaagcaggaaggcaaagtggccgtggcggaatacccgtccctgcgggtgacctacctctatctgaacaacagtaagccgccgatgaatcaggtggatttgcgccgcgcggtctcctgggccaccgattatcaggggatggtgacaggcattctcagcgggaacggcaagcagatgcgcggcccgatcccggagggcatgtggggcttcgatgcgaacgccatgcagtacagctttgacgaggctaaggccaaagcggcgctggagaaagtcaacgataaaccggccagcctgacgttcctctactccgataacgacccgaactgggagcctatcgccctctccacgcaggcgagcctgggcaagctggggattaacgtcaagcttgagaaactggcgaacgccaccatgcgcgaccgcgtcggcaaaggtgattatgacattgcgattggtaactggagcccggacttcgctgacccgtacatgttcatgaactactggttcgaatcggacaaaaaagggctgccggggaaccgttcattctatgagaacaaagaggtcgatgcattgttgcaggcggcactgaaaaccaccgatcaggcggaacgcaccaaagattaccagcaggcgcagaaagtggtgattgacgaggcggcttacgtttatctgttccagaagaactaccagctggcgatgaacaaagaggtcaaaggcttcacctttaatccgatgcttgagcaggtctttaacatcgccaccatgagtaagtaa

SEQ ID NO: 117318 - DNA, 1023 bp, Enterobacter cloacae
atgacgttctggagcatcgtgcgccagcgctgctgggggttaatcctggtggtggccggtgtctgtattattacttttattatttcacacctgatccccggcgatccggcccgcctgctggccggtgaccgcgccagcgatgaaatcgtgcagggcatccgccagcagctggggctggatcaaccgctctatattcagtttggccgctatgtagaggcgctggcgcacggcgatctgggcacgtccattcgcaccggtcgccccgttgcggaagatttgaaagcctttttccccgccacgctggagctggccttctgctctttgctgctggcgctggtgattggcgtgccgctgggcattttatcggcggtgtaccgtaaccgctggctggatcacctggtgcgactgatggcgatgacgggcatctcgacgcctgccttctggctgggactgggggtaatcgttctgttctacgggcaactgcaaattctgcccggcggcggcaggctggacgactggctcgatccgcctgcccacgttaccggcttttatctgctggacgccctgctggaaggcaacggcgaggtgtttttcaacgccctacagcacctgattctaccctccctgaccctggcctttgtgcatctgggtattgtggcgcgtcaggtgcgttccgcgatgctggagcagcttagcgaggattatattcgaaccgcccgcgcgagcgggttgccgggctggtacatcgtgctgcgctacgccttacccaacgccatgatcccctccattaccgtgctcgggctggcgctgggcgatctgctgtacggggcagtccttaccgaaaccgtgtttgcctggccgggaatgggagcctgggttgtgacctccattcaggcgctggacttccctgccgtcatgggcttcgcggtcgtggtatcgctggcctatgtcttcgtcaatctggtggtggatctgctgtatctgtggatcgacccgcgaatcgggcgcggaggtgccgaatga

SEQ ID NO: 117319 - DNA, 897 bp, Enterobacter cloacae
atgatgttaactcaggaaacgcccgtccccgtcagcaccgccaaacagcgcatcaactgggcaaagctgttctggatgttacgcaaaagcccgctcacgctgatcggcggggtgattatgatcgtgatgctgctgatgatggtggtctcgccgtggatagtcccgcacgatccgaacgcgctggatctgaccgcgcgattgcaggcgccttcagcccagcactggtttggcaccgatgaggtgggccgggatctgttcagccgcgtgctggtgggcagccagcagtccatcacggcggggctggcggtggtggtgattgcgggcggcatcggttctctgctcggctgtttgtccggcgtactcggcggacgcggcgacgccatcattatgcgtatcatggacattatgctctccatcccctcgctggtgctgacgatggcgctggccgccgcgctcggcccaagcctgtttaacgcgatgctggcgattgcgattgtacgcattccgttttacgtgcggctggcacgcgggcaaacgctggtggtgcgccagttcacctacgtacaggccgcccgcacctttggcgcatcgcgctggcacctgatcagctggcatatcctgcgtaacgccctgccgccgctgatcgttcaggcatcgctggatatcggcagcgccattctgatggccgccacgctgggctttattggattaggcgcgcagcaacccaccgccgaatggggcgcgatggtggccgtggggcgtaactacgtgcttgaccagtggtggtactgcgcgtttccgggggcggcaattctgatcacggcagttgggtttaatctgtttggcgatggtcttcgcgacctgctggatcccaaatcaggagggaagcagtcatga

SEQ ID NO: 117320 - DNA, 987 bp, Enterobacter cloacae
atgagtgattccgtattatcaattgaagatttgcacctgagcttccccatttttcgcggtgacgtccacgcgctcaatcacgtttcgctggagattggccggggtgaaattgtcggcgtggtgggcgaatctggctcgggaaaatcggtcactgcaatgctggcgatgcgcctgctgccggaaggcagttaccatgttcaccatggccgggtcacgctgctcggggaagatgtcctgaatgcgtcggaaaaacagcttcgtcagtggcgcggcgccagggtggcgatgatttttcaggagccgatgacggcgctcaaccccacgcgccggattggcaggcagatggtggaggtgatccgccagcatcagtcgctttcccgtcgcgacgcgcagcagaaggcgatcgccctgctgggcgagatgcaaatcccggatgcggcgcaggtgatggatcgctatccgtttgagctttctggcggcatgcgccagcgggtgatgatcgcccttgccttctcctgcgagccggagctgatcattgccgatgagccgaccaccgcgctggacgtgaccgttcagcgtcaggtgctgcgtctgctgaaacacaaagcgcgcgccagcgggacgtcggtgctgtttatcagtcacgatatggcggtggtatcgcagctttgtgaccggatgtacgttatgtacgcgggcagcgtgatcgaaagcggcagcacgcagactttgatccaccatcctgtacacccctattcgattggcctgctgcggtgtgccccggaaaatggtgaaccgcgcgagatccttccggccattcccggcacggtgcctaacctcagccacctcccgcgcggatgtgcttttcgcgagcgctgttttgctgccggagcgaaatgcagcgaaacgccgcgcttaatttccacgggcgcagaaggccagcaggctgcctgctggtacccacaacaggagacacgccatgtctga

SEQ ID NO: 117321 - DNA, 927 bp, Enterobacter cloacae
atgtctgaggtactgctggaactggatagcgtgcatgtgaattttcctgcgcgcaaaaactggctggggcgcgtgacggagcaggtacacgccctcaacggcatggatctccggatccatcgcggcgaaacgctgggcgttgtaggggaatccggctgtggaaagagcacgctggcgcagctgctgatgggcatgctcaaaccgagtaccggtgcctgtcagcgcgcgaatgcggcaggcggtatgcagatggtatttcaggacccgctctcgtccctcgacccgcgtttacccgtctggctcatcattaccgagccggtgtggatacagcaacgccgcagcgaacgggagcgtcgtcagctggctgagacgctggcgcagcaggtgggcattcgggcggaatatcttgatcgcctgccgcatgcgttttcgggtggacagcgccagcgcatcgctattgcccgggcgctctcttcggatccggacatcatcgtgctggatgaacccaccagcgcgctggatatttccgtccaggcgcagatcctcaatttgctggttgccctgcaacagcagcgaaatctgacctacgtgctgatctcgcacaacgtctcggtggtccgtcacatgagcgaccgggtggcggtaatgtatctggggcagatcgtggagctgggtccggcggaccaggtgctgggcaagccacggcatccgtatacgcagctgctgcttgactccgttccccgtaccggagaaccgctggacgaagatctggcattacgcaaaaccgatctccccggtaatcgccgcctgcccgatggctgctacttccgcgaccgctgcccgctggcagctgaaggatgcgaacggccgcagccgcttcagcccgcagccggagaccgaagcgtacgctgctggcgtaaccgctag

SEQ ID NO: 117322 - DNA, 663 bp, Enterobacter cloacae
atgaatacaacgcttgcaggaaaaatcgctctggtgaccggcggcagcaccggtattggtctcgcaacggcacaggagctggcggcgcagggagcgaaggtctatatcaccggacgtcgtcaggccgaactggatgccgcgcgggcagacattggcgcggcggcggtagctatccgcgcggacgtctccagaatggccgatctggatgcggtttacgcgcagattgctaaagaagagggacgactcgatattctgttcgccaacgccgggggcggcgacatgctgccgctgctctcctctggttcatccattatcctcaccggatcgacggtttcaattaaggggacggcgaattttagcgtctacagcgccagtaaagccgccgtgcgtaactttgcccgctcctgggcgctggacttacagggccgcgggatacgcgtcaacgtcgtcagccctggccccgtgaaaacgcccggtcttggcgatctggttcccgaagaacagcgtcagggattatacgatgcgctggcggcccaggtgccgctgggtcgcctgggcgcgccgggcgaagtcggaaaagccgtggcgtttctggcgtccgatgccgccagctttataaacgccacggagctgtttgtcgatggcgggatggcgcaaatctag

SEQ ID NO: 117323 - DNA, 906 bp, Enterobacter cloacae
gtggatcagctaatggcaatgcgcgcctttacgcgggtggttgaatccggaagctttacccgagcggcagactccctgaacatgccgatagctacgctgagtaagctggtaaaatcacttgaagcgcacctggaaacacggctgctgcatcgtactacgcgccgggtggtcacgacggcagaaggcatggaatactacgagaaagcgctgcgggtattaatcgatatagaggacattgataccgcctttcgcgcatcgtgctgcacgcctaaaggccatttgcgtatcgacgtgggggggtcaaccgcccgggacgtgttgatccccctgctgccggatttttttcagcgctacccggacctgcgcatcaacctgggggtagccgaccgtccggtagacttaatcagtggaaacgtagactgcgtgatccgcggcggcccgctggatgactcttcgcttatcgcccggcatatcggtgacgcccggatgatagcctgcgcgacgccgggctatcttaagactcacggcatccctgcctatccgcaggagctgcgcaacggccataagctgattagctacctttcccccgttaccggacgcgcattcccgtttcggttcctcgatcggggtgaaccgctggagatcagcgttccgcaccatcttggagtcaatgaaagcaacgcacacctggccgcggcgctggcgggtttagggattattcagacgtttggctatgctgcgagaacgcatctggaaacgggcgcgctggtaaaggttctgagcgactggcgtcctaaggcgtatccttttcacgtagtctatccacagagtcggcatttaacacatcgcctgagagtgtttattgcgtggcttgccgaggtcttccctgcggcggtgaaaggttag

SEQ ID NO: 117324 - DNA, 429 bp, Enterobacter cloacae
atgacgattcataagcacggttcagcacactggtctggcgacatcaaacgcggcaaagggacggtctcaacagaaagtggcgtccttaaccagcaaccttacggctttaacacccgcttcgagggcgaaaaagggaccaacccggaagagctgattggcgcagcgcacgcggcctgtttctctatggccctgtcgctaatgttgggcgaagcgggttataccgccgattccatcgataccacggcggatgtctcgctggataaaaccgacagtggttttgccatcagcaaagtggcgctgcaaagcaaggtgacggtcccgggtatcgatccgcagcagtttgacggcattattcagaaagcgaaggcgggttgtccggtgtcgcagctgttgaaagccgaaatcacgctggattacaaactgaactga

SEQ ID NO: 117325 - DNA, 888 bp, Enterobacter cloacae
atggatcgcgttattgccgcccaggtgtacaaccgcatctgtgagctggggagtttaagcgcggcggcgcgggcgctggggatctcccgtccgatggtgagccgttatctggagcagatggagaagtgggccggggcgcggctggtgaaccgctccacccgcaagctgacgctgacggcggcgggagagaaggtcctgcaaaagacgcgtacgctctcgcaaatttctcaggaaattgaagatcagtcagtgaaggatttaccctcaggcacgcttcgcgtcgcctgcgcgcatttcaccgcgatgcagattatcgctccggtgctgcccgatctgttgcaacgttaccctcagctgcgcattgagctggatgttaataaccatccggtaagcctggtgggcgagcgaattgacgtggcgatccgcatcaccgataaccccgaaccgggcatgatcgcccgccgactgggagagtgtcggtccgtactttgcgcttcgccgcactaccttgccagccggggcgttccagagcagctggaggatttagcccggcacaactgcctgcattacagcttttttgccggtcagtcgtggcgttttttgacgcccgaaggggagccgatcacgacagcggtcagcggcaatctcagcgccagcatctcgtcactgctgatggaggcggcgataaaccactgtggtattgccatgctgcccgagcgcgaggctgacgcggcgctacggcagggcagcctggtgccggtgctcagcgcctttacgccaaaaccaatcggtatttttggtatttatcagtcgcgagactatcagcctgcggcgcagcgtgtgttcctcgacgcgctggcaaaccaccttgccacgcgctcggactaa

SEQ ID NO: 117326 - DNA, 852 bp, Enterobacter cloacae
atgaccatcgcccgccttgctttgctgacaacccttttcactccggccgtctttgccgcgccgttgaccgttgatacgtacaacccgcaggaaaaaggcatttttgccgtttcttccaccctggtgtctggcccgaaagaggcggtactgtttgacgcccagttcagcgtgaaagatggcgaagcgctggtagaaaaaattcgccacagcggtaaaacgctgaacaaaatcgtgatcacttccggcgatccggatttctatttcggcctgcaaccgctggtgaaagccttccctaatgccaaagttgtcgccacgcaacaggtggtggaccatatcaaggccacaaaagacgcgaagctcgccttctgggggccacagatgaaagacggcgcgccgacgcagctctacgtgccgcaagtgcttgcctcaaccacctttatgattgacggtgagagagtgaatattgaagagcctgagagctatgcggcgtatgtctggatcccatccgcaaaaaccatcctcggcggcacgggcgtctcatggggcattcacgtctggacggcagatacccaaacgccggaaaaccgcaaacagtggcagcagacgctggatagcatggcagcccttaagcccgaacacgttattccgggccactacctggggacaccgccagcaggtaccggcgctatcgactttacccgtcgctatctacagcagtttgaacaggccctcacggcagataaagcgtcaaccggcgtcatcaacacaatgaaaaaacagtggccgaatctggcggaagccagttcgctggaactgagtgccaaagtgaataccggcgaaatgaagtggtaa

SEQ ID NO: 117327 - DNA, 522 bp, Enterobacter cloacae
atgccatcttcagtaaggggcatcgaccatatcggtattacggtgcccgacattgaaaaagccaccctattttttgaacgcgctttcgacgcccaggttttatatcattctgtcgatgcgcaaaccgataatattgatcagcccgcccagcagcacaccttaaaattatttcccggcacaaaaattcacgccattcgcatgctcgtcatgccccacggacccggcatagaacttttcgaaatgcatggccctgaacagggaatgcccgcccgcgccagcgactttggcctccagcattttgctgtttatgttgatgattttgataaggcgatagccgctttcaccgctgctggcggggagatgtttaccgcgccaaagccgctcacgtttccggatgagcaaggtgaaggtaatgctttctgctatgggcaaaccccctggggcagcattgtagagttgatttcctggccaacgcccatgccttatgaaaaaacgacaaatttacgccgctggaaaccctga

SEQ ID NO: 117328 - DNA, 216 bp, Enterobacter cloacae
atgtttacttattacccggcacataccacagcagcacaacccgaactcgttaacgcgattgcgcagggtctccaggcggagcacggtgttgttaccgaagatgacattttgatggaactgaccaggtgggtggaagccacagacaatgacatcctcagtgacatctaccagcaaaccatcaactatgtggtcagcgggcaaaatgcacctttgtaa

SEQ ID NO: 117329 - DNA, 138 bp, Enterobacter cloacae
atgaaatcgaaccgtcaggcacgccacattctgggactgaactacaagctctctaaccagcgcaaagtggttattgaagaggggagcgaaacgcaagtgacccacgccaccggcaggaaacgtcaggcaggcaagtaa

SEQ ID NO: 117330 - DNA, 1698 bp, Enterobacter cloacae
atggacaacaaactgaaaaaacatcgttccctttatattccttacgccggtccggttttactggagtttccccttctgaacaaaggcagcgcctttagcatggaagagcgcagcagctttaacctgctgggtctgctgcctgaagtggttgaaaccattgaagaacaggcggaacgcgcctggatccagtatcagggctttaaaaccgaaatcgataagcacatctacctgcgtaatatccaggacacgaacgaaaccctcttctaccgcctggtgcagaaccatctcgaagagatgatgcccgtcatttacaccccaaccgtcggcgcggcgtgtgaacgcttctcagagatctaccgacgttcccgcggcgtgttcatctcctatcagaaccgtcacaacatggacgacattctgcaaaacgtgcctaatcacaacatcaaggtgatcgtggtaaccgatggcgaacgtattctgggccttggcgaccagggcattggtgggatggggatccccatcggtaagctctcgctgtataccgcctgcggcgggatcagcccggcctacacgctgccggttgtgctggacgtggggaccaacaaccagcaactgctgaacgatccgctgtacatgggctggcgtcacccgcgcattaccgacgacgagtactatcagtttgttgatgatttcatccaggccgtgaagcaccgctggccggacgtgctgttgcagttcgaagacttcgcacagaaaaacgccatgccgctgctgaaccgctaccgcgatgagatctgctcgttcaacgatgacattcagggcactgcggcagtgaccgtggggacgctgattgccgcgagccgtgcggcaggcagccagctcagctatcagaaaattgtcttcctgggtgcaggctccgcgggctgcggcatcgccgagcaaattattgcccagacccagcgcgaaggcttaagcgaagagctggctcgctcccgcgtctttatggtggaccgttttggcctgctgaccgacggtatgccaaacctgctcccgttccagaccaaactggtgcagaagcgtgaaaacctgaaaaactgggatacggataacgaagtgctctcgcttcttgacgtggtgcgcaacgtgaagccggacattctgatcggcgtatccgggcagaccggcctcttcacggaagagattattcgcgagatgcacaagcactgcgaacgccctatcgtgatgccgctgtctaacccgacttcacgcgtggaggcaacgccgcaggatatcatcgcctggacagaaggtaaggcactggtcgcgaccggcagcccgtttgatccggtgctgtggaaggacaaactctatcccatcgcacagtgcaataactcctatatcttcccgggtattggtctgggggttatcgcctccggcgcgtcacgcatcaccgacgaaatgctgatgtccgcgagcgaaacgctggcaggtcactcaccgctggtgaataacggtgaaggcctggtactgccggagctgaaagacattcataaagtgtcccgcgcaattgccttcgcggtaggcaaaatggcgcagcagcaaggcgtcgcggtgaaaacctctgccgatgcgttgcagcaggcgattgacgataacttctggatgccggaataccgtagctatcgtcgtacttctatttaa

SEQ ID NO: 117331 - DNA, 1710 bp, Enterobacter cloacae
atgagcactttactcactgcacattctttacgcgttgatacggcgttcggcacgctcttcgactctctctcctttacgttgaaaaaaggcgatcgcatcggcctgctgggtgataacggctgcggaaaaagtacgctgctgaaaatcctcgacgggacgcagtcccctgctgccggaaccgtttcactggcggggcattgcctgctggcgcgcgtggaacaacatctgccggaggccctttatcccctgaccatgctggatgcggtgctggcgcagctgccgatcggtgagcgcgacagtttgcgctggaaagccgagtcgctgctggccggaatgggcttcatgacgcaggaaacggcgttaacctccgccacgctgagcggcggccagcatacgcggttgctgctggcacgagcgttgataagcgatccggatctgctgcttctggacgaaccgagcaaccaccttgacctgccgaccctgctgtggctggagcagtttctacaaaactggtccggcagctttgtgctggtctcacacgacaggcaactgctggacgcggtaaccaacggcagctggatcctgcgcgataaaacgctgcacgcctttgcccttccctgcactgccgcccgtctggcgctcgacgcaaaagacgaaagcgatgcgttgcgccataaggcagagcaaaaagagatcgaccgcgtcacggccagcgcacggcgtctcgcgacctggggcaaggtctatgacaacgaagatctctcccgtaaggctaagcagatggaaaaacaggtcgaacgcctgaaagagacccagacggaactgacggcgggaagcccgtggaccttaaccctgcgcggggacgcgcttcgcgccgaccgcctgctggaaatgactcacctcggcgtccccccggtgccgggtctgccagacctgtttactctcgacagcgcgcggctgaagagcggcgatcgcgtggcgattgtgggtcgtaacggctgcggaaaatcgtcgctgctgaagcttatctggcgacattttcgcgacgagatcgcggacgagcggcttaagcgtcatccgcgcgtctcacccggctactatgaccagacgctgcaccagttgccagatgatgcggcgctgcttgatgcgctggagcctttcgcgccagatccgcagacccgtaaaatggcgctcatcagtgccgggttcccgtgggcgcgtcacgggcaaaaagtcagtacgctgagcggcggggaacgttcgcgcctgctgttcgtcggcctgacgcttgcccgttatagcctgctgatgctggatgaaccgaccaatcatctggacatggaaggcaaagaggcgctggcggaaacgctgcaacagtttgaaggcggagtgctgctggtgagccacgatcgtcagttaattagccagagctgtaaccgcttctggctgattgaggacggcaggctgagcgaatggcacgatgcggaggcggtgtttgagcgtctgcgtgaggacaccggtccggttgtacctgaagcgtcgaaggccgcatcgaaggcaccctcttcagcgtctgacgatctgctcgaacgcctggttgccctggaaacgctgctggaagaagatttggcgcgtaagccaaaacaccaaaaaccgcagttacaggcgcaatggcgaaaagagattaaggtcatagaagcgcaactgtaa

SEQ ID NO: 117332 - DNA, 1011 bp, Enterobacter cloacae
atgaaggctgctgttgtcactcaggatcatcaggttaatgtcacagaaaaaaccttacgcgcgctcaaacatggtgaagcgctgctgaagatggagtgctgtggcgtttgccataccgatctccatgttaagaatggcgattttggcgacaaaaccggggtgatcctcggccacgaagggattggtatcgtcaaagagattggtcctggcgtcacgtcgctaaaagtaggcgatcgtgcaagcgtggcgtggtttttcgaaggctgtggccactgtgaatattgtaataccggcaacgaaacgctgtgccgtgacgtgaaaaacgcgggttactccgttgacggcggcatggcggaagagtgcatcgtaaccgcggattacgcggttaaagttccggacggactggactctgcggcggccagcagcatcacctgcgccggggtcaccacctacaaagcggtaaaagtctctgacatcaaacccggccagtggattgcgatctatggcctgggcggtctgggcaacctcgcgctgcaatacgccaaaaatgtcttcaatgcgaaggttatcgccattgacgtgaatgacgaacagttgaagctcgctgccagcatgggcgcagacttaaccgtgaactcccgcagtgaagatgcggcaaaagtgattcaggagaaaaccggcggtgcacatgcggcggtggtgacggcggtagcgaaagcggccttcaactctgccgttgacgcagttcgcgccggaggccgcgtggtggctgtaggcctgccgccggaagcgatgagcctggatattccacgtctggtcctggatgggattcaggtagtgggttccctggtgggtacccgtcaggatctgctcgaagccttccagtttgcggctgaaggtaaggtgaaaccgaaagttacaatgcgcccactggaagatatcaacgccatcttcaaagagatggaacagggccagatccgtggccgtatggtgattgatttacgttcttaa

SEQ ID NO: 117333 - DNA, 510 bp, Enterobacter cloacae
atggcgttttacagttctggtgtggaatatggcattcatagcctgatgtgtatggtggatgcaaaaggcaatgaacgtgagatgagcgtccgggagatggcggccttgcagggcgtgccgtacgactatcttggaaaaatcttcacccgtttatcacgcgcggggctggtcatcagcaccgaaggcaaagggggaggcttccggctggcgcgtccggcagagctgatcagcgtgctggacgtggcgcatgccattgacggcgagaagaatatgtttgagtgtcgggaagtgcgtcagcgcctggcggtgtttgatgaaacgccacctgcctgggtctgtgacggcccgtgtggggtgcgctcggtcatggacagcgcgcagcagcggatggaagaggagttagggcgccataccatcctggatctggcgcggaagatgtatcgaaaagcgccggacacgttccagatcgaggttcaggaatggatttccgatcgccgttcgtccacgtga

SEQ ID NO: 117334 - DNA, 1203 bp, Enterobacter cloacae
atgaaaaagcagattttaattgtgggtagtgggttttccggtatgtgggctgcggtcagcgccgcgcgcctttctgctctggcgggtaacaatagcctcagcattgccgtgctggcccctgttgcggagctgcgcgttcgcccacgcttttatgaagagaacgtgtcgacgatggtcgcgccgctgaccgaactgtttgctgagctgggtatcgcctttattgcgggcgaagcacaacgtattgatacctcgtctaaaaccgttttgtatcgcgattcaaacggcgcgattgctgacgtcgcctgggaacgtctgatcctcgcaaccggtagccagactaaacgtcctcctgttgccggtctggctgaatacgcctttgatatcgaccaactcgactccgccagattattcgagcagcatcttgattcgctggtttcgcgcccctccaccccggagcgtaataccgtggtcgtgtgtggcggcggctttaccggcatcgaactggcaacggaactccctgcccgactccgtactcgcttcggcgctgatacaaagactaaagtaatcgtagttgaaagaggtgcaaccatcggcgggcgttatagcgaggcgctgcgtaacacaattgaagaagcaagcaacgcgctcggcgttgaatggcgtttaaacagtgaaattgaagccatcgatgccagcggcgtaacgctgaaaaacggagagcgcattgccagcgccactgtagtgtggacggcaggggtagaagctaacctcctcagcctgcaaattgacggggaacgcgatactcagggtcggctgatcgtcaacgacacgttgcaggttcctgcgcatcctgaggtttacgcgacgggtgatatggcgcacgccaaaacggacgatgcgggcaacacggcgctgatgacctgccagcacgcgatccagctggggaaattcgccggacacaacgcggcggccagcctgttaaatctggagccgtacccttaccgtcaggtgaactacgtcacctgtctggatttaggtggctggggcgcggtatacaccgagggctgggaacagcgcgttaaatccgtgcgcgaggaaggcaaaaagatcaaagtcgccatcaccaacgaactgatttacccgccagcagcagacaaagcggtcgcttttgccgccgctgacccgctggcgaaattcgtttag

SEQ ID NO: 117335 - DNA, 1176 bp, Enterobacter cloacae
atgaaaaagacaattttttcgttagcactgggtacctttggcctggggatggctgagtttggcattatgggcgtgctgaccgagctggctcatgatacgggcatttcgattccctccgccggaaatatgatttcgttttacgcttttggcgtggtgatcggcgcgccgattgtggcgctgttctccagcaaattttcgctgaaaacaacgctgctgtttctggtggcgatgtgcgtcgtcggtaacgcgctctttaccttctctgactcctacgtgggactggcggcggggcgcttaatctctggtttcccgcatggcgcgattttcggagtgggggcgataatcctgtcaaaaatcgcgccgccgggtaaagtgacggtcgctgtggccgggatgattgccgggatgaccgttgccaacctgcttggcgtgccgctcgggacgtggctgggacatgaatttaactggcgttacaccttctttttgattgcggtctttgacgcgctggtgatcctgtctgttctgctgtgggtgcctgacattcacgacacgacaaccacccggctggcagaacaattccacttcctgaagaaaccggaaccgtggctgatttttgccgctacgatgtttggcaatgccggggtgtttgcctggtttagcttcgtgaagccgtttatggtcaacgtgtcaggcttttctgagggcgtcatgaccgcgatcatgatgctgatggggctgggcatggtgctgggaaatgtcttcagcggcaagctgtcgtcacgctttagcccgctgcgcattgctgccaccactgacctggtgattgtggcttcgctgctggcgttgttcgcctttggcgagcttaaaacagcttcactggtcatgggattcatctgctgcgccgggctgtttgcgctctctgcgccgctgcaaattctgctgctgcaaaatgcgaaaggcggcgagatgctgggggccgcaggcgggcaaatggcgtttaacctcggcagcgcaattggcgcctatttcggtggattaatgattacgctcggctttagctggagctatgtcacgctgccggccgcgattttatccttctctgcgatgacctctctgctgatgtatggttatttatgtgccaaaaagcgtcaggccaacgcaggtgcgctggcctga

SEQ ID NO: 117336 - DNA, 819 bp, Enterobacter cloacae
atggtcagtaagaagaaaacccgtgttgttgatgatgtcgttaaaaacgcgccgctcaaaaccaaagcgtacgagcaagagcttcgccgcctccatgttgaactggttaagctccagcaatgggtggtcgccaaagggttaaaggtctgtattgtttttgaaggacgagacggcgccggtaaaggcggcgtcatcaaagccatcaccgaacgcgtcagccctcgggtgtttcgcgttgttgcgttaccggctcccaccgataaagagaaaagtcagctctattttcagcgttacgttccccatctgccctctgccggggaaatcgttatttttgaccgcagctggtacaaccgtgcgggcgtggaaagagtcatgggtttctgtaccgaggagcaggccgaaaaatttcttgatggaacgccggtgatggaaaaagcgatggtcgatgccgggatcattttgttgaaatactggcttgaagtaacgccaaaagagcaggagcgacgccttcgcgatcgcattaatgatggtcgcaagatctggaagctgtctccaatggatattaaatctttcaatctgtgggatgagtataccctcgcccgcgacgcgatgtttaaagcgaccgacaccgcctgggcgccgtggtttgtggcgcgctcagaagataaaaaacgggtgcggctgaatattatttcgcatctgctttcccagatcccctataaagaaattcacgtagacaaagtggatttaccgaaacgcaagatcggcaaagtgaagcctacaaaatatcccttccgctatattgcagagcggttttga

SEQ ID NO: 117337 - DNA, 324 bp, Enterobacter cloacae
atgtgttttcagtttgacgtttatcgcaacccatcagacagaacgcgtgaataccagccctattttatgattattcagcacgatttttatgacgacttatcaacgagacttattgtaccgttaagctatcacaatcatttaagaggacattcaaacgctgcaacgccactggtgaacattgaattccagacatattttcttaatacagccaacatcacacacgtggagacaaagaaacttaataataagaattatgtatgtaatctgcgcagtgcaagaagtagtgttcttgcaggaattgatgcgttaattaccaatacgtag

SEQ ID NO: 117338 - DNA, 657 bp, Enterobacter cloacae
atgagtaagtcgaaaatgatagtgcgcacaaaatttgtcgatcgcgcctgtcactggacggtggtcatctgcttcttcctggtggcggtatccggcatatcgttcttcttcccgacgctacagtggctcacggaaaccttcgggacaccgcagatggggcgcattctgcacccgttcttcggcgtgctgattttcgtggtgctgatgtttatgttcgtgcgtttcgttcatcacaacatccctgacaagcaggatattccctggattaaagggattgttgaggttctgaaaggcaacgagcataaagtcgcgaaggtgggcaaatacaacgccgggcagaagatgatgttctggaccatcatgagtatgattttcgtgctgctggtgaccggagtgattatctggcgtccgtattttgcccaatatttcccgatccaggtggtgcgctacgcactgctgatccacgcgacctcggccattattctgatccacgccatcctgatccatatgtatatggccttctgggtgaaaggatcgattaaaggcatgattgaagggaaggtgagccgccgctgggcgcaaaaacaccatccgcgctggtatcgggacgtcgagcgtcttgaagcgcaaaaagagagttcggaagggttgaagtaa

SEQ ID NO: 117339 - DNA, 885 bp, Enterobacter cloacae
atggcgatggaaacacaagacattattaaacgctccgcgaccaacccgataacgcccgcgcctcgtgcgcgggattacaaggcagaagtcgccaagttgatcgatgtctcctcctgcgtgggctgtaaggcctgccaggtggcctgctcggagtggaacgatattcgcgacgaggtggggcactgcgttggtgtctatgacaatcctgctgatctgagcgccaagtcctggacggtgatgcgctttagcgaaaccgaccagaatggcaagctggagtggctgatccgtaaagacggctgtatgcactgtgaagatccgggctgcctgaaggcatgcccgtctgccggggcaatcattcagtacgccaacgggatcgtcgacttccagcaggataactgcatcggctgcggttactgtattgcaggttgtccgtttaatatcccgcgcctcaataaagaggataaccgggtctataaatgcacgctgtgcgtcgatcgcgtcagcgtcggccaggagcctgcctgcgtgaagacctgtcctaccggggcgatccacttcggtaccaaaaaagagatgctggacgtggcacagcagcgggtggataagctcaaagcgcgcggctatgacaaggccgggatttataacccgcagggtgtcggcggtacgcacgtcatgtatgttctgcaccacaatgaccagccggagctgtatcacaatctgccgaaagatccggcgatcgatacctcaatcaacctgtggaaaggggcgcttaagccgctctcagcagcgggctttatcgccacctttgccgggctgatttatcactacatcggtatcgggccgaataaagaggtggatgacgacgaggaggagcatcatgagtaa

SEQ ID NO: 117340 - DNA, 2412 bp, Enterobacter cloacae
atgaccaaccactgggttgatatcaaaaacgctaacgtcgtggtggtaatgggcggtaacgccgctgaagcccatccggtgggattccgctgggcgatggaagcgaaaaacaacaacgatgcgacgctgatcgtcgtcgatccgcgctttacgcgtacggcatcggtggctgatatctatgcgccgatccgctccggtacggacatcacgttcctgtccggcgtgctgttgtacctgatcgaaaataacaaaattaacgcggaatacgttaagcattacaccaatgccggcctgctggtacgggaagatttcgccttcgaagatggcctcttcagcggctatgacgccgggaaacgtcagtacgataaatcgtcctggaactatcagttcgacgaaaacggctacgcgaaacgagatgagaccctgagcgatccgcgctgcgtgtggaacttgctgaaacagcacgtttcccgctatacgccggacgtggtggaaaacatctgcggtacgccgaaagcggacttcctgaaagtatgtgaagtgctggcttccaccagtgccgccgacagaaccactacattcctgtacgcgcttggctggacgcagcataccgtgggcgcgcagaacatccgtaccatggcgatgatccagctgctgctcggcaacatggggatggccggtggcggcgtgaacgccctgcgcgggcactctaacattcagggcttaaccgacctcggcctgctgtcgaccagcctgccgggttacctgaccctgccgtccgagaagcagaccgactggcaaagctggcttgacgccaacacgccaaaagcgacgcgtccggaccaggtgaactactggagtaactatccgaagtttgccgtcagtctgatgaaatcgttctacggcgacgcggcgcagaaagagaatgactggggctttgagtggttgccgaaatgggaccaggcttacgatgtcatcaagtatttcaacatgatggataagggcgacgtcacgggttacatctgccagggctttaacccggtagcgtcattcccggataaaaacaaagtcgttcgcagcctgagcaagctgaagtacatggtggttatcgatccgctggtcaccgaaacgtctacgttctggcagaaccacggtgaatcaaacgatgtcgatccggcagcgattcagaccgaggtgttccgcctgccgtcgacctgctttgcggaagaggacggttcaattgccaactctggccgctggctacagtggcactggaaaggtcaggatgcgccgggcgaagcgcgtaatgacggcgaaattctggccgggatttaccatcgtctgcgcgagatgtaccgcgcagaaggcggcaaaggcgctgagccgctgctgaagatgagctggaactacaagcagccggatcatcctgagtccgaagaggtggcaaaagagaacaacggcgtggcgctggccgacctgtacgatgccaacggcaatctggtggcgaagaaaggacagctgctcaatagcttcgcgctgttgcgtgacgacggtaccacggcctcttcctgctggatctacaccggcagctggacggagcagggtaaccagatggccaatcgcgataacgccgatccgtcaggcctgggcaataccctgggctgggcatgggcgtggccgttgaaccgccgcgtactgtacaaccgtgcctccgcagacgtgaacggtaagccgtgggatccgaaacgcatgctgatcgagtggaacggcacgaagtggacggggaacgatatcccggacttcaacaccgccgcgccgggcagcaacaccgggccgtttatcatgcagccggaagggctgggacgtctgtttgctatcgacaaactggcggaagggccgttcccggaacactacgagccgatggaaacgccgctcggcactaacccgctgcacccgaatgtggtctccagtccggtggtacgcatctatgaagacgacgtgctgcgtttaggtaaaaaggacaagttcccttatgtcggcaccacctaccgcctgaccgagcatttccatacctggaccaagcacgcgcggcttaacgccatcgcgcagccggaacagtttgtggagataagcgaaacgctggcgaaggcgaaaggcattgccaacggcgatcgcgtgaaggtcagcagcaagcgcggctttattcgcgcggtggcggtggtcacccgtcgtctgcaaacgctgaacgtgcatggccagcaggtggaaaccgtcggtataccactgcactggggctttgaaggggtagcgcagaaaggctacatcgccaataccctgacgccaaacgtcggcgattccaactcgcaaacgccggagtataaagcgtttctggtcaacatcgagaaagcgtaa

SEQ ID NO: 117341 - DNA, 588 bp, Enterobacter cloacae
atggacgtcagccgcagacatttttttaaaatctgcgcgggcggtatggccggaacaacagccgcaatgctgggattcgctcccaaaatggcgctggctcaggcacgcaactataaactgctgcgcgcgaaagagatccgtaacacctgcacatactgctccgtgggttgtgggctattaatgtatagcctgggtgatggcgcaaagaacgccaaagaagcgatttatcatattgaaggggacccggaccatccggtgagccgcggggcgctttgcccgaaaggggcggggctgctggactacgtccacagtgaaaaccgtctgcgctacccggaatatcgtgcgccgggctctgacaattggcagcgtatctcctgggacgaagccttctcccgaattgcaaaactgatgaaagcggatcgcgacgccaactttattgagaagaacgagcagggcatcacggtaaaccgctggacctccaccgggatgctgtgtgcctctgcggcaagtaatgagaccggcatgctgacgcaaaaatttgtgcgctccctcggcatgctggcggttgataaccaggcgcgcgtctga

SEQ ID NO: 117342 - DNA, 822 bp, Enterobacter cloacae
atggtgggtctcatccgcagcgtcagtgaaggactgggcccggtgggcggcgcggcgatgatttacaccgtcagcgggctgttgtgtctggtgacggtgggttttcccgatcttcggcgtttttccacgcgctatctcattgcgggcagcatcctgtttgtcagctatgagatgtgcctggccctgtcgctggggtatgccgcgacgcgctcacaggcgattgaagtcggtatggtcaattatctgtggccaagcctgacgattgcgttcgcgattttgttcaacgggcaaaaaaccaccctgtgggtgatccctgggcttctcatctcgctgttgggtgtgtgctgggttttaggtggcgaaaacggtctgcaactgaatgacatcatgcagaacgtcgtttccagtccgctaagttatgggctggcgtttgctggcgcttttatctgggccgcctactgcaccgtcaccagcaagtatgccaaagggcaaaatggcattacccttttcgtcctgctgaccgccctgagcctgtgggtcaaatatgccgtcagcgatcagcccgaaatggtgttcagcgtcccggttgtggtgaagctattgatgtgtggggttgcgcttggctttggctacgccgcctggaatatcggtattcttcacggtaacgtcacggtgcttgcggctgtctcttatttcacgccagttctttccgccgcactggcggctattctgctgagttctccgctttcactctcattctggcaaggggcattgatggtgtgcgccggatcgttactgtgctggtatgccacccgcaaatag

SEQ ID NO: 117343 - DNA, 1074 bp, Enterobacter cloacae
atgaaacttaaattagttgcagtggcagtgacttccatgttggcagctggcgttgttaacgcggctgaagtttttaacaaagacggtaacaaactggatctgtacggcaaagttactggtctgcactatttttctgatgatgctggtagcgacggcgacaaaacgtatgttcgtctgggcttcaaaggtgaaactcagatcaacgatcagctgaccggatacggtcagtgggaatatgagttcaagggcaatcgctctgaagctcaaggttccgacggcaacaaaacccgtctggcgtacgctggtctgaaattcgatgaattcggttccttcgactacggtcgtaactacggtgtggcttatgacatcggcgcgtggactgacgttctgccagagttcggtggcgatacctggacgcagactgacggcttcatgaccggccgtaccactggcgttgcaacctaccgtaacaccgacttctttggtctggttgacggcctgaacgtggctgctcagtaccagggtaaaaacgaccgtgacgatatcaccgaatccaacggtgacggctggggtctgtcttctacctatgaattcgacggcttcggtgtgggtgcgacctacgcgaaatctgaccgtaccgaccgtcaggttcgtgctgcaagcaacctgaacgccggtggcgaaaacgcagaagtctgggctgctggcctgaagtacgatgcgaacaacatctacctggcaaccacctactctgaaacccgcaacatgacggcgttcggtaacggtcacgttgccaacaaagcgcagaacttcgaagttgtggctcagtaccagttcgacttcggtctgcgtccgtccatcgcttacctgaaatccaaaggtaaagacatcggttcttatggcgaccaggacctggttgaatacgttgacgttggcgcgagctactacttcaacaaaaacatgtccacctatgttgattacaaaatcaacctcgtggatgacagccagttcaccaaagatgccaaagtggctaccgacaacatcgtagctgtaggtctgacctaccagttctaa

SEQ ID NO: 117344 - DNA, 1491 bp, Enterobacter cloacae
atgtttcgtcagtggttagcgttagtgattatcgtgctggtgtatatcccggtggcgattgacgcgacggtgctgcacgtggcggcgccaacattgagcatgacgctgggtgccagcggcaacgaattgctgtggattattgatatttactcgctggtgatggcggggatggtgctgccgatgggcgcgctgggcgatcgcataggttttaagcgcctgctgatgatcggcagcgtgctgtttggcctgtcatcgttagcggcggcttttgcgccgtccgcgggctggctgattgccgcccgcgcgtcgctggcgattggcgcggcgatgatcattccggctacgcttgcagggatccgcaccctgtttattgacgtgcggcaccgtaatatcgccctcggcgtctgggctgccgttgggtcgggcggcgcggcgtttggcccgctgattggcggcatgctgctggagcacttttactgggggtcggtgttcctgattaacgtgccgatcgtgctgatcgtggtttcgcttgctgcgcgcctggtgcctgctcagcaggggcggcccgagcagccgctcaatatcagccatgccattatgctgattgtggcgattttactgctagtctatagcgccaaaagcgccctgaaaggggggctgtcgccgtggatggtggcctgtacgctgcttaccggagcggtaatgctgtttatcttcgtccgtatccagctacgcgcgcgcgtgccgatgatcgacatgcgcctgttttgccatcgcattattttaagcggcgtggtcatggcgatgaccgccatgattgcgctggtgggctttgaactgctgatggcgcaggagttgcagttcgtgcatggttttacgccgtttgaagcagggatatttatgctgccggtgatggtggcgagcggatttagcgggccgatcgcgggtgtgctggtcgggcgtctggggctgcgcattgtcgcggccggaggcatggggcttagcgcggtcagttttatcggcctgtcgacgctcgatttcagcacccaacagtggcaggcgtggagcctgatggtgctgctgggcttcagtgccgccagcgcactgctggcatcgacgtcagcgatcatggctgccgcgccgaaagagaaagcggccgccgcaggcgcgatcgaaaccatgtcctacgagctgggtgctggtctggggatcgccattttcggtctgctgttaacccgcagcttttcggcgtctattgtactgccgcaggggctgagcgcgtcgctgaccgataaagcctcgtcgtccatcggtgaagcgatgaaggtggcgcaggagctgacgccgtcgctggccgagccggtgatgacggcggcgaaaaccgcgttcatcacctcgcacagcgtggccctgggcagtgcgggaggcatgctgctgattctggcggtcgggatctggtttagtctggcgaaggtcggagggcagcagtaa

SEQ ID NO: 117345 - DNA, 576 bp, Enterobacter cloacae
atgcgttatctgagcaaggacgagcggcgggaagagatcctccaggccgcgatgcgcgtggcgctgaccgaaggattcgctgcgatgaccgtgcgccgcatcgccaccgaagcgggcgtcgccaccgggcaggtgcatcaccactttgcgtcggcgggcgagcttaagtcgctggcgtttgtccggctaatccgcgatttgctggatgctgaaatcgttggcgaaaacgccggctggcgcgagcgcctgcatgccatgctcggcagcgatgacggcgggttcgagccctacattcgactgtggcgggaggcacaaattctcgccagccgggatagcgatatcaaaggcgcctacgttttgaccatggagatgtggcaccaggaaacggtcgcgattatccgcgccggggcggaggccaacgcctttacgcttgctgaccagccggaaaatatcgcctggcgtttaattggtctggtatgtggcctggatggcatatacgtattaaatatgcctgaaatggacgacgcggcatttaataagcatctggataagcttatttccctcgaattgttttaa

SEQ ID NO: 117346 - DNA, 1386 bp, Enterobacter cloacae
atgtcacatcaaagcgagaagagtaatcagcatctgttgagtaactggaaaccggaaaacgcgcaattttgggagaataaagggaaacatatcgcacgtagaaacctgtggatttccgtggcgtgtttgcttctcgcgttttgtgtatggatgttgtttagcgctattgcggtaaatcttaataaggtcggatttaatttcagcaccgatcagctttttatgctaacggcattaccttctctttccggcgcgatattacgtgtcccctactcttttatggtgccgatatttggcggacgttactggaccgtgttaagtaccgttatcctggtcgtaccctgtgtctggcttgggatcgccatccagaataccgccacgccttactgggtctttatcatcatcgcactgctgtgcggttttgccggcgccaacttcgcttccagcatgggaaacatcagcttcttcttcccgaaagccagacagggcagcgcgctgggcattaacggcgggctgggtaacctgggcgtgagcgtgatgcagctggttgcgccgctggtgatttttctgccgatgtttaccttcctcggcgttcacggcgtcccccaggaggatggctcgacgatgtggctggcgaacgcggcgtggatctgggcgccgctgctgattcttgctacccttgcggcgttttttggcatgaacgacatcgccagctcgaaagcgtccattgccagccagcttccggtgcttaagcgctttcacctctggctgctgagcctgctttatctggcaaccttcggctcgtttatcggtttctcggcaggctttgctatgctgtcaaaaacccagtttccggacgtaaatatcctccacctcgccttctttggcccgctgatcggcgccctggcgcgttcggctggcgggatgatctcggacaggctgggcggcgtacgggtgacgctgatcaacttcgtctttatggccatctttagcgccctgattttcctgacgctgcccggctctggttcaggcagttttatcgccttctatctggtctttatgggcctgttcctcaccgccgggctgggcagcggctcgaccttccagatgatcgcgattatctttcgcaaaatcaccctcgaccgcgtgaaaaaacagggtgggagcgacgaacaggcacagcatgaagcggtgaccgaaacggctgccgcgctgggctttatctctgccatcggtgcggtaggcgggttctttattcccaaagcctttggcacatccctggcgatgactggttccccggtgggcgccatgaaagtcttcctcgtgttttacatcgtctgcgtgctcgtcacctggctggtgtacggccgcaaatcctcacaaaaataa

SEQ ID NO: 117347 - DNA, 3741 bp, Enterobacter cloacae
atgagcaaactgttggaccgcttccgttacttcaaaacaaaaggcgacagtttcgccgatgggcacgggcaggtgtaccacaccaaccgcgactgggaggacagctaccgtcagcgctggcagttcgacaagattgtgcgatccacccacggcgttaactgcaccggctcctgtagctggaagatttatgtcaaaaatggcctggtgacctgggaaacccagcagaccgactacccgcgcacccgccctgacctgcctaaccacgaacctcgcggctgcccacgtggcgcaagctactcctggtatctctacagcgccaaccgtctcaagtacccgctggtacgccgcaggctgatcgaactctggcgcgaggcgctggcgcagcataccgatccggtgctggcctgggatgccatccagaacgatccgcagaaagcgcagagctacaggaaagcgcgcggaaaaggcggttttatccgctcaaactggaaagagcttaaccagctgattgctgccgccaacgtctggaccatcaaaaactacggcccggatcgggtagccggtttttcccccatcccggccatgtcgatggtctcttatgccgccggtacgcgctatctctccctgctcggcggcacctgcctgagcttctatgactggtactgcgatctgccaccggcgtcgccgatgacctggggcgaacagaccgacgtgccggaatccgcggactggtacaactccagctatatcattgcctgggggtcgaacgtgccgcagacgcgcaccccggacgcccacttctttaccgaagtgcgttacaagggcaccaagaccgtcgccattacgccggacttctcggaggtggcgaagctcagcgaccagtggctggcccccaaacagggtaccgacagcgcccttgccatggcgatgggccatgtgatccttaaagagttccacctcgataacccgagcgagtacttcctcaactattgccgccgctacaccgacatgccgatgctggtcctgctggatgaacaggctgacggtcgcgtggtgccgggccgcatgctgcgcgcgtcggatctggccgacgggctgggtgaaaccaataatccggagtggaaaaccatcgcctttgacgtggccggaaatctggtggcgccgaatggttccatcggcttccgctggggtgaaaaaggcaaatggaacctggagtcgctggctgcgggacaggaaaccgagctgacgctttccctgctcatcacccacgacagcgtggcagacgtggccttcccttacttcgggggcaacgagaatccgcatttccgcagcgtgaagcaggagccggtgctgacgcgccgcgtaccgagtaaaaccctgacgctggccgacggcagccagagacgcgtggttagcgtgtacgatctggtgctggcaaactacggcctcgatcgcggtctggaagacagtaacgcggcgacaaactacgccgagataaaagcctacaccccggcctggggcgaacaaattaccggcgtccccgcttatctgatagaaaaaatcgcccgtgaatttgccgacacggcgcacaaaactcacggtcgttcgatgatcatcctcggggccggtgtgaaccactggtaccacatggacatgaactaccgcgggatgatcaacatgctggtcttctgcggctgcgtcgggcagagcggcggcggctggtcgcactatgtcggccaggaaaagctgcgcccgcaaaccggctggctgccgctggccttcgcgctggactggaaccgcccgccacgccagatgaacagcacctcctacttctacaaccacgccagccagtggcgctatgagaagctgaccgcccaggagttgctttctccccttgcagacgcgacgaaattcaccggacacctgatcgatttcaacgtgcgcgccgagcgcatgggctggctgccgtcggcccctcagctcaaccttaatccgctgcacgttaaggcccgggcggacgccgccgggatgtcgccgcaggactacaccgtgcaggcgttaaaatcgggcgatatccgcttcgcctgcgaacagccggataacggtaagaaccacccgcgcaacctgtttgtctggcgttctaacctgcttggctcgtccgggaaaggccatgaatacatgctgaaatacctgcttggcaccgagagcggtattcagggtgaggatttaggctcaacggacgacgtgaaacctgaagaggtggaatggcaaaccgccgccattgagggcaagctggatctgctggtgacgctcgatttccgtatgtccagcacctgcctgttctcggatatcgtcctgcccaccgccacctggtatgaaaaagacgatatgaatacctcggacatgcatccgtttattcacccgctttccgcagccgttgacccggcgtgggagtcccgcagcgactgggagatttacaagggcatcgccaaagtcttctctgaagtgtgcgtcggacatctcggcaccgaaactgacgtggtgctacagccgcttcagcatgactccccgggggagctgtcgcagccttttgatattctggactggcgcaaaggcgagtgcgatctgatccccggcaaaaccgcgccaaacattgcagtcgtcgagcgcaactatccggaaacctacgagcgcttcacggcccttgggccgctgttggacaagctcggcaacggcggaaaaggcatatcgtggaacacccagaacgaggtcgatttcctcggcaagctcaactacgtcaagctcgacggcccggcgaaaggtcgtccgcgcatcgagaccgccattgacgcttcagaggtgatcctcgcccttgcgccggaaaccaacggtcaggtcgcggtcaaagcctgggaagccctcggcgaactgaccgggcgcgatcacactcatctggcgctgaacaaagaagatgagaaaatccgcttccgcgatattcaggcgcagccgcgtaaaatcatctccagcccgacgtggtccggccttgagagcgagcacgtctcctataacgcaggctataccaacgttcacgagctgatcccgtggcgcacgatttcgggccgccagcagctgtatcaggatcatgcctggatgcgcgccttcggggagagtctggtggcctatcgtccaccgattgacacccgcagcgttacccatatgcgcgaaatcccgccgaacggattcccggaaaaagcgcttaacttcctgacgccgcaccagaaatggggcattcactccacctacagcgaaaacctgctgatgcaaaccctgtcgcgcggggggccaatcgtctggatcagcgaaaccgacgcgcgcgagctgggcattgaggacaacgactggatcgaagccttcaacgccaacggcgccctcaccgcccgcgcggtggtcagccagcgcgtgccgccgggcatgaccatgatgtaccacgctcaggagcgcattctgaacattccggggtcagaagtaaccggacggcgcggcgggatccacaactcggtcacccgtgtctgcccgaaaccgacccacatgatcggcggctacgcgcagctggcgtacagcttcaactattacggcaccgtcggctcgaaccgcgacgagttcatcatgatccgcaaaatgaaaaacattaactggctggacggcgaaggtcgggatcaggtacaggaggcgaaaaaatga

SEQ ID NO: 117348 - DNA, 1545 bp, Enterobacter cloacae
atgaaaatacgctcacaggttggcatggttctgaatctcgataaatgcattggctgccacacctgctcggtcacctgtaagaacgtctggaccgggcgcgaagggatggagtacgcgtggtttaataacgtcgaaaccaaaccgggtatcggctatccgaaaaactgggaagatcaggatgagtggcaaggcggctggatccgcggtattcacggcaagctgaccccgcgcctcggcggcaaaatgggcgtgctgtcgaagattttcgctaaccccgtcctgccgcagattgacgattactatgaacccttcaccttcgattaccaggatctgcaccgcgcgccagagggcgatcacctccctaccgcccgcccgcgctcgctgattgacggcaagcgaatggataaaatcgaatgggggcccaactgggaagagctgctgggcggcgagttcgaaaaacgcgcccgcgaccgcaatttccagaagatccagaaggagatgtacggccagtttgaaaacaccttcatgatgtacctgccgcgcctgtgcgagcactgtctgaaccccagttgcgttgccacctgcccgagcggtgcgatttacaagcgtgaagaggacggcattgtgctgattgaccaggacaaatgccgcggctggcgtctgtgcatcagcggctgcccgtacaagaaaatctacttcaactggaagagcggcaagtcagagaagtgcatcttctgctacccgcgcattgagtccggccagccgaccgtctgctcggaaacctgcgtcgggcgcatccgctaccttggcgtgctgctgtatgacgcggaccgcattgaagaggcggccagcaccgagcatgaaaccgatctgtacgagcgccagtgcgacgtgttccttaacccgaacgatccggcggtgattgaggaagcgctgaaacagggtattccgcagaacgtcatcgacgcggcacagcgttccccggtttacaaaatggcgatggactggaagcttgccctgccgctgcatccggaataccgcaccctgccaatggtctggtatgtgccgccactgtcaccgattcagtcctacgccgacgcgggtggtctgccgcagagcgacggcgtgctgcctgcggtcgaaagcctgcgcattccggtgcagtacctggcaaacatgctcagcgcgggcgataccggtccggtgctgcgcgccctgaagcgcatgatggcgatgcgccactacaagcgttcccagaccgtggaaggcgtgaccgacacccgcgccatcgaagaggtcggcctgacggaagaacaagtagaagagatgtatcgctacctggcgattgccaactacgaagaccgcttcgtgatcccgaccagccaccgcgaaatggcgcgcgacgccttcccggagaaaaacggctgcggcttcacctttggcgacggctgccacggttccgacaccaaattcaacctcttcaacagcagccgcatcgacgcgatcaacatcaccgaagtgcgcgaacacggggagggagaataa

SEQ ID NO: 117349 - DNA, 696 bp, Enterobacter cloacae
atgcagatcctcaaaatcatcgcgctgctcattgagtatcccgatgagttgctgtgggaaaaccgtgacgaagcgctttccctggtggaacaggacgcgcccatgctgctgccgtttgcgcagcagcacctgagcgccccgctgctggataagcaggccgaatggtgcgaagtgtttgaacgcgggcgcgcaacctcgctactgctgttcgaacacgttcacgccgagtcccgcgatcgcggtcaggcgatggtcgacctgatgagccagtatgagaaagccgggctccagctggactgccgcgagctaccggactatctgccgctctatctggaatatctcagtatcgtcagcgatgacgaggcgcgtgaagggctgcaaaacgtcgcgccgattctggcgctgattggcggccggctgaaacagcgcgaggtggcgcattaccagctgtttgacgccctgctgacgatggccggtacacggctttccagcgacagcgtggcgaagcatgtgtctggtgaaaaacgggatgatacccgtcaggcgctggacgccgtgtgggaagaggaacaggtgaagtttatcgaagacaacgccacatcgtgcgacagctcgccgatgcagcaatatcaacgacgctttagccaggacgtcgcgccgcagtacatggacgtcagcgcaggaggcccaaaatga

SEQ ID NO: 117350 - DNA, 681 bp, Enterobacter cloacae
atgacacattacctgaacgtgtttttctatgacatttatccgtacatctgcgccaccgtgtttttccttggcagctggttgcgctatgattacggccagtacacctggcgcgcatcgtccagccagatgctcagcaagcgcggtatgaactggggctctaacctgtttcatattggcattctggggatcttcttcgggcatttgttcggcatgttaaccccgcactggatgtacgcctggtttttacccgtcgcggttaagcagcagctggcgatgatggcgggtggtgtgtgcggcgtattgacgctggttggcgggtcgatgctgctttaccgccgcttgttcaaccagcgagtgcgtgccacgtccaccacgccggatattatcatcatgagtatcctgctgcttcagtgcatccttgggctgtcgaccattcctttctccgcccagtatcctgacggaagcgagatgatgaagctggtcggctgggcgcaggggatcgtgacgtttaagggaggctcgtcagaaatgctgagcggcgtcgcaccgatcttccgcgtgcatctggtgctggggatgacgatcttccttatcttcccgttcacccgtctggtgcacgtttggagtgcgccgtttgagtattttacccgtcgctatcaggtggtgagatcgcgccgttga

SEQ ID NO: 117351 - DNA, 846 bp, Enterobacter cloacae
atgtccccatttctgagtgcttatttcgcccgcacgggctggcagcagcccgtacaggttgatatcgataccctgcgggggctgcatttacaccataactgcgcaatccctttcgaaaatatcgatgttgttttgccgcgtgaaatccatctggacgacgggtgtctggtggataaacttgtcaccgcgcggcgggggggatattgctttgagcaaaacggcctgtttgagcgggtgttacgcgaagtcggttttacggtgcgcagcgtgctggggcgggttgtgctggctaatccgtcgcagatgccgccgcgtacgcaccggttgctgctggttgagctgaacggcgagtgctggatcgccgatgtgggatttggcggacaaacgctgacggcgccgattcgtttgatcgccaacgaggaacaggaaaccccgcacgggagttatcgtttgctgagcgagggtaacgactgggtactgcaattccgccatcacgagcactggcagtcaatgtaccacttcgacctggcgacccagtacttcaatgattacgtgatgggaaacttctggtcggcgcactggccgcagtcccatttccgtcatcacctgctgatgtgtcgccacctgccggacgggggcaagctgacgctgaccaactttaattttacccactggcagaacgggcatgtggaggatcagatccatttgccggatgcggaggcgctgtataagctgatgcaggcgcggtttggcctgggcgttgatgacccgaagcacggctttaccctggccgagctgacggccgtgatggcggggtttgatacgcatccacaggcagggaaatag

SEQ ID NO: 117352 - DNA, 573 bp, Enterobacter cloacae
atgaaccactttcgccctgttggattacgccatgccagccgtcttctgaatcacggtccaaacgtgctcatcaccagccgggatgagaccatcgatcgtcgcaacgtcatggccgccgcatggtctatgccggtggaatttgagcccccgcgtatcgcgattgtggtagacaaaagcgcgtggtcacgggagttgatcgaacgcagcgggaaattcggcattgtgatccccggcgtggcggcagccaactggacctgggcggtcggcagcgtcagcgggcgcgacgaggataaatttaactgctacgggatcccggttatttatggccctgagcttggcctgccggttatagaagagaaatgtctggcgtggatggagtgccggttattacctgtaacctctgcggccgagaaatatgacactctgtttggcgaagtggtttccgccgcggcggatgaacgcgcatttgtcgccggacgctggcagtttgacggggataagctgaatacgctgcatcatctgggtgcgggtacgtttgtcgcgagcgggaaaatggtgaaggcgctggaatga

SEQ ID NO: 117353 - DNA, 510 bp, Enterobacter cloacae
atgtcctggatagatatggcgaaattttatattccaaataaaatgctcaagcaaaaagcatcggtaattgggcacattatgtcatcgaagccactcttctttttacttttcatcctgtcttccttagcgggcgcggaaaccacctatgcaccggggctagtggcgcttaaattcaatcaatggtatatagcgcagttagatcagaacaaaccacccgtactcaatccagacattatgaacgagtacgtagcctcagggaccattgcagcaattaaagaaatgtactctggcgacagtaacgacaaagatatgcccgatgcggatatgtttatcaaagcgcaggactgggatgatgactggaatcagataaccgtcttacattctgattttgacgccgtttgcacaaacgtctatgtcgcatttggtaagaagcaagatcatgtgattgcagattgtctcgttgaagagcaaggaaaatggaaagtgcgatcggcgacgctaattaagtaa

SEQ ID NO: 117354 - DNA, 2103 bp, Enterobacter cloacae
atgccccgacccattccactcgaacgttatcgcaacatcggtatctccgcgcatatcgatgccggcaaaacaaccaccactgagcgcatcctgttttacaccgggatgagccacaagctgggtgaagtacacgatggcgcggcaaccaccgactggatggcgcaggagcaggagcgcgggatcaccattacgtcggcggcggtaagctgtttctggcccggtatggacagaggctttgaaccgcaccgcatcaatattatcgacacccccgggcacgtggatttcaccattgaggtggaacgttccatgcgtgtgctcgacggcgcggtgatggtctatgactccgtcggtggcgtgcagccgcagtcggagaccgtctggcgtcaggcgaataaatatcacgtcccgcgcctggcatttgtcaacaaaatggaccgcccgggtgcggatttcttccgcgtggtgcagatgatgcaggagcggctgaaagccaatccggtcccgattgtgatccccgtgggggcagaagaacacttcaccggcgtggtggatctcatcaggatgcgcactattctttgggatgatgcgacgcagggcatggcgtttagctatgcgccagtgcctgacgatctgctgagcaccgcccaggcgtggcgagaaaaaatggtttcggctgcggcagaagccagcgatgagcttatggataagtaccttgagacgggcgaactggatgaagcggaaatcatcaaagggctgcggatccggactatctccggcgaaatacagcccatgctgtgcggcagcgccttcaagaacaagggcgtgcagcgcatgctcgacgcggtgattgaattgatgccgtctccactggacgtgcccgctattgatggggtagacgaagacggacagcacgccgagcgccacccaagcgatgatgaaccgttctccgcgctggccttcaagctgatgagcgatccgtacgtcggccagctgacctttatccgcgtctattccggcatactgcgtaaaggcgacgcggtgtacaacccggtgaagggtaagaaagaacgtatcgggcgcatcgtgctgatgcatgccaacgatcgccatgaggtggacgagctgcgcgcaggggatatcgcggcctgtgtcgggctgaaagacgtcaccaccggtgacacgctgaccgacccgaatgcggtgatcacccttgaacggatggagttcccggacccggttatttcgctggcgattgagccgaaaaccaaggccgatcaggagaaaatggggatcgccctacagcgcctggcggcggaggatccgtcgtttcgcctgcacacggacgaagagtccggacagaccattatctccgggatgggcgagctgcatctggagatcatcgttgaccgcatgaagcgtgagtttggcgttgaggcgaacattggtcgtccgcaggtcacctaccgtgaaactctgcgtaaagcggtgaaggatattgaaggtaaatttgtccgacagtccggcgggaaagggcagtacggtcatgtggtcctgagccttgagccgttagccgccgggagtggttttgtgtttgaagatgccaccaaaggcggggtggtgccgcgggagtacatcccgtcggtggaaaaaggcttgcgagaagccatgaatacgggagtgctggcgggctatccggtggtggatgtgaaagcgaccctgacgtttggttcctaccatgacgttgactcctcggagatggccttccgcatggcggcgatcctcggcttcaaagagggcgcacggcgggcggatccggttattcttgagccggtcatgcacgttgaggtggaaactccggaagagtacgccgggaacattatgggcgatctctcctcccgtcgcggcctggtgcaggggatggcagagcagtacggcagccagattattcgcgctgacgtcccgctggctgagatgtttggctacgccaccacgctgcgctcgatgtcccaggggcgcgcgacgtatacgatggagttccatcattttgcggaagctccgcggaatgtggcggatgagattattgcgaagcgtgtgaagagttaa

SEQ ID NO: 117355 - DNA, 300 bp, Enterobacter cloacae
atgatcccaaaccacccggaacctgaacaaatagtgttggaaaatgtgctgttcgccctcggcaacccgctgcgattagcgattatccgcaggctggccgacggcagcgaactgagctgtaacgcgctgcgcccggaagaggtggtgaaatctactatgactcaccactggtgcgtgctgcgcgacagcggcgtgatctggcagcgcccgcaggggcgcgagaatatgatctcactgagaagagaggatctggacgcccgctttcctggactgctggcgatcctgctccaggctaagtag

SEQ ID NO: 117356 - DNA, 642 bp, Enterobacter cloacae
atgaccggaagagtcgattatcatctggaaaaatacctcctcaccgaagccggtgagccggaacgtctgacgcgccagtgggcggaggtgatgcgcgagtgtcatgaccagaaatccggggcagaagagcggctgcgtctcgcgctgctgaacgtggattatgtgaccagctttgagcttcccttccggttacttcttacccgtgcaccgcagctgattgatagcatcagaaatgagtttcagctcagtcaaaaaaatgtcctgttcaacgggaagcggtttggctgcgtctacagccttaaacaggatttgaacggcattccggatgaatttacctaccacctgaagacccgtattcagcggatcgatgcgtccggcggttcggaagtgccttaccggcaaatcgctcagcaggtgaaagccccccgcgagcgcctccagctggcgctggaacaggggcttgcggtcaccgcgcttgacgggcttttctggtttggcctccagcgcatagccgccgaggtgcagcggttaaggaagaccgggatgagaatagtcacgtccgatacggaggtgttcgacacccttaccggaacaatacggcgcattccggtttatcgtcttgaggacgctgccgctacttag

SEQ ID NO: 117357 - DNA, 1002 bp, Enterobacter cloacae
atgacaaaattacctcagttttcactcgcgtttattcatcctcgttactggctcagctgggcaggcattgccgcgctttggtgcacggttcagcttccgtacccgctgctgttgaaaacaggtcacgggcttgggcgtctggccatgcgcctgcttccacgccgcgtggagatcgccagacgaaatcttgagctttgttttcctgatatgaaagaggacgagcgcgagcgtttacttgagcgtaattttgaatcggttggaatgggcgtcatcgaaaccggtatagcgtggttctggccagactggcgcgtacggaaacacttcagcgtgaccggctacgaacatatggaacaggcgcgggcgcaaggaaggggcgtggtgctcattggcatgcattttctcacgctggaattaggcgcacgcatctttggcatgctcaacgcgggtattggtgtgtatcgtcccaacaataatgcgttgctcgactggctgcaaacgcgcggtcgtctgcgttccaataaaaccatgcttgaccgctatgacctgaagggcatgatccgcgcgctgaagcaaaacgagatcctgtggtatgccccggaccacgattatggcaaaacgaatagcgtgtttgtgccgttttttgccgtcccggacgccgcgacaactgccgggagctacatgctggtgaaaagtgccagaccggccgtgatcccgtttgtaccgcgcagaaaagcagatggcacagggtatgagctgattattctggaagatattagcgataccttgcagggaggcgacaaagcgtcggtggccacgcaaatgaacagagcgattgagcgcgccgtgatgatggcgcctgagcaatatatgtggctgcatcggcggttcaaaacccgccctgaaggccagccggaccggtataaacgcaaaaaacagatcccatcttctgcaagaaccttatctgccagcgatatttcggaccggtcgagtatccagcagtag

SEQ ID NO: 117358 - DNA, 231 bp, Enterobacter cloacae
atgccacacgttgatatcaaatgttttccacgcgatctgactgacgaacaaaaaacggccctggcggcggatatcgccgaagcgatcgcccgtcatctgaacagcaaagatcgctcaatctccgtggcgcttcaggaggttcaggaagctgactggaaggcgcaggtctgggataccgagatcggcccgaaactggatgaactgattaagaagcccggctattcgatgtaa

SEQ ID NO: 117359 - DNA, 618 bp, Enterobacter cloacae
atgatcaaactctatggcgtacccggctggggatcggcaatcagtgaagtgatgctgactctggcagacatcccgtatcagttcgtcaacgtggacgggtttgaccagcccggcccgcagcgcgaattgctgttgaaactgaacccgctgtgccaggtgccgacgctggagctggaaaacggggcgatcgtgacggaaaccgcggcgatcgccctgatggtgctcgacagacgtcccgacctcgcgccgcccgtagggcaggccgagcgccagcagtttcagcgcctgctcatctggtttgtggcgaacgtctatcccacctttacgtatgcagattacccggaacgctgggtgcctgatgccccggaacagctgaagaaaaattgcattgagtaccgaaaatcgctctatctgtggttcgacagccagctcagcgcctcgccgtttgcgtttggcaaacagctgacgctgcttgacgtctatattgccgttgcgcgtacctgggggccacgtcatgagtggtttgccactaacacgcctaatattaccgccgtcgcggatgccgtctgcgcgctgccggaactgcacaaggtgctaaaagctaacgatataatctga

SEQ ID NO: 117360 - DNA, 888 bp, Enterobacter cloacae
atgaaatatggactcctggcggggctggtcttcacgacggcgagctacgccagcattgatttaaaggccaacgaacagccgctgccggtgacggttgatcaacaggcagtggcgaaaatcccggcgaactataaatttgttgagccgggtaccctcacggtggcgatttcagccctgaattctccgccgctggcgctgctggccagtgataaccgcacccgtattggcagcgacccggatatcgcccggttgctggcgggcagtctggggctgaagctgaagctggtgccaacggcgtgggaagactggccgctggggatcacttccgggcgctatgacgtggcgttggtgaatatcgccgtcaccgagcaacgtaaggcgaagttcgattttgcgacctatcgcgtcgattcccttgccttctcggtgaaatccaccagcaacgtacagtcgatcacccgtgcgaaagatctggccggtaaaaaggtgattgtcgggtcaggcaccaatcaggaacgtattctgctgggctggaacgaagagaataaaaaggccgggcgcgagcctgcgttgccgttttatctgaccgacgacgcctcaggcaatctttatattcagtccggcagggcggatgttttctttggaccgcagtccgtttctgcctataaagccgcgttaaccggcaaaacccgcgtcgtgggattagggccgaagaaagcctatgtcgccaccacaaccaaaaaaggcaatgggctggtgtatgcgttgcaggctgcgctggacggtgcgattaagcgcggggagtatcaaaaggtgctggcgcgctggggggaagcgggcgaagcggtgacgtcttcagacgttaatccgcccgggataacctactaa

SEQ ID NO: 117361 - DNA, 774 bp, Enterobacter cloacae
atgcaagcctctcctgaaggacacatttccattaccggcgtcagtaagttttttggccgacataaagcgctcgataaggtcacgcttgagatcccgccgggctccgtgacggtgatccttggcccctctggatcgggaaaatcgacgctgctgcgcaccattaaccatctggagcgcgtagacgaaggctttattcagattgacggggattacatcggctatcgccgtcagggtgacaaactctacgagctcaaagagaaagagatcctcaaacagcgcgtcaacgttgggtacgtgtttcagaacttcaatctttttccgcatctcacggtgctggaaaacctgattgaagcacctatcgcgcataaaaaattcagtaaaaaagaggctgttgaaaacgcctacagccttctggatgtggtaggtctgcgcgataaagccgatgcatggtcgcgtcacctctccggcggccagcagcagcgtatcgccattgcccgcgcgctggcgctgcgcccgcgcgtgatgctgtttgatgaacccacctcggcgctggatccagaactggttggcgaagtgctggacgtgattaaaaagctcgcccgttccggcactacgctggtggtggtcacccatgagatcggctttgcccgggaagtggcggaccaggtggtatttatggtcgacggtaaaattgtggagcagggcagcagcgacgacgtgttaaaccgaccgtcgcatccgcgaacgcgccagttcctctcaaaagtgctgtaa

SEQ ID NO: 117362 - DNA, 927 bp, Enterobacter cloacae
atgagcaacgttgaaaccataaaagtggtcccggcacgttatccgctgcgcgctgctggcgccgtggtggcgctgtttgtgctggcggtcgtgatccagtccgtggcctttaatccgcgctgggaatgggcggtatttgcccgctggttcttcgacccggtgatcctcgaaggcgtcggccagacgctgctgctgacgttgataagcaccgtactgagcgtggtgattggcggcatgctggcgctggcgaggctctcgtcatcatggctgttgagcagcctggcgtgggggtacatctggctgttccgttccctgccgctgatcgtggtgctgattatcctctataacttctcctatctctacgacacgctctctctcggcgtgccttttaccggcattacctggggcagctttgaaaccatcaatgttctagggcagttttctaccgccatcgtggggctgacgctggtgcagagcgcctatactgcggagatcattcgcggggggttccttggggtcgaccacggtcagtatgaggcggccgctgcgctaggtctgccggcatggcgtcgcacggtgcgcataattctcccgcaggcgctgcgcaccatcctgccgtccgggtttaacgaaatcatcagcctcgccaaagggacggcgatggtttacgtgctggcgatgccggaactattctacacgatccagatgatctacaaccgcacccaggaggtgatcccgctgttgatggtgggggccgtctggtatctggtgatcaccaccgtactgtctgccatccagcatgttattgagcgtgtactcgcccgcagcgagcgccgctccgccgtaaaccagaaccgggcggccagtcgcgcgcgctccgtcaccacttcgccagcacaggagcctgttcatgcaagcctctcctga

SEQ ID NO: 117363 - DNA, 510 bp, Enterobacter cloacae
atgcgcgaacaatttcgtgacgtttcgccggaagatgccgatcttcagcccattatcgaggggcttttcggtgagtacgccgctcgttacggcgactacttttcaaaggatgcggaagtcgagctgacagagtggtacctggcgccgcaggggctgtttatcgtcctggagcgcgatggcgagatcatcgccaccggtgcgtacaagcccttcgacgaacataccgcagagatcaaacgcatctggacgaataaaacgctgcgccagcagggactggccgcgcgcgtagtacaggagctggagcgccgggcggtgctggcgggctacagccgcatctacctgaccacggggtttcgccagccggaggcggtgcggctctatctcagtcaggggtatcagccgcagttcgatcttaaccgtgatccggaagagtatagccagccgccgttcgacggtcggctgcgtttcaccaagacgctgatccgcgaagcgctcagcaaaaccgcataa

SEQ ID NO: 117364 - DNA, 1317 bp, Enterobacter cloacae
atgtctgcacatcgtcaattgcggctggggaccattttgcatggtgcatccggaaatatgtctgcctggcgccatccggcggcggtcgcggatgccagcattaattttgatttcgttaaagtaacggctttaaaagcagaagagggcaagctcgactttatatttgtggccgacggtctttatattaacgagaaatccattccgcattttttaaaccgctttgagccgctgacggtgttgtccgcgctggcgagtatcacctcgcgcctggggctggtcggcacgttatccacctcctacagcgagcctttcaccgttgcacgccagttcgccagcctcgatcacctgagcaacggacgcgcgggctggaacgtggtgacgtcaccgctggaagggtcagccaggaacttctcccgcgaaaaacacccggagcatgcgctgcgctaccgcattgccgatgagtatctcgacgtggtgaaggggctgtgggattcctgggaaggggatgcctttatccgcaataaagagagcggacagttctttgatgcgtcgaaactgcatactcttgatcaccacggtgatttcttccaggtttccggcccgctgaatattggccgcacgccgcagggacgtccgattgtctttcaggctggcgcgtccgacgacggtaaaaagctggcggcaaaacacgctgacgccatctttacccaccatgacacgcgggaagaagcccaggctttttaccgcgatgttaaacagcagctggaaagtcacggccgccgcgcagaggatttacatatattccagggcgtcagcgtgattgttggaaacgacgccgatgacgtagaaaaccagtatcaaactacggcggcactggtctccattaatgatgcgctgaattacctcggacgttatttcgagcatcacgacttcagccagtatcccctcgacgcgccgttcccggatattggcgacttgggcaaaaacagcttccgcagcaccaccgatgaaatcaagcgtaacgcccgtgagcgcaacttaactttgcgtcaggtcgcgctggaagccgcatcaccgcgcccgcgtttttccggcacaccggagcaggtggccgatggtttacaggcctggttcgaagagaaggcggcggatggcttcatcattcagggcggcacgccggacactttcccgcgctttgtcgaccaggtggtgcctgttttacaggcgcgcggcctgttccgcaccgactatcccggcaccacgctgcgcgaaagtctgggcttagacgagcccaaaaatcagttcacacaacaataa

SEQ ID NO: 117365 - DNA, 1122 bp, Enterobacter cloacae
atgagctttagcgaacaactgattgcctggcgccgtgagctgcaccagaaccctgaactctctggtcaggaggtcgaaacaacggcgcgcctgcgcgagtggctgacggcagccgggattgccccgctgccttacgatctccagaccgggttggttgcggagatcggcacgggcaacgcactggttgcgctgcgcgccgatatcgacgcgttacccatcgacgagcgcagcggggtgccgtttagctcccggcgcgccggggtgatgcatgcctgcggacacgacattcacaccagcgtgatcctcggcgccgcgctaaagctgaaagagcgggaagcctcgctcaacggtcgcgtgcggatcctgttccagccagcggaagagaatttcggcggagcgaaaagcatggtgcgggccggggcgttacgcgacgtacgcgcgattttcgggatgcataacgagccgtcactgccggtcggcgagtttgccacgcgcggcggcccgttctatgccaacgttgatcgcttcgttattcacgtgaccggcaaaggcgcgcatgccgcacgtccccatgaaggcaacgacgccatcgtgctggcaagccagctggtaaccgcgctgcaaagcgtagccagccgtaacgtcaacacgctggattcggttgttctgagcgtgacgcgcatcgccggggggaatacctggaacgtgctgccggaaagcgttgagctggagggcacgctgcgcacgcaccgcacggaagtgcagcagaacgtgaaagcgcgcgtcggtgaaatcgccgccggatttgccagcgcctttagcgcgcaaatcaacatcacctggtacgccgggcccaccgcgctggtgaacgatgagcactgggccgggtttgccacctcggtcgcgcgcgaagcgggatatgaaacccggcatgcggaactgcacatgggcggggaggatttcgcggtctatctgcaaaacatacccggcgcgtttgtcagcattggcagcaacagtccgtttgggttacatcacccggcatttaacccggacgaagcattaatcgaacacgctgcccgctattttgctcagctcgcggaaaaagccctgcaacacgtttaa

SEQ ID NO: 117366 - DNA, 1002 bp, Enterobacter cloacae
atgtcatggcgaatcagcattctggataaaagccccgtcgcagaacacgaaacagccgccgatgcgctggcgcgaaccttagcactggcgcaacaggcagaaacgctgggttatcaccgcttctggattgccgaacaccacaataccccgcagcttgccagcccctcgccggagctgctgattgcctggatcctcgggcaaacaaaacgtattcgcgtgggctcaggcggcgtcatgctgcaacattacagcccctataaagtcgccgaaaattttaacgtactggccgccattgcgccgggccgggttgatctgggcgttggcaaagcgcccggcggtctgccgctctctacccgcgccttgcagcacggccttaatccgcaggaaaaaggcagctttgctgaacaactgacgcagctcgatcgctggatccgccctgaaaatcagtcagcggaggaggacgttcgcgccacgccgctgccgccggtgcctgcccgggggtttctgctgggcgccagcacagaaagcgcgctgctggcggcctccctcgactggcattttgtctttgccgcccatctgaacggtgatcctgagctgctgcgcgaggtcgtcacagcctggcgtcaacacagcgtccgggaggtgattgtggccgtgcaggccattgttgccccaacccaggctgaggccgatgcgctggcgcagaaggttgaagtgtggggcgtggagctggcaaacggacagcgcgtcaccgtcgccagcgaagaacaggcctacgcctttgcgcggcaggcggggagtgaaccggtgcgcatcgcgcgtcgggcgcagtctctgctggccggaacggcggcgtcggtgcttgaacagctcaacgcgttgcatcagcagtgggggattgacgaatttatcatcgacacgccggtcgctgatggcgcaacgcgcgtacagtccctgcgactgctggccgaggcgcgtcctgacagggaggttaccgtatga

SEQ ID NO: 117367 - DNA, 540 bp, Enterobacter cloacae
gtgaaaatcaatatcataggcaccagcggaagtgggaaaagcacgtttggcaggcgaatcgcggaggcgctggctatcccttacattgagatggacaggctttactggcgagcgaactggcagggaacaccggatgatgagtttcttgcaaccctggaaaaagcgctcgccgcctcgcctgactgggtcctggacgggaattacaaccgcacacgcgacgttaagtggcgcgacgtcgatctggtggtgtggatagatcgtgggtttatccgcacgctctggcaggcggtgacgcgggcctccagacgcgcctggcacaaacaggagctctggcccggcacggggaaccgcgaaagctttcgtcggtcgttccttagcaaggactctattatcatctggacgatcaaaacctggcgcagcaaccgcaaacgatatgaggcggatatacaaaacccgcagtacgcacacattcgctttctccgcattacccgacggcaggatgcggaaagactcattacatcgctcaaatcacgccgatga

SEQ ID NO: 117368 - DNA, 399 bp, Enterobacter cloacae
atgaaaattatccgtagcggttcgttaccttccgttaaggggccagaggcctggtttaccggctgcgtgcgcattgacgcgcctttccaggcgactgaaccggcaaaagtcggcggcgcgaccgtcacctttgaacccggcgcacgtaccgcctggcatacgcatcctcttggacaaacgctgatcgtgacgcaggggcgcggctggttacaggagtgggggaaagaggcggaaccgctgaatcagggtgatatcgcctggatcccacccggcgtgaagcactggcacggcgcaagcgcgcagacggccatgacccatatcgccatcgcagaagctgtcgacgggagcccggtggcatggctggagaaggtcaccgacgagcagtatccgaacgagtag

SEQ ID NO: 117369 - DNA, 891 bp, Enterobacter cloacae
atgttaaaagacaacttcaacgatctgctttcctttatggtcgtcgcccgggagcgcagctttacccgcgccgcggcgcagcttggggtatctcagtcggcgctcagccacgcaatgcgcaatctggaaacgaggctggaagtccgtctgttaacccgcaccacccgtagcgtggcccctaccgaggccggcgagcaactcttcatgcgcttaagcccccatctgctggagatcgagcaggaactcaccgcgctgcgtgatacccgcgacagacctgccgggaatattcgccttaccgccggggagcacgccatgtctgcggtgctgtggcctgtgcttaaaccctttatggcgcagtatcctgatatcaacgttgaagtcacggtggacaatgggctgactgatattgtcgatggccgctttgacgcgggggtgcgtctgggtgagcaggtggcgaaagatatgattgccgttcgtattgcgccggacatgcgcatggcggtcgtcgggtcggcagagtatttgcaacgtttcggcgtaccggaaacgccggagcagcttgatcagcaccgctgcattaatatgcgcctgcccacacgcggcggattatatgcctgggaatttgaacgggacggacgtgagctgcgcgtgcgggttgacggccagctgatcctcaacagcctgccgcaacgcatcgatgccgccgaaaacggtctggggctggcgtacgtcccggaagatgcggttcaggacgcccttgctgagagccggttagtgcgtgtgcttgaagcctggtgcccggcttttacgggataccatctgtactatccgagccgccgccagcacactaccgcgtttgcattacttattgcagccctgcggcattcataa

SEQ ID NO: 117370 - DNA, 1497 bp, Enterobacter cloacae
atgaatacaagcaataaaagcgcagccgatcatcatgctgcgaaacgtcgctggttgaactctcatgaagagggctatcacaaggcgatgggcaaccgtcaggtgcagatgatcgccatcggcggcgctatcggtacaggtctgtttttaggtgcaggcgcacgtctgcaaatggctggccccgctctcgccctggtctatctggtgtgcgggatcttctctttcttcatccttcgcgccctcggcgaactggtactccaccgcccttccagcggcagctttgtctcttacgcccgcgagtttcttggtgaaaaagccgcgtatgtcgcgggctggatgtacttcgttaactgggcgatgaccggtatcgtcgatatcaccgccgttgcgctgtacatgcactactggggcgcgtttggcgatgtgccgcagtgggtgttcgcccttggggcgctggcaattgtcgggaccatgaacatgatcggcgtgaaatggttcgccgagatggagttctggttcgcactggtgaaggtgctggccattgtgatcttcctggtggtcgggaccgtattcctcggtaccggtaaaccactggacggtaacgcaaccggcttccacctgattaccgataacggtggtttcttcccgcacggcctgctgccagcgctggttctggtgcagggggtggtgttcgcctttgcttccatcgaactggtcggtacggcggcaggcgaatgtaaagatccgcagacgatggtgccaaaagccatcaacagcgtgatctggcgtatcggtctgttctatgtgggttccgtggtgctgctggtgctgctgctgccgtggaatgcataccaggcggggcaaagcccgtttgtgaccttcttctctaagctgggcgtgccgtacgtgggcagcatcatgaacatcgtggtactgaccgccgcgctctccagcctgaactccgggctctattcgacgggccgtatcctgcgctccatgtcgatgggggggtctgcgccgaagtttatgtcgaagatgagcaagcagcaggtgccttacgcgggtattctggccacgctggtggtttacgtctttggcgtgttcctgaactatctggtgccgtctcaggtgtttgagatcgtgctgaacgtcgctgcgctgggcattattgcctcctgggcctttatcgtggtgtgtcagatgcgtctgcgcaaagcgatcaaagaaggaaaagcggctgatgtcagcttcaggctgccgggcgcgccggtgacctcctggcttaccctgctgttcctgttcagcgtgctggtgctgatggcgtttgactacccgaacggtacttacaccatcgcgacgatcccactgctggcggttctgctgattgctggctggttcggcgtgcgtaagcgcgttcacgagatccacagcaccgcgccgcttcatcacgacgatgaaaagcacgacgcaccgctggtagaagaaacctcgcgttaa

SEQ ID NO: 117371 - DNA, 1062 bp, Enterobacter cloacae
atgtctttacgtcatctgtgctcgccgcgcctgcgtgggtctctgctgttgggctctttactgtttgccggtacgttccaggttcatgccgctgaagagatgctgcgcaaagcggtcggcaagggcgcgtatgaaatggccgtcagccagcaggaaaacgcgctgtgggttgcgacgtcacaaagccgcaaaaccgataagggcggcgtggtctatcgtctggatccggtcacgctggaagtgacgcaggcgattcataacgatctcaagccgtttggcgccacgatcgataacgccacccagacgctgtggttcggtaacaccgtcaacagcaccgtgacggcgattgacgccaaaacgagcgaggtgaaagggcgcctggtgctggacgatcgcaagcgtagcgacacggtgaagccgcttcagccgcgccagctggtggccgatgacacgaccaatacggtgtacattaccggtatcggcaaggagagcgtgatctgggttgttgatggcgcaacgctgaagctgaaggacaccatcaccaacaccggcacgttcagcaccggtctggccctggatgcgaaggcaaaacgcctgtataccaccaatgcggacggcgagctggtgaccattgatacggcaaccaacaaaatcctcagtcgtaaaaaagtgcaggatgacggaaaagagcacttctacctgaacctgagcctggacactgccggccagcgtgcgtttgtgacggattcaaaacagccagaagtgctggtggtgaatctgaaagatggcagcgtgatgcagaaaatcgccgcgccagcatcgctggccgtactgtttaacccggcgcgtaacgaagcctatgtgacgcaccgcgaggcgggcaaggtgagcgtgattgacgccaaaacctacaaagtgaccaggacctacgataccccggtttacccgaacagcctggcgctgtctgcggacggtaaaacgctgtacgtaacggtgaaacagaaatcaacccgtcagcaggaagcgacccagcctgacgatgtgattcgtatcgcgctgtga

SEQ ID NO: 117372 - DNA, 2118 bp, Enterobacter cloacae
atgaaaattattactgcccgtaaggcatcactaccactgctcttcgttcccgtcatttttagcccgctgagtgcgatggccgcggatgaacagaccctgatcgtcagcgccacgccgcaaaccgtctccgaactggacaccccggccgcagtcagcgtggtgagcggcgaggatatgcgacatgccacaccgcgcatcaacctttctgaatcccttgggagcgtaccaggcctgcaaatccagaaccgccagaactatgctcaggatctgcaactttccgttcgcggattcggcgcgcgttcgaccttcggcgtacgcgggatccgcatgtacgtggacggcattccggcaaccatgcccgacggccaggggcagacgtctaacattgacctcaacagcattgagagcgtcgacgtgctgcgcggccccttctctgccctgtacggcaatgcctccggcggcgtgatcaacatcaacacccagaccggacaacagccagccacaattgaagccagcagctattacggcagctacggcacctggcgttacggcatgaaggccaccggtgcggtgggcgacgggactcaggcgggggatgtggactatgcggtatccaccacccgtttcaccacccatggctatcgcgaccacagcggcgcacggaaaaacctcgccaatgcgaaactgggcgtgcgcattgatgatgtcagcaagctaacgctgatttttaacagcgtggacatgaaagccaacgatccgggcggactgagttatcaggagtggcagaacaacccgcgccagtcaccccgtggcgatcagtacaatacgcgtaaaaccattaagcagacccaggccgggatccgctacgaccgtcagttgagcgaacaggacgacctcagcgtgatgatgtatgccggtgagcgtgaaatgacccagtaccagtccattccggcgtccactcagcgtgacaatcctgcgcattcgggcggcgtaattgatatgcagcgccattatcagggtattgatacccgctggacccaccgcggcgagctgctggtgccggtaacgtttaccaccggccttaactacgaaaatatgagtgaaaatcgccgcgggtatgaaaacttcgtgatgaacaatggcgtgccggattttggcgtgaagggtaacaaacgccgtgacgaacgtaacctgatgtggaaccttgatccctacctgcaaacccagtggcagctcacgcaaaagctgtccgttgaggcgggcgtgcgttacagctccgtctggtttgactccaacgatcattacattaccccgcaaaacggcgatgacagcggtgacgccagctaccataaatggctcccggctggtgcggtgaaatacgccgtgaccgacgcctggaacctgtatgccgcggcgggacgtggatttgagaccccgaccatcaacgaactctcctaccgttctgatggcaaaggcggcctcaatattaatctgcaaccgtcaaccaacaacacctatgagattggcagcaaaacccgcatcggcaatggcatcctgacggcggcgctgttccgcacggataccgacaatgagatcgtggtagataaagacaatgaacgccgtaccagctataaaaatgccggtaaaacgcgccgtcagggtatggaaattgcgctcgatcagcagtttgccgagaactggaagctgaaaatggcgtggacctaccttgacgcgacctaccgtaccaacgtctgtgataaatcagattgtagcggcaaccgaatgccgggtattgcccgtaacatggggtatgcgtcgtttggctgggagcctgaggaaggctggtacgcgggggcagatgcccgctacatgagcgacgtgatgacaaacgacaccaataccgccaaagcgccctcttataccgtggtcggtctgaataccgggtataaactcaattacggcaaatggggaatggacatctttggtcgcgtcgataacctgtttgataaagagtacgtcggttcagagattgttaacgctggctacaatcgctattacgaacccgcccctggccgtaactatggcgtgggcctgtcggtctcttatcgctttgagtaa

SEQ ID NO: 117373 - DNA, 669 bp, Enterobacter cloacae
atgcttgatttggaaaatctggaaaaagcacaaagaatcagtctgacgatgcaagttgagaacagtttaaagggagcgttaattacgggctcattaaaacctggggctcgactcatcacgaaagagattgcggataaattaggcaccagcatcacaccggtgcgcgaagccctgctgcgcctggtgtcggcaggcgcattacaggccacgcctgctcaggcgtttttggtgccagaggttacgctggagcgttataacgaaattaacgccattcgaaaacagcttgagccgatggccgttgcggcggcgtgtcagaatatgaccgagaccaaactggatgcattacgcgcgctgtcagataacttcagcaccgccatgcatcagggcgacgtgcagaaggcgatccatgccaaccgcgtgttccggtttacgctttatcagtatgccgaaatgccgaccctgaactcgctgattgagcagctctgggtacggattggtccgtgtatcaactacctgcacgaagagatgaaagatatccctgcaacgacttaccattatgccgatctgctttctgcgcttgagcaaagggacgtgacggccagtcgggaagcgatcgaccgagccattgatgaagctaatatcctcctgcaacggcaatactacagttaa

SEQ ID NO: 117374 - DNA, 1035 bp, Enterobacter cloacae
atgagtcaatcaactacgcaaaaccgacgctgggtactggcttcccgtccacacggcgcaccggttgccgaaaatttccgcctggaagagcagccgatccccacgcccgcagaggggcaggtgttattacgcaccgtatggctctcgcttgatccgtacatgcggggccgtatgagcgatgccccatcctattcacctcctgtcgagattggcgcggtgatggtgggcggcacggtaagccgcgtcgagacctcccgccatccggattataaagagggcgagtgggttctgggctacagcggctggcaggagtatgaactttccgacgggaaagggctggtcaggctgggcgaaaacccgtcgcacccttcatgggcactcggcgtgctgggaatgccgggcttcaccgcgtatatggggctgcttgatatcggccagcctcaggcgggagaaacgcttgtcgtggcggcagccacggggccggtcggcgcaacggtggggcagatcggtaaaatcaaggggtgccgggttatcggcgtggctggcggggaggagaaatgccgtcatgcggtcgacgtgctcggtttcgacgcctgtctggatcaccatgcggataatttttccgaacagctggcgaaagcctgcccgcagggcattgacgtgtattatgaaaacgtcggcggtaaagtctttgacgccgtactgccgctcctgaatacctccgcgcgcgtacctgtttgcggactggtcagcggctacaacgcgaccaacctgccggatggtccggatcgcttgccgctgctgatggggaccatcctcaaaaaacgcatccgcatgcagggctttatcatcgctcaggactatggtcatcgtatcgacgagttccagcaggaaatgggacgctgggtgaaggaaggcaaaattcactatcgcgagcaggtcaccgaagggctggacgcggcgccggaggcgctgattgggctgctggaagggaaaaacttcggcaaggtcgtgatccgcgtggcggcggactaa

SEQ ID NO: 117375 - DNA, 576 bp, Enterobacter cloacae
atgaacacaatgacagacaatatgaatcaacgcattagcgcccgcatacgccttgaacgcgagtcgcggggctggtcattaagcgaactggccgaacgggcaggtatttcacgcgccatgatccataagattgaacggggggacagtagcccaacggcgacgctgcttgcccggttatccggtgccttcggtattagcatgtctacgctcattgcgcgcgcggaaatgcaggagggcaaactgttacgtctggcgaaccagcccgtctggcgcgatccgcaaacccactatttacgtcgtcatgtgtcgccgcgcagcgatatgcctattgacctcgtccaggtggaactgcccgcgggcagcgatgtgccgatgcccgcctcctcttatgcgctggcgcgacagctgatttggttgcaggcaggtgaactggtctttctggagggggacacccgccatgaaatgaaggccggagattgtctggaactcgggccgccgaacgactgccggtttattaacgaaacggatgaatcgtgcctttatctggtcgtgcggcttaatcagtccggctcataa

SEQ ID NO: 117376 - DNA, 519 bp, Enterobacter cloacae
atgatcgttcgtcatgcctgcaaagaagattgtgccgctatcggtgaaatttataaccatgcggtgctgcacaccgccgctatctggaacgatacaactgtcgacaccgataaccgtattgcatggtttgaggcgcgcacgctgttgggttatccggtgctggtcagtgaagaagaaggtgttgtgacgggatacgcctcatttggcgactggcgagcgttcgacggttttcgccatacggtggagcactcggtttacgttcatcccgatcatcagggcaaaggcatcggtcggctgctgatgacggaattaatcaaggaagcccgccagattggtaaacatgtgatggttgccggtattgaggcgcagaatcaggcgtcgattcatctgcacaaaaccctgggctttattaccaccggaaatatgccgcaggtgggaaccaaattcggtcgctggctggatttaacctttatgcaactccagctcgatgagcgcagcgatccggatgctctgccatga

SEQ ID NO: 117377 - DNA, 450 bp, Enterobacter cloacae
atgaatcaatcgttgacgttagcgtttctggtggccgccgggattgggctggtggtgcaaaacaccctgatggtgcgcattacgcaatcctcttccactattcttatcgccatgctgctgaactcgctggtggggattgtgctgtttgtcagcattttgctggtgaaaaatggcctggcggggtttagcgaactggcgtcaacggtgcgctggtggacgttgatccccggcctgctggggtcattttttgtctttgccagtattagcgggtatcagaatgtgggcgcggcaacgaccattgccgtgctggtagcaagccagctgattggcggcctggtgatggacatcctcaagagcaacggtgtccccctgagggcgctggttggcccggtctgcggcgcagtgatgctggtggtcggcgcctggctggtggcacggcgccagttttaa

SEQ ID NO: 117378 - DNA, 234 bp, Enterobacter cloacae
atgtcacatttaaacgatgttatcgcccgcgtcgatgccgccatcgaagagagcataattacccacatgaacgaactgctgatcgaattaagcgacgatgcagagctcagccgtgaagatcgctatacccagcagcagcgcctgcgtaccgcgattgcgcatcatggtaagcagcataaagaagaggcggaggcgcgccatgcccacctcacgcagggtgggactatcctgtaa

SEQ ID NO: 117379 - DNA, 1599 bp, Enterobacter cloacae
atgtctacagggaaaaccgtgctggccctcgcgctgagcgcgctgctaccggcaagcgccgcatgggcggaaaacaaagacaccattatctactgctccgaggcgtcgccggagtcgtttaacccgcagatcgccagctctgggccctcatttgtcgccagctcgcaaacgctgtataaccgtctgattaacttcgacccggtaaaaaacacgccggtgccttctctggccgagtcgtggaccatttcgccagacggcaaaacatacacgtttaccctgcgtaaaggggtaaagttcaacagcaataaatacttcaaaccgacccgtgattttaacgctgatgacgttattttctccgttatgcgtcagaaagaccctaagcatccctatcacaatgtttcccagggtaattacgaatactttaatgacgtgggcctcgacaagctcattcaggatgtgaaaaagatcgacgattatcacgttcagttcacgctgagtgaacccaacgcggcgttcctcgccgactggggaatggacttcgcctcgatcctctctgccgagtacgcggacgcgatgctgaaaaaggggacacctgaatatgtggacacctggccaatcggcaccggcccgtatgtgcttcagcagtacaaggtggattcgctgatccgctacgtcgccaatccgaactactgggagggtgaggtgccgaccaaacacctgatcttctccatcacgccaaacgttgagacgcgtctggcgaagctgcaaacgaacgagtgtcagatcattcctgcgccgtcgccggtgcagtttgaagcgatcaagaaaaacaaagacctgaccctgcactcggtggatgcgctgaacgtggggtacctggcgttcaacacggagaaaaaaccgtttgataacgtgctggtgcgccaggctctgaattacgcaacggacaaaaaggccattgttaacgcggtctttatggggtctggtacggtcgctaaatcgccgatcccgccgaacatgctcggctttaacaaagacctgaaggattacggctacgatccggaaaaagcgaaagcgctgctgaagcaggcgggtctggataagggcgcggaagtgaccctctggtccatgccggttcagcgtccgtacaacccgaactcgcgacgcattgcggagatgatccaggctgactgggcgaaagtgggcgtgaaggcgaaaatcgtctcatacgagtggggggaatatctctccggcatgcgtaaaggcgagcatgattccgcgctgttcggctggatgtctgataacggcgatccggacaacttcgccgatgtgctgctgggttgtaacagcatcaaaaccggatctaacgccgcgcgctggtgtgataaggggtatgatgagctggtgcaaaaggccaaactgaccagcaacccggacgaacgtgcgaagctgtatggccgggcacaggagattttctaccagcaggcaccgtggattgcgttagctaacggcaaaacgttctacgcgacccgcagcaacgtgaccgggtacagcgtgagtctgatgggcagtgacttctcgaaagcgaagctgaactga

SEQ ID NO: 117380 - DNA, 1338 bp, Enterobacter cloacae
gtggcaaaaacacttttacgcagcggtaatctggatgattttcaggccgttggcggcggcggacaggccgtttttgaatcagcgctgcaaatccgcgaagcgcttcggttgcgcaaacagcaggctatcgttgattgcctggccatcccccaggtcaacgacggcggcgatcgcgttgactggtactccccggttgagggaaccgtctccagctggaaggcggcggatgaagatgatcgttatcgcgccctgcgctatctggaaaacacgctcgccagcgtggagtcgctgagtaaaaaatgccttcagtcaccgaaaacggcgcagcaactgtttggctctctgctctcaaaagcctttcagtatcccggtgaaaactttgttttcctggtggatggcaagccggtgatctgcttctggggtttcgtcaaccttaacgaaaacgcgcgcgatgacgtgctggactgcctgcgcgaatcgttggtcactgaacctgagccagtggtgattaacgagcctgaacctgaaccggagccagaaccggccccggtggtgacctttgagcaggccgacgcgccgcttatcacgcctgtgactacagtccgtatcaccgacgatgaactgtatacgccagagccggtgcgcatgaacgccgcgccgccagagcccgcaccggcggccatacagaaaaaacgtcgctcccccctgtggttgctgccggttgccgccgtcattattgcagccatcgccaccccgctgctctggccaaaacaggccccaatcgcagcgcctgttgccacaccagcgccagtacccgtcgccattgctccggcccccataaagtcggttgagccgcttgaactgaaactcccgctgcaccaagccgaagtggtagagccgaaggtgaaaacgcctgccccggcagccgaaccggtggtcattaccgcgataccgaaagatgcgatggtgatggaggcaaaccaggtcaaagcggggttaacgcgcttcctgaacggcacctggcgcgcgtttctcgatgtgcaggatccgctcaccggcaaaccgccgtcgctgcgctaccagatccagaacaataaaggtttcgcccgggtcgtgcatggcgacaacattgtctgccgggtagacgtcttttccggattacacagcaacggcgagctgttgatcaaaacgcgcggaaacgcgcgttgcaccgacggttcacgctatccgatgccggaagtgacctgtaaggcaggtgccagcgatgtggcggaatgcaccgcacgttacgatgccaacaccgtcgttcctctgacgttcaagaaagcaggtgtctga

SEQ ID NO: 117381 - DNA, 2982 bp, Enterobacter cloacae
atgctggttaatctttgcgactataaacagagcgtgacgctgattgctaacagcggcgtgcagtttctcgattttggcctgactccgcaggacaccgccagcaacgggcgtttcgtgcgtaaaacggcaaatggcccgctgctgcgtctggattttgacctggttaacggccggtacacgctccctgccaccgatggcgggcagccggaagtggtcaagcctgaaagcaccattccactgcatgactccctgaccgtgctggacggcgtctggctgccgatccctttcctgcgctttaacccgccgcggacgtttgttgaaggcccggataactgggcgcgcgtccaggtacgaaagctttccacgcccgacgcagctggcaatacgcaccgggtcaccgtcgcgctcgacagccagattgcagagcatgcgacgtctgccctgtcgccggttgaaaacgatatcctgaacggcacacgtttcgcgctcgcctggcgcgacagtgaggttgaaagtttcctcgaccagacctggattgacggctggctccgtgaagccttcacgcagtttgccgacggggttgaaaaacgctccgagcgcgagctgcatcaggccatgcgcagctttgaatatcaggcgcactggctcaacctgctctccatgctcggtgaacaactcaccgtgccggaagtgaagtttgtcacccataccctgagcacccctgctattcctgtcgatttgatccttgacgtaggcaacacccacacctgcggcgtgattattgaagatcatggtgatgccaacgacggcctgcgtcagacggctgaacttcaggtacgatcgctgagtgagccgcagttcctgaatgagccgctgtttaccagccgtcttgagttttccgaagcgcgttttggcaagcaacacttctcggtggaaagcggccgggaggatgcattcgtctggccgtcgattgtccgcgtgggtgatgaagcgcgtaagctggcaatgcagcgtctgggcaccgaaggcaacagcggcatttccagcccgcgtcgctatctgtgggacgagacgccggtggtgcaggactggcgctttagccagatgaacagcaaaacccagcgcgaaccgctggcaactgcgtttccgctgatgaacctgatgaacgacgacggggaaccgctctttacgctgccgcaggatgagcgcctgccggtgttctctccgcagtacagccgcagcaccctgatgacgcacatgctctgcgagctgctggctcaggcgcttggccagattaacagcgtggccacccgcctgcggctcggcttcccggcctctccccgccagttgcgaacgctgatcctcaccctgccgtcggcgatgccgaaacaggagcgcgagattttccgtcgccgcatgttcgaagccatcgccatcgtctggaaagcgatgggctggcacccgcaggatgaagattttgccagccgcaagcagcaggaaaaaagcgtggtgccggtccctgagatccagatggagtgggacgaggccagctgcggccagctggtgtggctgtataacgaagccatttcccattttggtggccagaccgaggcctttttcgcctccctcgcccgtccggatcgcgcgcctgagcctggcgtccagccggggcgtgcgctgcgcgtggcctcgattgatatcggcggcggcacgacggatatggccatcacgcactatcagttagatgatggttccgggaataacgtcaaaatcaccccgcagctgctgttccgcgaagggtttaaggtagccggtgacgacacgctgctggacgtgatccagcgctacgttctgcccgccctgcaaacccagcttcagaaatccggcatagccgatgcctcccagctgatggcatccctgttcggtgactccgggcggatcgatacccaggcggtcctgcgccagcagacggcgcttcagctctttatgccgatcggtcacgcgatcctggcggcgtgggaatcgagcgatgttgacgatccgctggccgggctgcatgccacctttggcgatctgcttgcgcaaaaaccgacgcgcaacgtgatgaattatctccagcaggcgatcgaccatgcgttgcctgccggctcagaacactttgatctgttcagcgtaccgctgcacgtcagcttccgggagatgcgggacgccatgctggcgggtcagttcacgcttgccgccccgcttcatgcggtatgtgaggcgatctctcattacagctgcgatatcctgctgatcacgggacggccgggctgtctgccgggcgttcaggccttgattcgccacctgcaaccggtgcccgtcaaccgcatcgtctggctggataaataccaggttcatgaatggtatccgttcagccagcagggacggatcggcaacccgaaatccaccgctgcggtgggagcgatgctctgtagcctggcgctggatcttcgtctgccgcgctttaactttaaagcagcggatatcggcgcgtattctacggtgcgctatctgggcgtgctggataacacgatcaataccctgcgggacgagaacgtctggtatcacgatatcgacctcgataaacccggcgcgaaactggacgcccgtctgcacttcccgctgcgcggcaacgttacgctcggcttccggcagttggccaatgcccgctggcccgcgacgccgctctataccctgagcatcaactcagccgagctggcgaaagccattgcgggcgacggcgtactgaacgtgcgcctgaagctgcgtggcggcactaagcaggtaggcccggaatctttcgagctgagtgatgcctggctacaggacggcacgcccgtgccgccggatgccctgacctttaaactgaatactctggccgatcgccgacacagcggcagccactactggatcgacagcgggagcgtatacctcaaatga

SEQ ID NO: 117382 - DNA, 2175 bp, Enterobacter cloacae
atgactgcgacgactgccaccactcaggccttaatcgggtggatcaacgagacgcgacagcacgccccgatgcttgataacgaagccgacgccctgcttgcccgccttaacgcagtaagcgcgcgtgaagaggcgctcgatcgcgcccttgtcagccaaggcagtatcggcttatatggccactcgcaggccgcgaaagcgcacctgctggctgctctttgcggcagcggggacgaacggctgaacgttacgccgggtcaacgcacgtttgattacttctcgcatattaaccccgggcatgcaccgaccaacatggccgtgcgtttcagcagagcgtcccgcgaggtcgcagacgacgcgtttcccctgcgcctgcgcctggtaacggaggccgagctggtgcagctgtttatcgcgcgcaccacgctggatccgcagatccgcgcggtggataaattggtgattgaagcccggcttgagaagtggcgtgcactgcgtcaaccgcagagcgtgccgggaatgacggcgcgggaagtcgcgaccattgcccggttctggcaaagcgtagtacccggcgctaagcagcatattgatgatgccctgtggcaccagtttgccctgctggttccgtcgcttgatctcagcacccgcgccagcgtctggtctctgctgtggggtgagcagcaggagttaacccagcagtggcttaaattcgcccaggtgctgcatcaaaccagccatgccagcgcgcttgcggcgccgttgagtctgctggtggacagctttggtctgccctgcgaaggcttccttacgcacggggcgtttaccgtgccggaagcacaggaaacactgcttcatccggtaaaaaacggcgagctgcttaacgccattagcctgcccgtcgatgtactggcatctctgacccgcgaagtggtgctgcccgttgagaactgcgtgctggataacgttgacgtcattgatatccctgccatttctgaggaaaacacgccgctgataatgcaggcaaaatgcctgtggttgctggagcattatcgtcagcacattcagccggatgtcctggttatctgcaatgcgacggcgcaccaccagcagaccgcgaaaacggcaaggctcctgcaaaactgggtcaaagagacgcagccggttgaagaatccgcattgccggggctggtctgggccattacccctcatgatgcgcggtttaccacaaagcagaatctggacgaagcggtgcagcaattgctgggccagccgggtctgcgctggggcacgctccaggcgctcgatacccacagcatgcagcgggtgattgagtggctgtcgcaggctaccctgccggcacagcgccagaagcgtctccgcgcgctgaaaaggctgttacaagagtcgctgtcgacgctgattcgcccatatgtcgcgcctctcactcaggagccaggcgcagggcgggcacaggccgaaaaaatggtccgaacgctgcaaggcagtgccgctcgtcatggtgaactgcttgagggacttctgccgccgttaaacgcgtttgagacgctgctgaccgttcaccagcctcgtgaggaacaggtcaacggcctgtttaacgatgttatcgatctgtttgcggaagagacgcaggaaaatccaggcgcgttgcagaccaaagacaaggcgcggctggcccataacgtgtgggttaaccatcttcgtcagtggagtcgcaacgacgcggcggctgcccgtctgggcctggacgcagaggtattacagcagattgcggatgtgctgatcgttaccagctaccggctggatctgccgctgcaactgcaacgcattgcagaaaaagataaaagcagtgccgcgcagctgcatgccgcgacaggcaatttcattagctggcttggctatgaaatgacgcccgtttctgaacggcctgcaagccggatccgcaaaggtcagccaatttttgtgacgccagttgtgagcagcgcttctccccgtcttacccgacttggcgagcagcctgtccatgcggcgacagcctatgtttatgactggctggttgcgctctacacccgcgcgattgaaaacgtggattatcagtgcccgtatgacgttcagcctgctgcgcggaaagccttgtctgccctgctgtcttaa

SEQ ID NO: 117383 - DNA, 759 bp, Enterobacter cloacae
atgatcagtttctattcgcagcaagcaggctgcactgtgcgctggcaagatcttcccggtgtcggtgacccggttgtgtttatccacgggttgggctgtgcatcgtcgtatgaatatcctcgtattgtctgtgatacccgtttcggggggcgcagagccattctgatcgatcttcccggtagcggttacagtgacaaacctgacaactaccgttatcgcacgagcgaacaggcgcaggtggtggttgaactgttaaaccatctcgccctggatagtctatggctgtatggtcatagcatgggagggagtatcgcgatcgaaacggcagcactgttaacgtcgcgcgttaagggcctgatagtatctgaacccaattttcatgcgggtggcgggatgttcagccgagcaattgcggcccaaacggaacaacattttctggctcagggctatgatgacatgctgcgggcggaaacgtcgccgtgggctggaagccttcaaagcaatgccccctgggccgtctggcgcggcgcaacaagcctggtcgagggcgttaaacctgactgggcacacctgttcttgtcattgagctgcccggtaatgttagtttttggtgagcgatccctgcctgatgacgattttaatcgcctgcaacaaaacaatgttgctgtaaaaattatccctgatgcgggccattcaatgtcctgggaaaacccgtcagcgttggctcaggctttatctggcttcataaacggctcatga

SEQ ID NO: 117384 - DNA, 174 bp, Enterobacter cloacae
atgacgttgtatcaaaagatgttggtgttctacgcaatcatggcctccatctgcgcattaatcaccaggttcctgtctaaagatcgtaaacgtattcgcctgttgagcgcattcctggtgggttccacctggccgatgagctttcctgttgccctgttgatctctcttttctga

SEQ ID NO: 117385 - DNA, 327 bp, Enterobacter cloacae
atgctacgcattccgcagagttgcattcacacccgttccacgcctttctggaacaaagaaacggcccccgccggcatttttaaacgccacctggatacgggcacgcgtccgggcgtttaccctcgcctgtcggtgatgcgtggcgcagtgcgttatctgggctatgctgatgaatttacctctgagcctgacagcgagctcgtcattgaagcgggtcgtttcggcgttttcccgccagagagatggcaccacattgaggtgatgaccgacgacaccctgttcaatattgaattctttgttgaacctgaggtgcttaagtccctttaa

SEQ ID NO: 117386 - DNA, 354 bp, Enterobacter cloacae
atgttacgtattcctgaaaactttgttcatacccgctcgacgccgttctggaataaagagaccgccccaaaagcgctttttacccatcacaacaccaaagccggcgtgtacggtcggttgtccgtcatgcagggtgcggtgcgttactttggctttgccgatggcgacgccaccgagcccgatctggaagtggttattgaggccggttcttttggcatctccccaccgcaaaaatggcaccgcattgagctactgaccgacgacacctattttaatatcgacttttttgcggatcctgccgtcacgctcagcggtgcgggcatcggtaaagtggtcaatacgcataaggagtag

SEQ ID NO: 117387 - DNA, 183 bp, Enterobacter cloacae
atgggtaaggctacctataccgtgaccgtcaccaacaacagcaacggcgtgtcggtggattatgaaacagaagcgccaatggagctgttgatcccggacgtcgcggcagatgtcgtgaaggatctggtgaacaccgttcgcgcctacgatacggaaaatgaacacgaggtctgtggctggtaa

SEQ ID NO: 117388 - DNA, 1269 bp, Enterobacter cloacae
atgtttgccctggtcgatgtgaactcattttatgccagttgcgagacggtattcagaccagacctgcgtggtcggccggtggttgttctttcgaataatgacggctgcgtaatagcgcgtagcgcagaagcaaaggcagtcgggatagcgatgggtgagccgttcttcaagcagaaggaattgttccggcgcgctggtgttgtttgcttcagcagcaactacgagctgtacgcagacatgtccagccgggtaatgaccacgctggaagaaatgagcccgcgcgtggagatttacagcatagacgaagccttttgcgacctgaccggcgtaaggaactgccgggacctgactgaatttgggagagaaatccgcgcgacgatattacagcgaacgcatcttacagtgggggtcggcatagctcagaccaagacgttggctaagctggctaaccatgctgcgaaaaaatggcagcggcagacgggcggggtggttgacctctcaaacgtcgaccggcagcgaaggctactggcgcttgttcctgtggaggatgtctggggcgttggccggcgcatcagcaaaaagctgaacgccatgggcatcaaaacagcactggaactctctgagcagagtacatggatcattcgcaaacactttaacgttgtgctggagcgaaccgtccgggaactgcgcggcgagccatgcctggatctggaggagttcgcgccggtgaagcaggaaattgtatgcagccgatcgtttggcgaacgcattactgactatgagcaaatgcggcaggctatttgcagctacgcggcccgtggtgctgagaagcttcgcggcgagcaccagtattgccgttttatatccgccttcgttaagacctctccatttgcccttaatgagccgtattacggaaatagcgcatcggtaagactgctcacgccaacgcaggacagcagagacatcatcaacgccgcggtaaagtgtctggacaaaatctggaaggacggtcaccggtaccagaaagcgggtgtcatgctgggcgacttcttcagccagggcgtagcccaactaaacctgttcgacgacagtgcgccacgagctggtagtgagaagttaatggaagtgctggatcacctgaatgcaaaggacggaaagggcacgctctattttgccgggcagggtatacagcagcagtggcagatgaagcgtgaaatgctgtcgcctcgatacactacgagattttcagatttgcttgttgtccgataa

SEQ ID NO: 117389 - DNA, 306 bp, Enterobacter cloacae
atggaggcaaaagctcagcgattcaggcttgaaaaattatgtggtgttaaccgcaactcatgcctggttgaaacgtcaggtggatatgcgatttttcagcctgatctttcgcccgccaacggaacgcgcgtgctggtgcatgcgttcggccagctacagttcgcggtcgttatgggcggtgcgctcatcaccgaagacggtgaaagcatagagggagatgctttagatgaagtcgatgtcatgggagttgtgaccttttttatcaatggcgctgcggcgttcacagacgacaatccggtgatgtga

SEQ ID NO: 117390 - DNA, 414 bp, Enterobacter cloacae
ttggacagtgatgctaaacttcagacctttccgaattcactgatttctataatgttaaagttattcgccaagtacacatcaataggtgttatcaacacgctcattcactgggttgtgttcgctgtttgcatctacgcatttcatacaggccaggcacttggcaactttgccggattcgtcgtggcggtgtcattcagcttctttgcaaacgccaggttcacgtttaagtcttcgacaaccacgatgcgctacatgctgtatgtagggtttatgggatccttgagcgcagctgttggttgggctgccgataagtcaggcatggctccaattgtgactctcattctcttctccgcaatcagtctggtgtgcggttttatttattcaaagttcattgtctttagggatgcgaaatga

SEQ ID NO: 117391 - DNA, 918 bp, Enterobacter cloacae
atgaaaatttctctggtcgttccggtatttaatgaagaagaagcaattcctatcttctataaaaccgttcgggaatttgaaggccttcagcagcatgaagtcgagatagtcttcatcaatgacggcagtaaagacgcgacagaatcaattatcaacgcgcttgctgtttcagatcctcttgtggtccctctgtcatttacaagaaacttcggtaaagagcccgctctgttcgccggccttgaccatgcgaccggtgaagcgattatcccgatcgacgtagacttgcaggacccaattgaggtcattccgcacctgatagagaaatggcaagccggggcagatatggttttggctaagcgttcagaccgctccactgatagccggttgaagcgtaaatccgctgagtggttttataaactgcacaacaaaatcagcaatccgcagattgaggagaacgtgggcgacttcaggcttatgtcccgtgaggtggtggaaaacattaagctcatgccagagcgaaacctgttcatgaagggcgttctgagttgggttggtggccgcaccgatgtcgttgaatatgcacgcgcagaacgcgtcgcaggaagcactaaatttaacggctggaaactgtggaacctggcacttgaggggatcacaagcttctctactttcccgctgcgcatgtggacttacattggcttgctcgtagccgggcttgcattcctgtacggcgcctggatgattgttgacacactagcatttggtaacccggttcgtggctacccttccctgctggtatcggttttgttcctgggtggcatccagctgatcgggattggcgttcttggcgagtacattggcaggatttatgtggaggttaaacacagacctcgttacataattaaaaagggtaattaa

SEQ ID NO: 117392 - DNA, 1503 bp, Enterobacter cloacae
atgaattacaatagaaacaataaaatcacatccattattatgtatgctatttctttttctttcttggcatttataatatcaagatactttccaataaactctgattatgccaatagtccattagtatggagagagtttttagataagggagtgtcttctttttttgactggagacccactccagacaattggtattttactgtatacccaattaacttcgcaatcttctttttgctaggagatgatggtgtaattccgttgctgatttctactatattatttgcagcactagttacattgttttcttctgagatatctaaaatatcaaatggaaagtggagctatgtttcggttatcgtaggaactacattattgcctcagataatgttaactgatgggtttgttgctcatccatttgcgcattattcaactgctgcgtatggatttctaatgttgttgctgtttaccaaaaacctatcaaagaacaacatttacataacaacgatgatagccgctataggtttgattgcgaactcatctgatatgtggatcgcgcctacattctttatgccaatacttcttgttgagatctacctattcctttcaaaggaaaggagagtatctcatctttgtgtaatggccgccttttttggattatcaattactcatgttctgcctattctgatgggcttcgacatacagaagtttgaaattgttgatatcagtatgatgttgcagaacatttatggctccatcatattgataggggaaacaataaatatttctgtaatgaaaggtaatatattttatattgcttcgttctttgtaatgttgtttttggtgcttatttctgtttggattggatggctaagtggtggaattaagagatatgtaacaatcacattattcctttctttgctcggaattgtgtcttcatacattataagcaataattcgtctttcccaggcccaccacgtttttttgtaaacgtaattccatgtgtattcgcgatactagcaattaatctatcgggaagatatagtaggttactattagtaataactattctatttgctgttacatccataaactcgtatgaaacgaaaaagtggtgggcgaaaggtgtaataactgagaataatcaatacattgatttcttaaagaaacatgacttgcaatatggtttcggtgatttctgggataagtcaatgactgttaactggattagtcgaggggatgtaaagatattccctatattcattcgtgatggatataggctggacccatattcagtgaggtggcaaacaatgcgatcatggcataccgaagaattcctaaatggtcttccgaagagacaattcttcgctatctcaaaaggtagagaatgttcagacgtagaaaagtgcgtcattggtatacaggagcgctatggttacgccagtgaagtgctcacatttaaaaaaatgactattctagtttatgatgatggtattccattttga

SEQ ID NO: 117393 - DNA, 2175 bp, Enterobacter cloacae
atggctacgacacctaccaacctgtcagtaccgagcgagtccccgcgcgatctgaaatttaacgcagggaaaattgatgaatttgtgacatcgctggcacttcagtacattgatcgctttggtgatgcgcattacacaattgaaggcctgaaggctttagtgcttcagcagatatataatcttggctggaatccggttggaagcttccagggtggcgctacagtttcttccgcaggggatattatccaggatgaaacgaatggtgtatggtatcgctgggatgacctctccagcttacctaaggctgttcaagcaggttccactcccggttccaccggtggtattggtgaagggaaatggctagctgtcgatgtaaatgatgtcttaagaaaagaccttcatggaagcaatggatcaacattaatcggtggctctgtttatgtagttgactatttttcagatgccaaggtggcgaatgccggcaagtcaaagtacatcatgacgcgcggtcatcatgagatcggagttggtgctgcgacatattttagtgatggcacaactggtgcgccatcaactggtaatgagctcaagttttacgatgcaactggaaatggatggtaccttcgccacgatggaaccattgattgtcgtcaattcggcgttgtggctgatggtagtgatgagacaacaaagttgcaattatggttagattgctgcgctcaatctggggccgaagcgtatatacccgtaaatgttttcccatctgctgctggcttaatttgtacctcgcaacataatggtttgaaattcaaatggcatgggtatgttaagcactggggagatggaacaaagcctgccactgttgtagattcatgggacccttcatctggatatgttctttacctgaaagaagtaagtgacctcactggagagataagaattgatggtgtaaggacatctaagatagccgatgaacacatccataatatacattcctatggcgggaaaaatcacgtattgtcattatttttcaaagaaacaagaggtgatggaatttatcttaatgcagcacatggtaaccaagattcaacacctccatcaaacatgacatatccattagtagagagcgtaaactctgactatgacggtagaaatgcgatgagcattatttgcgcggatggcgtttccataggcacatttgtttcgtataagcatggtggacgcattggcacggttatgcagccaggtggtttggatattgaaccaaattatagctaccagccatgtactaacatccagattgatagctattactctcgctcatgtggaacaggttttactatttttggtaaggtaaatactgggaatatggttgttagaaacatctctatttcgaagatggaaattgtgatggagtatatttcttcaaataacaatcaactgcgtggatcgcttcttatgggtgctgatggtttgtacataggatcatcacatattcgatgcttatcaaattacactgcaaactctccgattggtgcgcaaattgatgcctgttataatgcagatatcaatatttctactgagaggttttaccagggagcagcaattggcatcaaggcatggactgaggttggaggtattgccaggattgtaaattcaaaaatatctgtaacccctaggatatttcaacgaggcgcagtgataggtgatgttaatggccttgattttgttttgcgcgctttcacccctacattgatgtcagttggtagcgatgtagggctggttcaaactattaagagtgatggtttaggttcctctacatttataaaatcagcccgtctatcagtatcaagtggtcctggtgctgctattacatggggtgttttctgcgtaaacacaaacattgatcgtgagacgtgcataattcatgattccgacttatctagtatcgtgcacaatggtacgacaaccaatagactaatctccacggcaaacttccaaaagaggaacatagccggtgtaacgccgaaaggagggggtgatacaataacaggcactgcaatttggggggtaggagatgtggttaatgacaatactacatcatcagcgggtggttacataggaaagatatacacagcatcaggatggaaaaattacggagccataagcgcataa

SEQ ID NO: 117394 - DNA, 2478 bp, Enterobacter cloacae
atggcgctggttgagatatcgaattttccaggaacgcctaagctgcgttgcagggtgccaaacggcacccttttttatgactggctggtggccaatgacgctactttccaccgcgacctgctgatcgtccgcaacggcgtaagactgggcgacgatgatgagctggcgtttgagctgagcgagctggaccacatccagattttcgaccagcctaagggcattgtcggcgacatcctgagcccgatatttaaagtggttggccaggtgttttcgttcctggcgccgaagccggcaatcgcgaacaacggcggcaataccgtcgactcgcccaacaatagcctgaccggtcagacaaacacggcgcgcgtatataaggccaaaccggacatctacggccagattcgttcgttcccggatctaattcaggagtctgtattcgaatacgttcaccagacgtctaccgacggcggcctgaagtacgtcacagagtggatgtgcatcggtattggaaaatacgattacgagtccgtgcgctactcagaatcaagcctcggttcactggccggtgccgaattccagttcttccagcctggcgaagttatcccgcagatcgtcgagggatacgggttcgatgacgttgacggtcaggaggtcccagggcagaacgaagccagcgacttcccgatcgaaacagcaacggcaaacacagtggtcagcggaacgtattccggcggacagatagcgatgaaaatcgtcaagcaggctgagtttgactatttcatgggcctggttctgccgcatgcggttaccttcaccatcaacgtgacgtacagcacggcctccggcaccgtgactaccgatgcaacattctccggcacgctgatatccgccgttgaaaccaacgacggcgcggttgttaacccggtgcgctggtacacgtttacgatgaaccagctggaggggccgcaggacattccggctaacgccacgatcaacactacgaagttcattctgaacgataacgaggcgctggtggttgggccgttcttttctccggtcgagtcaacgcaactgtggctgcatacccagtccagcctcggcgggaagaaagagaccaactggaaggttgtcatctggaaaatcgacgacgactacaaccaggtgccgggaacgcagcagacgtttacgtaccggcagacgacgccgcaccagtcgacgagcgaggtgttttatcgcactgacaagatcactccgaccggcgggttcgggaaatacgcggtcagcttccagcgcacggataactccggtgacgcgtcactgctcaaggtcgaagagatccacagcatcaacatcaggacaaacgtcgttcacccgaccgacacgcttgtgcgagtaaaagtccgggcgacagagaacgctcttggcagccgcgagcgcaaatataacgcactggtgacgcgccacaccattacgtacgacctggacacgcagacggtggattatacgctgagaccgtcgcgctcgttcgctgatgcggtggcgcacacctggctgattatgggtgagcaaccggtaagcagcattgacctgtacgggctgtactcgatcgccgaaagcctgccggatgagcgcctgggttacttcgactatacgtttgacgacgagaacgactcactgggcgaccgcgtgcaggcgatctgcaatacggcgtcggtggtggcgtactgggatgacggcgtgctgacgtttacccgcgatcagaaggttgactacccggcggccgtattcaaccgggccaacatgaagacggacgagtacaaaatgacgtacgaggccacgcttcctggtggctacgacggcgtgcaggtgtcctacgttcacccgaccacgaacaataagacgtacatcaactaccgcgtgctgaacggcgccatcgtcgagcaggaagcggaaaacccaaacaagctggagatcgtcggcttccgtaatgagtatcaggcccgggagcgcgcattacgcgaaaccaagcgcctgatctactcgcgcgtgaagatgaacgccaaggtgtttgaggacggcattatccaggtgggtagcgtcatccagatgccagacatctacgacagcaaccagcaacagggttacatcaccgggcgcgccggtaataactttgataccagcgagccgatcacgtttaccggttcgatgtatgtgctggtgacagacagcctgggtaacccgacgctgcgctatccggcaaccgcccgcagcgacacgaagtatggcttcaccgcggctatccccaacattcagctcaacatatggaacggagacactgtgcagctcccgtcgcgctatctcattgcgacagtggaggaactggacagtcagctatggacggtcaacagcatcaaacctaacacagataacacggtatctctgaccgtcgcggaatacagcgacgccatctaccaataa

SEQ ID NO: 117395 - DNA, 417 bp, Enterobacter cloacae
atgacccaacggaatacactggccttcagtacctctgattttatcagcaggatgatcggcgtgccgtgggctaaccgggcttgctcgttcgataaggtcgattgctgggggctggtggtgctgtattaccgacacgttctcgggattgagcttcaccagacaccggattacgaagccggggccgacttcttcacctgctatgagggtgacgtcgttttctggcgccaggtcgataaaccgatcgaaggcgggatattcgtcgggtaccgaggcgcgcaaccggcgcatgttgggctggtgcttaacaggcaggcgctgcattcacgcggcgagaacggaagcgtgcgcatggactcgttgctggtcattcagcgggcattcaacaaagtggagtttttcgaatatggcgctggttga

SEQ ID NO: 117396 - DNA, 471 bp, Enterobacter cloacae
atgccaacattcagagcttataagcagcagcgcccgacgcgcggactgtacgacaccatcacgttctaccatccatccttcggctatgtccgcctggtcgataagcagttcttcccgaagacgcttggcggccagacgtacacacccgcccgttttgaaatcgaagagagccagcagagcggtacgccggtgatcgacgctacggtgaagttagggcgtctgtcgtctgacatcaaagcgctgatgaaacagtggaagggtgcggccaggctgactgccatcacggccacgcggcagatcttcgacagcggcgatgtgtcggtgccgattaagtcgtggcagctctacgtcaagacggtggatattgatgccgacgccgcatcggtcactctgtctgttaccaacccgctaaacaacaacatcggaaggctctatgacccaacggaatacactggccttcagtacctctga

SEQ ID NO: 117397 - DNA, 498 bp, Enterobacter cloacae
atgccaattatcgactatcccgactggctgccgctggcgcagaaggccagcaaaaacatgactctcgataccgggttccagaccgatcagccagcggtcggcccggctatcttccagaaccttactgacgacctgaaagtgacctggtccctgacgtggattttcaccttggctgaggaacgagcattccagcagtggctacgcagcccgaactatctcaatcggggcctgaactggttccggatgaatatcaatctgggcggtagtggcctgcaactccaggaacttcactttacgcagatgccggtgcaaaccagtatcgatggcggagtggtgacctggacgggaaccgttattgcgaaccacctctacaacgccgacgacgagttcgacgacatcattgttgaactgccgccgccgtgggattcgtggctggatatcgttgtcacgggttatccggacgggcgcgatccggaatcactgccgagagtgccgtaa

SEQ ID NO: 117398 - DNA, 228 bp, Enterobacter cloacae
gtggttattgagccaaacgatgtgcaatcaataccaacagagataggcaagcctcataagctttatccaaacagggcagtagagtttgtctttactctaaaggatggctctacaattaaaggcattgctcctgctggagaggatctggaatttattaatcatggggatatcgttgacattaaaatcaatgtttacgaagcaccgcctggtccaagatccgttgaataa

SEQ ID NO: 117399 - DNA, 2676 bp, Enterobacter cloacae
atggccaacagtgaacaggttgggaatattgtttatcaagtccaaatggacgtagcagagcttattgaagcacagcgtaaagtaaacgatcggcttgataaaatgggctccaatttcgaccgagcatccgggtcggttagccgatttgagggagcgcttaataaagtaggagtggcgattgccgcagctttcaccatcgagacggccaaaaggctgattgcgattggtgatgagatggctaccttgcaggccaggatcaccaggctcagcccaagtattgatacagcgaaagagactatgtcagctctttcagctattgcatcacaaacaggtaatagcctttctgaaacagagcgtttgtgggaatcactgaccacagcattaaaaagcgctggtgcaactaactctcagatccttgcgcttacttcgacgcttcaaaagataggcactatcggtggttcatcctcagaggaaatggctaacgcacttcgccagttcgggcagtcaatcgccggcggcacagtacgagccgaagagttcaactccatccttgagcaaatgccagagcttgctcgccagattgcgtctggacttggaatatcgattggtgatctccgcaagagaatgctggagggcaagttaacggctgaagatgcccttaacgctattcaaaaacaatcccagtctgttaacgaagagttcgacaagatgcctgtcaatatcgacagggcgaaaaatagtctggacgtagcatttaaaaacgccattaacgacatcaatcaggcgattggcttgacctcgaccctggcggggttgatgcaaagcgttgctgataatcttaattactacaataaaaatgtcggtgattcttccagaatgccgaagcttatcaagctacagcaagaattaaactccgagcttaaagatggtcagcgctggtatgagacagactccgtattccagactcgtcgtgcgcaggccgccgttcagttaaagcaggtcgaaggtgaaattgctcacatcagagctaaagcagcaagtgatgctaagaacaaccaagggttcaagaccgaaacaagcggagacgatgcagcaacatccaagctggtgaaaaactctgagcgcaggctcgctctagccaaacttgaaggagaggcaagagcaaggcttcaggctcagtatgatgctgccgacgctggggttacggatccgaaacgcatcaagactcttcaggatgaatatgcggagacgtaccgagtaaccgaggcgagaaaggaaagcaataaaactggcaagaaaactgaggcgcagtccgaatcaattgcaaataagcttgaaaatttgcgtcagcagtcagaattggcagctgattcaacggaggagctaagcagagagcaggccatattacgtgctcagcagtcactgggaaattctgcaacccaggagcaaatcaaaaaggccggtgaatatgcagcaaaagcatgggatgcatcagcggcagccaaaggggttacggaatcacttaaggcaatgcctttgcaggcggagaataaatcctacgccgaatccatgcaaaatctgaaggccgcactgaacgctgggaaaatagatctcaaggagtataacgctgccacggagaaaatggcgctcgagcaccagaataacctcgccaagattaacgcccaggccacagtcaatcccgtagcttctgcccgagccgaagttgacccggtacagcaactggtgaacgaaaataaccagaagttagccctgatgcagcaatatcagcagcaggaacaggcgatactccagcaaagttaccaaaaagggaaaataaattacgatcagttcgttgctgcaaaggcagctaccgatgcccagtaccttgccttgaagactgcgcaggaaaaccagttcaatgagcagatgacagccgctcagtggcaattgctcagtcaacaaggtcttggttatgaaatgctgacaagcgcggtggatgcgttttcaggtaatgcatctaatgcgttaaccgggctgatcaccggaacgatgtcagcgcaggatgctatgcgttcgctcgggaatacgatgctgaacagcgtggtcaatgcgctagtccaggttggggttgaggcactcaaaaacttcattatcggtcagacattgggcgcagcggctactgctgctggagcatctcaggctgcaatattggctacagcttgggctcctgccgccgccatggctagcctcgcttcatttggggccaactcagttcctgccatgacaggaattgcttcaacggtaggcctggcacagggccttgctttaaccggtatgcgttacaatggcggcccggtgaatgcaggaggtctttatcaggtcggtgagcgagggaagccggagatttaccaggccagtaccggtaagcagtacatgataccgggcgacaacggcagggtgatcagcaacaaagatatgaccgcagggggcggagttagcgtcataatcaacgttcagaatatgacgagtgccacatttgacgctcaagctacgaacaacggggatggtacaataaccgtggatgccattattgctgacttgaataatggaggtcctatatcgcaggctatcactggcaatacaactgcgaaaagaacacctcgaggtcagttataa

SEQ ID NO: 117400 - DNA, 363 bp, Enterobacter cloacae
atgcgtacattaattttattgggaacgctgctcgctgcaccttgtgttatggcggctactgatgcagaaattgtcaatgctgtgaaacaaagagcagaaagcggtttctttccaaaagacgtaaaagtcgtttcattaaaggaagttaatttcttccctgacgacagagacacagtgtacgccagatttggaaacgtatgcggcaaggctgaagtgaccaaaggtgataataaagcctcattggtatttattgcccctgtggttgaaaaggcaagccagatttctatagacgatccgacaatttacgatctcacaaagcaaggtgagattgcagaaaaagacattccaaatagatgtaagtaa

SEQ ID NO: 117401 - DNA, 696 bp, Enterobacter cloacae
atgacaccagttaaagagtttggagaatgccttattagtgtcggggataaggactactttttccgcccgtcatttctcgcgatatcaagtatcggcgatccggtagaaatcgttcagacgttttacgatctttataatgatgaggccgctaatctcatcaagaaggctgccgaatcctacattcattcagaatatgatagcctgcctgaatatgtaattcactacatcaagagcggcatactaagccgtaaggcgatcatggctgcgcatacggttttgtctgcatgctgtgaggatgatgtaggggatcttatcggctggatgaagccaagtaaaagccggaagcgcggatttaggtggcggcagggtattatgtcgcctcaggaaatggtcattatcgctcaaagattgatgatgcacggtgttatcgggaagggaaaattacgtaagctacagcgccacgaatcgaacgagcctaccaatgaattcagggcgtcggattacatcattgctgcgagaaatcactttaacatcagcaaagaagaggccgcgcagttgactatgacagagttccagatgatgttggttgctaaataccctgaacagaaggggtatacgcgggatgagtacgatagcgcggcagatgactactttgcgcgacgtaagcgcaggctggcaagggagaatcagaagtaa

SEQ ID NO: 117402 - DNA, 753 bp, Enterobacter cloacae
atgcaaggctgctccaataacgaacaactaattggtcgcgcgaagacgctggaactggcgtacggatgcgctgacatggtgccggaggaaggtgactggaagttgatgggtcttccaacttcggctacgtgggatttaagtcctgaggcgctgacgtctgatgcggataatggcggattcagttcaaacctgatctccagcctcgatccaacctattcgattgaaggtgaggtgcgtgttaaggaccgcaccgacgaattcggcgttcagcagttcgtgaagtatatcgttgatgaggtacgcgcccgccgtcagcctggcgtgtggatgcgtttccattggggcgattattatcacatcggctacatggtgccgtctggtgccagtgatggtggcggcgtaaaggaaattgtcacctacagctttgagttcaagctggcagatggttctactttccagatcaccgaagctgatggcgatatcgcggtaacaggcgtgacggttacaccaaccagcagttctattgcggctggttcaagtacaacgttcaccgtgaacatttccccagaagatgctgacaataaagtatttactgtcacttcatccgtgccagctcgcgctacggtggctttctcaggtagtaccgtaactgtatctgccccatcgggggctacggcgggaatcgcagtgattactgtcaccactgatgatggtgcattcacggcaacccacaccgtaactgtcactgtgtaa

SEQ ID NO: 117403 - DNA, 390 bp, Enterobacter cloacae
ttgaccactccgatgtataagcgtgttcgcaacgtgctcgttgatgctgggcttactactggctacatcatccagtctttgtcttgggtagattctggaaaactaaccgatcggttcattgtcttccgcccaaatggcggcacggcgatagaccgggatatggcagctgattattacgttctggttgacgttattgcaggaacggctaagggcgataaggccaaagccgaggccgatgttgaagccattatcgaatatgtgaaagccaatccgatgacaaatcgctgcctggggcaaatctcaaatatgggcggcataccatcacctgtaatgactaccgaagggcgtatggtgtggcgcctgcaatttgcctgtctcttcggcggatag

SEQ ID NO: 117404 - DNA, 369 bp, Enterobacter cloacae
atgggcatcaaagtgaagggcatcagccaggcgaagaaaaaccttaatgctctggttggtgatattcaggggagaaaggtcgtcagagccatgcaatcagctttgattatcggcggatcgcaagcgacgctctataccccgatcgatacatccaccctcatcaatagccagttccgcgagattactgtaaatggcaatcgcgtgactggccgggtgggttattcagctaactatgctgcatacgtccatgacccaagcgtacctcagaacttccgccgggcgacggccaggaaggagtttttaaccaaagggtttgatgatacccgcaggcaaatcgacgcggtaattaagaaggaactatcactttga

SEQ ID NO: 117405 - DNA, 357 bp, Enterobacter cloacae
atgtcgtctactgcttcatggtcatacaacaagccatgcacgatatggcgcaagggagctggcggtaatgacgagtggggcgatcctgtcgaaccatatgaaccgcctgaaaccatcatgtgcgactacatcggcggcttgtcggcaaagctcggctcaatcggtaaagaagtggtcgttaagaacacctttttcacggcatacgcactggccgatgagggcgactacatcatgattggtgtaagcgctgagccggatccggtcgtagcaggtgctgatgaggtccgtcacgtgacgcgctggaacgacactctcgacggtctggaagatgactgggcgataattacgggagtgtag

SEQ ID NO: 117406 - DNA, 174 bp, Enterobacter cloacae
atgacatacaaatcagttaagcacggtctaccgcgctcgttcacccgcgtctgggtgatgaccgacaccgggcgggagactaccggctacgtgaaatcggacggcgagtggtatatcaactgtgagcgcatccgggcgaccggcgcgaaggtgctgcgctggaaggagggctga

SEQ ID NO: 117407 - DNA, 381 bp, Enterobacter cloacae
atggctgacccaatcacagcggcagacgtgcaggcgttcctcggtgagttgggttactccatcccgggcgcgctgctggatccgatcctctgcgtggtgaacaagattattccgtgcctcgatggtgctgggtatgacgagtgcaccgcgaagctgatcctgatgtatgccgcagcgcttatggctacgtcctccggcgcgcgccgaatcaaatcgcagggggcgccgtctggcgcgtcccgctcgtttgaatatggcgacgacagcattacctggctgcgtgactcgctggcccggcttgataccagcggttgcaccggtgagttaccgatcagcgctggtaatagtgtcgggttgttcatggtggttgggggctgctga

SEQ ID NO: 117408 - DNA, 366 bp, Enterobacter cloacae
atggcactggtagaaatcgtggcaagcaacctgcacgccggtgccaacctccgcaagctggaggttggttcagtggtggatgtggacgatgcaacagctgagcgctggatcagcactggcaaggcgaaggagaccgacaagaagaaaggcgagaagcttaccttcgaagtggctactccttccgctcctgcggcagatctgacggcccttcaaaagcaactcgccgacgcactggagcagaaccaaaagctaatcgccgatggtgaagctaaagacaaggctcacgccgacacactggcagcagaaaccaaacgcgctgacgaagccgaagcggcactggcggaagcaatcaagaaggcgaaataa

SEQ ID NO: 117409 - DNA, 1098 bp, Enterobacter cloacae
atgtttgtattctccaagtctatcggtgaaaagaccggtaacctcgcggtaaatcaggcgcaatggcgtgcactcgaaattgagcgaaacgccagtgctcaggcagcagcagattttctggcgcggactcagttccgtggcgatgcagaaaatgctccttatctcgatgcggtgaatgcagttgacgatattcgtcgcctgtatcgcgctttcgacacaactgttcttcagcagttcgagccgaataccgagttcactctgctgaacgatctgatgccgctttctcgctccgttcgaattgagcagtctcgttacgattacgctcgtaccggtggccgcggctgggctcatacttccatgtccggtcaggttggtgcggcgctggatgctcgcagctattccttcgatggcaccatggttcctatccacgattcgggctttaagttcgaatggcgtgatccaatcttcaacagcccgcaggcattgcagtcgcagtcggatgctcagcgtggttctgtagaagatgtacagcgtcgttacgttgactacattttcaacggcttccgcgataaggctggcaactttgcagtattcgacggccttacctggaaagggctgcgtgacgatgagcgtgtagcacagatcgaccttggcgcttccggccttaatatcgacttcacctctggcaccgcaacgtctcaggctatccgatctggggcaatcgcgctgcgtgatcagatgcgtcgcgtaaacaatcagtatgcagagcagacttggtatgtatccggcgaaatcatctccaacctggaacgctacttctccgacaactttcagtccggaacgatcatggatgaaatcctgaagctgaccggcgttgcggcgattaaagaagacagccaactgtcaggtaacgaaatcgtcatcgttccgctgtctgctggcgtcattgctccaatcgtcggccaggctatcggtaccgttgcatctccgcgtcctgagtacaacagcgactacatctggcgcacctggggtgcaatggggttgatggtcaagcaggacatcaacaacaaatactccgtaattcacgcatcaagctaa

SEQ ID NO: 117410 - DNA, 435 bp, Enterobacter cloacae
atggctaaagacggaaagcatattatccacgccggcggcgtgttccctaatccgctgcttaaccgtgaaggcgcagctgcggcatcaacccctcctggaaccattggcttcttcagcgcaacggacaaattcacggcctcagttgatggtaatgaagctgcaattctctacgtggccaacaaagactatctgcgctgcctgtcagtggacgacgctatcccggctggagagcttgtcgtaggtattcaacctctgccgggcatgttcctgaacgttcgtgccgcagccggcacctacaccaagggacaagcgctctctattgcaaacggtcgagtcaaagtggctgctggcgatgagtcagtgcgctgctacgtcgaggaagacaaatcatacacagcggcggcaggcgatctgcttcgtgtcgtaatcaaataa

SEQ ID NO: 117411 - DNA, 1197 bp, Enterobacter cloacae
atgaaacgcaaccgcgtcaacgtgctgaccgtcgtcaactccgcttcaaacatcaccactaaaaccatcgacggcaagccacatatcgtggttcgcggcatcacgcctgtcgtggacgatattgtgatgaaccggaagttgtacccggcagcagaaatcgaaaaggcctacaacacgctcgagcgtaacccgatgccgctgggccaccctaaagtggacggtaagcatgtgtcggcgcgggatgtccgggcggtgaacgagtaccacgtcggggcctggctacagaacgtcagccacaaagacgggaaggtgacgggcgatatgtacgttaaccgccagtacgccgaatccagcgataagggcaaacgcctgatcaaccgcctggatgagatgctggccggtaccaactccgacccgatccacatctccaccggcctgctgtattccggcatcgccgcaaatggcgagtcaaagggaaaaaagtacaacgagatcgccacaaacatgatgtttgaccatgttgctgtgctgctcgatgagcctggcgccggtacgccggaggagggcgtgggcatcttcgtaaacgccgaaggtgacgaacttgaaatcgaggtcgtcaatctcgaagagtccaataacccagacccgcaagaccccgctttcaaatcatttttcaaccagctaaaggcgtttttcggcgccaacagcgattcaacccagaaggaaacagacccgatgaaagagctcatcgttaatgcgctgaaggccaaaggtaaatcggttgacggtaaaaccgatgccgaactgatggacgcatacaaccagatgctggcagaaaacgccgacagcaaagaagaaacgcctgaagagaagtccgcacgtgagaagaaagaggcggatgacaagaaggataaagagcagaccaccaacagcgaagagatgccagcgtgggctaaggcacttaccgaccaggtaactgctttgaatagccagatcaatgccaacgcagaaagcgagaagggcaacatgcgtgctgctgtgaaagccaagtttggcatgacagatatcgctgtgaacgcactggacggcgagcccctgaaagagctgttcgcacagtgccagacctcaaccggcctgaacggtgcattccgccatcaggctactaatacccaatcagtcagcgaaatgccggagtaa

SEQ ID NO: 117412 - DNA, 201 bp, Enterobacter cloacae
gtgagcattcccgtacctgatgaagcaccgaaagatattaatcacggtcgcctgttcactgaggcgcaaatcagagccgctttcgtgaagtggtgcgacgactataagcacaaccctggtgcttaccaggaaggtgaatccaccgacggagaggcttgtgctgattacctgattcaggtgatgaccgaaaactcccactaa

SEQ ID NO: 117413 - DNA, 513 bp, Enterobacter cloacae
atgagcattatacctcaggaagttggttcatatattctaaccctaattggcccgataactattggggttgcggttgcttggtttactgcaagtttcgctttaaagcgctttcacaatgaaaagtggtgggagaagaaacataaggcttatggggatcttgtagatatccttattgagatgaaagccatataccatgcagcgtcaaaccattacgaaagaatatatagagctgagcaaacactgtctgaagttccagattattatttcgattgggatcagtttcatgaattaaagaagcaattgaggcgctcgtacgttttagctccaatatctttaagtgaaacaactaaagagcatctaacttggttttttacgttggacgctaattctgatgagatgatacatgaggaaaattatcctgagcaggcggcttataacgatatggctcttgaggtagataatctgattgagttgattgttgacgatgctaaacatgaacttaactttaagtga

SEQ ID NO: 117414 - DNA, 996 bp, Enterobacter cloacae
atgacaccggagcaaaagacgaaagtcgggacaccggtagttccgcgcagcaaggttgacccgacccgttcggcaaagcaggttaccgcgatgttccgggatatcgaggaacggtatctcggcatcaagcgcgcactgaaagctctgttcgaccagcgcctgaccgggcgagagcgtgaggtaaacagccataactggcatttcatgtgccacgaccacgaccacggcgcggatatgcggctctaccaggtcaacgccggaaagtttatctacgacatgtcggcgcaggaactggcggacctgctggaagcagtgcaggccattctcgacgattacctgttggatggtggcgagaaaaacctctgggcgatggattatgtcgtcgcagaagcgcagcgcggcacgctggaggcattcaacaacctctcgcagcagtcacaggtgtacgccagccagacgacgctacagcagcttttaagcagtcccggttatctaaaccagatatcggcggccaggctgacaacgttcagtgactggaaggtcatcagcgacaccgcccgcggcgacctgaccaacatcatcaccgatgcggtagcgcgcggcgtgaatcctcgcgagacggccagcgtcatcagtaagcgcctcgatgtgtctatgtcgaaggcgaagaacatcgctcagaccgagcaggtcggcgcgctgcgtgaagctcaatggaatgagacggactgggcttccgagaggctcgggctgaatactggtcttctccatctatctgcgctgaagcctaccactaggacaacgcacgcattctggcatggaaaggtcagaaccgtgcaagaggtgcgcgactggtatgcagtagatggtaacaaataccactgctactgcggccagattccggtgctgctcaacgacgacggcagcattttcaatgaagggctggaggagaagttgaaaaaagagcgtcagcagtggaaagctgattctgattag

SEQ ID NO: 117415 - DNA, 1476 bp, Enterobacter cloacae
gtgagtaacactacagaaatgcaagtcctcgctgggctcattgtgaacagccttaacgaggttgggcgcgcgcgccaattgtatgcatcagggcttgggaagtccggtaacacgaagcgtcaccatctgtggtgcgaatttggttacccggagagactcgacttcgaccacttctacaacatgtatgagcgtaacggcgcggcgttcggcgcggtgcataagttgctcgatgcatgctggaccgataccccggtgatcgtcgacggcgatgagacgaagaagtcgaagaagtcgacgccgtgggaaaagaaagtcaccaagctcatgaagaagcattgggcgaaagtgaaggatgcagatcggcgcaacctggtcgggcattactcagcacttatcctccagtttgcagacagcaaggagtggtgggagccagtcgatcgtagcgtgatgcgtaattctcgcgagcgcggcctggtcaagatgatccccgcatgggaagcgcaggttaaacccggtgagcttgagcaggaccaaaagtctccagactacggcatgccgaagttctactatttccaggaacagcaggtcggcgataacggaaatattcccgggccgatgcggtctattaagatccaccctgagcgcatcatcatgttttgcgaagggtcagaagacgagacttcgctggctggcattcctttcttacgtgctggttataacgatctgctcgacatggcaaagacctccggtggtagtgccgagggcttcctgaaaaacgccagcaggcagctcggcattaacatgtcgaaggatacaaacctcaagaccattatcgaagaggcgaagaaagctggttactcaggactggctgaggcgctgaacgccgccatccagaaactgaactcaggtactgactcggcactggttactcaggacggagaggctaaggttctgtctgtggctgctgccgacccgagccctacatggacggtcagtgcaaatcagttctcttcatccgtacagatacctttcaccattacttttggtcagcaaacgggccgcctggcctccgatcaagataagaacgactttgctaagcgttgtaatggacgtcgtgctggattccagactggccgtgtaaccgctgttatcgaacgcctatggaccgtggaagttatcgaaccacctaaatctggcgaaatcacgttaacctggcctgatctgctcgctccaagtgagaaagagaagattgccaacatgaaggaaatggctgcggtggcgaaggatacccagcaagcctacggcacaccggctgttgatgagaacgaggtcagggaagcgggagaacttgagccgcgtgatgatattaagccgcctgacccaaataaaaaggtaacgaccgatgatcctctttccgatgacaccggagcaaaagacgaaagtcgggacaccggtagttccgcgcagcaaggttga

SEQ ID NO: 117416 - DNA, 1476 bp, Enterobacter cloacae
atgaaacctgagcatctcaagctgctggccgacaaagactggcggcttaacaatctctactggatcaccgataaagagggaaagccaacgcgcttcaggatgacgcctgagcagcgtgaatactttgaggggatccacacccgcaacatcattctgaaagctcgccagctcggtttcacaactgaagtgtgcatcatccagctcgacgcagccctgttcgagtcggctaaatgcgcgctgatcgcccatacgctgaatgacgcaaagcgcctgttccgcgaaaaggtgaagtacgcatacgacaagctgccagcagagataaaggcggccaacccggcgagcaatgactcgtctggtgagctggtctttaagaagggcggctcgctatacgtcagcacgtcgtttcgtggtggtacgctgcgctaccttcacgtttccgagtttggaaagatatgcgccaagtatccggacaaagcccgtgagatcgtcactggtgcgtttgaggcggtatcgacgggatgcttcgctactatcgagagcacggcagagggacgggcgggttacttctttgattactgccagatggcagagaaagcgttgctacagggcaagcacttatccgcgctggactggaagtttttcttcttctcctggtggaagaacccgcaatacgcaatcgacccggttgaaacgctgccggtgcgcctgcttgagtacttcgctgaaatggaggctaagcacggcgtaatcgtcaatgagcgccagaaagcctggtactacgccaaagagaaaacgctcggcgacgacatgaagcgcgaatacccgaccattccggccgaggcgttccagcagtctgtcgagggcgcgtattacgcaaaacagttccgctggctctacaccaataagaggatcggccaaatccctgataactcgcacctcccggtacacacgttctgggatatcggtgtgggtgactccacggcgatctggttcgttcgcgaggttggcgaagagttccatatcatcgactactacgaaaactctggtgaaggcctgcggcactacatgaaggtgctgaaggataggggttatgagtacggtgagcactgggggccgcacgacatcgataatcgtgaattcggtgctgacgccaaatcccgcagagaacttgcccgtgaagggtatgaaatcgacgggcaggtttacagcatgacattccaggtggtgccaaaagtcggagttgataccggcattgagtcggtgcgtgaaattctcccatcctgtgttttcgatgaagagaaatgcgctgaaggcatttcccaccttgagggatatcgcaaggagtgggatgacaagcgcggctgctggaaagataagccacttcatgacttcacatcacacggcgccgatggctttcgctactttgcggtagcgaagaataaccataaacaggttggagctatcttcttcacataa

SEQ ID NO: 117417 - DNA, 516 bp, Enterobacter cloacae
atgagcaaaccagattgggaggccattgaatcggcttaccgggctggttcattgtcagtaagggccatcggggaaaagcatggcgttaaccacgccaccatcctaaagagagcaaacaaagaagggtggcagcgcgatctgacagaaaaggtcagggcggcaacgaaagccaaggtaaccaagtcggtaaccaaagacggtaaccagtcaccagtggttactgatgagcagattattgaccgggcatccgatgaggcggcagctgtagtcatggctcatcgggaaagtttggcggcatggcgcggtatcaccaataagctccgcgacttcctcgaagacgcagaaattacggaagacaatcacgcctcaatgtctcgctcgatcactgccggtgtcgatgctcagataaaagtgataaacgctgagcgtaaggcgtataacctcgacaccgaggaaggcaataagacggttgatgacctgtctaacctgatggattcactgtctcagggggcgtaa

SEQ ID NO: 117418 - DNA, 207 bp, Enterobacter cloacae
atgtctgatatctacatcatcaaactgactacgaatgacggcggcgagtatacgggcaagatgtcacgacgtcagcctgagctggttaacggctttgtgccgctggctaccgagacgggacagtggctgtacttcgctccggctgatgtgaagcgcgtggagttcacgcctgtaccggaacagcagaccgaacaaatgacggagtaa

SEQ ID NO: 117419 - DNA, 555 bp, Enterobacter cloacae
atgtccggatcactatcaacctcagttatatccttcccatggcgagatattattacgccaatcgtagggcttgttggtgcatttggcggggcgcttcttgccaatcatttcgccgatgaaagatggcagaaacaagtccaatatgaggcgagtaaggaatcttcgaaagttgtcagggataaaggtgaggagttatacactctctgctgtcgctgggagaagatgctgtttctgatccaaatggctcagataaggtatatcaagagccagcgtgagtgggatggattcaatgattacatcaatactatatcgctcggccctggagtttttgatcgtttagaatccttgttgcacatctatttttatgagcttaccccgcgcattggattgattcagtctgagatgaaaaaatgcaatgaactctacgaaaattaccgtaggggtttaatcaccgatgtcgaagaaagctcaaggattattaaccagtcctcaatagatttagaagagcatatgctaatcatgaaagaacacattagaaataagctgaagatttga

SEQ ID NO: 117420 - DNA, 534 bp, Enterobacter cloacae
atgaataatccgtcagttattccggccttcgacttccgcgaaatggtcacgaccctcgacaacaagataatcaccacatcactcaaggtggcggattactttggcaagcgacacaaagacgttttgcgtgccatacgtaacctgaaatgctccgatgacttcacccagcgcaattttgcgcccattgatttcattgacaaaaatggcgatgttcagcctatgtataacatcacccgcgacggatgcatgatgctagtgatgggattcactggcaaaacagctgccgcagtgaaggagtgttacatcaatgccttcaactggatggccgagcagctaaaccggcgcatggcgatgggtgaagaattgcagcatcgctacgccatcaaagaaacgcgctcaaagctgaagggaacgatcggcagccgtttgatgaacgagcggaagaaagagaagcgagttctggaactcgagcatgagcacatcatgcaggtgacgcaaccagaacttttggctggtaactattttaaaccgtaa

SEQ ID NO: 117421 - DNA, 378 bp, Enterobacter cloacae
atgagccggttaacagcaatcatctgcgctgtcgttatctgcctgctcgtctccatggcctgggcgattaaccactaccgcgacaacgccatcacctacaaagaccagcgcgataaggcgacggtcagggccgacacatcagaggcgatcaccaataacgtgatcaccacgatgaaactcattcgcgatatctcacaggctacccagaatgcaaagaacgaactggcccaaaaaggcgaaacgcgcattgtctacatcaggcaggcacttgaaggcgatccgtgtgctaaccagcttgttccttctgccgctgctgacagcctgcgggaatacgcagacagtttacgttccggcaccggtggtgccgataagcgctga

SEQ ID NO: 117422 - DNA, 531 bp, Enterobacter cloacae
gtggcgaacttgaagctgagtaagaagagtggcgcggccgggatcgtttgttcagtggctacaattatcgcaatcgtgatgaatgcgggccatgtccggactaacgagcgcgggctggagttgatcggcaacgctgaatcttgccgacgagatccatatgtctgcccggccggtgtgctgactgacggtatggggaacacgcatggcgtgaagcttggtaccgttaagtctgaccagcagatcgcagccgaatgggagcgcaacatccttgatgctgagtcctgcgttaaccgttacgggaatggcagaaagctatctgacgatactttctcagcagctgtatcggtaacgtttcgtgctggctgtgggaacatgcgcacctccacgatgttctctcttctcagaagtggagacatcacggcggcatgcaaccagttccctcgctgggtatggggaggcggcaaggttctgcctggtctggtaactcgagcagggaaagaaaaggcgctctgcctggaaggtgttaaatga

SEQ ID NO: 117423 - DNA, 321 bp, Enterobacter cloacae
atgcaacgtatgaacccaacagatggacacaatctgccttactggtggtcaactcttctggggttattttccgttctcagtttacaggactacgtctttattctcggcgcgctggtctctgcatacttcacgattaagacctattacgcgaaacggaaagaagagcgtgaacggctggaagaagaaaagaaacgtacacagttactggctaaataccttgctgaggtaagcgagaaaccccactccgaacgtccggcatctgccgaggttgtaacggaggcaatgcggagaatgtccagtggcgaacttgaagctgagtaa

SEQ ID NO: 117424 - DNA, 243 bp, Enterobacter cloacae
atgaagaacttccagctttatgttggcggcactaacaacatcacctatcgttacgaaatcagaaaggtggatgatgcttttagtgttcgaatattcaacgtcaaaaacaagttgcacaaagaggtcggttgtaagtcgcttcgctttgtgtcagctcatgatgttatcgatgagtgcacatcgcattacaggaggcacgctgaaggcctaagaggctttttacgtgggctcaaaatgtggtga

SEQ ID NO: 117425 - DNA, 690 bp, Enterobacter cloacae
atgaacagccagcaactggaatacgtacgtcagcagctcattgtggcgactgcagatctgagcggggcgacgaaagggcagctggtagcttttgcagagaacgcgcaattcaccgcgacggcgcgcagccggggacgtaagaaaatcactgatccggtcaccggccgtaaagttaacccggacggcccggcgatgagcggcagccagtcgcgcgcgaagggctcatccatcgcgctggtgggtccggttgagttcgtgaccgcatcgtggcgccgcgctgtcctgtcgctggaggaccaccagaaagcctggctgttgtggaactacagcgagaacgttagctttgaacaccaggtggcgatcactcagtgggcatgggcagagttccgggaacagctcggcacgaagaaagtggccggaaagacgatggagcggctgaagaaacttatctggctggcggcgcaggacgtcaaagctgagctggcagggcggcaaacttacgaataccaggcgctggcggagctggcgggcgtggcgaaatccacctggacggaaacgtatctgcctcactggctggcaatgcgtaacagctttaagcggctcgatagcgatgcgcttatatcagtaacgcgatcacgttcacaacaaaaggcgacaaattcgcacgcaactcttgcaaaaccgaactga

SEQ ID NO: 117426 - DNA, 141 bp, Enterobacter cloacae
atgaaaccagaaacgcttgagatacttcgcacgcgctggcagcgcctacggatttaccgccgcccgggctccgtgctggtggattaccgcatcctccgtaacttcgttcgcatctatcacccagcaggagccgcgcaatga

SEQ ID NO: 117427 - DNA, 612 bp, Enterobacter cloacae
atgcgtaaaccatcccgccgtaagtgcaaagtatgcggtgaatacttcgtgccgaaattccacgacatccggatccgctggtgctgcccggagcacggcacaatcctcgcgatggaagaacgagaaaaggagaaggtgaaagccgcagctaagcgcatcaaggagctgaaggaagccgagaaagcagggcgacagcgccgcgcagaacgccgtaatgagctgaagccgatccgtcactgggtgcagatgactcagcgcgccttcaacgactggcgtcgcgaaatgctgcttgctgccggctatggctgcatctcatgcggcactaagagcgcttttgtatggcacgccggacattaccgcaccacagcggctgcacctcagctgcgcttcaacccagataatttgtggttacagtgtccagtctgcaacgttcataaatcagggaatatcgaggcctatcgtgcagccttggtcgagctgatcggtgaagaacgcgtactggccctcgaatccaacaacgaaaaccaccgatatacccgcgaagaactggacggcatccgcgccaaagccagggcagatcttcgcgctctaaaacagcaggaggcagcatga

SEQ ID NO: 117428 - DNA, 171 bp, Enterobacter cloacae
atgtcaactccactttcccgcgttatctcaaacgaaatattccgcgtcccggcgcgccgcaagcgtaagcccgcgattaagccgtccgatatcccgacactgaagggctacaccgcccgcctggttgatcagaaatggctgcgtcttgcggctcggaggaatcatgcgtaa

SEQ ID NO: 117429 - DNA, 456 bp, Enterobacter cloacae
atgactctgccagtagacggtatcaaactccatcgcggcaacttcgcggccatcggccagcagattcagccattgctggatgcagggcaatgcttccgccttcaggttaagccatggcgcgagaagcgcagcctgtcgcagaacgcgctcagccacatgtggtacacggaaattagcgagtacctcatcgcccgaggcaagaccttcgctacgcctgagtgggtcaaagacgcgatgaagcacacctatctcggctacgaaagcaaagaccgggtagacgtcgtgtccggcgaagtcaccactgtccaatccctccgccatacgtctgatctggaaacgggcgaaatgtacatcttcctgtgcaaagtcgaagcctgggcgatgaatatcggctgccacttgaccattccgcagagctgtgaataccagcagctgcgcgataagcaggaggcctga

SEQ ID NO: 117430 - DNA, 480 bp, Enterobacter cloacae
atgacttccgaggtatggagcgccgtagccggtgtggcatcagctatcgcagcttccgtgagccttttcataacatggagagggctagtctatcaaaaggcttcgctaatcgagtcaaggcgaagaaatatccaagacctgcttagttatcaagcagaaagggcaaattcatcatgcagtgggaaaacaagctcagaatggtctttctctgagtttgcaaacattatgttcgctatcgataccgcgagaaacatggtcgcacggatcaaagagagcgatggcattagcagggaagaggctggaacatattttttagatttactcaaccagcacatcgtagccacgttcaagcacggctcccctccagacggagcttttaaaaataaaggctcaatacccgagagccttgaggtcattcagttgtggaaccctaacgctcattttctgggttttacagatgtgaattttggcataagttaa

SEQ ID NO: 117431 - DNA, 249 bp, Enterobacter cloacae
atgtcagaacataacttagcagctaaaagtgacgatgaacgtgacaaagttaacgttgatctagcagcgtccggagtggcgtacaaagagcgcctgaacatgcctgttattgctgaagtggttatgcgtgagcagcctgagcatttacgcgattacttccttgagcgtttacgccattatcgagagttgagtatcagccttcctaaggcaaacgacccccgttacatcaagaatgaagaggtaaagtag

SEQ ID NO: 117432 - DNA, 240 bp, Enterobacter cloacae
atgtcagaatatgagaagctgtcagaagacctgtatcgggaagcgtgccgaattgttggcgagtgctgcttgatgcttgccagcaatgatgcggaaacaaacagagaccagctggttcacgagttaaaacggcttcactgggaaatcatgaagaagacagacgaatctaatctgccgattctgctggccatcgaaaggcttgctaccagcgaggactggaagaagccatatcttggatga

SEQ ID NO: 117433 - DNA, 327 bp, Enterobacter cloacae
atgtctaatttgaagccaggcaatgtttatattgaaatttctcataatcaggctggaggcctttcactctgcgtaggcaatgacgatgggggatatcgaatctccggcgccaaggttggcggatgcgaaactctgaagtgctttgaggttaatgccgaggagctaatcgcgcagattcgtgagcacgcgaaaaaggcagccgcagagcctaagtatatcgacgaaatcgctattcaggcaggaattgacccagccgttgctgatgcttacatgcagggatatcacgacgctgaagcgcggagagctgagcagcaggatgcaaactga

SEQ ID NO: 117434 - DNA, 996 bp, Enterobacter cloacae
atggtagaggagggcatatggcgcgaacgtcgtcgtaagtttgcccgaatttatcagcgccggatgcggcgcccatcctacggtgaactcatccagattgatggctcgcctcatgactggtttgaaggtcggggccccaaatgcacactgatagtctttatcgatgatgctaccagcgctctgatggcgctacgattcgctcctgcagaaacaacccgggcttacatggaaaccctccggggttaccttaatgatcatggcgtaccactggctctctattctgacagacacagtatattcagagtaaataacccggagcgggaaggagagttgactcagttcacacgtgcgataaagacactgggcatcgagccaatccatgccaacagcccgcaggcaaaagggcgggtagagcgtgccaatcagacactgcaggacaggctggtcaaagaaatgcggcttcagggtatcagtgatattgaaacagcaaacgcatggttgccgacctttattgaagcctataacaaccggtttgctacgccgcctcgtattgctgataacgcccatcttgatgtacaccattctgaagaggaactgggttatatcttcagcctccaggcgaagcgcgttctctccaaaaatctcactttccagtacaaaagcagtgcgtttcagattcgcagtgaaggccggggatatcgacttcggcattcggttgtcacggtatgcgaaagctttaacggtgaaattaaggttctgtatgatgggaaagcgttgggatgggaaaaatatgttgatggcccggagcctataccactggatgatgaaaaaagtgtccatgaacgtgtggataatgcccgttttgatttacgctcaaaattctacgtaaaacctaaagctgaccatccttggctcacgcgccgcacgcaaagtaatcagcaagtgaagccccctaaattacccagaaagaaggctgatcccgataaaatggactga

SEQ ID NO: 117435 - DNA, 1239 bp, Enterobacter cloacae
atgactgtgactaatcaatttgctgcgcacgttggtctggactgggctgataaaaaacacgatgtctgtgttcagtttaaaaacggtgaacgcgtattcgatgtgattgaacatacagcagaagcgcttgatgcctggcttactgagttacaccagaaagtaaaaggtagaatcgcaatagctctcgaactgaagaagggccccgtggtatatgctcttcaaaaatacccctttatcaccgttttccccgtccacgcattgtccctggctcgttatcggcaagccttctcgcccagcggcgctaaagatgatccgcaggatgccgagctggcattagagttaatgctgcgttacccccagaagataaaagctattgaacccgacaatgcggatattcgcttacttcagcaactggttgagcaacgtcgtcagttggttgaagataaacgacgctttgtgaaccggataatcaacacgcttaaacagtattatcctcagccactggagtggttctcacatcggggtagcttactgttgtgtgagctgattatccggtggcccagtctgcaacaactgaaacgagccagacgcgacacgatccgcaactttctgaatgccaaaggtggtcgcgctatggcccttaccgagcaacgtgttgcgagtattgataatgcgatcccattgactacagacccgagtgttatagaggctaatgctttgatggcagcagcactggcgacacaaattaaagtcgtgagtgaaatcatcaaaacctatgacgaacgaatcgaaacgctgtttgacacattgccagatgcggggctgttcaaatcacttccgggcatgggaccgtgcatgggcccacggatgcttgctgcacttggtgataatcgtgaccggtttaacagcgctgaagaaattcaaaactacgcaggtatagcaccggtgaccgaacgaagcggccaaaaatcatgggttcactggcgatggcaatgtgccaagttcgtcaggcagacctttgttgaatgggctgccaagacggttaattcatcatactgggccaaactgtattatcagggccttagagaaaagggcaaatctcatcagtctgcgatccgggcactggcgttcaaatggataaggatcatttaccgctgctggaaggccagaacctgttatgacgaagcgaaatatttgctggctctcgaagcgagacactcgcccttactgaagccataa

SEQ ID NO: 117436 - DNA, 573 bp, Enterobacter cloacae; identical to SEQ ID NO: 26658

SEQ ID NO: 117437 - DNA, 924 bp, Enterobacter cloacae; identical to SEQ ID NO: 26657

SEQ ID NO: 117438 - DNA, 240 bp, Enterobacter cloacae
atgggtagcattaacctacgtattgacgatgaacttaaagcgcgttcttacgccgcgcttgaaaaaatgggcgtaactccttctgaagcgcttcgtctcatgctcgagtatatcgctgacaatgaacgcttgccgttcaaacagacactcctgagtgatgaagatgctgaacttgtggagatagtgaaagaacgacttcgtaatcctaagccagtacgtgtgacgctggatgaactctga

SEQ ID NO: 117439 - DNA, 288 bp, Enterobacter cloacae; identical to SEQ ID NO: 84381

SEQ ID NO: 117440 - DNA, 159 bp, Enterobacter cloacae; identical to SEQ ID NO: 105660

SEQ ID NO: 117441 - DNA, 321 bp, Enterobacter cloacae; identical to SEQ ID NO: 31761

SEQ ID NO: 117442 - DNA, 204 bp, Enterobacter cloacae; identical to SEQ ID NO: 105658

SEQ ID NO: 117443 - DNA, 357 bp, Enterobacter cloacae; identical to SEQ ID NO: 105657

SEQ ID NO: 117444 - DNA, 600 bp, Enterobacter cloacae
atgaataaagaacaactaatcgacaaactggaacgcgtggtatgtggtcagtactcctacgaaatgcaggagcttgcgtattcggccctctgctgcattaaaggcaccccggacgactgcgctaagttccctgttacgcgtccgctgcctgacaccttagtggacgtatgggacgagatcgggcaataccttggcacaggcaaagccattgaaactcgcagttgcggcgtttcgcttctgcttcatggacactgctacgattcaaatcatgtgctgtactggcgcaatgctggcgcacttccagcagcttgcgatacgccactggctggtgggtctcgcaaactgttcacctgctcagcctgtggagtggacggtctggatgaaccacctgaaaccagttgccactgctgcacagagggggcccactggattgagagcaggctcttcacctccgggcaggcagaccctgaagaatttagacccgtggcggtcgtgaaagagtgtgcaggctcaacgccggatgatcggctcatctggagcgtgattgaacagctcaacggcgaactggcggaaggcgataaactatttaagcaacgctga

SEQ ID NO: 117445 - DNA, 945 bp, Enterobacter cloacae; identical to SEQ ID NO: 105655

SEQ ID NO: 117446 - DNA, 1185 bp, Enterobacter cloacae; identical to SEQ ID NO: 105653

SEQ ID NO: 117447 - DNA, 282 bp, Enterobacter cloacae; identical to SEQ ID NO: 105652

SEQ ID NO: 117448 - DNA, 702 bp, Enterobacter cloacae; identical to SEQ ID NO: 105651

SEQ ID NO: 117449 - DNA, 297 bp, Enterobacter cloacae; identical to SEQ ID NO: 31759

SEQ ID NO: 117450 - DNA, 438 bp, Enterobacter cloacae; identical to SEQ ID NO: 105649

SEQ ID NO: 117451 - DNA, 537 bp, Enterobacter cloacae; identical to SEQ ID NO: 105648

SEQ ID NO: 117452 - DNA, 369 bp, Enterobacter cloacae; identical to SEQ ID NO: 31758

SEQ ID NO: 117453 - DNA, 285 bp, Enterobacter cloacae; identical to SEQ ID NO: 105646

SEQ ID NO: 117454 - DNA, 354 bp, Enterobacter cloacae; identical to SEQ ID NO: 26525

SEQ ID NO: 117455 - DNA, 123 bp, Enterobacter cloacae; identical to SEQ ID NO: 31757

SEQ ID NO: 117456 - DNA, 732 bp, Enterobacter cloacae; identical to SEQ ID NO: 105643

SEQ ID NO: 117457 - DNA, 1182 bp, Enterobacter cloacae; identical to SEQ ID NO: 105642

SEQ ID NO: 117458 - DNA, 663 bp, Enterobacter cloacae; identical to SEQ ID NO: 105641

SEQ ID NO: 117459 - DNA, 1110 bp, Enterobacter cloacae; identical to SEQ ID NO: 105640

SEQ ID NO: 117460 - DNA, 2085 bp, Enterobacter cloacae; identical to SEQ ID NO: 105639

SEQ ID NO: 117461 - DNA, 3147 bp, Enterobacter cloacae; identical to SEQ ID NO: 105638

SEQ ID NO: 117462 - DNA, 738 bp, Enterobacter cloacae
atgaacgacgcaattatcacggacaatgagcgtattaacattgaaccaaaagatgtaatggtaaaaggttcaaataaaaagcaaggcgtaaacgctcaaacttctactcaacgtagaccagagcaccagggtatggccaaagttattattaaccccggcaccccagactttaaccggtttttaactgccagaaatggagcagtcatcagaggttttgatgatgtgagtatcgctatttcctctctctttaaaacggttgatgcagttaaacatcctgaccttgttcaggctattcaggattggttcaacgagctgcatgaagaaaacaataagatgaaagaaaatcttgttgcttatattaagtcaattgagttcgacaagaatgactcattcatgtcatcaactcagtttgtacctttcagttttgaaccagtacaactcaacttcaataaccacaacaccatgaggttttacaagtacatcttcgagatgaaccagctcatgaacacaatgtatgagtacaactcattgggtttactggctgtaagcgactatccggttatgtctcacaacattataaagagtattaatttatatgttgagaatgtgaaaaagactctgaatgtttctcgccgtaaggatgggccatacagtccagcagagttcatcaccaaagtaatgcaatataaaagtgtgcaggcatacattgcagccgaactgtcaggcaaacgtcgataa

SEQ ID NO: 117463 - DNA, 486 bp, Enterobacter cloacae; identical to SEQ ID NO: 105636

SEQ ID NO: 117464 - DNA, 801 bp, Enterobacter cloacae; identical to SEQ ID NO: 105635

SEQ ID NO: 117465 - DNA, 513 bp, Enterobacter cloacae; identical to SEQ ID NO: 31756

SEQ ID NO: 117466 - DNA, 1047 bp, Enterobacter cloacae; identical to SEQ ID NO: 105738

SEQ ID NO: 117467 - DNA, 1416 bp, Enterobacter cloacae; identical to SEQ ID NO: 105737

SEQ ID NO: 117468 - DNA, 3951 bp, Enterobacter cloacae; identical to SEQ ID NO: 105736

SEQ ID NO: 117469 - DNA, 507 bp, Enterobacter cloacae; identical to SEQ ID NO: 105735

SEQ ID NO: 117470 - DNA, 1062 bp, Enterobacter cloacae; identical to SEQ ID NO: 105734

SEQ ID NO: 117471 - DNA, 558 bp, Enterobacter cloacae; identical to SEQ ID NO: 105733

SEQ ID NO: 117472 - DNA, 540 bp, Enterobacter cloacae; identical to SEQ ID NO: 105732

SEQ ID NO: 117473 - DNA, 750 bp, Enterobacter cloacae; identical to SEQ ID NO: 105731

SEQ ID NO: 117474 - DNA, 393 bp, Enterobacter cloacae; identical to SEQ ID NO: 105730

SEQ ID NO: 117475 - DNA, 423 bp, Enterobacter cloacae; identical to SEQ ID NO: 105729

SEQ ID NO: 117476 - DNA, 612 bp, Enterobacter cloacae; identical to SEQ ID NO: 105728

SEQ ID NO: 117477 - DNA, 810 bp, Enterobacter cloacae; identical to SEQ ID NO: 105727

SEQ ID NO: 117478 - DNA, 1281 bp, Enterobacter cloacae
atgatggaagcgcgtaagctattgataaacctgctgtatcgggctacgtcgcagtccagcgaactaccgggctggagtcatcgtgaaacaaaaaagccgctcatcatagccagcaataacgattcgtccgtcattgcaatgaataaactggctaaaagcgttggtattaagcgtgggaccccaatttttaagtgcagggatttgattcagcaacaccggatcgaagtccggagctctaactttactttgtatgaagactactcaaatcgcttccatgaaacgctggaaagcttcgcgcctcaatcgagtcgatatagcatagatgaaaatttcatgttattgaaaaacatgaacaagataatagattatgaagattacggccggttgatcagaagtacacttcttcataatctgtcccttacctgtggtgtgggttgttcaagcaccaaaaccctcgctaaattatgcacctatgcgagcaaacgatgggcagctacaggcggggttgtagttttgactgatcaggccaggatcaggaagctcctgagcctgatcagtaccagagaaatatggggtattggtcgaaagattagtgaacgcctgtcggctttcgggatcatcactgccggtgatttttataatagcgacgttcgctttttacgtaaaagctttggcgttgaaatcgagcgtacctggcgggaactgcatggcgaaccatgtttccggctgcacgagtctccccctgtcaggcaacagattatcgtttccagaagttttggtcagcgccttaatgagataggcaagctacatgaggcagtttcattttttaccgcccgggcggcagagcagctgcgcaaggatggctcgtggacccgtcaaatcacagtcttcattcagagtagcaattatgcgcaaggtgaaaaccgctacagcaattgtggtatcgagccgcttaccgctacacaggacacccgcgatctggttgatgcagccatgaccatcctgaaccgcatttacagacccgggatagcgtatgcgaaagcaggggtaatgctctccgctatgactgacggcacagagcaactcagcctgtttgatactcgcccggccaggcctggcagtcaggcactgatgaaagttatggaccggttcaataaagaaaagcgcggagctctgtttttactgggggaaggcattcaacaggattttcgtatgaagcaggccatgctatcaccgagatatacgacccgctgggatgaattactcgttgtaaaagcgtag

SEQ ID NO: 117479 - DNA, 1200 bp, Enterobacter cloacae
atggcaaagatcaagctcaccaagaccgccgtagagtcggcgcaaccccaggcgaaggacatcgaactacgggataccgtcgtgcccggcttcctttgcaagattacctcgacgggacgccgggtgttcatgctccagtaccgcacgaactctggccagccccgcaagccctcgctgggactctacggggagctaaccgtcgaacaggcgcgggtcaaagcgcaggactggctggccgaggttcgccggggtggtgatcccggcggtgccaaggccgaggcgcgcaaggcgcccacgatggccgagttgtgcaaaaagttcatggaggactactccaagaagcgcaacaaggtcagcacgcaggacggctaccagggcgtcatcgaccgcaacatcatcccgctgctgggccgcaagaaggtgcatgacgtgaagcggcccgacattgcggggctcatggaaaagctggcctacaagccgaccgaggccaacaagaccttcggcgtgctgcgcaagatgttcaacttggccgaagtctggggcttccgcccggacggcacgaatccgtgccgccacgtcccgatgtacccgccgggcaaggaaacccggctcatcgtggacgaggaaatggtgcggatcttccgccagttggagaaactggaggcggaggggctggagaactacgtcatcccgttggcgatccggctgcaattcgagtttgcggcgcggcgctccgaaatctgcccgctcgaatggagctggctggacttcgagaaccggcgcgtggtgtggcccgacagcaaggttggcggcatttccaagcccatgagcgaggaagcctatcggctgctttcgacggcgccgcgtctggaaggctgcccttacgtcctgccgtcgccgaacgacccggccaagcacctgacctttggcgagcactatggcggctggtgccggacgctcaaggccgccagcgtgccgcacgtaggcacgcacggcatccgtcatcgctcgaccaccgacattgccaattccggtgtgccgaccaaagtgggaatgaagctgacgggccacaagaccgtggcgatgttcatgcactacgtccacaccgaggacaagccggtgcgcgaggcggccgagctggtggccagccgccgccaagccatcacgggcgcgcggcagcttgcggaggcggtggcatga

SEQ ID NO: 117480 - DNA, 1065 bp, Enterobacter cloacae
atgaacgggcgccggccatcagcagcatcgctcgcagcgcccgcggcgctgctgggcgacattcgggcactgatcgaggcggcgcgcttgcgcgccgcctcgacggtgaatagcgagcttacgatgctctactggcgcatcggccaacgcatccacacgcaggtcttggacaggcgccggggcgcctacggcaaggaagttctgcccaccttggctgcgcagttggtggaggagtacggcagcagctttgcagagcagaacttgcgccgcatggtgcagttcgccgccaccttccccgacgagcgaattctcgtatcactgatacgagaattgagctggacgcacttcatcgccctgatgccgctgaaagacccgctccagcgggactactacgcacagatggccagcacccaacgctggagcgtgcggacgctgcgcgagcgtatcgactcgatgctgtacgagcgcacggcgctttcccaaaagccggaagaaaccatagcgcaggagttggcgaccctgcgcgatgcgcagcgcatgtcgccggccctggtcatgcgcgacccgtacatcctcgacttcctgggcctgcgggacacttggcaggaaggcgacttggaagcggcgatcatccgtgaaatggagtccttcctgctggagctgggcgcgggcttctcattcgtcgcccggcagaagcgcattccgatcgacgacgaggatttccaccttgaccttctgttctacaaccgcaagctgcggcggctggttgcggtggagttgaaggtaggtgacttcaaggcggcctacaaagggcagatggagctttaccttcggtggctagacaagcacgaacgggagccggaggaagcctcgccgctcgggatcatcctttgcaccggcaagaagcgcgagcagatcgaattgctggagctggacaagtccggcatccacgttgccgagtatctgaccgccttgccgccgaggggcgtgctggtggagcggctgcaacaggcaacgcaacgggcgcagttgcaaatcgagcagcgcaagacggacaacgagtag

SEQ ID NO: 117481 - DNA, 510 bp, Enterobacter cloacae
atgtcgcaactgtcctttccctcgttcgattcctgtctgctggtgcgcgacgcgcacgggcgctatctaccggcatcggccgacgacattctggaagctgcgcgccaggtcattgaccggaaaatgcggcgcggagcagagttcacttcgccggcggcggtcaaggaatacttgcgtacaaagttggccagcttcgagcatgaggtgttcgtagtgctgttcatggatacgcgccatcgtctgatcgaatacagggagatgttccacggcactattgacggtgcgtcggtgtatccgcgcgaagtggtcaaggaggcgctgcggctcaatgcggcggcggtcgtcgtttcgcacaaccatccgagcggaaaccccgagccgagcgcggctgaccgggcgctgacccagcggctcaaggaagcgttgggtctggtggacgtgcgcgtgctcgatcacatcatcgttgcgggcaacgaaacggcatcgttcgccgagcatgggctgatctag

SEQ ID NO: 117482 - DNA, 2304 bp, Enterobacter cloacae
atgattgtctgcatcaaccgcctcaaacagttcggaatcttcagcgacttcaatggaacgaagatccaaaagttcggccggtacaacctggtctatggttggaatggaacaggcaagtcaacgttatcgaatctattctcttgctttgagcttcgctcgatggttccccgcttcagcacgggccaattttcagtagttctggaggatggctcaacgatcacggaatccacactccactcatcccaattgaatattcatgttttcaatcaacgcttcgtgcatgagaacattgattgggacaaatccgtaaagagcatccttcttattgcgaaagagaagattgatgacttgcagaagctggagaagctgaagagcgagcttcagtcgaaaaagaaggctcacgacgacaagcaaagcgatatcaagaagcagcgtgaggcattagagaagttcctgaccaatgctgccaagaaaatgaagcttggacttcaggcgattgatacgagcgacagttattacttgaattacgaccgccgcaagctcttcaacttcatacagaataacggcgagacaattatcaaggcggagtcggttcttccagatgagagggttatcgaccttacgaatgccgccaagccagatcagcttccaagcattgctttcgcctcaacggccattgagccggactactttaagaaagcggcgggccgcatcagagatttgattgggactacggcggtcaatcaagcaatccagcggctgaccgataacccggaaatccgcgaatgggttcaagcaggcttggaaatccataaaaaccacgactcgcaatcctgcgagttctgcggctctccgttcgcccagcttcgtgccgaggcgcttgctgcccacttcagcaaggagttcacggagtttcagagccgacttcagaacgcggcgacatggattgaatctcaaggcgctccagctaatcagtttcccgcatcgaccgagttttataaagaactatcggccgaggcagagaagcttcaaaaggactacgcaactgctgctgaaaagatcgaccagcaaatcgacgcctggcgggaagccctgaaggccaagatcacagaccctgggaagacagacattcagatctcggatgtggttgaagacgatgtcaccaatttcaatgacatcctgaaatcgattgttgctctcgttggaaagcacaacaataagacttcaaatttcaaatctgagacctcaaaaagcaaggtggcactggagcttcactttgctgcggctgaggtgcaagagtttgactatgctggaagtgagaagaagtgcaatgaccttgagtcagaagcaaagaacgaccataaggaaattgaaaaaattagtctagaggtcggagccatagaagcggcgctctcgaatgaaacggtcggggcaaaggagttcaatgacatcctgcatcgcttcattggccgctctgagctttgcctgaacttcaatcagaagaagaaaggctatgagatcatcagaaacggggttggtgagcacgatgggaatttgagcgaaggtgagaaaactgcgattgcatttgtctatttcatcacgaagctcaaagaaaatggaaataacatcaaggatacgatcgtcgtcgttgacgatccggtctcaagctttgattctaatcacttgtttcacgcctactcgtttttgagaacgcaatgcactgaagccaagcaactttttgtgctgactcacaacttcacttactttaagctagtgagagactggttcactggcaccaataggaatcgagtcaaaaaaggcaacgccgagaattgcttcttttatcgcctggatgcgccacctggctcccctcgtcactccctacttgtggatgccgacgactcactcaagaactacggttccgagtaccactatatcttcaagaagctctacgaatatagggcgcacacaacactcaatcgagatgaggcgttcttgaccgccaacctcgcccgaaagcttgttgaatcgtttttcaccttcaaatatccaaggcgtcgaagcgacattagtcaattgatggaggctggcctaaaagattgcaccatcacgacaccagagcttaaagaaaaaatctaccgctttatcaataagtattcacatagcgacgttattgagataacagaggaatccgcagaaaacttggcaggcgaaagccacagcgtcatcgggaacatcttccagtggctggaagaggtggacaagaaacattacgacgagatgattcaggttgcgacggcctga

SEQ ID NO: 117483 - DNA, 828 bp, Enterobacter cloacae
atgcaactcgcatcccgtttcgctttccgctccccctcgctgcgcagcgattacccgctgtccgacgaccagattcaccgcgtggccccgtccatcttcgcggatgccccgcacgagagccgttcgcagcggtacgcctatatccccaccgccgccgtgctgaccgagcttcgcaaagaaggcttccagcctttcatggtgacgcaaacccgcgtgcgcgacgaaggcaagcgcgagcacaccaaacacatgattcgcttgcgccatgccagccagatcaacggcgcggaggccaacgaaatcgtgctgctgaactcgcacgacggcaccagcagctatcagatgctggccggaatgttccggttcgtgtgcagcaatggccttgtctgcggcaacaccgtggccgatgtgcgagtgccccataaaggcgacgtggccggtctggtcattgagggggcttacgaagtcttgagcggtttcgatcgggtgaaggaatcgcgcgatgccatgcgcggcatcaccttggacgatggcgaatccgaagtgttcgcccgcgccgcgctcgccctcaagtacgacgaccccgacaagcccgcgcccatcacggaatcgcaaatcctgatgccgcgccgcttcgacgaccgccgccccgacctgtggagcgtgttcaaccgcacccaagaaaacctgacccaaggcgggctgcgtggccgcagcgccaacgggcgccgacagcaaacccgcccggtgcagggcatcgaccaaaacatccgactaaatcgcgccctctggctgctggccgatggcatgcgccagttgaaagcctga

SEQ ID NO: 117484 - DNA, 2070 bp, Enterobacter cloacae
atgaacgccgttacccaaaccgaagcccgcgccatcaacaccgccgccgctatcccgctggaagccgctgatccgaccaagaacctgattctggttccgctgtcgcggctggtgtcgcgtcccactggccgcaacgtgcgcaagaccccgcgcatgtccattcccgaactcgccgccagcatccagcgtgtcggcctgctgcaaaacctcatcgtgattgccgccgccgatggcgagcattacgaggtcgtggccggtgaccgtcgcctcgcagcgttgaagctgctggcgaaaaagcaccgcattagcaaggaatgggaggtgccttgcctgctggtggccgatggcaccgcccgcacggccagcctcaccgagaacgtgcagcgcgaagccatgcaccccgccgaccagttcgaggcgttcgccgcgctcgtggccgaaggccgcagcatcgaggacattgcagcggatttcagcgtcacgccgctggtggtgcagcgccgtctgaaactcgccaacgtgtcgccgcgcctgctggccgactaccgggccgaggccgtgagccttgaccagttgatggccctcgccatcaccgacgaccatgctgcgcaggaagccgcgttctacgatgcgcccacatggcagcgcggcccgcacaacctgcgcgaccgcctgaccgaacgcgaaatcgacgcctaccggcatccgctggtgcgctttgtcgggctggacggctacgagcaggaaggcggtggcatccgccgcgacctgttcgcggagggcgacaaaggcgtgtatctgaccgatgccgcactgctggaacggctggcgcaggacaagctggcaggtatcgccgccaaggtgcaggccgagggctgggcgtgggtggatgccacgccgggcatgacccatgccgatctgcaagccttccagcgtgcgccaagggaacgccgcagtccgaacaagcgcgacgcgcagcgcatcgagaagctgcaaaccaagctgcacgaactggccgaggcggtggatgccgcgctggacgacgaggacgaggaaaaggccgatgccttgcaggaagaaggcgaacgcctgggcgagcagttgcaggcgctggaagatggcttgctggactatgcggccaacgtgaaggccgcagccggtgccattgtcaccatcgaccgcgacgggcaggccgcgattcatcgcgggctgctgcgcgaagcggaggccaaggcactgcgcacgctggagcggctgcggcagggtttcggcagcgaaggcgaagccgcgaacgaggacgcaggcgaggacgacgagcagcccaagaccgccgccatgtctgaccgactggcgcagcggttgagcgcgcaccgtaccgctgcgctgcaaatcgaagttgcacggcatccgcaagcagcgctggccgccgtggtgcatggcatggtgcagaccgtcttgcaggaaaggcactacgggcacgacctgccgctgggtgtgcgcctcacggtgcaagaccggctggaaggcatggccccggactggccggaatcacccgccgccgtggcgctgcgcgaactgcaacaggtggcaggcgaaaccttgccggaggacagcgccgaactgttcgccgcgctgctggcgaaatcacaggatgaactggtgcggctgctggccgtgtgcttagcttccacggtggacgtggtgacgcctcgcgccacgccgcaccagcccggcgcggaactggcgcaggccgtggggctggatatggccgcgtggtggcagcccaccaatgagggttacttccggcatgtgccgaaggccgcgattctggaagccgttggcgggttcgcgccctcgcacgtcacccgactggcgaagttgaagaagggcgacattgccagcgaagccgaacggctcgccgctggcaccggctggatgcccgccatcttccgcaccgaaggcccgcagcaggccgggcaggacgcgccggcggatggcgaagccgaagcacaggaagaagcggccgccgtggcggatgtccagccgcaggccgaggctttggccgcgtga

SEQ ID NO: 117485 - DNA, 210 bp, Enterobacter cloacae
atgacccaccaacccgcaaaccgcccccgtatggctgcgacctatgcctccggcacggtgcgcgcccgccgctggcacggcgacggcgacgtgcgcggctaccgtccgccgcgtggctggacggcccgcgccgacctgaccgatctgcatcccctcacgggccgcgccttgccgcgcgccgtgtggtggatcatcgaaaccaagaaataa

SEQ ID NO: 117486 - DNA, 654 bp, Enterobacter cloacae
atggggccacgcacaagggcgctcgtgcgcgaaatccacgaagccagcaagtgtggcggcgcatcgcgccgccaacgattcgaccgagccccgccgcaatgggcggggctggtgtggctacgccccggcttgctgcggcaggttgcacgaaagcgtgccgtccccgacgctggcggttcgttgtctgtacgtcacgaaagacggttcaccgacacgccgcccagcctcgcttctatggagcttccacaccacgcctcagtatgtggccgtgagctgcggcaggggcgctctggccttgtcgtcggggcattgacctggcccgcgtcagggcgcaagccggtgcagccgtcacgcggggatgccgagttggccacgtctccattcgggagcgggcggcctgtgcgtccttgtcttgttgtgaatcctggcggtggcgcggctgcgccttgggcttcatggccgcaaccttgcagcgaaaacaatttcccctgcgctgcgcgcattcctcgcgggacaaattcttttcgcttccaggttctccacgttgttgcgaccgctgcgcggtgcgaccagcccatcccccgccggccggatcacaacaaggacgcactggcgcgaccttgttcaacccgaaaggagaaacatcatggctaa

SEQ ID NO: 117487 - DNA, 315 bp, Enterobacter cloacae
atggctaacatcggcaccttcaccgcagagaaagacggcttcaccggcacgcttcgcaccctgacgctcaacgtcaaggtcaagctggttcccaacgacaagggcgacaccgagaacgcccccgacttccacctgcaagcggctggccacgaagtcggcgcagcgtggaagaagaccagcgaggccgggcgggaatacctgtccgtatccatcgacgacccttcgttcccggcgacggtctatgcccgcctgatcgagaacgaggacggcacgcacgacctgatctggtcgcgcaacaagccgaaggcggcctga

SEQ ID NO: 117488 - DNA, 294 bp, Enterobacter cloacae
gtggcagcgaagaactcattggcagcggcgattcggacggtaaggaaggcgcgtggtttgagccaggaagcgttctccaacgtgtccagtcgcacctacatgagcacgctggagcgcgacctgaaaagcccaaccatccagaagctggccgatctgtgcgaggtcatggaagtgcatccgctcacgctgctcacattggcttatgccggtgacagcacccgcgaagctgatgaattgctggcacaggtgcgccaggaactcagggcgatattggaagagcccgacacgccttag

SEQ ID NO: 117489 - DNA, 318 bp, Enterobacter cloacae
gtgcacctactggcccacggcctcacccgcgccgcaggccaggaatgtgacccgctgcccgtggtgcgcctgttcacaccggacgcacatgcgacctggctattggccgcgctcgatccgaccgatggcgatacggcctacggcctgatcgacctcgggatcgggatgcctgccctggcgacggtgaagctgtccgatctggcgtccatcgtcgggccgctcaagcagcccgtgatacgagatcggtatttccagccgacgcggccgctgtcggaatacgttcgactggctcaggaaaacggttcgatcaccgattga

SEQ ID NO: 117490 - DNA, 771 bp, Enterobacter cloacae
atgactgaccgcagcagccaacactggtatcccacggccgcgtatctctacacgctgcacctcgatggcccagcgctggcttgggagtatttgcgcaggaatccaagctaccggcgcgactggctacgccggcgtcgcaagcctgatgcggcgcaggcctggggcctgcgcctgctggaagatcccggcctggatgcgcgcgacgcacatcctgcttggttccccgatcacgatgccgtggtgcagctataccccgacgccgacccaccacccgatgcgcataccttcgagttctggcgcattcctgggcgcaagcaactgacccacgacggcaagcgcctggtgctcgtatcgcattggccaggctgctgcgttcggctggcactcgcacccgacctggaagatggttcggcctatctctacgccacacgcgcctgcgccacgccctgtgcgcgctaccgcacgctcgctgcgaagctggatgcgctatctgccgcaaccgtggccacgcctgtggcaacagcccgctcccgccccacgcccgccgcgctgctggaactgcataccttgcaagcgctcgacgcgaccctcgcgggagcctccttgcgcgaggtgggcgaaggtctgttcggcgcggatgccgtcgcggccgactggcacaaagacagtgcattgcgtgcccgcgtacggcggctggtacgccgcggcgatgagctgatgcacggcggctaccgccgactagcgcagcttccaatgttcccgtcgcattag

SEQ ID NO: 117491 - DNA, 285 bp, Enterobacter cloacae
atgcgacctgctccctcgcggcctgccgccgctgccgtcactgcgacctcgcagcctcaacgctacctgacaaacgacgaagccgccgactacctgcggctgtcgccgcgcacgctggagaagcagcgggtgatcggcggcggccccaagttccgcaagttcggccgccgcgtcatgtacgcggtgtccgacctcgatgcctgggccgaccagcgcagctacgaggccacgtccgatcccgaatacgccgagcgccacgcgggcgactaccgtgatggccgctga

SEQ ID NO: 117492 - DNA, 846 bp, Enterobacter cloacae
atgtccagcccgccagggcaagccttgccgcagcgcgaacagctcgatctgttccgcgcgctgccgggcgacatggcgccacgcgattcccaggacttgatggcctttccgttcttctcgcttgccaagtcgcggcgcacggcgccgatcgacttccgcagcgggaacgtcaccattcgcgtggaaggcacgcaggagcacggcatcgcaacgatatgggatgccgacgtgctgatatgggccgcctcgcagatcgtggaggcgcgcgacgcgggcctgcgcccgtcgcgctggatacgcgccacgccttacgagattttgcgcttcatcgggcgcggcacgtccctcaacgactaccagcgcctgaaggccgccctcgaccggctgcaatcgaccacggtggccacgtccatccgcgaaaccacgggaaggcgcttgcatcgcttctcgtggatcaacgagtggaaggaactcgccgacgccagcggcaccccgctgggcatcgagctgatcttgccggactggttctatgccggcgtgctcgacgccgccctggtgctgaccatcgacccggcctatttccgcttgaagggcggtatcgaacgctggctgtaccgcctggtgcgcaagcatggcgggcggcaggagcacggctggcaattcgacttccgacacctgtaccgcaaatccggcagcgcggcccgcttctcggacttcgcctacgacgtgcgcgccctggtggcgcggcagtcgttgcccggctacgtcctcggcatcgagcggatgccggacgacaacaccgagctgctgaccttccggcccgtgccgcacgcggcacggggataa

SEQ ID NO: 117493 - DNA, 639 bp, Enterobacter cloacae
atgatcttcgcgtttctcaaccagaaaggcggcgtcggcaagaccacgctcgccacgcacatcgccggcgaactggcgatgcgcggcctgcatgtcatcctgctggatgccgacccgcaggggtcatcgctcgactggacgcagcggcgtagccagcagggcctgccccgtctgttcagcgccgtgggccttgcccgcgaaacgctgcatcaggaagcgccagaactcgccaggcgggccgatcacatcatcatcgacggcccgccgcgcatcgccgccctcgcgcgctccgcgctgctggcggccgagcgcgtgctgatccccgtgcagcccagcccctacgacgtatgggcttctgccgagatggtcgcactgatccgcgaagcacaggtgttccggccagcgctacgcgcggccttcgtcatcaaccggcgcgtcagcaccaccatcatcggcagggaggcacggcaatcgctggccgaacagccgctgcccgcgctgcgctcggagatccaccagcgcatcgtctttgccgacagcgtagccgctggccggctcgcccgcgaaaccgcgcccgacagcgccgctgcccgcgagatcgccgcgctcaccgacgaactgctgcggtggccgacatga

SEQ ID NO: 117494 - DNA, 264 bp, Enterobacter cloacae
atgactggaaagccatcaccacgcagcaagcgcgtcggcatcggtgtacgtcccccagcgaatccgcacgccgaagcgtggattcgccagggcgacgcagatgccttgcagaaaggcgacctctacaccgctcgactgacgcttgacatcacgcccgccatgcgggcgcgcatcaaggtgtcggccttcacgcgaggcgtgaccgtagccgaactgctgcgcagcctgctggagcgggagtttcccccggagggcacgccgtga

SEQ ID NO: 117495 - DNA, 558 bp, Enterobacter cloacae
gtgaacgcatccgcttcgaccgcccacacccccaaagcaagtgcgcccacggctgcaccgccgccggcgccttcgacactcgccggccaggccggcaacgtgccgctgacgcgcgtggcgctgacctacatcgaaccccgcttcaagctctacctgcgcttcggcgaaccggcgcgcacgctccagctcgaccgctggcggcgctgcgccgtgttcctgccgaacgcggttctgtgccgcatccgttggcaggccaacgactacggcacgatccgctggcagctcatggtgatgcagaccgccacgccgctggacgccgtgcaacgcatccccggcgtgcagccgggcgcgcgtctgctgttgcacgccgaaggcgatgccaacgttcgcgccgtgctggaacgcatcgacgacatcgaggcgctgggcatcgcagccgcagacacatcgcccgcgtactggcgcacgctcgcgaaccggctcgcagcgcgctcggcgttacccacatacaccacagaacggcacgccgcctggctggcagggagggcattgccatga

SEQ ID NO: 117496 - DNA, 588 bp, Enterobacter cloacae
atgaccacgatttccacgaccggccccgtgccgcatcctcgctcgcgcctgcgcactcgcctcgtgctggcaggcttcgccaccgtcggcctcgctgcgctggcctgggctgcgttcgtgcagcccctgccgcgaatggcctacaacccgtccgacagcgtggcggtcggttggtatcgcatcgaaccgttcgacccgcgcaccgcctcgcggccacgtccgctgtccgtggacagcatcgtgctggtgccgctgcccgacagggccgccatgctggctgcgcagcgcagttacctaccgacccgcgttccgctgctcaaacgtgtgggcgcagtcgcgccacaacacgtctgcatcgtcgccggccaggttcgcatcgacggcgtgccggtggccgccgccctgcctgccgaccggcagggccgaccgctgccatccttgcagctttgccgccgtctcgaaccgggcgaactgttcctcttgagcgtgaccaacccagcgtcgttcgacagccgctatttcgggccggtcagtgcatccaccgcgatcggcgttgcgcatccgatctggctggagacacgtccatga

SEQ ID NO: 117497 - DNA, 2121 bp, Enterobacter cloacae
atgggggtggcgcggcacggagcggctttgccgccgtgccgcgtggggcgcgaggcccgcgccaatgcaggcatgtccgcgtgcttcgcacgcccggagacgccggagcttgccaggggcgctgccatgaccgaccgccgcgacgacgatttccgggtgcgccctggcgcgccgaagaaccgaggcaaaggccagggccagagcttcgtttccaaggtgctcaagcgggctggcaaagccagcggcggcaagtcggcggtgcgccgtcctgtcgctggcgggagcggccagcacgcgggccagcggcccggctcacggcttgggcgcggccatacggcagcgcgcttcgcaggtgcaaagctgacacccatgtcacggcgcgtgaccgtcaagacgctgctggtcaaccagcgcaacgccagcccgcagtcgctcgccaagcacctgcgctacatcgagcgcgacggtgccggccgggacggcgagccgggccgtgcctacgggccgcagaccgaccatgccgacctcgatgccttcaaggaacgctgccaggacgaccgacaccatttccgtttcattgtttccccggaagacggagccgagctggacgacctgcgcacctacacccggcacctgatgaaccgcatggaggccgacctgggaacgcggctggattgggtggcggtcgatcactggaacaccgacaacccgcacacgcacctgatcgtgcgcggacgcgacgataccggcagagacctcgtcatcgcgggcgactacatcgcccacggcttccgccatcgcgccgccgagctggcgacggaatggctggggccgcgcaccgaactggagatccagcagacctggcagcgcgaggtgaagcaagagcggtggacgagcctcgaccgcacgttgcagcgcgaggtcggcgaggatgaccgggtgcggatcgaacgcttcaacgaaccgacgttgcaacgccagcgcctgctactgatcggccggctgcaacgcttgcagcggctcggcctggccgacgaggtgcagcccagcacctgggccatccatgccgacgctgagaagaccctgcgtgccctgggcgagcgtggcgacatcatccgcaccatgcagcgcgccatgagcggccagccgcgcgagctggcggtattcgagccggccgacgacggccgtaccctcgtcggccgcgtggccgccaaggggctggccgacgagctgcacgaccgcggctatctggtcatcgacggcgtggacggcaaggcccactacgtcgctttgaacgcccgcgacgaactggcgagctaccccaccggcgcggtggtggaggtgcgtggttccgccgaggtacgggcggcggacaagaacatcgccgcactggcgagcgatggcctgtaccgtaccgatcatcacctggcgatcgagcaaggccgagccaagcccggccgcgacccgcaggaagtcgtcgcggcccacgtccgacggctggaagccctgcgccgggccggcatcgtggagcgcgtggcggaagggctatggaaagtgccggacgacctatccgagcgtgggcgccagtacgatgcgcagcgactgggcggcgtggccgtggacctgaaatctcacctgccgatcgagcggcaggcccgcgtgatcggcgccacctggctcgaccagcaactgatcggcggcggccggggattgggcgacctgggctttggtggcgaagccaagcaagccttgcagcagcgcgccgacttcctcgaagaacaggggctggcccagcggcgtgggcagcgggtgattctctcccggaatctgctggaaacgctgcgcaatcgggagctggcgcaggccgcccagcacattgccgccgatagtgggttggagcatcggcacgtcacagacgggcagcgcgtagccggcatctaccggcgctcggtcattctcgccagcggtcgctatgcgctgctcgatgacggcatggggttcagtctggtgccttggcggccgataatcgagccacgactggggcagcagatcgccgcgactgtacgcggcggcggtgtgtcatgggaggttggacggcaacgaggtcctgggattggatag

SEQ ID NO: 117498 - DNA, 702 bp, Enterobacter cloacae
gtgaacacttccgccaggatgattcccgtcgctgccgcgactatgacgctagtactcggcttgtccgcgtgcagtgtgcttcccaaaacagctccaatggtcacctacaaactgcccgactatcacatcgcccaggcggagagtacgccacgcgccgttcctggacctggggcgctgcgcgtctacgcccctgagagtagtcgcgtcctggattcggagcggcttttcattgcgcagcccgatggtcgcttgtcggcttggcaaggagtgcgttgggccgaccccgcaccggtgctgctacgcgaccgaatcgtcgaagccttcatgcgcgatgggcggtcgacttcggtgattaccgatagcacgccaatgagcgccgatatggagttgcgcagtacgctacgggcgttccagctcgaataccgcggcactgaagcgatcgccgcggttcgggttcggctcgatgtgcaactggtcgatccggccaaacggactgctattgccagtagacgcttcgaagcaatccaagctacaggcagcaagcgagaggcagatgtggtgagcgcgttcggtgtcgcgacggacgtgttggccgggcagatcgttgaatgggcagttcaggtcggggcagcgcgtttgcgagttgcaccggaatcggcaagcaaccatgcacccacagcgtcggcgataagcacagactag

SEQ ID NO: 117499 - DNA, 930 bp, Enterobacter cloacae
atggagccacgtgcccatcatgtattcattggtctgttcgtcgtgctgctcggtgcgattggtatcggcttcgcgctctggctcagcgacacacgttccgaccacgattaccagtattaccggatcatgttcgatgagccagtgaccgggcttacgcccggcagccaggttcagtacagcggaatcacgattggcgaagtcgttgcactttctctttcgccgcctgacccaaggcgggcgatagcgcgcgtgcgtatcaatgccaccatcccggtccggcaggatacccgcgctgaattggtcatcacgggaattaccggcaacgcggtgatcgagttgagcgacggtgggccaaacgtgccattgctggatcggaaagaggacgaggaaccgttgatcctcgcgccacgttcggcgatggcatccctggtctccggcgagggtaacagcatgacgacactcaacggcatcttgctgcgcacgcaggagttactgtcgaaggagaatttggctcttgtgcaccgcagtctagtgaatctcgaacagactacgggcgcggtcgctgaccagagggccgagatcgcgacgttaatcagcaatctgaccgaagcaagcagagaatcgacagctgccgtgcgccaagcaaatagcactcttcgcgatgccaacctgctactaaataacgatggtaagcaaatcatggtgaacacgcgtgatgcaacggcatccctcgaacgcgccgctttcagggttgagacgctactgcaaaacaatcaggaatcgctgaaccaaggcatggccgccacaggccctgccatgcacgaactccagcaggcgctggccaatctaaacaccgtgctgcgccgactggatcgcaatccggcgcaatacctgctcggtggagagaacattgaggaaaccaagccgtga

SEQ ID NO: 117500 - DNA, 822 bp, Enterobacter cloacae
gtgagcgcggtgaaggaagacaccgacaacggtgtgcgacacgctattgaagtgcgcggcctagacaacaggtttggaacccagcaggtccatcaggacctggacctggacgtgcgacgcggggaaatccttggcgtggtgggaggatcaggcaccgggaaatccgtgctcttgcgtagcatcgtcgggctgcagaagccgcattcgggcgtggtccgtatcggggggcgcgacctactgcgagcccaatggcttgcacgcgcgcgtatggagcgaaggttcggcattctgttccagaagggcgcgttgtattcatcgctgaccgtcttggagaacgtcgctcttcctttaatcgagcatgtcggtctggcgcggcctcttgccgagcgtttggcaagaagcaagctgggcttggtggggttgcctgccggagcgggagacaaatatccggcctcgttgtccggaggcatggtgaaacgagcagcactggcgagagccttggcgcttgatgcgaacatcctgtttcttgacgaacccaccgcaggactggatccaatcggggctgcatctttcgaccaattgattctgaccctgcgcaatgcactgggtctcacggtgtttctggtaacccacgacctcgatacgctgtacaccatatgcgaccgtgtcgcggtcctggcgaaccagaaggtactcatcaacgacggcatcgaggcagtcgagcgattcaagcacccgtggatacaggaatactttcacggcccccgtggccgtgcggccgcacaggccactggtgcttccagccaagagacgcagccatga

SEQ ID NO: 117501 - DNA, 1158 bp, Enterobacter cloacae
atgagcaacgcttcacaggcttggctccggcaggatgccatggtcggcggtgatcacaaatggctggcgggtggcgactggacgatagagcactacgccagtctggcaaaatccgtgtccgccgcccgcatcagccatgccgaggggtacgccactcccttgctcgactggacgcaagtccagagactggacaccgccggcgcggctctgctggtggaaattctcgggccagactcgatactcgaccggccggaggcagctccaaatctgtccccggatcgcctcgccctaatgaaagcgcttgccgccgctgctaccgctcagcagaagacggacaaagcagcggtgagcgggaatcctctgctccgcggtctgggacgcataggcctgaccgtggaacagggctgtcgtgcgtgtcttggtctggccgggttcgtgggtcagatcatcgaaacatggagccgtaccgttcgtcacccgcgtcgctggcgcacgacctcggtgatcgctcaaatccagcggtcagcggtggacgccattcccatcgtggcgctactgagcttcatggtaggaatggtggtggcgttcctgggcgcaacggtgctggccaacttcggtgcgagcatcttctcggtgcatctggtcgccttctcgttcatgcgcgagttcggagtgctgctcccggccatattgattgcaggccgtaccgcaagcgcgtataccgcccaaatcggttcgatgaaggcaaatgaagagatcgatgcgcttcgctccaacgcgctcgaccccatcgagttgctggtgctgccacgcgtgctggcgcttcttgtgtccttgccactgctcacattagtaggcatcttggctggcattgtgggcggcgccactgtatgcgcactgagcttggagattcctcctgcacagttccttgccatcgtgcaggaaaaaatcgaggtgcgccattttcttgtcggaatgagcaagtccccgctcttcgcggtgatgatcgccgctatcggctgccatgaagggttcaaggtcgccggtagcgctgagtcggtaggcgaccacacgacttctagtgttgtgcaatcaatcttcatggtgatcctgatcgatgccatcgctgcactgttcttcatggagatgggctggtga

SEQ ID NO: 117502 - DNA, 621 bp, Enterobacter cloacae
atgaagagcaaaactgcattgatccgcggcggcatttttttttgcgtagcagccgcgctctctggatgcgcgaccaacagcatgacgcgctccggatttctcggcgactacgagaagttatcgccgacacgatacgagaacgtactgatgtaccgcgcagcgggattcgagcccaagcgttatgccgctgtcgtggtggaagatgcgcagatcaagaccgcctcgggtcgcatcgatgggctcgatgacgcgcagcagcgtgaagtgctagaccatgtgacgagcgaactgaaacgccaggaaggcaaaagtcccgccaccccaggtggcacgggacaggttcgggtgcgtgtagcggtcaccgaactgcagacaccgaatcgggcagtcaatgcaatgacgaccctgctggttggacccgtgacgacgggcggtgccagcctagagttcgaagcagtcgatgtaagtacgggacgacgcgttgctgccgccagttgcttcgagcgcggcaacgtcattaaagagttcgccggttcgtacacattgctgggtcatgccaaagcggcgatcacgaactgcatcgagcgcatcgacagcgcttggcgggacacgcagccatga

SEQ ID NO: 117503 - DNA, 432 bp, Enterobacter cloacae
atgagtctcttgcggaccgcctcgtgctgcgcattctcagaattcgtatgtacccacgcttcatccgtatgtctcgctaggcttatgcgattcagcatccatccgctgatctggaaatcctggtcgattgtcattgccgcaggggttctaggagcgggctatccattgggcctgcgggccatcacggcgggcggtccgacgcgctgggtcggcctctgtgtggcagtgacgtgcatggcggccagcggcgcacttttgtggctcgcgctcaagcggattccgatcagcgcggcctctgcagcctgggcaggaatcgggctacttggaaacttgggtatcggcgccctcttgctaggcgatctcgcatcagtgacgcgctggtctggcaccgccctcatcgcagcaggcattgcctgtcttagtttcgtttga

SEQ ID NO: 117504 - DNA, 3105 bp, Enterobacter cloacae
atgaagatcaccgagatggcgctgcgcgccagtcgacttacctactttgtagcgctcatcattttcgtcgccggcatcgcgaccttcctgaattttccttctcaggaggagccgactgtcacggtccgcgatgcgatggtcacggcgttgaacccggggctgcccgccgaacgcgttgagcaactcattgcccggccgatcgaggagcgcttgcgcgaactggcagaggtcaagcgcgtgacgagcaccgtgcgcgcaggcagcgccatgatccaggtcacgatctgggaccgctacaccgacttggcaccgatctggcagcgcgtccgggccaaggtcgccgattcgaaggatgccttaccacagggcacgatggggcctttcgtcgacgaagacttcggccgcgtcgcggttgcctcgattgcggtcactgcaccaggttactccatgagcgagatgcgcgtcgcgctcaagcagatgcgcgaccgcctgtacaccgtgcctggtattgagcgcatcactttctacggcctgcaggaagagcgcgtctatctcgaattcgatcggcctaggctcgcgcgattggagctgacaccacagggggtgatcgaccaactcgtcaaacagaacgtcgtcgcttcgggtggacaaattgttgtcggcggcatcaatgcaaccttggcggtcagtggcgaagtgcgtgacgctccctccctgcgagcaatgccgatcgcgctgccacgaccgcaaagtagtacggcgcccgtgccgacgatcgcattgggtgaactggcgcaggtgagtgtgcggccagccgatccgccggaatctgctgccatctacaaaggccagcccgctgtcgtcatggcggtttcgatggcctccggtcagaacgtggagcagttcggaaaagcgctcaaagcacgggttgcagaccaggagaagctgctgccggcgggtttcgatctgtcatacgtcactttccaggccgatgtcgtcaagcacgagatgggcaaaatgaaccaagtcatgatggagacgatcatcgtcgtcctcggtgtcgtcgtgctatttctcggttggcgcaccgggatcatcgtgggcatgatcgtgccgttgacgatcctcagtgcactcatcgtcatgcgcgcgatgaacatcgagcttcagaacgtctcgatgggcgccatcatcattgcgctcggcttgttggtggacaacggcattgtgattgccgaagacatcgaacgccgcctggccggtggcgaagatcgtaagcatgcctgcctcgaggcgggccgcacgctcgccattccgctgctcacgtcctcgctcgtgatcgtgatcgtgttctcgccgttcttttttggccagaacgccacgagcgagtatctgcacaatctcgtggtcgtgctggcactgacgttgttcgcttcgtggctgctgtgcctgactgtcacgcccctattgtgctaccacttcgccaaaccccatcacaagcaggagcagggcgacgcctatgacacccgcttctaccgtggctaccggcgcgtactggagtgggtgctccaccataaggcggtctatgtagcgtcgatgatcgcggcgcttgccattgcgctgtatggcttcaccaccctgccgtacgatttcatgcccaagtccgaccggcttcagttccagattccggtgcagctcgcccccggtaccgactcgcgcgaaacgctcgcccgcgtgaagcagatcagtagttggctgggcgacacgaacatcaatccagaagtctccgatcacatcggctacgtcgccgatggtggcccgcgcttcatccttagcctgaatccaccactgccggcatcgaacatcgcgtacttcgttgtcacattgaagccgaagagcgacatcgacgccgtcctcgcccgcacccgcagctactttgcgcaagcacatggcgacgtgcgcgccgagcccaagcgtttctcgctcggtgcgaccgagtcagggactgccatttatcgcgtcagcggtccggatgaggaggtattgttggaggccgcgtccaaaatcgaagcagcgctgcgcaagctgcccggaaccatcaacgtcaagaacgattgggatacgcgcattggccgcatcgacgtaaaggttgaccaggaccgcgcgcgtcgggcgggcgtaacgactgaagacatcgctggcgggctggatgtccgctacagcggccgatcgatctcggtgattcgcgacggtgacacctccgttccgatcgtcctgcgcagcatcgtaagcgagcgtcgcagcacggcagacgtaggcgcgacgctcatctatcccagcaacggcggtccggcggtgacgctggcccaggtcgcagacgtatcgctcgcgagcgagccatcggtcatccaacggcgcaatctcatccgcacgatcaccgtgcaaggacagaacacctcctacaccgcccaggagatcgtcaaccgcctggtgcctagcgtcgctgccttggacctgcccgcgggctactcggtcgaacttggcggcgagatcgaggaagctgccgaatcgaacgccgcgctgtcgacctacatgcccctcgcatttctggcgatgctgatgctgttcgtatggcagttcaattccttccgcaagctcggtgtgatcctcgcgacgatccctttcacgcttatcggcgtggtattggctctgaagctaaccggcacacctttcagcttcatggcgaccttcggcgtactggccttgttcgggatcattgtcaacaacgccgtgctgttgctggaacgcatcgaccagggcttagcggaaggcctgccgcgccatgaagccttggttggggccgcgatacaacgacttcgtccaatcgtgatgaccaaggtcacctgcatttcgggactggtgccactcatgctcttctccggaccgttatggacagggatggcgatcgcgatgatcggtgggctggcgctcggaacgctggtgacgttgggcttgattccgttgctttacgaagtcctgtttggaatcaagcgaattgggccgtggagcctgagtgccgccaccgcgcatggagatcgctcatga

SEQ ID NO: 117505 - DNA, 1806 bp, Enterobacter cloacae
atgccgcctcgcgcgaaaacaaagttgccccccccgtccaccgcccatagcagcaccgatgcgcagcccgttctccagcaaggagcccagctaactcgcgagcgcatcctgcaggccgctcgcgaactggtgctggaggaaggcgccagtcgtctgacgctggacgccgtcgtcgtgcgggccgggttgagcaaaggggcgtttctctatcacttcaagaccaaacgcgatttgttcgtgacactgatcgacgagatgatccgggcgttcgacgcggtacaagccaatcacgagcgcaggtttgccggagacccggacccctggctgtcgagccaggtggaagcgatgcccgacgacgagatgcagaagatgggcgcagcgctgctcgcggcagctgcggaagatccaacacttctcgacccactgcgcgagtggtaccgcgtgcagtacgaacgcgtgcgtcgatccccgcgtggcaccgagaccgcggcactcatcatgctggcattggatggcgccctgttcgccgatcttctgggtttgccaatactcgcacccgcagagcggcggcatttctttcgggcgctccaggatctcgcctcgggccatctcgaacttgtcccggcaaaaaggacgcacatgagtcgcgtccgtagcggtgtcatgaccgcgtgcgcaccgcgctccttggcggttgcttgcacactatccatttcgactctgctctcagggtgcgaaaactcgcaatccaccgtatccgagcctccgcgcgcagtgaagctcgccgccgcgcagtcggatctcccgcatagctctcgcatcgaattgactggctcggcgcgagcaaccgagcgcagcatcctaggatttgaaacaggaggacggatcgccaagttgaacgtcgacgtgggtgaacggttctcccgcggccaagtcctggcagaacttgatgcgcaacctgaccggcttcgcgtgacacaagcgcaagcatccctggcggccgccgaagccggcctgatggatcgacgtgtacagacagatcaacagcgccggttgctcgaaagcgaagtcatctcccctgctgcgttcgagagcgcgaaggcgcagctagcggtcgcagagggtcaagcgcgcactgccaaggcggcgcttggcctggccgaacgagcacaacgtggcacgatgatcgtcgctcctttcgatggtgtcgtggcggaaaagctggctttggcgttcaccgacattgctgctggtgcgccggtatttcaggtcgacggcgtgcgcagtggcactgagatcatcgcgaacgcgtctactacacaggcacctcacatagatgtcggccaacgcgcagaactgttctggagcggagccgaacaaccaatccgagcggtggtacgtcgtgtcggtctgcgcgccgaaaatggctcgctcctacccgtggtgctagtgcctgaagataacgcgcaagcgcgcgcacttcggccaggtattcccgtacaggtcgtgctcgacgcacctgcggcaacctccaagacctctcggcccgagactgtatccataccttatgcctcgctggtgctcggcacgaagccgggcgaggcttccgtcttcgtctacacccctgaagataagaaggtgcaccgtcgcgcggtgcgcttcacgccggtacaggaaggagacagcgcgcgcgtcctcgctggactcaagcccggcgagacggtggttgccgccggaggaggatggctcaccgatggacagccagtgacaccactggaagccaccactcaattgaccaagcgctaa

SEQ ID NO: 117506 - DNA, 1404 bp, Enterobacter cloacae
atgtctcaaattcttgaacgctatcgcctcatggccatgatttcgccgctaatgcttcttgcggcttgcagccatgctccgcactctgccgatccgcctcgcctggatgtaccggcccatttctcaaatgaagagggaggtgaaggcatcctggacaaatcatcccgccgtactcttcccgtcgactggtggacggcctacggcgatccacagctcaatgtcctagtccgggcggcgctggagcgcaacaccgaactgtcgattgcgcgcgcgcgcgtcgacgaggcctcggccgccacgcggcgagcacgggcctccctgctcccctcgttgtccgcgggcacgcaggcaactcgaggacgcgactattcagagaacgttgcgatcggcaatgatggccgcgccacgttgtctgcatcgtgggaggcagacctgtcggggcggctttcgcaggcagcagaaggtgcgcgcctggatgcggtggcagccgaacaagcgtgggttgccacgcgttggcaggtcgcgtttgaaacagtgtcggcggctgtgcagcagcgccaagccagtgaactcgaagcgctcgccacggcgcggctggcatccgccgagcgactcgtcttgctgacacaacggaagttcgaggccggacaagctaccggcttcgacatcgagcgaacccgctccggcgtcgtcgcactgcgtgtggagcaagagcaacttcggcgtgcgcgcggcgaggcgacgcatgcacttgatgtactagcgggacaaacgcccggagcgtctgcagcttctccgactcttgcttcactcgccgcccccaattggacaccgacacgcatacctgcggacctgctgagtgagcggcccgacgtgcgcgccgccgaagcgaagttcgcagccgaaaccgcgcgctggaacgcagccgaaggcgaacgcttccctaagctggtgttggacctgagcggcggacggcagcgcgttgagagtgcggggacgcgcattaccggcaacattttttcacttggggccggggtttcgttgccgatcttcgatggtggcgcgatccgtgccggcatcgagaccggagaggcgcgcagccgagctgcgcgcgcggagttcgagcgcactttgttgagtgcattgcaggacgtagagaacgcatacctcggttggcatacgcagcacgccgcactggagcatcagaccgagggggtcgcagtcgcggagcgtcagctcgatcgcagccgccgtctgtttgaggcgggacaagtggacgccacggtggtggccgaggctgaggcgggggtgatgtcagcgcaggcttcgctgatccgcacgcgggccgagacagccgtgcaatggggtgtgctggcaaaagcactatccggcccacctgtttga

SEQ ID NO: 117507 - DNA, 906 bp, Enterobacter cloacae
atggaaattcggcatctgcgctactttctagcggtggcagaggaactgcactttgcccgagccgcagagcgcctccacatcgagacatcgccgctgtcgcgcgccatcaaagagcttgaagaggagttgggcgtagcgctatttgcgagaaccactcggagcacccgcttgactcgtgcaggcagactcttctttgagagcgtaccccgtgtcttcgcagctttgcagcaggcgcgcgacagtgtgaacgccgcagccaatggctttcattgccagctccgtattgcattgtctgatggaatcacgccatcgcgcctgcctgcgttgttggcgctctgccggcaggaagagccggaagtggaagttcgcttcttcgaagtgcctttgtcacagcaaatcaagggattgtgtggcgaactgtacgatctcggcttcgctcaatcggatgaagtcggcgaaggcatcatcgccgtgccggtgtggagtgaccctctgatggtagctgtgcccgcacggcaccccttgctatcccacaaacagattcccctggaagagctgttgcggtatccgctggtgctctgcgacgcggtggcgtgtgagggccatgctcggcaagttgaacgggtgctacgtcgcgtggacattgagcctctaattgccgaacgcgtgacttccagcgatctaatgatggtcctggtttcggcgggacttgcactaggcctcacaggaggtgcgcatattactgccagcagggaacagggtgtggtcgcacggccgctgactggaggttcgcccatgctcacgacctatctgctacgaccggccagcgagccgtcagaaatactgactcgcttcatggaacgcgttcattcgatcaaatctccagacgccaaaagtcggcggtaa

SEQ ID NO: 117508 - DNA, 264 bp, Enterobacter cloacae
atgaagaagattgctctcatattgctttcctcgacactggcagcctgcagcccatccgggaaaccagataaaggcaaccttccgacggtcgatgaattagcgctcaatcctgagcggctgaaaaagttgcgccagcaatgcaagttggatcgtcctatgctgggcgaccaactatgtaaccgggttgccgaggctacgcgaaagcgcttttacgaagatggcgatgtgccctacaccacacctaaagagccgccgaagttctaa

SEQ ID NO: 117509 - DNA, 318 bp, Enterobacter cloacae
atgggctggatctatcttgttttggctggattgtttgaaatcggatggccggtcgggctgaaaatggcgcaagagccaacatcgcgttggagtggggtcgcagtagccgtctctttcatgacaattagcggcgccttcctatggcttgctcagcgtcagataccgattgggactgcttatgcggtgtggacgggtatcggagcggcgggaacgttcttagtcggaattcatttctatggcgacccaacctccctgatgcgataccttggcgtggcgctgatcatcctgggcgttatcacgctcaagttatcgagttga

SEQ ID NO: 117510 - DNA, 507 bp, Enterobacter cloacae
atgatgggaactcccctcgagattctgctggttttgacttcgcaggcaacgatgggcgacgacccgcgcctgaccggcgtgtggttcgaggaacagtccaccccgtactacgccttggtcgatgcaggtgccaatgtggatattgcgtcaatcgccggcggcgagattccggtggatcctcattccatagcgagcgaaggcatgaacccgccgagcgtggaatgcttcctcgatgacaaggtgtcgatggacaagctcgaaggctcgctgaagatcgacagcatcgccccggaagggggtgcggtgatgttcctgcccggcggccatggcaccatgtgggacttacccggagcggggcgctcgtcaatctgctgtcgggcgcttgggctgacggcagggtggtcgcggcggcctgccacggccgagccggactggttaatgtcaaggaagcgaatggccagccgctggttgccggccgtcgcgtcagcccctttgccaaacgcatga

SEQ ID NO: 117511 - DNA, 531 bp, Enterobacter cloacae
atgagcaagcaacagaacgccatcctctggcccgaaggctacacgccgggctttactgagaatttcgcctctaatgagatcatcgccgccggcttgagcgcggccgacgtatggccgctactcgtcacaccatcgctgtggccaagctactacgccaactcggctaacgtgcgctttcatggcggcaaaggcccggtactggccgacggcgatcgattttatttcgagaccttcggcttcccggtagaggggcagtgcaacgagtacgtggcacctgcggatgggcaacccggccgcgtggcctggcacggctggtccggcgaggaaggcacagatacgcgcctggatgtgcatcacgcctggctggtcgagaacctggacggcgggcgcgtgcgcatcctcacgcaggaaacgcagaagggcaagccggccgaggagctgcacaacgccaaacccaacccgatgatcaacggccatcaggactggctcgacagcttggtcgagacagcgcgcaaagccaagcaggcgtaa

SEQ ID NO: 117512 - DNA, 906 bp, Enterobacter cloacae
atgaaagatatcaagagcatggatctcaacttactcaaggcgctggacgtattgttggacgaacgcaacgtgacacgggcggcagcacgtcttggactaacccaaccggccttgagcggcatgcttgcgcggctgcgtgaaagcttcggcgacccgctgttcgcgcgtgcgcagcggggcatcgttccgacgcagcgggcgctagacatagggatatctgtcaaacaggtgctagcggaaatcgacgcgctgctccagccaccttctttcgacccggccaccgcacaactgaccttctccatcgccgcgacggactatgcgctgcgtgccattgctgtcccatttctatcggcactcaaacagcacgcaccgcgcgttcgagtctcattagtgccagtcgagagcggactgctacagaaccagcttgagcgcggtcaaatcgatctagccctcctgacgccagagatcactccgccaaatctgcatgcccgagagctattcaaggagcactacgtgtgtgtcctgcgggaagaccatccagcggctatggggcgcaagctgacagttaagcagttctgtgctctcgaccatgcgcttgtttcctacgatggtggaggtttccgcggcgtcaccgacgatgcgctagaacagttgggcaaacaacgaagcgtcacactgtcggtcaagagctttctgatcttgccagacatcctgcgtgccagtgacatggtcgcgatcttgccgagccgcttggtcgccggtatggacaagctggctatctccctgccgccgatgaagataccggggttcaccaagacggctgcttggcacgaacgcacccatcacgatccagcacatcgctggatacgagcactgctgttcacttcctgtgctaacaacaagtag

SEQ ID NO: 117513 - DNA, 1998 bp, Enterobacter cloacae
atgcaagctcagggcgtactgttcgggcagatcgccgccgtattcggcatcgtgatcgctggcgtgtggggtgcaacgcaatggacagccgccgccctgggctatcaactacgccttggctcgccatggttcgacttctttggaaccccggtctatcacccttggcggctgttcgagtggtggttcttctttgatgcctacgcgccgcacgtcttcgatatcggcggggccatcgcgggtggaagtggtctggtggccgtggtggtcgccatcgccatgtcggtgtggcgctcgcggcaagcgcgccttgtcaccacctacggttcggcacgctgggccgatgcggaagacatacgcaaagctgggctgatccagcccgacggggttttcctcgggctgcatcgcggccagtacctccgccatgaaggcccggaacacgtcctgaccttcgcaccaacgcgctcgggcaagggtgtgggcctggtcgttcccaccttgttgagttggcccgcatccgtcgtcgttcacgacatcaaaggcgagaactggacgctcaccgcaggctggcgttcgcggtttagccactgcctcctgttcaaccccacggatgcgcagtcggcagcctacaacccgctgctggaagtgaggcgcggcgcgcacgaagtgcgcgacgtgcagaacgtggccgacattcttgtcgatcccgatggcgcactcgaacgccggaaccattgggaaaagaccagtcacgcgctgttggtcggcgccatcctgcatgtgctgtacgcaggcgaggacaagacgctgcgcggcgtcgccaacttcctcagcgacccggcgtgtccgttcgagctgacgctgcaccggatgatgacgacgaagcacctgggcgatgcgcctcacccggttgtcgcatccgctgcccgcgaagtgcttaacaagtcggacaacgagcgatcgggcgtgctctccaccgccatgtcgtttctcggcctgtaccgcgacccgaccgtggccgaagtcacatcgcgctgcgattggcgcatcgccgacctgatttccgccgagcacccggtatcgctctatctggtggtgccgccctccgacataagccgcaccaagccgctgatccggctcatcttgaaccagatcgggcggcggctgaccgaatcgctcgacggcagcgatggcatcgcgcgccggcacaagctgctgctgatgctggacgagtttccggcgctgggccgcctcgattttttcgagtccgcgcttgccttcatggccgggtacggcatccgcagctttctcatcgctcaaagcctgaaccagatcgacaaggcgtatgggcagaaccattccatcctcgacaactgccatgtccgggtgactttcgccaccaacgacgaaaggacggcgaaaaggatttcagaaaccctcggcaccgccaccgagcttcgcgcgcagcgcaactacgccggccaccggctcgctccgtggctggggcacctgatggtgtcgcgtcaggaaactgcacggccgctgttgacgcccggcgaggtgatgcagcttccacctgatgacgccgtggtcatggtgtccagcgtcgccccgatccgcgcgaagaagctgcgctactacgccgacgccaatttcaagaatcgcgtcctgccaccgcccgcgctcgtagccgggaggtacgccgacgcgccgccagcccgccccgacgactggagcggcttggcgatcccggccgtacctgcggcgccggcctcggcatccgccgatggcctgggcggcaccgatgacggcggcccacgccgccagcccgaactctccgaaaccgtcgcctacgaccccgagccggacgcacatgcgaacgacctggcgctgctcgatgacgacgacctggcgctcccgcttcccggccagctcgacccggccatgcagcgcacggcccggctggcttccctcgaccccaacgacggaatcgacctatga

SEQ ID NO: 117514 - DNA, 477 bp, Enterobacter cloacae
atgagccaataccgcctcaatcttttcatccagcccgagcacgcccagcgcctggacgaactggccgccaagaaaggcgtgtccaagtcgtccatcgtcgcagcggccttggcgtcctggctgtcgcccgatgctggcgaccagcgcgaggccgccattgccaagcggttggatcgactgtcgcggcagaccgaacgcctggagcgcgaccagaacatccagatcgaaacgctggcgctgttcatccgctacttcctgaccgtcagcacgccggtgcccgaagcccatcaggatgcggcacgcgcccagggcaaggtgcgcttcgagcagttcgtcgaacagttgggtcgccaccttctgcgtggccgcagtctggtgcgcgacgtggtggaggaactgcaccccgatccgatgcagatggatgacgcagcagcgatggcctccgcccatgaacgaactgcggagcgtgcgtcatga

SEQ ID NO: 117515 - DNA, 1071 bp, Enterobacter cloacae
atgagtgccgttccacagatccagcccgaacctcgctcatccgcagcagcgtcccaggatcgccgcatccagatgctgcgcactgcaatggggccgctgatcgccgctgcgctcgaagacccggatgtggtggaaatcatgctcaaccccgatcgcaccctgtgggtggatcggctgtcgtcgggtcgctcgccgctgggcgtggagatgcccgaggccgatggtgaacgcatcatccgcctggtcgccgcgcatgtcggcgcggaggtgcatcgcggccagccgctcttgaccgccgagttgccggaaaccggcgagcgtttcgagggcatcctgcctccggccgccccggggccagccttcgcgctacgcaagcgggccgtgagcatcatcggcctggatcgctacgtggccgacggcatcctgaccgccgggcaggccgagttcctgcgccgcgccgtgcgcgagcggcagaacatcctaatcgccggcggcaccagcaccggcaagaccacgctggcgaacgcgctgctggccgagatcgccgccacaggcgaccgcgtgctggtgctcgaagacaccatcgagctgcaatgcgcggcccgcgaccatgtgccgctgcgcacccgcgccggcgtcgtcacaatgaccgagctggtgcgggccacgatgcgcctgcggcctgaccgcgtgatcgtcggcgaagtgcgtggcggcgaagccctggacttggtgaaggtctggggcaccggccaccccggcggcattgccaccatccatgccggctccgccttgggcgcactgctgcgtctggagcaactgatcctcgaagtggcagtgaatccgccccgcgccctgatcgccgaggcggtcaacgtggtgattcacatcgcaggccgtggccgcaaacgtcacgtcgaaaccatctcccgtgtcgtcggcttcgacggtgcgggctatcgcctgacagatgcgctggaaacgccgtttcccgagctgccgccggttcctcttgcagccgctgccgctgcgccttcctcgacccctgaccaacctggagaactgccatga

SEQ ID NO: 117516 - DNA, 387 bp, Enterobacter cloacae
atgacgcacgttgatgctttccgtctttccgtaaatcctatttctcgcctgtccagcatggcgcggctgcgccacctggcccgtcccgcagggcaagggctgctgctggccgcgctgatgctgttgctggcgggcacggcgcaggccgccggttcctcgatgccgtgggaagggccgctgacctccatcctcgaatccatccaagggccagtcgcccggatcgtggcggtgatcatcatcatctcgacggggcttgcgctggcgttcggtgataccagcggcggctttcgcaagctgatccagatcgtgttcggcctgtccatcgcgttcgccgcgtcctcgttcttcctgtcgttcttcagcttctccggaggggccgtcgtatga

SEQ ID NO: 117517 - DNA, 270 bp, Enterobacter cloacae
atgagtaaggccaccgatcttccgggctttgaagtgccgctgcatcgctcgctgaccgagccgatcctgctgggcggtgcgccgcgcaccgtggcgattgccaacggcacgctagccgccgccgtcgggctgggcctgcaactgtggattcccggcgtggtgctctggatcgtcggccactcgctggccgtatggggtgcgcgcgtcgatccgcagttcatgcaggtcttcgcgcggcatatcaaacaccgcccgcttctggacgtgtga

SEQ ID NO: 117518 - DNA, 2487 bp, Enterobacter cloacae
atgctgaaccttgccgaatatcgtcagcgcccggccttgcttgccgactggctgccctgggccgggctggtcgcgccgggcgttgtgctgaacaaagatggttcgtttcaacgcacgttccagtttcgcggccccgacttggacagtgcgacacagggcgagctgattgccacgtcggcgcggcagaacaacgcgcttcgccgtaccgggtctggctgggccttctatatcgaggccgagcggatgcgggcatcgagctatccgcaatcctcctttcccgaaccactgtcctggctggtggatgaggagcgacgcgcggcgttcgaggagtcggatggccatttcgagagcgtctatcacttcacgttgcaacacctaccgccgcaagagtctcgcgcccgtgcggctgggatgctgtacgagaaccggcccactgagggtgtggactggcgtggtcggcttgattccttcgtggcagagaccgatcgcgtgttcgacctgctcgatggtgtgatgccggagattgcctggctggacgatagccagacgctgacctacctgcatgccacagtctccacgcggcgctatcgcgtcggcgtgcccgacgtgccgttccatatcgacgcactgctggccgatgccgcgctggtcggcggcctggcgcccatgctgggcgatcagcacctgcgcgtggtgtcggtacgaggcttcccgacctcgacctggccggggatcttggacgacctcaaccgcctgggctttgcgtatcgctggagtacgcgcttcctgtgcctggacaaagccgaggcggaacgggaattggggcgcttgcggcgccaatggttcgccaagcgcaagaacgtcatcgcgctgctgcgcgaaacgatctttcagcaggaaagcccgctggtcgataccgatgccagcaacaaggccgccgacgccgatgccgccttgcaggagctgggcagcgatcaagtcgccttcggctacctcaccgccacggtgacggtgctcgacgccgacccggccgtggccgacgagaagctgcgcatggtggagcgcgtcatccagggccggggtttcgtgaccatccccgaaaccctcaacgcagtcgatgcctggctgtcgtccgtccccggcaacgcatacgcgaacgtgcgtcagcccatcgtttcgacgctgaacctggcgcacatgatgccgatgtcagcggtatgggctgggccggagaagaacgaacacctcgatggcccgccgctgatcgtcacccgcaccgatggcgcgacgccgttccggctggtgacgcacatcggcgacgtggggcacacccttgtcgccgggccgaccggcatgggcaagtcggtgctgctcgccatattggccatgcagttccggcgctacttcggctcgcggatcttcgccttcgacatggggcgctcgatgcgcgccaccatcctcggccttggcggtgagcactacgacctcggtgccgatggcggcatcgccttccagccactcgcgcgaatagcccacgagggctaccgcacctgggccgccgaatgggtggagggccggctgctgcacgaaggcgtgacggtcggcccggacgagaaggctgccatttggtcggcgctgcgaagccttgccggtgcgccagtggagcagcgcaccatgaccggcttgtcggtgttattgcagtccaacgcgctgcgccaagcgctcgcgccctatgtgttgggcggcgcccacggcaagctgctggacgctgaccacgaccggctgggcatggccgacgtgcagggctttgagatggaagaactgatgcacagccccgccgccgtgcaagcagtgctgcgctacctgttcgcccgcttcgacgaacgttttgacggcgcgcccacgctgctgatcctcgatgaagcgtggctgttcctcgatgagccgtccttcgcggcccgcatccggcaatggctcaagacgctcagaaaaaagaacgtcagcgtcatctttgccacgcagtcgctggccgacatcaaggactcgaccatcgcgccagccatcatcgaaagctgcgcgagcaggatcttcttacctaacccgcaggccaccgagccgcagattcgcacgatctacgaaggcttcggcttgaacagccgccagattgagatcgtggcgaccgcacagcccaagcgcgattactactaccagtcgcgcctcggcaatcgcctgttcgacctcgacctggggcctgtcgcgctcgcattcgcgagcgcatccacccctcaagaccaacgcgacattgaccgcgtgctgacgcaggccggcgctcccggcttcgccggcgcgtggctgcgccatcgcggcctcggcttcgccggcgcgtggctgcgccatcgcggcctcggctgggccgccgacctgctgccgtccgctccggcggcagcttcctttctcgcttctcaaccgctggaggtttcgccatga

SEQ ID NO: 117519 - DNA, 744 bp, Enterobacter cloacae
atgatgaccaagccccgtttgctctctgtctcactcgctgctgtgctgtcggtatcgctgttggccgtgcagcccgcatccgcgctgacggtgttcgacccgtccaacttcgtgcagaacacgctgaccgccgtgcgcacgctggaacagatcaacaaccagatcaaccagctccagaacgaggcgcagatgttgatgaaccaggccaggaacctggcaaatctcgacttcaacatcgtcaaccgcctgcgctcgacgctcgccaccaccgagcgcctgatcgccgaggcgcgcggcttggcctacgacgtgcagagcatggatgccacgttcgcccgcctgtacccggaacagtacgcctccaccatcagcggcgaccgcatggcacaggatgcccgcgaacgctggcagaacaccttgaacggcctgcacaccgcgatgcggatgcaggcgcaggtgtcgcagaacctcgcccaagacgaaagcgcgctggccgacctcgtgagccagagccagtcggccaccggcgcgctgcaagcgatgcaggcgacgaaccagctcctggctttgcaggccaagcagtcgatccaggcgcagcagctccagatcacgcaagaccgggccgcttcgctggaactggcgcggcaagcggcggctatggagcgcgcccgcgaagtgcggcggcgcttcctcggcaccggcacgccgtacacgccgcagtccgtcaacttctacaacaactga

SEQ ID NO: 117520 - DNA, 327 bp, Enterobacter cloacae
atgcgatgcgcttccgtcctgctggccgtgctgctgaccgcgtgcggccagcagccggccgagaacctggccgacgccctggccgcagatccggtgcggctcaaggcgttgcgcgggcaatgcgcggtcgaccggcaggccatgggcgaggatgcctgccgcgccgccgccgaagccttccggcggcgcttcttcgccggccataccgggccggatgaatacaactcgctggctgaactcccgccgattccgccgagcttcgatacgcccgcagatgaattgccagagggcgccgttccgctcactccgcccgaggattcgccatga

SEQ ID NO: 117521 - DNA, 1368 bp, Enterobacter cloacae
atgaacgacgtgaccatcatcgaccgtttcctcgatacgttctcgcgctacatcgactcgggcttcggcttattgcagggcgaagtggcatttctcaccgccacgctcatcgtcatcgacatgacgatcgctggcctgtattgggccatgagccacgccaccggccagggcgacgacgtgatcgccaagctgctgcgcaaggtgctctatgtcggcgcgttcgcctacatcatcggcaacttcaactggctggcgagcatcgtgttccgctcgttcgccggcttgggaatcaccgctaccggctcggccatcacgatggagaactttcttcagccgggccggctggcgaagaccggcatcgacgcagccgcgccgattctggaacagatcggggacatggctgggttccccgaggtgttcgtgaacatcgaccctatcgtggttctgttcatcgcctggctggtggtgatcctctgcttcttcgtgctggccgtacagcttttcatcacgctgatcgagttcaaactgactacgctcgccggcttcgtcttgatcccgtttgcactctggaacaagacctcgttcctcgcggaaaaggtgctaggcaacgtggtgtcgtcaggcatcaaggtcttggtgctggccgtcatcgtcggcattggttccgggctgtttgccgagttccaggtacatcccgacgaaccatcaatcgaccacgcgctggtcgtgatgctggcctcgctcgcgctgctggcgctgggcattttcggccccggtatcgccaccggcctggtgtccggtgcgccacagcttggtgcgggcgcgatggctggtgctgcggtcggggctgtcggcaccggcgttgccatcggagccgccgcaacgggagtgggcggcgccgtcatggctggggcacgaatggccccggcggccgcaaagctggccggtgccggcgcgcgtgccgcgacttcggcggccggcagtgcccgatcggcgttccaggccggttccgctgcggccggcggcggtgccaagggcgcggcggctggcctcggcaatgtcgccaagaccggcgcacaagccgcaggccgcagcgtcacctctggtgcttccgctgttgggcagaaggtggccgactccttccgcgctggctggaacggcacagaagccggcagcgacggtgctggccgcggccagaccgcagacggcaccgcaggctcgcagaagcaagagcaaccggcctgggccaagcggatgcaccgccgccagcaggctacccatgccgcgaccactgccgcccacacgctgcgcgggggcgacggcggcggctccgggcaaggcccgagcctgcgggattccgatacctaa

SEQ ID NO: 117522 - DNA, 705 bp, Enterobacter cloacae
atgcgattcaaacgaccgcaggtgcgctacgccgatacgccgcagcctgccaccccgtatcaagccgccgcccaggtgtgggacgaccgtatcggctccgcccgcgtgcaggcgaagaattggcgcctgatggccttcggctgtctagtgctcgcgctgttgatggccggcggcctggtgtggcgctcggcgcagtccatcgtgacgccctatgtcatcgaggtcgatcaggccgggcaggtgcgcgctgtaggtaaggccgctacgccgtatcggcccggcgacgcgcagatcgcgcaccacctggcgcgcttcgtgacgctggttcgctcgctgtccatcgaccccatcgtggtgcggcagaactggctcgatgcctacgactacaccaccgacaagggcgcggcggtgctcaacgactacgcccgcaccaatgacccattcgcccgcatcggcaaggaatcggtaacggtgcaaatcaccagcgtggttcgcgccagcgacacgtctttcaacgtgcgctggacagagcagcgctatgtcaacggtgcgcccgccggcaccgaacgctggaacgccgtgctttcgaccgtcctgcaaaccccgcgtactgaacagcgcttgcgcaagaacccattgggtatctacgtcaacggcctgtcatggagccgcgaactggattcttccgaaggagccaaaccatga

SEQ ID NO: 117523 - DNA, 993 bp, Enterobacter cloacae
atgaaacttcgtttctgcctttacgtttttcctttgacgctgctggccctcgcgggctgcgcctcgcagggcaagccgccgccgtccatctcgctcgacgagccggtgctggcccagccattgcccgaaccgcccaagcccgtcgaagtcgtcgccgtccctgaaccgctggcgctgccggcgcagttgaagccgctgccggaactcgatgaggcccccgttgcgccggagccggccgacgaaaaggtgcgcgtttcccgtgccaatgcagaagcgcgtatcgcgcctacccgtgagggctacgtcaacgcgattcaggtgtggccgttcaccgatggcgcgctttatcaggtctatgcgtcgccggggcgcgtgacggtggtttcgcttcaaccgggcgaggaactggtgacggtcgccgccggcgataccgtgcgctggatcgtgggcgacacgtccagcggcggcggggccgatctgcgcgtcaatgtgctggtcaagcccatccgttccggcctgaaaaccaatctcgtcatcaccaccagtcggcgcacctacctgctggagctgacctcgaccgagaaggcatggatggcgtcggtatcctgggactacccgaaagaccggatgctcgcgttgcagcgccaggcgcaggctgcgcaggcgacaacgcctgtcgatacgggcctgtcgctggacaagatccgcttccgctacgcggtatcgggcagcaacccgccgtggaagccgctacgcgccttcgatgatggagagaaggtctatatccagtttccggcgggcatcgcccagggcgagttgccgccgctgtttgtcatcggcgcgcagggcgacgggcaattggtgaactaccgtttccgcgcgccgtactacgtcgtggatcgcctgttcggcgcggccgaactgcggctgggcggcgacggcggcgacgtggtgcggatcgagcgcaccgatggcgttgcgcggaggaactga

SEQ ID NO: 117524 - DNA, 1284 bp, Enterobacter cloacae
atgagccaggatgacactcccgaccttgccgcgccgcaggcggcgggcaagatcgctcccgaggcggtcgcgcttcgcgcccagccgcgcccggtcacgcgcctgaatcggcgcacgctggccatcctcgccggcgtcctggcggtggccgtgctcggcgcggtgatgtggtcgctgcaacctcagcggcgcggtgcgggcgagcagaccgagctttacaacgtcgatcgtgtctcgaagtctgaaggactggatgcgctgccgacggactactccaagctgccgccggcgttgccgcctgccgttcccgaactggggccgccgctgccgggcgatcttggcccggccatcgtgaagtcgcagcagccggcgacggccgcctacgcggcccccggccacgacccgaacgatgctctgcgcaaagaagccgaagcggccgcggcctcgtccgtgttcttccgctcgggagggcagaatgcggcgccggtggcgcagacacaggtggccgctgcgccgggcttcgccgccaatgcggtgtttgacccgctggcggccgggccggtctccacggcggcccagcctgctgacccgacagcggtgcaaaaccggcaagaccataaagaggctttcttgaaaggtggctccactgaaacccgtaattccggcaatctgaccctgccaacttcgccgtatcaggtcatggccggaacggtggtcgcaggtgccttggtgacggggattaagtcggacttgcccggcgacgtgatcgccacggtgacggagccggtctatgacacagcctccgggcgcttcctgctgattccgcagggttcgcgcatcctgggcaaatacaacagccaggtcagctacgggcagagccgcgttcaagtcgtctggaaccggatcatcctgccggacacgtcttcgctcacgctcgacaacctggccggcaccgacccagccggctatgccgggctggaggacgatgtggactaccactggggccgcatctttgccggtgcggcactcaccacgctgctgggcgtcggtgccgagctggccgcgccggagaaccggcaggatggtgatcgcgtcatcatcgctgggcgcgacagcgcgcaggacagcatcaatcaggtcggccaggagatgacccggcgcaacctcaacatccagccgaccttaacgcaacggccgggcctgccggttcgcatcatcgtcaaccgggatctggtgctgcggcggtaccagccgctgttcttcaaccgggggacttcacgatga

SEQ ID NO: 117525 - DNA, 246 bp, Enterobacter cloacae
atgagcacgaccaagaagctgcggctcggcccgctgccgaagaccgagagcaccaagctgactttcgtttgcccgaccagcttgaaagccgacctcgaccgctacgccgcgctacacgcgcaggcgtatggcgaggccgttgatgcggcgacgctgatcccgcatatgctggaagcgttcatggcgggggatcgaggattcaggaagggcacggcgacccgcagcacaccaccgaagccgccatga

SEQ ID NO: 117526 - DNA, 435 bp, Enterobacter cloacae; identical to SEQ ID NO: 105725

SEQ ID NO: 117527 - DNA, 609 bp, Enterobacter cloacae; identical to SEQ ID NO: 31743

SEQ ID NO: 117528 - DNA, 354 bp, Enterobacter cloacae; identical to SEQ ID NO: 31742

SEQ ID NO: 117529 - DNA, 3336 bp, Enterobacter cloacae
atgggtgacctggtcagcaaaaataacattgaccgtttagagcgatttcattctttgctggcgggtcagtactggacgtccactgacagcatccctgaagagggtattgtggcaggggatacgctgctcattacgtctttgcgttacgttgaagataagctgcacacagtgattctacgcgcccatccccgcgtttacggtcagactgtagctattgtcactgaagacagcagcggcaaccgtagggaacgtggcaaagaaatgcgagagcatcgcttcctggttaaggattttctgtccagttttgtatttgaacccgaccataaggtaatccgggatgctgaactcagacaagctcaggaagaagtgaatagcctacaggcatcgcttacagccctcgtgagcgatgctcaggggctccgtgaccttgcgattgagcaattaggtacagatgaccgtgaaaaccctgtgacgggccttagcgttgcgttagtgcccccacaagagcagcaggcggtaacctcactggcgattggatcagttcaaaatgctctgtcctctggtatttcagatacccgcattgaacaaatcagagaagcggccttaaaagaagggcagatcagcacagccatcagcaaaatcatcacacaacgaacgcaggcaatcgctaatgccagcaaaagaatgctgccctatttcgaggaagttgcagcggcaagtctggccactacagaagaagccatggaatatgtgaagaaaatccacgatggcgttggcagtctggaactgtataccggcaaagacgttgaggtagtgaatatcgtgaagggtgaatccgctccatcacacctcccgctccaggtcgttcaggcaaagctgatggtggatgaagagctggccgtatggtgcgatctcgatagctggttcgacttctctgatatggaaaaatttcatgaaactttacgaaccagccccgggctggtggagcagatttttccgtccgaacgttccatcgtatgtatggccacaacacgacgttatatcgattaccgcgatccctgggaaaatcatgtccgcaatgacaggaaccgggttgtattccttctggtccgggacggtcaaaatattcatcaggtttactcttcggtagaaagccatcttggggcttcgcagctattcccttccgccagcgaacaggaagcacatttccaggggattgatggcagcaccataaagtttgaggacgtcagttataccgaccgactgaagcagcatgatcttatggcacttcactaccgtcgtttcctgatccttatctgcggcctcgatcaccggctcaaactatttggtgatttctatgataccaataccccttacagttttctgagccttgagttccaggaacggtacttccaatttctgcacgacaaagacggttctggccttttgggtatggctgagacacggccgtctctgcaaagttatcttgaacaggcaaactcatgccttcagtccggatcccgggtaatgtgcaactgggattcgttgatgaacccagtgacagcaccaggagcagttcaggaagacaacagctactctggctataaatggcttgggagaacccataaaaactatgagccggttattgcattccgtcagggagacgatatctgtgtcaacgcaacagtaaacagatactcaacggatcgagatttcaattgtaaggtgaatttgtctttatttaaggagtccagcaggaatgatgctgaactgggtttcctgtgcatggataccattaaagcggaggagctcgaatggtacattcacagacgtaaattcaggtctaatcacctgttttacattcgcttcttcaagatggctttaaattatattcgtgccgagcgtgaggcagaagaaccttaccggcagatgctgagccaggctctggccgatggaaatattggccagcctaatctgagatcagagttgatagatcgatgcattgtagcctggcgagctgataacaggggggcgacgctggaagctgccatgagtacagagaagggctccaaagagctcctgaaccagctctatatgctcgctgatgtggggctcaaacatcttcccggggttcgtaattttattagcagcaaaggctatgagctggtcaggttatcggtaaatgcttcagggaaacttgttgcatatgccgcaccagcaaattttgaatgcgacaaccggatggaagggcatgcctgggttcatcgaatggtacttgctacatcccgaaatgtcttaaacgtcactcatcaacgttttgcgaaaatgaaacacttcttaccagctgaaaacaccctgttcgaagatgaacagctggtggccacatggtcgggcaaaaagactgctttcaaaagcttcgaagagaagcagcgttattttgatacatgctcccgtggcgctcaggctcttaagcagtttttaaagctgaacgatccggtgatttacaccaatctgcttggccagtggattgaggcctatgaaagtatcaatgaaaccagtgagtacgtacagcaagtaagcctaatggctcctgttgcggtcaagagcgaaaaaggtaaagccagcctcatctatattggcactaaagacctggccgactggttttatcagaaagcgccgacacccgagttgcaggcgctgttccttgaggaatacctgtccaaatttgaaaataaagaggtcaataaagaaaagctactttcacgcagaaataccgctctgtctctcagtttttacaccatggacaacggggaagtaccagatgaaatcctcgtcaccaaatcagttgataatgccagacggtggtattcaggaatgttcacaagcatgccaacgatgttaaatgaccagtggtcctgccatgttgcgcatttttcccgtaacggaaaactctatttgacgcctgatctggtcactgatgaaggggaacctggttttgatgaaatactcgggtatccgcgcccggaggggctggtaccggtaaccgtgtgtgagtttgaaattgaccactttaaccgacgtggcattgatgcgaatggtgataaggtgaatattacacagtgggtcgatatttatcagggtgagcgtgaggttacggaactgctggggcctatttctgaagaaggggtgaacatcaaaacctacaggatggacactcttgagcaggcgatgaaaaacatctcccggggctcgacgcgcctcagaccgtcaacggagaatagcgagtggcaacagccagcagaaggtgtgagccgctatgtacttcggtcatggtaa

SEQ ID NO: 117530 - DNA, 516 bp, Enterobacter cloacae
atggtagaagcacgttatcaaggcaagcctgttagcagtcttcctgaagaagcttttgctgaagggttatcgcgatccggtttaagccccgttctgctactggcatccccgaccacagtacccgttaccacggatgagcgctggtggctcgcaaaggaaaacgtgtcaggacattacggcaggattttttatgctgcggtgcgggagttggtcataaggtcggatatcatctcagtagtgagaagtattgcagatgagaatttcacgtccgaacatatggggtacttcgagcgacttacctctgatgaaaaagaagtcgtgtttagtgattacctgcgcactctcgctgaaggcggtcttacctgcactgagaagaatctcgtcaaactgacgcaagatttatacccgattgatgcaactcctgacaacattagaaagctatccacggacagggatgcactgaacgaactacacatcgatggtatggtactttttattaccggccctgcgctttga

SEQ ID NO: 117531 - DNA, 492 bp, Enterobacter cloacae
atgatagtaaataaaaacaggtttatgcataaaaacgggaaaaggtttaagtccatcggaaggtatttaagattttggcaagcagtagcgtcctctggtttacccatggacatggtaatacgggaaaaaccatatcaacttatggtcgctttgattgctttatatacggccatccctgttgttacaatagtaattttatctggtcagcaatcgcataagttggaactaattgctgtgcatttcagtacaattatcacgatggtgtttgttttgcgtcgaaagatggggaaacgttggctggatttatttgaagaaaaattagccatttataaacctaatgataaactcgcgcttagcgaattacacgaaagcatacgtgagaaaaatgggctagacttgcaggatttacaagattggtactggaaagagaagatgacatatgagtatcacaaagaacgtaaaacaactataagctatcaaaaattcaagtag

SEQ ID NO: 117532 - DNA, 219 bp, Enterobacter cloacae
atgaacattaccgacaaagaacttagctcaaatacagtgagacagtatggatggaacttaggagagttcaatcactcaacgccttttacatctcattttatttatatcaccgactatcataaagataatacatggatgatttcactttcgcaggaggattttaatacaaccaaaattttaacatcgttaagtctagggaaggtgcgaacaagttcctga

SEQ ID NO: 117533 - DNA, 1398 bp, Enterobacter cloacae
atgacacataatactgatccgttaaccctgaaattgagcctgcgagagaagtgcgcctacgggatgggtgattttggctcgagcctgatgctgtgtattggcacgctgtatctgctaaagttttacacggacgagctgggcatgcccgcgttctacggcggcatcatttttctggtcgccaagttctttaccgcgtttaccgacatgctgaccggggtgctgctggactcccggcgtaatatcggcgcgcggggcaaattccggccattcattctctacgcctccgttccggtggcgctggtggccacggcgcagtttatggccaacgactttagcctgacggtgaaaacggccctcgccaccgtgctcttcatgatgtttggcctctgctacagcctgatgaactgcgcctacggtgcaatggttccggccatcaccaaaaacccgaacgagcgcgcgcagcttgcggcgtggcgtcagggcggcgcaacggtaggactgttgctctgtactgtcggctttatgccgattcaggcgctgttcgtcagccagccctcactcggctatctggtggccgcgctggtgttcgtcaccgggggactgttctgcatgtggtggtgctacagcggggtgaaagagcgctacgtcgagcttacgcccgatcaccataagcccggcattctgaaatcgttctgcgcgattttccgcaatccgccgctgctggtgctgtgcatcgccaacctgtgtaccctcgccgcgtttaacatcaagctggcgattcaggtctattacacccagtacgtgcagaacgatctgcatctcctgtcgtggatgggctttttcagcatgggttgcattctgattggcgtgtttctggtgcctggcgcggtgaagcgctttggcaagaagccggtctatctgggcgggctgacgctgtgggcggtgggcgacgtgctgaacttcgtctggggaaccagttccctgctgttcgtgctcttttcctgcatggcctttttcggcaccgcgtttgtgaacagcctgaactgggcgctggtgccggatacggttgattacggcgagtggaaaaccgggatccgcgccgaaggctcggtgtataccggctataccttctcgcgcaaaatctccgccgcgctcgccggtttcctgcccgggattatgctgacccagattggctacattccccatgccgtgcagagcgcaggcacgctgcttgggttgcgtcagcttattttcctctggccgtgcggcctggcgatcgttgccgccgtgaccatggggctgttttataaactcaacgaagcgcgcttcgcctttattatcgaggagattggaaaacggaatctatggtcactcccgtttttgcaacaccgattttga

SEQ ID NO: 117534 - DNA, 1383 bp, Enterobacter cloacae
atgagtcaacatacttctgatccggcaaccctgcgcctgccgtttaaagaaaaactcgcctacgggatgggcgatctcggctctaacatcctgcttgatatcggcacgctgtatctgctgaagttctacaccgacgtgctggggctgcctggcacctacggcgggattatcttcctgattgcaaagttttttaccgccttcaccgacatgggcaccgggatcatgctcgattcccggcgcaagatcggcccgaaagggaaattccgcccgttcgtgctgtatgcagccttcccggtaacgttgctggcgatagctaacttcgtcggcacaccgtttgaaattaccggtaaaacggtgatggcgacggtgctgttcatgctgtacggcctgttcttcagcatgatgaactgctcctacggcgcgatggtgcccgccattaccaaaaacccggacgagcgtgcttcgctggccgcctggcgccagggcggcgccacgctgggtctgctgctctgtacggtgggctttgtcccggtgatgaacctgattgagggcaacgaccagcttggctacatctttgccgccaccctcttctcgctgttcgggttgttctttatgtggtggtgctataaaggcgtaaccgagcgttacgtcgagacgcagcctgctaacccggcgcagaaaccggggctgttgcagtcgtttcgcgccatcgccgggaaccgtccgctgtttatcctgtgcatcgctaacctgtgcacgctgggcgcctttaacgttaagctcgccattcaggtctactacacgcagtacgtactgaacgacccgatcctgctgtcgtacatgggcttcttcagcatgggctgtatttttatcggcgtctttatgatgcccggcgcggtgcggcgcttcggcaagaaaaaggtctacatcagcgggctgacgatttgggtggcgggcgatctgcttaactacttcttcggcggcggctcggtgagcttcgtggcgttctcctgcctggcgttcttcggctccgcgttcgtgaacagcctgaactgggcgctggtgtccgataccgtggaatacggcgagtggcgcaccggcgtacgctccgaggggacggtctacaccggctttaccttcttccgtaaggtatcgcaggcgctggcgggcttcttcccggggatcatgctcacgcagatcggctatgtgcccaacgtggtgcaatccgccggcacggttgaagggctacggcagctgatatttatctatccgagtctgctggcagtcatcaccatcgtggcgatgggctgcttctacaaccttaacgagaagatgtatgtgcgcatcgtggaagaaattgagctgcgcaaacgtacggcataa

SEQ ID NO: 117535 - DNA, 2025 bp, Enterobacter cloacae
atgcgtaccctacacaatattgacctgaaaaataacgaaagtggtttcaccctgcgctggcaggaccgtctgattttatcccactctgcggatgccccctgcctgtggatcggtgcaggcgaagcggatatcgagatgtttcgcggcaatttcagcatcaaagacaagcttaacgaaaagattgccctgacgaacgcgaccgtcacgcagcaaagcgcgggctgggcaatccgctttacccgcggcgacgcggtgagcgcgacgctgctggtgggcgtggatggtgagggccgtctggagctgaagctgaaaaatgacgccgccagccataaccgcatctggctgcggctggcggctcagcctgacgatcatatctacggctgcggcgagcagttctcgtatttcgatctgcgcggcaagccgttcccgctgtggaccagcgagcagggcgtgggccgcaacaagcagacctacgtcacctggcaggccgactgcaaagagaacgcgggcggcgattactactggaccttcttcccacagcctaccttcgtgagcacccagaagtactactgccacgtggataacagctgttatatgaacttcgacttcagcgcgccggacttccacgagctggcattctgggaagataacgccacgctgcgcttcgaatgcgcagaaacctacgtcgatctgctggaaaaactgaccggcctgctggggcgtcaaccggagctgccggactgggtttacgacggcgtgacgctgggtattcagggcggcaccgaggtgtgtcagcagaagctcgacgccatgcgcgagggcggcgtgaaggtaaacggcatctgggcacaggactggtccggcatccggatgacctcctttggcaaacgcgtaatgtggaactggaagtggaacagcgcgctctatccgcagcttgatgagcggattgcgcagtggaaagaggaaggcgtgcagttcctctcctatatcaacccgtacgtcgccagcgataaagatctctgcgaagaggcgtcgaagcgcggctatctgaccaaagatgccgacggcaaggattaccacgttgagttcggcgagttctacgcgggcgttatcgacctgactaacccggaagcctacagctggtacaaagaggtgatcaaaaagaacctgatcgaactgggctgcggcggctggatggccgatttcggggaatatctgccgaccgataccttcctgcacaacggcgtgagcgcggagatcatgcataacgcctggcctgccctgtgggcgaaatgtaactacgaagcgctggaggagaccggcaagctcggggagatcctgttcttcatgcgcgcgggctacaccggtagccagaaacactcggtgatgatgtgggcgggggatcagaacgtcgactggagcctggacgatggtctggcgtccgtcgtaccggcggcgctgtcgctggcgatgaccgggcacgggctgcaccacagcgacattggcggctatacgaccctcttcgagatgaagcgcagcaaagagctgctgctgcgctggtgcgacttcagcgcctttacgccgatgatgcgtacccacgagggcaaccgccctggcgataactggcagttcgatggcgacgcggaaactatcgcccacttcgcgcgcatgaccaccgtcttcaccactctgaagccgtacatcaaagctgcggtagcgcagaatgcgaagagcggcctaccggtgatgcgcccgctgttcctgcacttcgaggacgacgcgcgcgcctacacgctgaaataccagtacctgtttggccgcgatctgctggtggcgccggttcatgaagagggacgccgcgactggtcgctctatctgccgcaggacacctgggtcaatgcgtggaccggggaaacctgccagggcggtgccatcaccgttgatgccccgctcggcaaaccgccggtcttctatcgccagcacagcgaatgggcagatctgtttagcaccttacgtcatatctga

SEQ ID NO: 117536 - DNA, 1242 bp, Enterobacter cloacae
atgaaatggtttaacaccctgagccataaccgctggctcgaacaagagaccgaccgcattctcgatttcggtaaaaacgccgccgtaccgaccggctttggctggctgggcaataacgggcaggtgcgcagcgatatgggcacccatctgtggatcaccgcccgcatgctgcacgtttacgcggtggcggcgaacatggggcgccccggcgcgtacgccctggttgagcacggcattaatgccctgaacggtccgctgcgcgataaacagcacggcggctggtacgcctgcgtaaacgatgaaggcgtgattgatgcgtccaagcagggctatcagcacttcttcgtcctgctgggcgcggcgagcgccgtgaccaccggccaccccgaggcacgcaagctgctggacgatgccatcgaggtgattgagcgctacttctggagcgaacaggagcagatgtgcctggagtcctgggacgaagccttcagcaagacggaagattaccgcggcggtaacgccaatatgcacgccgtggaagccttcctcatcgtctatgacgtgacccacgaccggaaatggctcgaccgcgccctgcgcatcgcctcggtgattattcacgacgtggcgcgcaaaggggagtaccgcgttaacgagcatttcgacaccagctggaacccgatccgcgattacaacatcgataaccctgcccaccgcttccgcgcctacggcggcacgccggggcactggatcgagtggggccgcctgatgctgcacctgcgtgccgcgctggaagcccgctttgaaaccccgccggagtggctgctggaagatgcgaaaggcctgtttcacgccactattcgcgacgcctgggcacccgacggggcggacggctttgtctactccgtgggctgggacggcaagcctatcgtgcgcgaacgcgtgcgctggccaatcgtcgaggcgatgggcacggcctatgccctctataccgtgaccggcgaggcgcagtacgaagcctggtatcagaaatggtgggattactgcatcaagtacctgatggattacgaaaacggttcatggtggcaggagctggacaccaataacgaagtgaccaccaaagtctgggacggcaagcaggatatttaccacctgctgcactgcctggtgatcccccgcctgccgctggcgccgggcttagcccctgccgtagccgccggattactggatagcctggccaaataa

SEQ ID NO: 117537 - DNA, 876 bp, Enterobacter cloacae
atgacgatgtacaccctgaaagatatcacccgaccttccggcggttttgcgatgctggccgtggatcagcgcgaagcgatgcgcctgatgtttgctgccgcaggcgcgccggtgccggtaaccgaccagcacctgacggatttcaaggtcaatgcggcgaaaattctgtcgccgtacgcctctgcgatcctcgtcgaccagcagttctgctaccgccagattgtcgagcagcaggccgtggccaaaagctgcgcaatgattgtcgccgccgacgagtttatcccggggaacggcattccggtcgacagcgtggtgatcgacaagaacgttgacgcgcaggcggtcaaacgcgatggcggtaaggcgctgaagctgctggtgctgtggcgcagcgatgaagatccgcagcagcgcctggaaatggtgaaagcgttcaatacgctgtgccacgacaacgggctgctgagcattatcgagccggtggtgcgtcccccgcgccgcggcgccgcgtttgaccgcgagcaggcgattatcgatgcggccaaagagctgggcgacagcggtgccgacctctacaaagtggaaatgccgctgtttggtaagggcacgcagcacgagctactgacggcctcgcagaagctgaacgagaacatcgccatgccgtgggtgatcctctcctccggcgtggacgataagttattcccgcgtgccgtaagcgtcgccatgcaggcgggggcatcgggctttttagccgggcgcgccgtctggtcatcggtgattggcctgccggacaccgagctgatgctgcgtgatatttccgtgccaaaacttcagcgtctgggtgagatcgtcgacgaaatgatggctcgccgttaa

SEQ ID NO: 117538 - DNA, 891 bp, Enterobacter cloacae
atgtcagcaatcgcatttatcggtttagggcagatgggcgcgccaatggcgaagaatctgttgaagcaaggtcatcagcttaacgtctttgacgtgaacccgcaggcggttcaggcgctggtagagagcggtgcccgggcggcggctacgcccgcacaggcagcaacggatgccgaattcgtgatcactatgctgccaaacggcgacctggtgcgcagcgtgctgttcggcaagcacggcgtgtgcgaagggttatcccgcgacgcgctggtgattgatatgtccaccattcacccgctgcaaaccgacgcgctgatccgcgacatggctgagcaaggcttcagcctgatggacgtgcccgtcggacgcacctctgatcatgccatcgccggtacgctgctcctgctggcgggcggtacggcgcagcaggttgagcgcgccaccaccgtcttaatggcgatgggcaatgaactgattaacgctggcgggccgggcatgggcatccgcgtgaagctcatcaataactacatgagcatcgccctgaacgccctttccgccgaagccgccgtactgtgcgaagcgcttggcctctcctttgacgtggcgctcaaggtgatgagcggcacgccggcgggtaaaggccacttcaccacgtcatggccgaacaaggtactgaaaggggatctttcacccgcctttatgatcgaccttgcgcataaggatctggggatcgccctcgacgtggccaaccagctccacgttccgatgccgctgggcgcggcttcccgcgaagtttacaaccaggcacgcgccgccgggcgcgggcgcgaagactggacagccattcttgaacaggttcgcgcatctgccgggctgaaaaaatcacactga

SEQ ID NO: 117539 - DNA, 897 bp, Enterobacter cloacae
atgactcgcatcgtttgtgtcggcattaccgtgctggatcgcatctggtatctcgatgatttaccgaaagaaggtgggaaatatgtcgcaaaagactatacggaagtgggcggcggcccggcggcaacggcggcagtggcagccgcaaaactgggcgcggaagtggattttattggccgggtgggggacgacgataccggcagacgactgcttgcggagctggaatccctgggggtgaacacccgctatacgcgcatagttaagggagcccgatcgtcgcaatcggcggtgctggtggacgcaggtggggaaagagtgattgccaactaccccagccccgatctccctgcggcggcagactggctgcatgaaatcgacttctctcagtgggacattgtcttagccgacgtgcgctggcatgacggggcaaaacaggcatttaccctggcccgccagcagggcgtaccgacgctgctggatgcggatgtcaccccgcaggacatcgcggatctgattgccttaagcgaccacgcggccttctccgcgccaggactgcggcggttaacgcagctggatgaaaccgaaaacgcgctgaagaaagcacaaacgctcacaaatggacatgtgtatgttacgcaggggcgagacggctgtttctggctggaaaacgacacgctatgtcatcagcctggttttgaagtgaacgtcattgataccaccggggcgggcgacgtgttccacggtgcgctggcggtcagcctggggcagaaattacccgccgcagacgccgtgcgttttgccagcgccgtcgcagcactgaaatgtacaaagcccggcgggcgcgcgggtatacccgactgtgatcaaacccgctcttttttgtcactttttgtataa

SEQ ID NO: 117540 - DNA, 801 bp, Enterobacter cloacae
atgagccttaccgaactgaccggcaacccgcgtcacgatcagctgctgacgctgattgccgatcgcggctatatgaacattgatgaactggcgcagctgctggatgtctccacgcaaaccgtgcgccgggatatccgcaagctcagcgagcaagggctgatcacccgtcatcacggcggcgcgggcagggcatccagcgtggtcaacacggcgttcgaacagcgtgaagtctcgcttaccgaagagaaacgggcgattgccgaagcgattgcggactatattcccgacggttcgaccatttttatcaccatcgggacgaccgtggagcacgttgcccgggcactgcttaaccataatcatctgcgcatcatcactaacagcctgcgggtggcgcacattctttataagaatccgcgctttgaggtgatggtgcccggcggtacgctgcgcccgcataacggcggcattatcggtcctgcggcaacggcgttcgtgtcaggatttcgcgcagattacctggtcaccagcgtcggggcgatagagcacgacggcgcgatgatggaatttgacgttaacgaagccagcgtggtgaaaaccatgatcgctcactcccgtcacattttactggcggccgatcatacgaaataccacgcctccgcggcggttgaaatcggcaacgtggcgcaggcgacggcgctgttcaccgatgagctgcccggcccggcgctgcaaaatcacctcaaatccagcaaggttgaggttgtcgaagtcaattccggagaagagcagcaggctggctga

SEQ ID NO: 117541 - DNA, 600 bp, Enterobacter cloacae
atgctttatatctttgacttaggaaatgtaatcgtcgatatcgattttaaccgggtgctgggcgcatggagcgattttagccgtgttccgctggcgacgttaaagcagaatttcgcgatgggtgagactttccatctgcacgagcgcggtgagatcagcgatgaagcgttcgcagagcgtttctgtcaggaaatgggtctctcgttaagctacgagcagttttcccacggttggcaggccatatttgtcgcgatccgccccgaagtgatcgacatcatgcacaagctgcgcgagcaggggcatcgtgtcgtcgtcctgtcgaataccaaccgcctgcataccaccttctggccggatgaatacccggaaatccacgcggcggcagataaggtgtatctctcccaggagatggggatgcgtaaacctgaggcgcgcatctatcaggcggtattgcaggaagaaggattcacggcggcggatgcggtcttttttgacgacaacgccgataatatagaaggggctaatcagttaggtatcacctccattctggtgaccggaaaagagacgataccgaactactttgcgaagcagttatgctaa

SEQ ID NO: 117542 - DNA, 882 bp, Enterobacter cloacae
atgctaaaaaccgttcatcaaaaagccaatcaccacacgcgcccgctgagggcgtggctgaaactcctctggcatcgcattgacgaggacaacatgaccacgctggcgggcaatctcgcttacgtgtccttgctctcgctggtgccgctggtggcggtgatttttgcgcttttttcggcgtttccgatgtttgccgatgtgagcatgcagcttcgccattttgttttcgcgaactttattcctgccaccggcgatgtgatccagaactacattgaacagtttgtcgcaaactccagcaagatgacggcggtgggggcatgtgggcttattgttaccgcgctgctgctgatgtactccatcgacagtgcgctcaacaccatctggcggagcaaaaaagtccgcccgaaggtttactcctttgccgtctactggatgattttaacccttggcccattgctggcgggggcaagcctggcgatcagttcctaccttctttcgctgcgctgggcgaccgacttaaacagcgtgatcgataacgtgctgcgtatattcccgctgattttatcgtggctttcgttctggctgctctacagcgtggtaccaaccacgcgcgtacccaaccgggatgccgtggtgggtgcgctggtcgcggcgttgctctttgagctgggcaagaaaggattcgcgctttatatcaccatgttcccctcttatcagctgatttacggcgtgctggcggtgatccccattttgtttgtctgggtctactggacgtggtgtatcgtcttgcttggcgccgaaataactgtcactctcggggtctaccgcgaactcaaaaaagcagcagaagctgaaaaacaacaagaagcagaccaaccatga

SEQ ID NO: 117543 - DNA, 438 bp, Enterobacter cloacae
atgattgcattgattcagcgcgtaacccgtgccagcgtcaccgtggcggatgaggtgacgggtgaaattggcccaggacttttggtgctcctgggtgtcgaaaaggatgacgacgaacaaaaagccaaccgcttgtgtgagcgcgtactgggctaccgcattttcagcgatgcggaaggcaagatgaacctgaacgttcagcaggcgggcggcagcgtgctggtggtctcccagtttacgctggccgcggataccgaacgcggcatgcgcccgagtttttcgaagggcgcggcaccggatcgcgcagaagccctttacgagtactttgttgagcgctgtcgccaacaggacatgaatacacaaaccggacgattcgctgcggatatgcaggtttcgctggtgaacgatggccccgtcacattctggctccaggtatga

SEQ ID NO: 117544 - DNA, 942 bp, Enterobacter cloacae
atgtatcaccttcgagtaccgcaaacggaagaagaattagacgcttattaccatttccgctgggaaatgctgcgcaagccactgcatcaacctaaaggctctgaacgcgacgcctgggacgcgatggcgcaccaccagatggtggttgatgaagagggcaacctcgtcgccgttgggcgactgtatatcaatgccgacaacgaagcttcaatccgctttatggccgttcatccctccgtgcaggacaaaggccttggaacgctgatggctatgacgctggaatccgttgcccgtcaggaaggggtcaagcgtgtcacctgtagcgcccgcgaagatgccgttgagttctttgccaagcttggtttcgtgaatcagggggaaatcaccgccccgcaaactacgccgattcgtcactttttgatgatcaaacccatcgccacgctggacgatattctccatcgcgccgactggtgcgggcagctccagcaggcatggtatcagcacattccgctcagtgaaaaaatgggtgtgcgtattcagcagtacaccgggcaaaaatttattaccaccatgccggaaaccggcaaccagaacccgcaccataccctgtttgccggcagcctgttttcactcgccacgctcaccggctggggactgatctggctgatgctgcgcgaacgtcatctcggcggcaccattattctggccgatgcccatatccgctacagcgccccgatcagcggcaagccgagcgcggttgctgacctgggcgcactgggcggcgatctcgaccgtctggcgcgtggacgtaaagcacgcgtacagatgcaggttgagctgttcggcgatgaaacgccaggcgcggtgtttgaaggcacctatatcgttctgcctgcgaagccgtatggcgcgtatgaagagggcgggaacgaggaggaatag

SEQ ID NO: 117545 - DNA, 921 bp, Enterobacter cloacae
atggcactggaaaagggtattgataagctggtacaggagtttattgccacaggacgaccttcctcgcgaaagcagagtattgatgaccggagaagcggatatgtcgccagcacagcgctagccggggaaacagaaacgcgtgtccaggttgaaacgcttgttcttgaggatatgacctttcgggtattttcgcctttcaatgcccctgaaacgttatcttgtgccctctactatcatggcggttgttttgtcagcggtgggtttgaaacccatgataatcagcttcgccaactggcgttttacggtaactgccgggtcattgcggttcagtacagactcgcacccgagcatactttccccgctgcgcatgacgatgcagagagagcggcagatcttgtctggcaaaatgcagaacaattaggtgtggataaaaaccggattacactttgtggagacagcgcgggaggtcatcttgcgctggtaacgtcattgcggcttaaggccaaaggtctctgggatcccgcgcagctcattcttatctaccccatgctcgacgctacggccagttttgaaagctataccctcaatggcatggattacgtgattactcgcgatacccttttgagcggctatgaaatgtatctggctggagccgaccgtcaacatcctgaagtcagcccactgtggcgcaacgactttagcggtctgccgaaggtccatattgttaccgcggaatatgatccgttacgcgacgaaggcgaggcgctttatcagcgcctcacggagcaaggcgtgaagtgtaccgctcaacgatggtggggtgtaatacacggcttcttccagttgggtggaattagccagtcagcgcgagacgttatgcgagatattgcctggcgcattaaccatgccgggcgagagtga

SEQ ID NO: 117546 - DNA, 243 bp, Enterobacter cloacae
atgagcgttttggcggaacttgatatgggcagaatacttatcgatttgtctgatgacgtgattcaacgtttggataatctcaagcaattgcgaaatcaaccacgtgctgaactgcttcgggaagcgatagagctgtatctcgaccagcagagttcttctgttatccgaaatgcgcttggtctgtggggagacagaaaagaggacgggcttgagtatgaacgcaagctgcgtgaggagtggtaa

SEQ ID NO: 117547 - DNA, 372 bp, Enterobacter cloacae
atggagcacatggcagtgtttgataccaatattctcattgatctcttcaacaaccgtattgaagctgcggatgcgattgagcataccgcgtcgcatcgtgccatcagcttaattacctggatggaagtaatggtgagcgctcgcaggcatggtcatgaagcgaaaacggcagccgttatgggcgcttttgaaattattgatgtgtctcgggatattgcggaaagaagcgttttactacgtgagaagcatggaatgaaactgcctgatgctatcattctggccacagcgcagagcagaaaatgtccgttgatttctcgcaacacgaaagattttgcgggtattgacgaggtccttacgccttaccaggtgtag

SEQ ID NO: 117548 - DNA, 930 bp, Enterobacter cloacae
atgagtattcgcataatcccgcaagatgagctggggtcgagcgagaaacgtacggcggagtatattccgccgttgttattccccagactcaagaacctctacaaccgccgcgcagagcgtctgcgcgagctagcagagaacaacccgctgggcgattttctgcgttttgccgcgctggtcgcccatgcgcaggaagtggtgctgtacgaccatccgctgcaaatggacctgaccgcacgcatcaaagaagccaacgagcagggcaaaccgccgctggatattcacgtcctgccgcgcgacaagcactggcataagctgctgcattccctgatcgccgagctgaagcccgagatgagcggcacggcgctggcagtcattgagaacctggaaaaagcctccgatcaggagctggaagagatggcgagcgcgctgtttgcttccgacttctcactggtgagcagcgataaagcgccgttcatctgggctgcgctgtcgctctactgggcgcaaatggcgagcctgattccaggtaaagcccgcgccgaatacggcgaagcgcgccagttctgcccggtgtgtggttcaatgccggtctccagcatggtgcaaatcggcaccactcaggggctgcgctacctgcactgcaacctgtgtgaaaccgagtggcacgtggtgcgcatcaagtgcagcaactgcgaacagacccgcgatctgaactactggtcgctggaaaatgaagacgcggcggtgaaagcggagagctgcggcgactgcgggacctacctgaagattctgtatcaggaaaaagacccgaaagtcgaagccgtggccgacgatctcgcctcgctgattctggacgcgaagatggagcaggagggctttgcccgcagctcgatcaacccgttcctgttcccgggtgaaggggagtaa

SEQ ID NO: 117549 - DNA, 636 bp, Enterobacter cloacae
atgagaaaacgtgacaccatcgtgcgctacaccgcgccggaacgcatcaaccactgggtcaccgccttctgcttcatgctggcggcgataagcgggctggggttcttcttcccgtccttcaactggctgatgcagatactgggcacgccgcagctggcgcgcatccttcacccgttcgtgggtgtggtgatgtttgcctcgttcatcatcatgtttttccgctactggcaccataacctaatcaatcgggatgatatcttttgggcgaagaatattcgtaagatcgtcgtcaacgaggaagtgggtgataccgggcgttataacttcggccagaaatgcgtattctgggcggcgattatcttcctggtcctgttgctggtgagcggcgtgatcatctggcgtccgtactttgcgcctgctttctcaatcccggtgatccgattcgcgctgatgctgcattcatttgccgcagtggcgttaattgtggttatcatggtgcatatttacgccgccctctgggtgaaaggcaccattaccgcgatggtggaaggctgggtcaccaaaacgtgggcgaagaaacatcacccgcgctggtaccgagaagtccgccagaaacaggaaaagtcatctgaatga

SEQ ID NO: 117550 - DNA, 903 bp, Enterobacter cloacae
atggcttatcaatctcaagacattatccgtcgttccgcgactaacggtttcacgcccgcgcctcaggcgcgggaccaccagcaggaagtggcgaagcttatcgacgtgaccacctgtatcggctgtaaagcctgtcaggtggcctgttcagagtggaacgacatccgtgacgaagtgggtcacaacgtcggggtgtacgacaacccggcggacctgaccgccaagtcctggacggtaatgcgtttctcggaagtggagcagaacgacaaactggaatggcttatccgcaaagatggctgtatgcactgtgcggatccgggctgcctgaaggcgtgtccgtcagaaggggctatcattcagtatgccaacggcatcgtcgacttccagtccgagcagtgtattggctgcggctattgcatcgcgggttgtccgtttgacgtgccgcgcctgaacccggaagacaaccgcgtctacaaatgtacgctgtgcgttgaccgcgtaaatgtcggccaggagccagcgtgcgtgaagacctgtccaactggcgctatccactttggctccaaagaggatatgaaaacgctggcggcagagcgcgtgggcgagctgaaaacccgtggttacgataacgcaggcctgtacgatccggccggggttggcggtacgcacgtgatgtacgtgctgcaccacgccgacaagccgaacctgtatcacggcctgccggagaacccggaaatcagcgcgaccgtgaagttctggaaaggtatctggaaaccgctggccgcggtcggttttgcggccaccttcgcagcgagcatcttccactacgtcggcgttggtccgaaccgtgcggaagaggaagacgacaacctgcatgaagagaaagacgaggtgcgcaaatga

SEQ ID NO: 117551 - DNA, 2415 bp, Enterobacter cloacae
atgaccaaccactgggtcgacatcaaaaacgccaacctcattgtggtgatgggcggtaacgccgctgaagcgcaccctgtcgggttccgctgggcgatggaagccaaaatccacaacggcgcgaagctgattgtgatcgatccccgctttacgcgtacagcgtcagtggcggatttctacaccccaattcgttcaggtactgacatcactttcctgtcaggcgtattgctgtacctgatgaccaacgaaaaatataaccgcgagtacaccgaagcttataccaacgccagcctgatcgtgcgtgaggattaccacttcgaagatggcctgttcagcggttatgacgccgaaaaacgcaaatatgacaaaaccagctggaactacgagctggacgaaaacggctttgcgaagcgcgacaccaccctgcaacacccgcgctgcgtgtggaacctgctgaaagagcacgtgtcccgctatacgccggaggttgtcgaaaacatctgtgggacgccgaaggcggacttcctgaaggtgtgcgagctgatagcggaaaccagcgcgaaagataaaaccgcgtcgttcctgtatgcgctcggctggacgcagcactccatcggcgcgcagaacatccgcaccatggcgatggttcagctgctcctcggcaacatggggatggcaggcggcggcgtgaacgccctgcgcggtcactccaacattcagggtctgaccgacctcggcctgctgtctcagagcctgacgggttacatgaacctgccgagcgagaaacagaccgacctgcaaacctacctgacggccagcacgccaaaaccgctgctcgaaggccaggtgaactactggggcaactatccgaagttcttcgtctcgctgatgaaagccttctacggcgacaaggcgacggcggaaaacagctggggctttgactggctgccgaagtgggacaaaggttacgacgtacttcagtacttcgaaatgatgcaccaaggccaggtcaacggctatatctgccagggctttaacccggtggcgtcgttcccgaacaagaacaaggttgtcgagtctctgtcgaagctgaagttcctggtgacgattgacccgctcaataccgaaacgtcgacgttctggcagaaccacggtgagtcgaacgatgtcgatccgtcgaagattcagaccgaagtgttccgtctgccgtctacctgcttcgcggaagagaacgggtctatcgtcaactccggccgctggttgcagtggcactggaaaggcgcggatgccccgggcatcgccttgaacgacggcgagatcctggccggtatcttcttacgtctgcgtaaaatgtacgcggctgaaggcggcgcaacgcctgagccggtgctgaacatgacctggaactactcgacgccagagaatccgtctccggaagaagtggcgatggagagcaacggtaaggcgctggcggacgttatcgacccggcgaccggtgcggtgctggcgaagaaaggcgatcagctcagcacctttgcgcacctgcgcgatgacggtacgacctccagcggctgctggatctttgccggtagctggacgccgaaaggcaaccagatggccaaccgcgataacgccgacccgtcgggcctcggcaatacgctgggctgggcatgggcatggccgcttaaccgccgcatcctctataaccgcgcctcagctgacccgcagggcaacccgtgggatccgaagcgtcagctgctgaagtgggacggcgcgaaatggggcggcgtggatattccggactacagcactgccgcaccaggcagcgatgtcgggccgtttatcatgcagcctgaagggatggggcgcctgtttgctatcgataagatggcggaaggtccgttcccggaacactacgagccgtttgagacgccgctgggtaccaacccgctgcacccgaacgtggtctctaacccggcagcccgcatcttcaagggcgattttgaagcgctgggtaaaaaggacaagttcccgtatgtcggcaccacttaccgtctgaccgagcacttccactactggaccaagcacgcgttgctgaatgccatcgcgcagccggagcagtttgtggagatcggcgagaagctggcgaacaaactcggcattgcccatggcgataccgtgaaggtctcctctaaccgcggctacatcaaagccaaggcggtggtgaccaagcgtattcgcacgctgaacgttcacggtcagcaggtggataccatcggcatcccaattcactggggttatgagggcgtggcgaagaaagggttcattgcgaacaccctgacgccgttcgtcggtgatgcgaacacgcagacgccggagtttaaggccttcctcgtgaacgtggaaaaggtgtaa

SEQ ID NO: 117552 - DNA, 588 bp, Enterobacter cloacae
atgcaggtcagcagaaggcagttctttaagatctgcgctggcggtatggcaggcaccacggcggcggcactgggctttgcgcccggtgtagcgctggcggaaacacggcagtataaactgctgcgcacccgcgaaacccgtaacacctgtacgtactgctccgtcggctgtgggctgttaatgtatagcctcggcgacggtgcgaaaaacgccaaagcatccattttccacatcgaaggcgatccggatcacccggtcaaccgtggtgcgctgtgtccgaaaggggccggtctggtagattttatccactccgaaagccgcctgaagtttcctgagtatcgcgctcccggctctgacaaatggcagcaaatcagctgggaggaagcgttcgatcgcatcgctaagctgatgaaagaagaccgcgatgccaactttatcgcgaagaatgccgaaggcaccaccgttaaccgctggctctccaccggcatgctgtgtgcttcagcgtcgagtaacgaaaccggctatttaacccagaaatttacgcgcgcactcggtatgctcgcggtcgacaaccaggcgcgtgtctga

SEQ ID NO: 117553 - DNA, 837 bp, Enterobacter cloacae
gtgtctaaacaaaaccgtgctgcccacgtgtcgccactgcctgcgggcattgtggaactgtcggtacacagaccgcctcacatttcacatgccacgccggattttctggcggaagaggtccccgttgccctggtttacaacgggatttcgcatgtggtgatgatggcttcgccgaaagatctggaactgttcgccataggtttttccctctcggaaggcatcattgcgcatccgcaggagatctacggtatggatgtggttcaggcctgtaatggtcttgaagtacaaatcgaactctccagtcgtcgctttatggggctgaaagagcgccgccgggcgctggccggacgtaccggctgcggcgtgtgcggcgttgaacagcttaacgatatcggtaagcccgtcgcgccgctgccgtttacccagaccttcaacctcggtaacctcgacaaagccctggagcacctcaatgatgtccagcccataggtcagctgagcggctgtacacatgctgcggcgtgggtgctcccgtcgggcgagatcgtcggaggtcatgaagatgtgggccgccatgtggcgctggataagctgctgggccgtcgcgcgcgtgaagatgccgtctggcagcaaggggccgcgctcgtttccagccgcgccagctatgaaatggtgcagaaagcggccatgtgcggcgtggagatcctgtttgcggtgtcggctgcgacaacgctggcggtcgaagtggcagagcgctgcaacctgacgctggtggggttctgcaagccgggcagggcgacaatttacacccatccgcagcgattaattgttaatcagtaa

SEQ ID NO: 117554 - DNA, 213 bp, Enterobacter cloacae
atgaaaagcatcaaaacttttgtcgctgtaatcgctctggctgcttctttcggttctttcgctgcgcagactgtgactgcatccgcctctaccctcgatggcgcagaagccaaaatcgccgcacaggctcaggaagcgggcgcgtcatcctacaaaattacccaggcattcaccggtaaccgcgtacacatgaccgctgaactgaacaaataa

SEQ ID NO: 117555 - DNA, 714 bp, Enterobacter cloacae
atgaacgcgatgtttaaaaaaggagtgctggcatctgtactggcagtagcggcgtcttcagcaatggcggcttccagtgttgatattcacgttacggggaaaattgttccgtcttcctgtacaccggcatttattagcggtggcggtattgctgatttcggtaccatgaaggtggctagtctgaattccaccaccccaacccctctggcggatgttaaaattatccctatttctattacctgtgaagaagcgacccgcgttggcgtgacctttaacgattcgcatgtggattctgcgcctacggagaatatgccggtgaactttattgattcggatttcattaccagtgcgggttttacggctggcctggggatgtatagcgataagaagattggcgcttattcaatgggtatccaaaagaccgacggggcgacgaccaacggagacggtgtaaacctttatccaatcttcaccagcgataacggcgcatcatggggagttaaaagcgggtttcgctacttacaggtgaaacctgataagagtgagatttattccttcacagatcaagcgaccggtacagtggcacctgttgcacaaactaaaattaacttcaacgtgggcattgccgcgatgattaacccaaccaacgatttaaatatcacggatgaagctaccctggacggcttaaccaacgttgagctggtttatctgtaa

SEQ ID NO: 117556 - DNA, 687 bp, Enterobacter cloacae
atgctgcttttaaagagaacgctgatctgtgcctgcctgctggcctcattcaacggtatggctgccgggatggtgccggatacctcgctgcttattgtcaatgaagacaagcagggggccagcatggatgttaaaaacaccgatgctgaagcacagctgctgtacaccaaaattattgatctcccggacgaccccaaaccgggtctgattgccacgcagccggttgtgcgcgtagatgcgggtaaaacccagcgcgtgcgttttgtgctgaaaaacagtaatgagccgctgaaggtggaacattttaagcgtgtcatttttaccgctatccctcagcgtgaaaaaaataaagttaaagtggtgtttagccagaaccttcccgtcattattcacccggctggcctggcggtaaatattgaaccctggaaggcactcacctggcagataaaaaatggcaatgtcacggttgagaataatacgccttatgtcgtccgactggagcaaaaggtgaaattaatggcctcgggtacgatcgcgacattagctaagacttacattcttcctggcgaaaaaatgacggccagcgccccagccaaaatatcagcatccgaaaaacaaatcgaaatctatccggcaacgcgttatggctataaggcagggaaatatatcgccgaccttcagcaataa

SEQ ID NO: 117557 - DNA, 2424 bp, Enterobacter cloacae
atgttaaacggttcctgtaaaaagggaatgctcgtgttttgccttagcgtgctggcatttaatattcgggctgagatttcctctaatgcgaatgaatctctggaactggcgcgagccatatttgacagcgatgctttaaaaaataacgggcttgatccggccattgcggattactattccctcactccccgttttacccctggctaccataatgtgacggttaatattaatggtaagcagcgcaatattatgcccgtgaaatttgatgaggaaggaacgccctgtattgataaagcgtttctggaaaacgcgggcctgattaaacagacgaaaagaggcacctgcccgaagatttatcactactggtccggatcaacgattcagacttcgccggatattgatgaaatatcggttgttgtaccgcctgaagcgatcgaccctgattatgaccgacagttcgccgaggtgcgtggcggacgtgcagccatgctgaattactccatgtttggcacccataatcactatgatgatgagaacgctgaccgtttccagtcgacctttgaaatgggctttaatgccggagactggattgtgcgcagcacgcagttcattagcgacggcagcgatcaggattttgatgtcgactccctctacacctatgcccagcgtacctttaccgattatggcgtgatggtgcagggtggccagattaacatcgccaacagccgcttcagtattccgggaatttacggggtccagatgatgccggataccgcactcactcctcaggtggggacgggcgtcgaagtcagcggtattgcccgtaatccgcaggcgcgcgtcgatatccgccagggcggacagcttatttactcaacgctggttcctgccggtccgttcaacctggatgacgtgccgctggcgaacctcaacaccgacctgaacgtaacggtcaccgagactgacggcagcgaaaaccgattcactgtctcggcaagtacgttccgcagcaatcatataggccgtgccccgggctttacgctggctatgggccgcgttgaagacatggactcacgctttgaaaatccgtgggtggtgtccgccaacgacggctggtctgtcaataagcgtgtcaatttcctggccggtatggtgatggcggataaccactattatggcttctccggcaacctcgataccataccgatgcagaacctgtatgcctcgttgggttttctggcgtcaatagacaaccagacgcaaaccgacggcaacaaaacgacgctggatctgggttactccctgccgtggggcattgggctttcgctgggcggtagctatggcacaccggactatcgcgagatggcggaactttacggcgacgatgacgatatgtcgcaaaccaaatacgacaccagcgtcggtatcaactggtcgagtaccacgctgggccgcttttccctcagctattatcgcaacgagagctggaacagcgactatgacagtcgccggtttatctcgtcgtggtcacagacttttaaatacttcaacgtgagcgtgaactgggagtcggatgtcagccggcacgacagcagcgacaacgatcagttttacgtaaacgtgtcgatcccgctgggacgctcaggcgtgacaaccagctcctggtatcgcgagagcgaaggtaagcgttcttacggcacgcgggcaatgggctcgctcaacgctgagaaccagtacacggtgggggtcactcaggaccaggaagagaacaccaccagctgggacagctcgctgaacagtaatctgcattacaccaacctggcgctggcggcaggaggagataacgacagcaataccaactactcagcagcattaagcggcgggattgtcgcccacagcgacggggtgaccttctcgccttaccgcgtgaccgatacgtacgccattgccagactggataaaccggtggctggtatcgagataggtaccccgcgcggcgcggtatggaccgataaatggggccaggcgattattcctgcgctgtcgccgttccgtgaaagcacgattgagatcaacacggaaagcctgccaggcaatctggacgtaagaaatggcagaacagcgatcaaagcgtctcacggcgctgtggcgaagtgggagtttgcgacgttaagccagcgccgcgtgctgctcagtatacgccgtgcggacggtacgccgctgccggaaggtgtctcgattgtggacgcggcaggggagtatgtgacgagtgcgccagaagacggcgtgatcttcctgaacgatatctctgccagccagcagctgtatgcgaagctggatgaagggcgttgcaggctgacgtacaccctgccggaggcagaaccgaataaattctatgaagaggtgacagggaaatgtctctga

SEQ ID NO: 117558 - DNA, 600 bp, Enterobacter cloacae
atgtctctgaataacgttcgtcaatacgcgctgatgcttatgctgctctgcggcgcagcgggactttcgggaatggcgcaggccgatgacggcgcctgtgaaatgatgtcggcggtgaagaaagtcgattacgggcgctaccgtaaagaggatatgcggcaaacgtccgctgagcatattggcaaagtgtataacggttatgcttctgtgacgcgtgaagttcaggtttcggtgctgtgtccggatgcgcgcaaaatgcgcctctccgtagacgggattgcccgacagaacctggcgtatcgttttacggataacggcgcgatgaaaatcgaatttaaagatgggcgggtagacgggaaccccgtacagctggccgcggtcgatatcggcgcggttgccgttcagggtggcgcatcgcaggtgacgctgaagccggaaaaagcgctggctgcggttaacggcacggaagtggcgggcgagcagtttgtcgccaccatgatgatcacgacctacctttcagacaaggcatttagcgttactaacacaacggattttgaagaaacgctgacgctcaatgttgatacgcttcctgcgcgataa

SEQ ID NO: 117559 - DNA, 324 bp, Enterobacter cloacae
atggaaaacatgacggtctttattctcggcatcgccattctttctgccggaacctatctgatgcgtctcggcggggcgaaactcggtagccggctggcgctttctgaacggtcgcaggcgctgctttcagacgcggcaaccgttttgttgttctccgtcgcgctggcgacaacgttttatgaaggggaccattttgccgggatggcgcgcgtgctgggggtggggttcgcggtgtttctggcctggcgcaaaatgccgttaattgtggtgatcgtcgcggcggcggtggtgacagcgctgctgcgtctggcggggatccactag

SEQ ID NO: 117560 - DNA, 660 bp, Enterobacter cloacae
atgaagaatcacctctcttgcctgaaaggcgacacgataaaagcgatcgtcctggtctgcctcgcggtgggcgtggtcggcatgtcttatggctcactggcgatggcctacggtttcccgctgtgggtgccgtttgtcctctccctcacggtgctggcaggcgcatccgagtttatgtttatcggcatcgtggcgagcggcggcaatccgctggcagcggcagcggccggtttactggttaacgcgcgccatgtgccgttcggcgttacggtgcgtgaactggtgggcaagcgcggcctgagctttctgggctgtcatatcatgaatgatgaaagtgtggtgttcggcctgtcgcaaaaaaccgccgagcagcgtaaagcggcctactggctgtgcggcctgggcgtggcaatcatctggccgctgggggcggtgctgggcgcgatggtcggcaagctgctgccggacccggaaaccatcgggctggacgcggtgttcccggcgatcctgctggcgttagtggtgccggcatttaaaaaccgtaccacgctgatccgcgcctgtagcggcgcagtgttgtcgctggccgccgtaccgtttgcgccggttggcctgccggtgctgctctctttgctcggccttgccgcgaggaaaaaataa

SEQ ID NO: 117561 - DNA, 549 bp, Enterobacter cloacae
atgacgcagccaatcagcgtgatcgccaaaagcctggtgcgagaacgcttgcgaaccgggctctcactggcggaaattgcccgccgtgccgggatcgccaaatccacgctttctcaactggagtctggcaacggcaatcctagcctggaaacgctgtggtcgctttgcgtggcgctggatattccgtttgcccggttactggagccgcagcaacccgtcacgcaggtgatccgccgcggcgagggcacaaaagtcgtcgccgggcaggcgaactacgaggcgattttgctcgcggcgtgtccgcctggcgcgcgtcgtgatatctatctgctgctgactcagccgggggcagaccgtatttcccagccccatccgcctggttcggttgagcatattatcgtgacccaggggcgggcgatggtcggtctgatcgacgcggcggaagagctcggcccgggagattacatttgctaccccgctgaccagccgcatatctttaaggcgctggagccagatacgcacgcgctgctggtggcggaacaaaactaa

SEQ ID NO: 117562 - DNA, 996 bp, Enterobacter cloacae
atgtcgctcaaagccattgccaaagaactggggctgtctgttaccaccgtcagccgcgccctcaacgggtatgacgacgtttctgctgagacgcgcgcccgcgtggaagcggaggcccagcgccgtggctaccgaccaaatacctttgcccgtcgcctgaagatgggcaaaatcgacgccgtcgggctggtgtttccggtgcatcctgttccgctcaataacagcgtttttatggacatggtcggcgaaattagccacgaactggcgcgacatgagattgacctgctgctcatcgctgacgacgatctggcggacaaacacagctatatgcgcatggtgcagagccgacgcgtggatgcgctgattgtggcgcatacgctggatcacgatccgcgtcttgagcagctacaggccgccgggttcccgttcctggcgctcggccgcagccagctcccgcagccgtacgcgtggttcgatttcgacaactatgccggcacatatcaggccacccgctggctgatcgagaaaggccatcagcgcattgcgctgctgggcgaaagcaacaaccaggcattcatcacccagcgccgccagggctacctggacgcgctgcgggaagccggactttccagcgaatggctgcgcgccatgcccccttcgcgtcgcgtggggtatgccaccacgcaagaacttctctccctgccgcagccgcccacggccatcattactgactgcaacacccacggcgacggcgcagcgatggccctggcgcagatggggcgcttaaccggtgaaaatgccgtttcgctggtggtctatgacggcttaccgcaggacagcattgtcgatatcgacgtcgcggcggtgatccagtctacccgtcagggtgtcgggaaacagattgccgatatggtgcgccagctgattaatggcgacgacattgacacccttcaggtgctctggcagccagaattctccccaggccagacggcctga

SEQ ID NO: 117563 - DNA, 2124 bp, Enterobacter cloacae
atgcaagattccatttttcgacttgaaagcaatacggttgacttggtggtaaaaacccacccgttcgccgaaattctctactggggggcacaccttcagcacttttcgccgcaggatgtgctgagtattgcgcgcccggttgctaatggcaggctggacgtcgactcccccgtcacgctgatggcagagctggggcatgggctgtttggctcgccgggcatcgaggggcaccgccaggggctggacggatcgccggtatttaaaaccacgcaggtgcagcaggcgttaaacgccctgacaatcactgctgaagacgagcatgcaggcctgcgtctgaccagtgaaataacgctggatgccagcggcgtactggtggtgcgtcatgggttaaccaacctgaaaacgcaggcgtggcaggtggatcgctttgccgtgacgctgccggtggccgaacgcgcgcaggaggtgatggccttccacggacgctggatcagggagtttcagccgcaccgcgtgatgcttgaacatgacagctttgtgattgaaaaccgtcggggtaaaacctcccatgaacatttcccggcgctgatttcaggtacgccgtcattcagtgaaatgcacggcaacgtctggggtatacatctgggctggagtggtaaccaccgcctgcgcgcagaggcgaaaaccgatggccgccgctatatgcaggccgaagcgctctacctgccgggtgaaatggcgattgaagagggggaaacgctctggacgccgcgcctgtatgccagccactccccgcacgggctgaatggcatgagccagcagttccaccgctacctgcgcgataacattatccgcttcccggaagataaaccgcgcccggtgcacctcaacacctgggaggggatctacttcaaccacgatccggactacatcatgcgcatggccgacgaggccgcagcgctgggcgtggagcgctttatcattgacgacggctggttcaaaggccgcaacgacgaccacgccgcgctgggcgactggtatctggacgagaaaaaatacccgaacggcctaaagccggtaatcgatcacgttaaacagctcagcatggagtttggtatctgggttgagccggagatgattaaccccgattccgatctgtatcgcgcgcaccctgactgggtgctggcgctgccgggctacgcccaggcgaccgggcgacatcagctggtgctcaatctcaatattccgcaggcctttgaatatctggtcgaacgcatgagctggctgctgggcgaacacgcggtcgactacgtgaaatgggatatgaaccgcgagctggtgcagccgggacacaagggtaaagccgccgccgacgcgcagacccgccagttttatcgcctgctggacgtgctgggcgagcgcttcccgcacattgagtttgaatcctgctcctccggcggcgggcgaatcgattacgaagtgctgacccgctgccaccgcttctgggcgtccgacaacaacgacgcgctggagcgcaacactatccagcgcggcatgagctacttcttcccgccggaggtgatgggcgcgcatatcggtcaccataaatgtcacgccaccttccgccagcacagcattcagttccgcgggctaacggcgctgtttggtcacatggggctggagctggatccgctcaccgtcgatgcgcaggagcgtgaaggctatcgccattacgccgcgctgcacaagcggtggcgagaggtcattcatcacggcacccagtggcgcgtggatatgccggacgccaccaccctggcgcagggtatagtgagcgaagataagacgcaggggctgtttttggtcagccagctcgcgatgccggattacaccctgatgatgccgctgcgcatgccggggttagacgccagcgcgctgtaccgcatcacgctgctcgatcacccgaacatccagattacgggcgagggcgggcacaccatgcgtaagctgccggcgtggatgaacgcgccgcaaacggtaagcggtgagtggctgatgcaggcgggtattgcgctgccgattctggatccggaaaccgccattctgattggtgtggaacgcgtgtaa

SEQ ID NO: 117564 - DNA, 1278 bp, Enterobacter cloacae
atgaacacaacaacctgtacccacaaagacaaccctaatttctggatcttcgggctgttcttctttctctacttcttcatcatggccacctgctttccgttcctgccgatctggctgtcggacatcatcggcctgaacaaaacccataccgggattgttttctcctgcatctcgctgtcggccattgccttccagccggtgctgggggtcatttcggacaagctggggctgaaaaaacacctgctttggatcatctcggtgctgctgttcctgttcgcgccgttcttcctgtacgtcttcgccccgctgctgaaaaccaatatctggctgggggcgctgagcggtgggttgtatatcggctttgtcttctcagcggggtcgggggcgattgaggcctatattgagcgcgtaagccgcaacagcttttttgagtacggcaaggcgcgtatgttcggctgtctcggctgggggctgtgcgcctcaacgggcggcatcctgttcggcatcgatccgtcgtacgtcttctggatggggtcggccgcggcgctgttgctgatgctgctgctggtggtcgcgaaaccgaagcctaaccagacggcgcaggtgatgaacgccctgggcgcgaatcagccgcagatcaccgctaaaaccgtttttaccctgttccgccagcgcagaatgtggatgttcatcctgtacgtgattggcgtggcctgcgtgtatgacgtcttcgaccagcagtttgccaccttcttcaaaaccttcttcgccacgccgcaggaggggacccgtgcctttggtttcgccaccacggcgggggaaatctgtaacgcgatcattatgttctgctcgccgtggatcattaaccgcatcggcgcgaaaaacacgctgctgattgccggggtgatcatggcgacgcgcattatcggctcgtcgtttgccaccactgccgtggaggtgattgccctgaagatgctgcacgcgctggaagtcccgttcctgctggtgggggcattcaagtacatcaccggggtgtttgatacgcgcctgtcggccaccatctacctgattggcttccagtttgccaaacagtcggcggcgatcttcctctccgcctttgccggaaatatgtatgaccgggtcggcttccaggagacgtatctgatactgggctgcttcgtgctggcgatcacggtggtgtcggcgtttacgctgagtggcaggcgggagattgctgccgcctcgggggcagcagcgttaacacatcagtccaggtaa

SEQ ID NO: 117565 - DNA, 315 bp, Enterobacter cloacae
atgatccgcaaagcgtttgtgatgcaggtaaacccggacgcgcacgaggagtacgcacgtcgccacaacccgatctggcccgagctggaagcggtgctgaaagcccacggcgcgcaccactacgccatctatctcgacaaagctcgcaacctgctgtttgcgacggtggagattgaatcggaagagcgctggaacgcggtggcaaacaccgatgtctgccagcgctggtggaaatatatgggtgacgttatgccgtcgaacccggataacagcccggtgagttcggcgctgaaagaggtgttttacctggactga

SEQ ID NO: 117566 - DNA, 1149 bp, Enterobacter cloacae
atgagctttatgttggcactccccaaaatcagcctgcacggcgcgggcgcgatcggcgatatggtcaatctggtggcaaacaaacagtggggaaaagcgctgattgtcaccgacggccagctggtgaaacttggcctgctcgacagtttgttttccgcgctcgacgcccatcagatgtcgtatcacctgttcgatgaggtattcccgaatccgacggaagcgctggtgcaaaaaggctatgcggcatatcaggatgcggagtgtgattacctgattgcctttggcggcggcagcccgattgataccgccaaggcgatcaaaatcctcaccgccaatcccggtccgtcaaccgattactccggcgtcggcaaagtaaaaaacgcgggcgtaccgctggtggcgatcaacaccaccgcaggcacggcggcggagatgaccagcaacgcggtgatcattgacgccgcgcgacaggtgaaagaggtgattatcgacccgaacatcatcccggatatcgccgtggacgatgccagcgtgatgcttgatattccggcctccgtgaccgccgcaaccggcatggatgccttgacccatgcgattgaagcctacgtgtccgtcggcgcgcacccgcttactgatgccaacgcgctggaagcgattcgcctgatcaacctgtggctgccgaaagcggtcgacgacggtcacaacctggaagcgcgcgagcagatggcctttggtcagtatctggcgggcatggcgtttaacagcgccggtctggggctggtgcacgccctggcgcaccagccgggcgcgacgcacaacctgccgcacggtgtgtgcaacgccattctgctgccgatcatcgaaaactttaaccgcccgaacgcggtcgcacgtttcgcccgcgtggcgcaggcgatgggcgttgacacgcgcggcatgagcgacgaagccgccagcatgtcagctattcaggcgattcgcgacctgagcgcccgggtcggcattccgtccggcttcagccagctcggcgtgaccaaagcggacatcgaaggctggctggataaagccctcgccgacccgtgcgcgccgtgcaacccgcgcaccgccagccgcgatgaggtccgcgagctgtacctggaggcattatga

SEQ ID NO: 117567 - DNA, 993 bp, Enterobacter cloacae
atgacatctgaagagttcaaacccacttctgcgccgggcatcttccagcgcctgctgtgctgggagggcttcctgctggcggtgacgctggcggtgtttgtggtgaacgcgctcgcctcgccctacttcctcaatatctggaacctctccgacgcgacgttcaacttcacggaaaaagcgatcattgtgttgccgatggcgatgctgattatcgcccgggaaattgacctgtctgtggcctccaccatcgcgctcagctccacgttgatgggcttttgcgcggcagcgggcgtcgatacgccactgctggtgtgcgtgggattaggcgtcgggctactgtgcgggctgttcaacggtattctggtgacgcgctttaacctgtcgtccatcgtcatcaccatcggcaccatgagcctgtaccgcgggatcacctacatcctgctcggggaccaggcgctgaacagctacccggagagcttcgcctggttcggccagggctacgtctggggtgcgctgtcgtttgagttcgcgctgtttatcgtgctggccgctctgtttgcctttgtgctgcaccgcaccaattttggccgccgcacctacgccatcggcaacaacccgaccggcgcgtggtactccggcatcaacgtgaagcgccacaacctgatcctgtttgcgctggtaggactgatgtccggcctggcgtcggtgctgctcacctcgcgtctgggcagtacccgcccgaccatcgcgatgggctgggagctggcggtggtgacgatggcggtgctcggcggcgtcaatattctcggtgggtccggcagcatggtgggcgtgattatcgccgccttcctgatggggctggtgacctttggcctgagcctgctcaacgtgcccggcatcgtgatgtcggtgattatcggcgcgatgctgatcgtggtgatttcgctgccgattattacccgccgggtgatgcagcgaagacggatctcatag

SEQ ID NO: 117568 - DNA, 1005 bp, Enterobacter cloacae
atgcttagctcactcttaaaacaccgcgaggcgctgcttggcgcggtgattgtcctgatggtcgtcgccattggcagccgcgtgccatcgtttatcgcaccgggcaacctggtggagatgtttaacgacaccgccattctgatcgtcctcgcgctcgggcagatgattgtgctgctcactaaaggcatagacctgtcgatggcggctaatctggccctgaccgggatgattgtcgccctgattaatttccattacccggacgtgcccgtctgggcgctgctgatccttgccagcgcgcttgggctgctgatgggcgcaataaacggcctgctggtgtggaaactgggcattccggcgattgtggtgacgctcggcaccatgagcatctaccgcggaatgatctttttgctctccggcggcggctgggtgaactccaaccagatgggtgcagacttcctcggcctgccgcgtgcgtcagtgctgggcctgccggtgctgagctggtgcgccatcgccgtactgctgctggtgggctacttcctgcgctacagtcgcaccggacgggcgctctacaccgccggcgggaacgccacggcagcgtactacaccgggatcaacgccgggaaaatgcagttcatcagcttctgcctttccggtctgctggccgggttctgcggctacctgtggatatcacgctttgccgttgcgtatgttgacgtcgctaacggttttgaattgcaggtggtggcagcctgtgtgattggcgggatcagcaccatgggcggcaccggccgcgtgctcggctgtctgttcggggcgctgttccttggcgtcatcaacaacgccctgccggtgatcggcgtctccccgttctggcagatggcgatttccggctcggtcattgtcatcgctgtgctgctgaacgagcgcggcaacaagcgcaaaggcaggctgatcctgcgcgacgcggcgctggcacgtcagaaactggcggtgaaaccatga

SEQ ID NO: 117569 - DNA, 1503 bp, Enterobacter cloacae
atgaccccattgctacagctttctggcatcaccaaggtgttccccggcgtgcgtgctcttgagaacgtgcagcttgcgctgtggcccggcaaagtgacggcgcttatcggcgaaaacggcgcgggcaagtcgacactggtcaaagtgatgaccggcatataccagcccgacgagggcgaaattctttacaaggcgatccccgttcaccttccgacgccggagtcggcgcataaaatgggcatcaccgccattcaccaggaaaccgtcctgttcgatgaactctcggtcaccgaaaatatctttgtcggtcagtaccttcacaaaggcttcctgaaaaagctcgactggccggaaatgcaccgccgggcgcaggctattctcgcccgccttgaggtgcaaatcgacccgcgcgcaacgctgaaaaccctgagcatcgcccagcgtcacatggtggcgattgcccgcgcgctgtcgtttgaggcgcaggtggttattcttgatgaacctacagcggcgctgtcacagcatgaaatcctcgagttttaccagattgtggagcgcttaaagcaggagggaaaagccatcctgtttatctcccacaagttcgacgagatttttgagctggccgatcactacaccattttgcgcgacggcgtgttcgtcggtgcaggggcaataaatgagatcaccgaggagcggatggtgtcgatgatggtcgggcgcgccattacccaaaccttcccgaaaatagactgcgaaaaaggcgagacggtgctggaggtgaaaaacctctgccatccaaccgagtttgcgcatatctcattctccctgcgtaaaggggaaatcctcggcttttacgggctggtgggtgccgggcgtaccgagctgatgcaggcgctttccggcgtcacgcggccatcgtccggggaaattatcctcaacggacagccccggcgcttccgccagcctgcggatacgatcaaggccggtatcgtctgcgtgccggaagaaaggcagaaacagggggcgattatcgccctgccgattgcccagaacatcagcctgcctcagctcagcaggctcaatccgaacggcgtactgcacgacgaccgcgaaaggaagctggcagacgaatacgccaggcgcctgcaagtgaaagccttcagctggaagcaggcggtggagaccctctctggcggcaaccagcaaaaggtggtgatcggcaaatggctggcgacgcaccctgacgtgatcatcctcgatgagccaacaaaaggcatcgatatcggctcaaaggcagccgtgcatcagtttatgtccgagctggtcagtcaggggctggcggtgattatggtctcgtccgaactgccggaagtgatgggcatggcggatcgcattatcgtcatgcacgaggggctgatggtggccgaataccaggcgggagacgcgacggcggaaaccatcgtcagcgccgccagcggtgcaaaacaggaggcggcataa

SEQ ID NO: 117570 - DNA, 987 bp, Enterobacter cloacae
atgaaaataaaagcaagcttgatcctcaccgttgccgctctggcgttgtccggttccgctttagcagaagtgaaaatcgccctggtggcgaagtccttagggaatggattcttcgaggcagcgaacgtcggcgcgcaggaggcggccaaagagttaggcgatgtaaaagtgatttataccggcccgaccaccaccacggcggaagcgcagatcgaggtgctgaacgggctgatcgcccagggcgtggatgcgatcgcgatttccgcgaacgatccggacgccgtcgtgccggtgctgaaaaaagcgatgcagcgcggcatcaaggttgtgtcgtgggattccggcgtggcgaaagccgggcgtcagatccatctcaacccgtccaataacgccctgattggcgaaactaacgtcaagctcgccgccgatgccctgaaagcgctgaacgtggagaaaggcgatgtggcggtgctgagcgccacgccaacctccaccaaccagaacacctggattgcggagatgaaaaaggtgctgccgaagtacccgtccgtcaatctggtgaccgtggcctacggggacgatctctctgacaagagctaccgcgaagcggtcggcctgctgaaaacctacccggagctgaaagtgattgtttcgccttcttccgtgggcattgtggccgccgcgcaggcggtgaaggaccagggcaagattggcaaagtgtacgtcaccggtttaggcctgccgtctgagatggcgggcgcggtgaagtccggcgcgagcaagagctttgccatctggaacccgattgacctcggctatgccgcaacctacctggcggatgacctggtgaaaggcaacgccacgaaaggcgaggccagcatgggcaaactgggcaaagtgaagctggatgccgacggcaacggcgcgatggccgagccgttcgtttacgatgccagcaatattgataagttctcaaaaatcttttga

SEQ ID NO: 117571 - DNA, 831 bp, Enterobacter cloacae
atgcagaccatcaccacctcctggttcgtccagggcatgatcaaagccacctccgatgcctggctgaagggctgggacgagcgcaacggcggcaacctgacgctacgcctggacgacgcggatatcgagtcatttgccgccgatttccaccagaagccgcgctatatcgccctgagccagccgatgccgctgctcgccaacacgccgtttatcgtcaccggttccgggaagttcttccgcaacgttcagctcgacccgcaggccaacctcggcgtagtgaaagtggatagcgacggcgcgggctaccacattctgtgggggctgacggatgaggcggtgcccacctcagaactgccggcgcacttcctctcccactgcgagcgcatcaaggcgaccaatggcaaggaccgcgtgatcatgcactgccacgccaccaacctgatcgccctgacctacgtgctggaaaataattctgatttcttcacccgcaaactgtgggaaggcagcaccgagtgtctggtggtgttcccggacggcgtcggcattctgccgtggatggtgccgggcaccgacgaaatcggccaggcaaccgcgacggacatgcagaaacattcactggtgctgtggccgttccatggcgtcttcggcagcggcccgacgctggatgaaaccttcggcctgatcgacaccgccgagaaatccgcggaagtgctggtgaaggtctattccatgggcggcatgaagcagaccatcacccgggaagaactgatcgccctgggtaaacgctttggcgtcacccccatgcagtcggcgttagatttgtaccaataa

SEQ ID NO: 117572 - DNA, 1260 bp, Enterobacter cloacae
atgaccactcaacttgaacaagcctgggacctggctaaacagcgtttcgccgccgtcggcgtggatgtcgaagaggcgctgcgccagctcgaccgtctgcccgtctccatgcactgctggcagggtgatgacgtcgccggtttcgagaacccgggcggttccctgacgggggggattcaggccacgggtaactacccgggcaaagcgcgcaacgccaccgaactgcgtgcggatctggagctggcgctgagcctgatccccgggccaaagcgcctgaatctgcacgccatttatctcgaatccgacgagccggtggcgcgtaacgagatcaaaccagagcactttacgaactgggtggcgtgggcgaaagccaaccggctgggtctggattttaacccctcctgcttctcgcacccgctgagcgcggacggctttacccttgcgcacgccaacgatgaaatccgccagttctggatcgaccatgtcaaagccagccgccgtgtctcggcgtatttcggcgagcagcttggcacgccgtcggtgatgaatatctggatcccggacggcatgaaggacatcaccgtagaccggctggccccgcgtcagcgcctgctggccgcgctggatgaagccatcagcgagaagctggacccggcgcaccacatcgatgccgtcgagagcaagctgttcggcattggcgcagagagctacaccgtgggctcaaacgagttctacatgggttatgccaccagccgccagaccgcgctgtgcctggatgccggccacttccacccaaccgaggtgatctccgacaagatctccgccgccatgctcttcgtgccgcgcctgctgctgcacgtcagccgtccggtgcgctgggacagcgaccacgtggtgctgctggatgacgaaacccaggccattgccagcgaaatcatccgccacgatctgttcgaccgcgtacacatcggcctcgacttcttcgacgcctccatcaaccgcatcgcggcgtgggttatcggcacccgcaacatgaagaaagccctgctgcgcgcgctgctggagcctgtcgccgccctgaaacagctggaagaaaacggcgactacaccgcgcgcctggcgctgctggaagaacagaaatctctgccgtggcaggcggtgtgggagatgtactgccagcgtcacgatgcgcctgcgggcagccagtggctggacaacgtgcgggcatatgagaaagacgttcttgccgctcgtcagtaa

SEQ ID NO: 117573 - DNA, 1470 bp, Enterobacter cloacae
atgacttttcgccattgtgtggctgtcgatttaggcgcatcaagcggccgtgtaatgctcgccacctgggactgcgacctgcacacccttacgcttcgcgaaatgcaccgtttcgccaattgtctgcaaaaacaggacggttttgttacctgggatatcgacgccctggaagcagagatccgcaccggacttcacaacgtctgcgaagacggtattcgcatcgacagtatcggcattgatacctggggtgtggattacgtactgctggacagtcacggcgaacgcgtcggcctgcccgtctcctaccgcgacagccgcaccgatgggctaatggcgcacgccatcgcccagcttggcaaggagaacatctatggtcgcagcggcattcagtttctgccgtttaacacgctgtatcagctgcgcgcgctggttgagcaacagccagagctggtcgaaaaggtggcgcatgcgctgctgatcccggactacttaagctaccgtctgacaggcaacatgaactgggaatacaccaacgccaccacctcgcagctggttaacatcaacaccgataactgggatgaacatctgctggcctggacgggcgcctcgccgtcctggttcggcgcgccaacccatccgggcaatgtgatcggccactggctttgcccgcaggggaatgaaatccctgttgtcgccgtcgccagtcacgacaccgcgagcgcggtcattgcctcgccgctcgccggcagagacgcggcgtacctctcttccggcacctggtcgctgatgggctttgagagcaaaacaccctacaccagcgatgccgcactggcggcgaacatcactaacgaaggtggcgccgaagggcgctaccgggtgctgaagaacatcatgggcctgtggcttctccagcgggtgctgaaagagcagaacatcaacgacctgcccgcgcttatcgcggaaaccgaaacgctgaaggcctgcaccttcctgattaacccgaacgacgaccgctttatcaatccggcgcacatgagcgctgaaatccaggccgcctgttttgaagcggggcagccggtaccttcccgccccgccgagctggcgcgctgcatttttgacagtctcgccctgctctatgccgacatcctgagcgagctggctgaccttcgcggcaaaccgttcacgcagctgcatatcgtgggcggcggctgccagaaccagctgctgaaccagctctgcgcggatgcctgcggcattaccgtggtggcaggtccgattgaagcctccacgctcggcaatatcggcattcagctgatgaccctggacgaactgtccaacgttgacgatttccgttcggtggtgacggcgaataacagcctgaccaccttcaccccccatccctgccatgaaattgcccgctaccgggcgcagtttcagcaaaaacgactgactaaggagctttgcgcatga

SEQ ID NO: 117574 - DNA, 837 bp, Enterobacter cloacae
atgaccgtactgcacagcgtcgatttttttccttcgggggcttcgccggtcgcgattgagccacggctgcctcaggctgcgttcccggagcatcatcatgattttcatgaaattgtgattgttgagcacggaacgggcatccacgtgtttaacggtcagccgtataccatcagcggcggtacggtgtgcttcgtgcgcgatcacgacaggcacctgtatgaacataccgacaacctttgcctgaccaatgtgctctatcgttctccggatgcgttccagtttctctccgggctgaatcagctgttgccgcaggagaaggacggtcactacccctcgcactggcgggtgaatcagtccacgttgcagcaggtgcgtcagctggtgagccagatggagcagagcgaggatggacaggagacgcacgccattgccacccgcgagctgctgtttatgcaactactggtgctgctgcggcgcagcagcctggtggaagggctggaaaataacgacgcgcgcctgaatcagctgatggcctggctggaagatcattttgccgaagatgtctgctgggaaacgctggcggatgacttttcgctctcgctgcgcacgctgcatcgtcagctcaagcagcataccgggctgacgccgcagcgctacctcaaccgtctgcgcctgatcaaagcgcggcaccttttacgtcataccgatgaaagcgtcaccgatatcgcctatcgctgcggattcggcgacagtaaccacttttcgacgctttttcgccgggagtttaactggtcgccgcgcgatattcgtcaggggaaagacgcgttgcttcagtaa

SEQ ID NO: 117575 - DNA, 849 bp, Enterobacter cloacae
gtggctgctcagctcattcttcgcaaagatgatttttttgcctccgcgagtcaggccgtcgcggtggccgaccgctacccgcaaaacgtctttgccgagcacacccacgagttttgcgagctggtgctggtgtggcggggcaacggcctgcacgtcctcaacgaccgtccctaccgcatcacgcgcggagacctgttttacattcgcgctgaagacaaacactcctacgcctcggttaacgatctggtgttgcagaacgtcatctactgccccgacaggcttaaactgaatgtcgactgggcgggcaatatccccggttttcatgatgccagaggcgaaccgcactggcgcttaagcagcaacggcatggcgcaggtgcgccagacgatttcccagctggagcaggagagccagaagagcgatccggtggcaaaccagatgtcggagctgcttttcgcccaactggtgatgaccctgaagcgccatcgttacgccacggataatccctccgccaccacgcaggaagcgctgctggataagctcatcacccggcttgcgggcagtctgaacaagagtttcgtgctggaaaaattctgcgagcaggagcagtgcagcgagcgcgcgctgcgccagcagttccgcacccagacggggatgacggtcaaccactatctgcgccagctgcgcatctgccacgcccagtacctgttacagcatacggagctgatggtgagtgaagtggcgatgcgctgcggctttgaggacagtaactacttttcggtggtgtttaaccgtgaggtggggatgacgccggttcagtggcgtcatcgcagtcgaaaggcagcgtaa

SEQ ID NO: 117576 - DNA, 1035 bp, Enterobacter cloacae
atgaatcatgcgattacgatgggtattttctggcatttgataggcgcggccagtgcagcctgtttctatgccccgtttaaaaaggtgaaaggctggtcatgggaaaccatgtggtccgttggcggcaccgtgtcctggctgattttgccgtggacaatcagcgccatgctgctgcccgatttctggggctacttctcctccttcaacgcctccaccctgctgccggtattcctgttcggcgcgatgtggggcatcggtaatatcaactacggcctcaccatgcgctacctaggcatgtcgatggggattggcatcgcgattggcattacgctgattgttggcaccctgatgacgccaatcctcaacggccacttcgacgtgctgatcaacactcagggcgggcgaatgacgctgctgggcgtgctggtggcggtgatcggcgtgggcatcgtcacccgcgcaggccagctgaaagaacgcaagatgggcatcaaagccgaagagttcaacctgaagaaagggctgctgctggcggtgatgtgcggcgtcttctcggcgggcatgtcgttcgccatgaacgccgccaaaccgatgcacgacgccgctgcggcgctgggcgtcgatccgctgtacgctgccctgccaagctacgtggtgatcatgggcggcggcgcgctggtaaacctcggcttctgcttcattcgtctggcaaaagtgaagaacctgtcggtaaaagccgacttctcgctggcaaaaccgcttatcgtcaccaacgtcctgctctccgccctcggcggtctgatgtggtatctgcaattcttcttctacgcctggggtcacgccagtattccggcgcagtatgactacatgagctggatgctgcacatgagcttctacgtgctgtgcggcgggctggttgggctggtgctgaaagagtggaacaatgccgggcgtcgtccggttggcgtgctgagcctgggctgtgtggtgattatcattgcggccaatatcgtcggcctcggcatggcgaactga

SEQ ID NO: 117577 - DNA, 621 bp, Enterobacter cloacae
atgagttatacactgccatccctgccgtatgcctacgacgcactggaaccgcatttcgacaagcagacgatggaaatccatcacactaaacaccaccagacctatgtgaacaacgcgaatgctgcgctggaaagcctgccagagttcgctaatctgcctgttgaagagctgatcaccaaactggaccagctgccggcagacaagaaaaccgtgctgcgcaacaacgcgggcggtcacgctaaccacagcctgttctggaaaggcctgaaaaccggcaccacccttcagggcgacctgaaagcggctatcgagcgtgacttcggttccgttgacaacttcaaagcggaattcgaaaaagccgctgcaacccgtttcggctctggctgggcgtggctggtcctgaaaggtgacaaactggcggtcgtttctaccgctaaccaggactccccgctgatgggtgaagctatctctggcgcatccggcttcccaattctgggtctggacgtgtgggaacacgcttactacctgaagttccagaaccgtcgccctgactacatcaaagccttctgggatgtagtaaactgggacgaagcagcagcgcgtttcgccgctaaaaaataa

SEQ ID NO: 117578 - DNA, 684 bp, Enterobacter cloacae
atgcattacccggtgaatgtgtttacaggcaaggtaagggagtacgaaggcagccgcccgagcgccatcgccaaagtgcaggtcgacggtgagctgacgttgaccgatctcgggcttgcgggtgaccagcaggctgaaaagaaaatccacggcgggcctgatcgcgcgctgtgccactatccgcgcgagcactatcagcactggaaagccgaatttcctgaacagacggacctcttcgtcgcccccgcgtttggcgaaaatctctcaacggaggggctgacggagaagaacgtctttatcggcgatatttaccgctggggcgatgctttgattcaggtcacccagccgcgctcaccgtgctttaagcttaattaccatttcggcattcaggatatgtcggcccagctgcaaaacgcgggtaaaaccggctggctgtatcgcgttgtgcaggcgggacaggtttcggcggatgcgccgcttgagctggcttcgcgcttgagtgaggtgtcggtatacgaggcctgcgcaattgcctggcatatgccgtttgatgacgagcagtatcaccgcctgctgtcagcggcgggattatccaccagctggaccagaacgatgcagaagcggcggttaagcggcaagatcgagagcagttcgcggagattgtgggggaaagaggttccgtag

SEQ ID NO: 117579 - DNA, 1374 bp, Enterobacter cloacae
atgataggcagcttaaccgcccgcatcttcgccatcttctggctgacgctggcactggttttaatgctcgttttgatgttgccaaaactcgactcacgccagatgacggagctactcgacagcgagcaacgtcagggcgtgatgatcgagcagcacgtggaagcggagctggcaaacgatccgccgaacgatttaatgtggtggcgcaggctgtttcgcgctatcgacaagtgggcgccccccggacaacgtcttttactggtcaccagtgaaggccgcgtgattggggccgatcgcaatgaaatgcagattatccgcaactttattggccaggcggataatgccgatcacccacagaaaaagaaatatggtcgggtagagatggtcggtcctttctcggtgcgggatggggaagacaattaccagctctatctgattcgccctgcgagcagttcccagtccgactttatcaacctgctgtttgaccgtccgcttttgctgttgattgtcacgatgctggtcagttccccgctgctgttatggctggcgtggagcctggcaaaaccggcgcgtaagctgaaaaatgcggcggacgaagtggcgcagggcaacctgaggcagcatccggagctggaatccgggccgcaggagttcctggccgccggaaccagttttaaccagatggtctctgctcttgaccgcatgatgaccgcgcagcaacgcctgctgtcggatatctcccacgagctgcggacgccgctcacgcgcttacagctgggtaccgccctgctgcgccgccgcagcggcgagagcaaagagctggagcgtattgagacggaagcgcatcgcctggacagcatgatcaacgatctgctggtgatgtcgcgcaatcagcagaaaaacgcgctggtgagcgaaacggtgaaagccaatcacctctggcatgaggtgctggacaacgcggcgttcgaagcggagcagatgggcaaatcgttcaccgtcaacttcccgccgggcccgtggccgctctacggtaaccccaacacgctggaaagcgcgctggagaatatcgtgcgtaacgccctgcgctattcgcacacgaagattgaagtggcgttttcggtggataaagacgggattaccgtcattgtcgatgacgatggtcctggcgtcagcccggaagatcgcgagcagattttccgtccgttctaccgcaccgacgaggcgcgcgaccgtgaatctggtggtacggggctaggtctggcgattgttgaaaccgccatgcaacagcaccgtggctgggtgaaagccgatgacagcccgctgggcgggctgaggttaacgctatggctgccgctgtataagcgttcgtaa

SEQ ID NO: 117580 - DNA, 699 bp, Enterobacter cloacae
atgaataaaatcctgttagttgatgatgaccgagagctcacatctcttttaaaggagttgctcgacatggaaggtttcaacgtcctggttgcccatgatggggaacaggcgctgagtctccttgacgacagcatcgatttacttttgctcgacgtcatgatgccgaagaaaaacggtattgatacgttgaaagagcttcgccagacacaccagacccccgtcattatgctgaccgcacgcggcagcgagcttgaccgcgtactcggccttgagctgggtgcggatgactatttacctaagccgttcaacgaccgtgaactggtggcccgtattcgcgcgatcctgcgccgctctcactggagcgagcagcagcagaataccgacaacagctcgcctacgctggaagtagactccctgagcctgaacccgggccgccaggaagcgagcttcgacggtgaaacgctggagctaaccggcaccgagttcaccctgctgtatctgctggcgcagcatctcggccaggtggtgtcgcgtgaacacttaagccaggaagtgctgggcaaacgcctcaccccgtttgaccgcgccatcgacatgcatatctcgaacctgcgccgtaagctgccggagcgtaaagacggtcatccctggttcaaaaccctgcgtggtcgtggttatctgatggtttccgcttcatga

SEQ ID NO: 117581 - DNA, 507 bp, Enterobacter cloacae
atgcgcaaagttaccgctgccgtcatggcctcaacgctggccttcagtgcgtttagccaggctgctgtagctatcatcagcgataacggttcctcagcagagggcgcaacgcagcacagcagccaaagccatatgtttgacggcataagtttaaccgaacatcagcgtcaacagatgcgagatctgatgcagagggcaagacacgaccagccccctgttaatgttagcgaaatggagacaatgcatcgccttgtcaccgcagaaaattttgacgaaagcgctgtacgcgctcaggccgaaaaaatggcgcaggaacaggttgcccgccaggtagagatggcgaaggttcgcaaccagatgttccacctgctaacgcccgagcagcaagcggttttgaataccaaacatcagcaacggatgaaccagttgcgtgaggttgcacggatgcagcgaagctcagatatgacgcttttcagtagcaatagcagtacccgtagtaaccagtaa

SEQ ID NO: 117582 - DNA, 198 bp, Enterobacter cloacae
atgaataaagcgttaacaaacctgaacgatgggcaaaaaaaacccccacatcatgtgggggaagacagggatggtgtctatggcaaggaaaacagggtttactggttactacgggtactgctattgctactgaaaagcgtcatatctgagcttcgctgcatccgtgcaacctcacgcaactggttcatccgttgctga

SEQ ID NO: 117583 - DNA, 885 bp, Enterobacter cloacae
atgaatcaatcctatggacggctggtaagccgggccgcaatagccgcgacggtgatggcgtcgtgtttgctgatcattaaaattttcgcgtggtggtacaccgggtcggtcagtattctggcggcgctggtggattcactggtggatattgccgcctcgctgaccaacctgctggtggtgcgctactcgctgcaaccggcggatgaagagcatacgtttggccacggcaaagcggaatcgctggctgcgctggcacaaagcatgtttatttcgggctccgcccttttcctgtttttgaccggcattcagcaccttatttcgccttctccgatgaacgatccgggcgttggcgtggtcgtaacggtagttgcacttataagcacacttgttcttgtaacgttccagcgctgggttgtacgcaaaacacaaagccaggctgtacgggccgatatgcttcattatcagtctgatgttatgatgaatggggctattcttattgcgctcggtctggcctggtatggctggcatcgggccgatgcgttgtttgcgttagggatagggatctatattttatacagcgcgttgcggatggggtatgacgcggtgcagtcgcttcttgaccgtgcgcttccggacgcagaacgtgatgaaatttatgccatcgtgaccaactggcctggcgtcagtggtgctcacgatcttcgtacgcggcagtcagggccgacccgctttattcagattcatttggaaatggaagacaacctgccactggttcaggcgcatatggtcgctgaacaggtggagcaggcgattttgcagcgtttccctgggtcagacgtcattattcatcaggatccgtgctctgtcgtacccagggcgttttga

SEQ ID NO: 117584 - DNA, 963 bp, Enterobacter cloacae
atgattaagaaaatcggtgtgttgacaagcggcggtgatgcgccgggcatgaacgcggcaatccgtggggttgtccgtgcagcgctgacggaaggtctggaagtttttggtatctatgacggttacctgggtctgtatgaagaccgcatggttcagctcgaccgctacagcgtgtctgacatgatcaaccgtggcggtactttcctcggttctgcgcgcttcccggaattccgtgacgaacacatccgtgaagtggctatcgaaaacatgaaaaaacggggtctggatgcgctggtggttatcggcggcgacggctcgtacatgggtgcaaaacgtctgactgaaatgggcttcccgtgcatcggcctgcctggcaccatcgacaacgacatcaaaggcaccgactacaccatcggttacttcaccgcgctgggtaccgttgtggaagcgattgaccgcctgcgtgacacctcttcctcacaccagcgtatttctattgttgaagtgatgggccgttactgcggtgacctgactctggcggcggcaattgccggtggctgtgagttcgtggtggtgccggaagtggaattcagccgtgaagatctggtcgctgaaatcaaagccggtatcgcgaaaggtaagaaacacgccatcgttgctatcaccgagcacatctgtgacgttgacgagctggcgaagtacatcgaaaccgaaaccaaacgcgaaacccgcgcgaccgttctgggtcacattcagcgtggtggttccccaggcccgtacgaccgtatcctggcgtcccgcatgggcgcgtacgcgatcgagctactgcttcagggccacggcggccgctgcgtcggtattcagaacgagaaactggttcaccatgacatcatcgatgccattgaaaacatgaagcgtccgttcaaaggtgactggctggactgcgcgaaaaaactgtactga

SEQ ID NO: 117585 - DNA, 990 bp, Enterobacter cloacae
atgaataaatggggcgtggggttaacattattgctggcatcgaccagcgttctggcaaaggacattcagttactgaacgtgtcgtacgatccgacgcgtgaactatacgaccagtacaacaaagccttcgcggcgcactggaaacaggaaaccggcgataacgtggtggttcgccagtctcacggcggttccggtaagcaggcgacatcggtgatcaacggtattgaagccgacgtggtgaccctggcgctggcttatgacgtggacgcgatcgcggagcgtggccgtatcgacaaaaactggatcaagcgtctgccggacaactctgcgccatacacctcgaccattgtcttcctggtgcgtaaaggcaacccgaaacagattaaggactggaacgacctgattaagccaggcgtgtctgtcattaccccgaacccaaaaagctccggcggcgcacgctggaactatctggcagcctggggctacgcgctgcaccacaacaacggcgatcaggccaaagcacaggacttcgtcaaagcactgtttaaaaacgtcgaagtgctggactccggcgcgcgcggtgcaaccaacaccttcgtcgaacgcggcattggcgacgtgctgatcgcctgggaaaacgaagccctgctggcgaccaacgagctgggtaaagacaagttcgagatcgtcaccccgagcgaatcgatcctggctgagccgaccgtctccgtcgtcgataaggttgttgataagaagggcaccaaagcggtggcggaagcctatctgaagtacctctactcacctgaagggcaggaaattgcggcgaaaaacttctaccgcccacgcgatgaggccgtcgcgaagaaatacgaaaacgccttcccgaaactgaagctgttcactattgatgatgtgtttggcggctggaccaaagcgcagaaagagcacttctctaacggcggcaccttcgaccagatcagcaagcgctaa

SEQ ID NO: 117586 - DNA, 744 bp, Enterobacter cloacae
gtgaaaaaaattatcttactgattctgatcgttatcgcccttgccgcaggcggcgtgtactggatgaaagcgggtaatccgaatgcgttgcgtcatatcgttctcgaccagtgtgtgcccaaccagctgcataaccgtaacccggcaccgtgtgcgcaggtgaagccagatgcgggctacgtggtgttcaaggaccgcaacgggccgctgcaatacctgctgatgcccacgtaccgtatcaacggcaccgaaagcccgctgctgactgagccgcagacaccgaatttcttctggctggcatggcagtctcgccattttatgaatatgaaacggggggccgacgtgcctgacagcgccgtttcgctgaccatcaactccccgaccgggcgcacgcaaaaccattttcatatccacatctcctgtctgcgcccagacgtgcgcgagaagctgaacgcgtcgcaggggcaaatcagcacccagtggttaccgcttccgggcgggctggaagggcatgaataccttgcccgtcgggtgacggagaacgaactggtgcagcgcagcccgtttatgatgctggcggaagagctgccggaagcccgcgatcatatgggacgcttcgcgctggcgatggcgcagcagtcggacggctcgtttgtattgctggcgacagagcgtaacctgcttacctttaaccgcgcgtcggctgaggaattgcaggatcatcaatgcgatatcctgaagtga

SEQ ID NO: 117587 - DNA, 1305 bp, Enterobacter cloacae
atgtcgctctggttaacgcatcctctgctgcttccctcgctgatcgtcggcgtcaccatcgtgctgtgggcgacgtcgctgttgccggaatttatcaccgcgctgctgtttttcacggcggcgatgaccgccagaatcgccccgccggaagtgatcttcggcggcttcgcctcgtctgccttctggctggtgttcagcggctttgtgctgggcgtggcgattcggaaaaccggcctggcggacagggccgcccgggcgctgtcggcaaagcttaccgactcctgggtgctgatggtggcgagcgttgtgctgctgagctatgccctggcattcgtgatgccgtcgaacatgggacgtattgcgctgctgatgccgattgtcgccgcgatggcgaagcgggccggcattcctgatggctcgcgggcctggtttggcctggcgctggcggtcgggtttggcaccttccagctctcggccactattttgcccgccaacgtgcccaacctggtgatgagcggcgcggcggaaggctcatacggtatccacctcaactatgtcccgtatctgctgctgcacaccccggtgctgggtattctcaaaggcctgattctgattggcctgatctgctggctgttccccggcaacccgaaaccggcgaaggatctcacgccatcggaaccgatggggcgtgacgaaaaacgactcgcctggctgctggcggtggtgttgacgatgtgggtgacggagagctggcacggcgttgggccagcgtggacggggctggcggcctcggtcatcgttatgctgccgcgcatcggttttatcaccggggaggagttctcggcgggggtgaatatgcgcacctgtatttacgtcgcgggtatactcgggctggccattacggtgacgcagaccggtatcggtgcggccgtaggcgaggcgttgctccatatcatgccgctggatgcagaccgcccgtttaccagcttcctggcgctgacggggctcaccacggcgctcaacttcattatgaccgccaacggcgttcctgcgctgtacaccacgctggcgcagagcttctcggacgcgaccggcttcccgctgctgtcggtgatcatgattcaggtgctggggtattccacgccgctgttgccgtatcaggcgtcgccgattgtagtggcgatgggcttagggaaagtgcctgcgaaggcggggatgctgctttgtctggcgctggcgattgcgacgtatctggtgctgctgccgctggattatttgtggtttagcgtgttaggtcgtttgtag

SEQ ID NO: 117588 - DNA, 768 bp, Enterobacter cloacae
atgcgacatcctttagtgatgggtaactggaaactgaacggcagccgccacatggtaaacgaactggttgctaacctgcgtaaagagctggctggcgtgaccggctgcgcggttgctatcgctccgccggatatgtacctggatctggctaaacgtgccgctgacggcagccacatcattctgggcgcgcagaacgttgacgttaacctgtctggcgcgttcaccggtgaaacctccgctgaaatgctgaaagatatcggcgcgaaatacatcatcatcggccactccgagcgtcgcacctatcacaaagaatccgatgagttcatcgcgaagaaattcgctgtgctgaaagagcagggtctgatcccggttctgtgcatcggtgaaaccgaagcagaaaacgaagcaggcaaaaccgaagaagtgtgcgcacgtcagatcgacgctgtgctgaaaacccagggcgcggcagcgttcgaaggcgcggttatcgcttacgagccagtctgggcgatcggtaccggcaaatctgcaactccagcgcaggcacaggcggtgcacaagttcatccgtgaccacattgcaaaagcagacgcgaaagtggctgagcaggtcatcatccagtacggcggttccgttaacgcatcaaacgcagctgagctgttcacccagccagacatcgatggcgcactggttggcggcgcatccctgaaagcagacgctttcgcggtgatcgttaaagcggcagaagcggctaagcaggcgtaa

SEQ ID NO: 117589 - DNA, 597 bp, Enterobacter cloacae
atgaaaagttcggcacactctctttatttgtgtttagcgatgctgagcgccagtttttccctgtatgccgcggaaacggcttccccggtcaccgccccctatcttctggcgggcgccccctctttcgatcaatctatcagccagttccgcgaagccttcaacaaagaaaacccctcacttccgctgggagagttccgtgcgattgacagcgcccgcgatacgccgaccctgacccgcgcggccagcaaaattaacgagaatctgtatgcctctaccgcccttgagcgcggaacgttaaaaatcaaaagtatgcagatcacctggctgccgattcaggggccagagcagaaagcggcgaaagcgaaagcgctggagtacatgagcgctattctgcgcgcctttacccccaccttcacgaaagcgcaaagccagcaaaagctgcaaaaactgcttaccgccgggaaaaacaaacgctattacgccgatacggaaggtgccgttcgctatgtcgtcgcagataacggcgaaaaggggctgaccttcgcggttgaaccgattaagctggccctatcagacgcactcgagggggcgaattaa

SEQ ID NO: 117590 - DNA, 420 bp, Enterobacter cloacae
atgaccatacagcagtggctgttttcattcaaagggcgtattggacgccgtgacttctggatctggattgcaacgtgggttgtcgccatgctgcttctgttttttgttgcctacaacgcatggctgagcacgcaaacggcggcatttgcgctggtctgtttactgtggccaaccgccgccgtagtggtgaaacgtctgcacgatcgtggccgctccggcgcatgggctttcctgattattctggcgtggatgctggtggcggggaactggtcaatgctgccctcaatcctcccatgggtggtgggcagactgctgccgacggttatctttgtaatgatggttgtcgaactgggcgcgtttatcggcacccagagcgagaacaaatatggaaaagatacccttgaggtgaagtaccgctga

SEQ ID NO: 117591 - DNA, 747 bp, Enterobacter cloacae
atggcggactgggtaacaggtaaagtcacaaaggtacagttctggaccgatgcgctatttagcctcacgctgcacgctcccgttcatccgtttactgccgggcagtttgccaagctcgggttggatatcgacggtgaacgcgtacagcgcgcctactcttacgttaatgcgcctgataacccggaccttgagttctatctggtcaccgtcccggacggtaagctcagcccacgcctcgccgcgctgaagccgggcgatgaagtgcagattgtctccgacgcggcggggttcttcgtgctggatgaaatccccgactgtgacacgctctggatgctggcgaccggcacggccattggcccgtatctttccattctgcaatacggcaaagatctggagcgctttaaaaatatcgtgctggttcacgccgcgcgctacgccgcagacctgagctatttgccgcagatgcaggcgctggaacagcgatatggcgggaagttaaaaattcagacggtggtcagccgcgaaaccgcagccggctcgttaaccggtcgcgttccggcgttgattgaaaacggcgcgctggaagaagcggtgggtttaccgatgaataccgaaaccagccatgtgatgctgtgcggtaatccgcagatggtacgcgatacgcagcagttgctgaaggatacccggcagatgacgaagcaccttcgccgccggccgggccacatgaccgccgaacactactggtga

SEQ ID NO: 117592 - DNA, 1011 bp, Enterobacter cloacae
atgaaacgtgaacttgctatcgagttttcccgcgtcaccgaagctgccgccctcgcaggctacaagtggctgggccgtggcgacaaaaataccgcagacggcgctgccgtccacgccatgcgcattgtgcttaatcaggtcaatatcgatggcactatcgtcattggcgaaggcgaaatcgacgaagcgccgatgctctatataggtgaaaaagtcgggacgggcaaaggcgatgcggtggatatcgcggtcgacccgattgaaggcacgcgcatgacggcgatgggccaggccaacgcgctggcggtactggcggtgggcgataagggctgcttcctcaacgcgcccgatatgtacatggaaaaactgatcgtcggtcctggcgctaaaggcgctatcgaccttagcctgccgctggacgccaacctgcgcaatatcgccgcggcgctgggtaaagcgctcagcgaactcaccgtgaccattctggcgaaaccgcgccacgacgccaccattgcgtacctgcaagcgctcggcgtacgcgtgtttgctattccggatggcgacgttgccgcctctattctgacctgcatgcctgacagcgaagtcgacgtgctttacggcatcggcggcgcgccggagggtgtggtctctgcggcagtgatccgcgcgctggacggcgatatgcaggcgcgtttgctgccacgccatgaggtcaaaggcgacagcgacgagaaccttcgcattggtgcagacgaactggcgcgctgcgcggcgatgggcatcgaggccaataaagtgctcgcgctgaacgagatggcccgcagcgataacgtggtcttctccgcaaccggcatcaccaaaggcgatctgctggacggcatcacccgcaagggcaacatggccaccactgaaaccctgctgatccgcggtaaatcccgcaccattcgccgcattaagtccattcattatctcgatcgtaaagatccggacgtacagacgcacattctgtaa

SEQ ID NO: 117593 - DNA, 1509 bp, Enterobacter cloacae
atgaccgaaaaaaaatatatcgttgcgctcgaccagggcaccaccagctcccgcgctgtcgtaatggatcatgacgcgaacattgtcagcgtgtctcaacgcgaatttgagcaaatttatccgcgtccaggctgggtagaacacgacccgatggagatctgggcgtcgcaaagctccacgctggtggaagtgctggcgaaagccgacatcagttctgaccagattgccgctatcggtatcaccaaccagcgtgaaacgactgtggtctgggagcgagaaaccggtaagcccatctacaacgccattgtctggcagtgccgtcgtacgtcagagatctgcgaacagctgaagcgcgaaggaatggaagagtacgtgcgcagcgccaccggcctggtggttgacccctatttctccggcaccaaagtgaagtggatcctcgaccacgtggaaggttcacgcgagcgcgcacgacgtggcgagctactgttcggcaccgtcgatacctggcttatctggaagatgactcagggacgcgttcacgttaccgactacaccaacgcctcgcgcaccatgctgttcaacatcaacacccttgagtgggatgacaagatgctggacgcgctggacattccgcgcgcgatgctgccagaagtccgtaagtcttcagaagtgtatggccagaccaacattggcggtaaaggtggcacccgtattcctatcgccggtatcgccggtgaccagcaggcggccctgttcggccagctgtgcgtcaaggaagggatggcgaagaacacctacggcaccggttgttttatgctgatgaacaccggcgagaaagcggtgaaatcagaaaacggtctgctgaccaccatcgcctgcggcccgcgcggcgaagtgaactatgccctggaaggcgcggtattcatggcgggtgcctccattcagtggctgcgcgacgagatgaagctgatcagcgatgcgtttgactccgaatacttcgcgaccaaagtgaaagacaccaacggcgtgtacgtggtgccagcgttcaccggtctgggcgcaccgtactgggatccgtatgcccgcggcgcgattttcggcctgacgcgcggcgtgaactcaaaccacatcattcgcgcgacgctggaatccatcgcctaccagacgcgcgacgtgctggaagcgatgcaggctgactccggcattcgtctgcacgccctgcgcgtggacggcggtgcggtagccaacaacttcctgatgcagttccagtccgacattctgggcacccgcgttgaacgtcctgaggtgcgagaagtgacggcgctgggcgcggcgtatctggcaggtctggcggttggcttctggcaaaacctcgacgagcttcaggaaaaagcggttatcgaacgcgaattccgtcctggcatcgaaaccaccgagcgcaactaccgctatagcggctggaagaaagcggtgaaacgtgccctggcgtgggaagagcacgacgagtaa

SEQ ID NO: 117594 - DNA, 846 bp, Enterobacter cloacae
atgagtcagacatcaaccttaaaaggccagtgtattgccgagttcctgggtaccgggttgttgatattcttcggagtaggctgtgtcgcagcactgaaagtggcgggtgccagttttggtcagtgggaaatcagtattatctggggtctgggcgtggcgatggccatctacctgaccgcaggggtttccggtgcacatcttaacccggcggtgaccatcgcgttgtggctattcgcgtgttttgacggacgcaaagttgttcctttcatcatttcgcagtttgccggcgccttttgcgcagcggcgttagtttacgggctttattacaatcttttcatcgacttcgaacagacgcatcatatggtgcgtggcagtgtcgaaagtctggatctggcaggcattttctcaacgtatccgaatccgcatatcaattttgtgcaggcgttcgcggttgagatggtgattaccgctattctgatgggcgtcatcatggcgctgggcgacgatggaaacggcattccgcgcggcccgctggcgccacttttgattggccttctgattgcggtaattggcgcatccatgggtccgctgaccggctttgcgatgaatccggcgcgtgacctgggtccaaaaaccttcgccttctttgcgggatggggcgatgtcgccttcacgggcggcaaagacattccttacttcctggttccgctgttcgggccaatcgtaggggcggcgctgggcgcattcggctatcgcaaattaattggtcgccacttaccgtgcgacacctgtgtggaagaggagaaagagacggcttccaccacacaacaaaaagcttcgctgtaa

SEQ ID NO: 117595 - DNA, 240 bp, Enterobacter cloacae
atgtctttagaagtgtttgagaaactggaatcgaaagtacagcaggcgattgacaccatcacgctgctgcaaatggaaattgaagagctgaaagaaaagaacaactccctgtcacaggaagttcagaatgctcaacacagccgtgaagaactggagcgcgaaaacaaccagctgcgcgaacagcagaacggctggcaggaacgcttgcaggcgctgctgggacgtatggaagaagtttga

SEQ ID NO: 117596 - DNA, 486 bp, Enterobacter cloacae
atgaaatacgatacctccgagctttgtgacatctaccaggaagatgtcaacgtcgttgaacccctgttctccaactttggtggacggtcgtcgtttggcggacaaatcatcacggtgaaatgtttcgaggacaacgggttgctgtacgatctgctcgaagagaacggtcgtggtcgcgtcctgctggtggatggtggcggttccgtgcgccgtgcactgatcgatgcggacctcgcccgccttgcggtgcaaaacgagtgggaagggattgtggtctacggctccgtgcgccaggtggacgatctcgaagacctggatatcggtattcaggccatcgcggccataccggtaggcgcagcgggcgacggcatcggcgaaagcgacgtgcgcgttaacttcggcggcgtgacctttttctcgggtgaccacctttatgctgacaataccggcattatcctttctgaggatgcgctggatattgagtag

SEQ ID NO: 117597 - DNA, 921 bp, Enterobacter cloacae
atgactgatatcagccgtacacaggcgtggctcgaaagtctgcgtcctaaaacgcttcctctggcttttgccgccattatcgtcggtaccacgcttgcctggtggcagggtcatttcgatccgctggtagcaggtctggcgcttgtcaccgccgggctgctgcaaatcctctctaatctcgccaatgattacggcgatgcggtaaaaggcagcgacaagcctgaccgcatcgggccgctgcgcggcatgcaaaaaggggtgattacccaggcacagatgaagcgggcgctgattatcaccgtggtgttgatttgcctgtccgggctggcgctggtgacggtcgcctcgaaaaccaccagtgatttcattggcttcctggtgctgggcttgctcgccattattgcagccattacctataccgtcgggacgcgtccttacgggtatattggtctgggcgacatctccgtgctggtgttcttcggctggctgagcgtgatgggaagctggtacttacaggcgcacacggtgatccctgccctgttcctgccggcgaccgcctgtggtctgctggcgacggcggtgctgaatatcaataatctgcgcgacatcgatagcgaccgcgagaacggtaaaaacacgctggccgtgcgtctgggtccggtgaatgcacgccgctatcacgcctgcctgctcatcggcgcgctggtctgcctggcgctgttcaatctgagttcgctgcacagcctctggggctggctgtttgtgctcgccgcaccgctgctgattaagcaggcccgctacgtcatgcgtgaactcagcccggccgccatgccaccgatgctggaacgtacggtaaaaggcgcgttactgactaacctgctgttcgtcatcgggattgtcttaagccagacgctgagttag

SEQ ID NO: 117598 - DNA, 1332 bp, Enterobacter cloacae
atgtctgaaatgaccccacgcgaaattgtcagcgaactgaacaagcacattatcggccaggacgacgccaagcgctccgtggctatcgcactgcgtaaccgctggcgtcgcatgcagctcgacgaagagcttcgccacgaagtgacgccaaaaaatattctgatgatcggcccgaccggtgtgggtaaaaccgaaatcgcccgtcgtctggccaaactggctaacgcgccgttcatcaaagttgaagccaccaagttcaccgaagtgggctatgtgggtaaagaagtggactccatcatccgcgacctgaccgactcggcgattaagatggtacgtgtccaggcaattgagaaaaaccgctatcgcgccgaagagatggccgaagagcgtattctcgacgtgctgatcccaccggcaaaaaacaactggggacaggctgaacagcagcctgaaccttctgctgcgcgtcaggcattccgcaaaaaactgcgcgaaggcgagctggacgacaaagagattgagatcgatctcgctgccgcgccaatgggcgtggaaattatggcgcctccgggcatggaagagatgaccagccagttgcagtccatgttccagaacctgggcgggcagaagcagaaagcgcgtaagctgaaaatcaaagacgcgatgaagctgctgattgaagaagaagccgcgaagctggttaacccggaagagctgaaacaggatgctatcgacgcggttgagcagcacggtatcgtgtttatcgacgaaatcgacaagatctgtaagcgcggcaacgcgtccggcccggatgtctcacgcgaaggcgttcagcgcgacctgctgccgctggtggaaggttgcaccgtctccaccaagcacggcatggttaaaactgaccacattctgtttatcgcctccggtgcgttccagattgccagcccgtctgacctgatcccggaacttcagggacgtctgccaatccgcgtcgagttacaggcgctgaccaccgaagatttcgaacgtatcctgactgagccaaacgcttctgtgaccgtacagtacaaagcgctgatggcgaccgaaggcgtgaacattgaatttaccgatgacggtatcaagcgcatcgcccaggccgcgtggcaggtcaacgaaaccaccgaaaacatcggtgcgcgtcgtctgcacaccgtgctggaacgcctgatggaagacatctcttatgatgcgagcgaccttaacggtcaaagcattaccattgacgcagactatgtgggcaaacacctggatgcgttagtggcagatgaagatctgagccgttttattctataa

SEQ ID NO: 117599 - DNA, 531 bp, Enterobacter cloacae
gtgacaacaatagtaagtgtacgccgtaacggccaggtggtaattgccggtgatggccaggccacgctgggtaataccgtcatgaaaggcaacgtgaagaaagtacgtcgtctttataacgacaaagtgatcgccggtttcgcaggcggcacggctgatgccttcacgctgtttgaactgtttgaacgcaaactggaaatgcatcagggtcatctggtgaaagccgccgttgagctggcaaaagactggcgtaccgaccgcatgctgcgcaagctcgaagcgctgctggccgtggctgacgaaaacgcctcgctgatcatcaccggtaacggcgacgtggttcagcctgaaaacgacctgattgccatcggctctggcggcccgtacgcccaggccgcagcccgtgcgctgttggaaaataccgacatgaacgcgcgcgatatcgcggtgaaagcgttggatattgcaggtgatatctgcatctataccaaccacaatcacaccatcgaagaattaccgtctaaagcgtaa

SEQ ID NO: 117600 - DNA, 864 bp, Enterobacter cloacae
atggtcgccattgctgcggctgtgctggtggcctttattggcggcctctacttcattacgcatcataaaaaagaagagtctgaagcccttcagggtaataaggtcgtcggcaacggcctgccgccgaagcctgaagagcgctggcgctacattaaagagctggaaagccgccagcctggcgtacgtgcgcctaccgagccttctgccgggggtgaagtaaagaatgccgatcagctgacggacgaacagcgtcaattgctcgctcagatgcaggcggacatgcgccagcagcctacgcagctgaacgaagtaccgtggaacgaacaaaccccggcgcagcgtcagcaaacgttgcagcgccagcgtcaggctcagcagcaaacgcaacagcagcagtggacgcagacgcagccggtacagcagccgcgtacacaaccgcagcagcagacgcgtaccgtacaaactcagcctgtccagcagcaaccgaaggcgcagccgcagaagcaaacggcacagccgtatcaggatctgttgcagacgcctgcgcataccactgcgcaacagccaaaaacgcagcaggctgcgccggtcaccaaagagaccgaggcaccgaagcagacggctgagaaaaaagatgaacgccgctggatggttcagtgcggttcgtttaaaggcgccgaacaggcagaaacggtgcgtgctcagctggcatttgaaggatttgactcacgcattaccaccaacaacggctggaatcgcgtagtgattggaccggtcaaaggcaaagaaaacgcagacggcaccatttcccgtttgaaagtggctggccacacaaactgcattcgactcgcctccgggggttga

SEQ ID NO: 117601 - DNA, 1026 bp, Enterobacter cloacae
ttgaagtccaggaaagaggttgcctcggcgaccatgaaagacgttgccgagaaagcacaagtctcaacagcaaccgtgtcccgcgcattgatgaaccctgacaaagtctcccaggcgacccgaaaccgggttgaaaaggcggcgcttgaggtcggatatttcccgcaagccatggggcgcaacgttaaacgcaacgaatcccgcaccatcctggtgatcgtgccggatatctgcgatcccttcttcagcgaaatcatccgcggcattgaggtcacggccgccgcccagggctatctggtgctgattggcgattgtgctcaccagaaccagcaggaaaaaacgttcatcgacctgatcatcaccaagcagattgatggcatgctgctgcttggctcacgcctgccgtttgatgccagcattgaagaacagcgcaatttaccgccgatggtcatggcgaacgaattcgcgccggagctggagctgccaaccgttcatatcgataacctcaccgccgcattcaacgccgtgaactatcttcaggaactggggcataagcgtatcggctgtatcgccggaccagaagagatgccgctgtgtcattaccgcttgcagggctacgttcaggcgctgcgccgtaccggggctatcgtcgatccgcactacattgcgcgcggtgatttcacctttgaagcgggcgggcaggcgctggaaaaattgctggccttgccagaaccgcccaccgcggtcttctgccacagcgacgtgatggcgctgggggcgttatcctacgccaaacgtcacggcctgcgcgtgccgcaggacctgtcgataatcggttttgataatatttcactttcggagttttgcgatccgccgctttcgaccgttgcacagccgcggtatgacatcggccgtgaagcgatgctgcttttgctggatcagctgcacggtcaatcagttagcagtgggtcacggctactggattgtgagctgattgtgcgcggctctacccaggcattaacttaa

SEQ ID NO: 117602 - DNA, 2196 bp, Enterobacter cloacae
atgcccgtcgctcacgttgccctgcccgttccgcttccctgcacctttgactacctgctgcccgacagcatgagcgccaaagcgggctgtcgcgtgaccgtgccgtttggcaaacagcagcgtgtggggatcgtggtgtccgtcagcgaacacagcgaactgccgcttaacgagctgaaatcggttgttgaggtgctggacagcgagccggtttactccaccagcacctggcgactgctgctgtgggcggcagattattatcatcatccgattggcgacgtgctgttccatgccctgcccattatgctgcgccagggcaagagcgccagccacgcgccaatgtggtactggtttgccaccgagcagggccaggctgtggacattaacagcctgaagcgctcgcagaaacagcagcaggcgctggcctcgctgcgccagggaaaaatctggcgccatcaggtcgacgagcttgaggtaagcgaaaccgcgttgcaggcattaaggaagaaagggttgagcgagctggccagtgaagcacctgcccttcacgactggcgcgacggcttttccgtctcgggcgatcgcctgcgtctgaataccgagcaggccaccgccgtgggcgcgattcacagcgccgccgatcgtttttccgcctggctgctggcgggcgtcaccggctccggtaaaaccgaagtatatctgagcgtgctggaaaacgtgctcgcgcagggcaaacaggcgctggtgatggtgccggaaatcggcctgacgccgcaaaccatcgcgcgtttccgtgaacgctttaatgcgcccgttgaggttctgcactccggcctgaacgacagcgagcgcctcagcgcctggctgaaagcgaaaaacggcgaagcggcgattgtgatcggcacccgttcatcgctgtttacgccgtttaaaaatctcggcgttatcgtgatcgatgaagagcatgacagctcctataaacagcaggaaggctggcgctaccacgcccgcgacttagccgtgtaccgcgcccacagcgagcaaatccccattattctcgggtccgccacccccgcgcttgaaacgctgcacaacgttcgccagtgtaaataccacatgctgcgcctgacgcgacgcgcggggaatgcccgcccggccattcagcatgtgctggatctgaaaggccagcaggtgcaggccgggttagcgcctgcgctgattagccgcatgcgccagcatttgcaggcgggcaaccaggtgatcctgttcctgaaccgccgcggcttcgcgcctgcgctgctgtgccacgactgcggctggatcgcggagtgcccgcgctgcgatcactactacaccttccaccaggctcagcgccatttacgctgccaccactgcgacagccagcgtccggtcccccgtcaatgcccgtcctgcggctcaacgcacatcgtgccggtcggtctgggaacggaacagcttgaacaggcgctcgcgcccttcttcccggacgtgcccatctcccgtatcgacagggataccaccagccgtaaaggggcgctggaacagcagcttgcggaagtacatcgcggcggcgcgcgcatcctgattggtactcagatgctggcgaaagggcaccacttcccggacgtgacgctggtcgccctgctggacgtcgacggcgcgctgttctccgcggattttcgctccgccgagcgtttcgcccagctttatacccaggttgccggtcgcgctggtcgagcgggtaagcagggcgaggtggtgctgcaaacgcaccaccctgaacatccgctgctgcaaactctgctgcacaaaggctatgacgccttcgcggaccaggcgctggccgaacgccagacgatgcagcttcccccgtggaccagccacgttaacatccgtgcggaagatcataataaccagcaggcgccgctgttcctgcaacagctgaggaacctcctgcaagccagcccgctggtggataatcagctgtggattttaggcccggtacccgcgctcgccccgaaacgcggcggccgtttccgctggcaactgttacttcagcacccctcgcgtatccgtttacagcagatcgtcagcggcacgctggcgctgatcaataccctaccggaagcgcgaaaagtgaagtgggttcttgacgtcgatccgattgaaggctga

SEQ ID NO: 117603 - DNA, 213 bp, Enterobacter cloacae
atgaaaaaagatattcacccgaaatacgaaatgattactgcaaactgctcttgcggtaactctatccagatccgctctaccgtgggtcacgatctgaacctggacgtgtgcggcaaatgccacccgttctacactggtaagcagcgtgatgttgcaaccggtggccgtgttgaccgcttcaacaagcgtttcagcatcccgggcgctaaataa

SEQ ID NO: 117604 - DNA, 318 bp, Enterobacter cloacae
atggctgaatggagcggcgaatatatcagcccatacgctgagcacggtaagaagagtgagcaagtcaagaaaatcacggtgtccattcctctgaaggtgttgaagatcctcaccgatgaacgtacgcgtcgtcaggtgaacaacctgcgtcacgccaccaacagcgaactgctgtgcgaagcgttcctgcatgcgtttaccggccaaccgttgccgaacgatgacgatctgcgcaaagagcgcagtgacgaaattccagaagaggcgaaggtgatcatgcgtgaactgggtatcgacccggatacgtgggaatactga

SEQ ID NO: 117605 - DNA, 1161 bp, Enterobacter cloacae
atgacgcgtaaacaggccaccatcgcagtgcgtagcggattgaatgatgacgagcagtacggctgcgttgtcccgccaattcatctctccagcacctataatttcaccggatttaatgaaccccgcgcgcatgactactcgcgtcgcggcaatcctacgcgtgacgtcacgcagcgcgcgctggcggaactggaaggcggcgcgggtgcggtattaaccaataccggcatgtctgccattcacctggtgactacggtgttcctgaaacctggcgatctgctggtggcgccgcacgactgttatggcggcagctatcgtctgtttgatagcctggcgaaacgtggctgctaccgtgtgctgtttgtcgatcaaaacgacgaacaggcgctgaaacaggcgcttgccgagcagccgaagctggtgctggtggaaagtccaagcaatccattgttgcgcgtagtcgatattgcgaaaatttgtcagctcgcaagggatgcgggagcgataagtgtagtggataatacgttcctcagtccggcccttcagaacccactggcactgggtgccgatctggtgttgcattcatgcactaaatatctgaacggccattctgacgtagtagcaggtgtggtgattgccaaagatcctgaggtagtcaccgaactggcatggtgggccaataacattggcgtcaccgcgggcgcgttcgacagctatttgctgttgcgcggcatccgtacgctgtcgccgcgtatggacgtggcgcagcgtaatgcccaggcgatcgtggatttcctgaaaacccagccgctggtgaagaagctttatcacccgtcgctgccggaaaatcaggggcacgagattgccgcgcgccaacagaaaggatttggcgcgatgttaagttttgaactggacggtgacgagcaaacgctgcgtcgcttcctgagcgggttgtcattgtttacgctggcggaatccttagggggagtagaaagcttgatctcccacgccgcaaccatgacgcacgcaggtatggcacccgaagcacgtgccgccgccgggatttccgagacgctgctgcgtatctcgaccggtattgaagattctgaagatttaattgccgatctggaaaatggcttccgggtcgcagccaaggggtaa

SEQ ID NO: 117606 - DNA, 2433 bp, Enterobacter cloacae
atgagtgtgatagcgcaggcagggacgaagggtcgtcagctgcacaagtttggtggtagtagtcttgctgatgtgaaatgttacctgcgtgtcgcagggatcatgaccgagtattcacagccgggggacatgatggttgtctctgcggcgggcagcaccaccaaccagttgattagctggctgaaactgagccagaccgatcgcctctctgcgcatcaggtgcaacagtccttacgtcgttaccagagtgaactgattgccggtttgctgcctgcggacgtggcggacgggctgattagcgcttttacgcacgaccttgagcgtctggccgctctgctggacagcggcattaccgatgcagtgtatgcggaagtggttggccacggtgaagtgtggtctgcgcgcctgatggccgccgtgctgcaacatcttggtgtggaagccgcctggctcgacgcgcgtgatttcctgcgtgccgaacgtgccgcgcagccgcaggtggacgaagggttgtcttacccgctgctgcaacagctgctggtgcaacatcctggtaaacgtattgtcgtcaccggttttatcagccgcagcaatgctggcgaaaccgttctgctgggccgcaacggctctgactactcggcaacgcagattggcgccctggcgggcgtgtcccgcgtcaccatctggagcgacgtggccggtgtctacagcgcggacccgcgcaaagtaaaagatgcctgcctgctgccgctgctgcgtctcgacgaagcgagcgaactggcgcgtctggcggccccggtgctgcacgcgcgcacgctacagccggtttccggcagcgacatcgacctgcaactacgctgtagctacacgccggatcagggttccacccgcattgaacgcgtgctggcatccggtacgggcgcgcgcattgtcaccagccatgatgacatctgcctgattgagttccaggtgcctgcgggccaggatttcaaactggcacacaaagatatcgacaccatcctgaaacgtgcccaggtgcgtccgctggccgttggcgtacataacgatcgtcagctgttgcagttctgctataccgctgaagtggtggacagcgccctgaaaattctggatgaagcgggcctgccgggcgagcttcgcctgcgtcaggggctggcgctggtggcgatggtgggcgcgggcgtcacccgtaacccgctccactgccaccgcttctggcagcaactgaaaggtcagccggtggagttcacctggcagtcggaagagggcatcagtctggttgccgtgctgcgtaaagggccaaccgaaagcctgattcagggtctgcacacctccctgttccgcgcggaaaaacgcatcggcctggtactgttcgggaaagggaacatcggttcccgctggctggagctgttcgcccgcgagcaggtaacgctttcggcgcgtaccgggtttgaatttattctggcaggggtggtggacagccgccgcagcctgctgaactacgaagggctggacgccagccgggcgctggccttctttaacgatgaagcggttgagcaggatgaagagtcgctgttcctgtggatgcgcgcgcacccgtacgacgatctggtggtgctggatgtgaccgccagcgaacagctggccgatcagtatctggatttcgccagccacggtttccacgtcatcagcgccaacaaactggcgggcgcgagcagcactgataaataccgtcagatccatgacgcattcgaaaaaacgggccgtcactggctgtataacgccaccgttggcgcgggcctgccagtgaaccataccgtgcgcgacctgattgaaagcggcgacagcattctggcgctgagcgggatcttctccggcacgctctcctggctgtttttgcagtttgacggcaccgttccgttcaccgacctggtggatcaggcgtggcagcagggcttaaccgagccggatccgcgcgttgaccttgccggtaaagatgtgatgcgtaagctggtgatcctggcgcgtgaagccggctacgacattgagccgggtcaggtacgcgttgagtctctggtgcctgcgggctgcgaggaagggtccgttgatcacttcttcgagaacggtgacgagctgaacgagcagatggtgcaacgtctggaagcggctaacgagatgggcctggtgctgcgttatgtggcgcgtttcgaggcgaacggtaaagcgcgcgtgggcgtggaggcggtgcgtcctgaacatccgctggcggcgctcctgccgtgcgacaacgtcttcgccatcgaaagccgctggtatcgcgataacccgctggtgatccgtggcccgggcgcgggacgcgatgtcaccgccggagccattcagtctgatattaatcgtctggctaagctgctgtaa

SEQ ID NO: 117607 - DNA, 891 bp, Enterobacter cloacae
atgagcttttttcacgccaaccagcgggaagccctgaatcagagcctggccgaagtaaacggccagattaacgtctcttttgaatttttcccgccgcgcaccagtgaaatggagcaaaccctgtggagctctatcgatcgtctgagcagcctcaagccgaagttcgtctccgtgacctacggcgccaactccggtgagcgtgaccgcacgcacagcatcattaagggcattaaagatcgaaccggtctggaagcggcaccgcacctgacctgtatcgacgccacccgtgatgaattgcgcgccattgcccaggactactggaataacggcattcgccacattgtggccctgcgcggcgacctcccgccaggcagcggcaagccagagatgtttgccgccgatctggtcgggctgctgaaagacgttgccgactttgatatctccgtggccgcctaccctgaagttcacccggaagccaaaagcgcccaggcggatctgctcaacctgaagcgtaaagtggaggccggtgctaaccgcgcgattactcagttcttctttgacgtggaaagctacctgcgctttcgcgaccgctgcgtctcggcgggtattgatgtcgaaatcattcctggcattctgccggtctcgaacttcaaacaggcgaagaaattcgcagatatgaccaacgtgcgcattccgctgtggatgtccaaaatgtacgaagggctggacgacgatccggaaacacgtaagctggtgggggccaatatcgcgatggacatggtgaagattttaagtcgcgaaggggtgaaagatttccatttctataccctgaaccgcgcggaaatgagctacgccatttgccatacgctcggtgttcgcccggcgctgtaa

SEQ ID NO: 117608 - DNA, 2181 bp, Enterobacter cloacae
atgagcatgtcagacgagaccaataacgcggcatccgccggcaaatgtccgttccaccagggcggcgtcgatcatagcgcgggtgcaggtaccggcagcaaagaatggtggcctaaacaacttcgcatcgatctacttaatcaacactccagccgttctaaccctctgggtgaagacttcgactaccgcaaagaattcagcaagctcgactattccgcccttaagggcgatctcaaagcactgttaaccgactcacaaccgtggtggcctgccgactggggcagctatgcgggcctgtttatccgtatggcctggcacggtgcgggtacctatcgctccgttgacggtcgcggcggcgccggacgcggtcagcaacgctttgcaccgctgaactcctggccggataacgtcagcctggataaggctcgccgcctgctgtggccaattaagcaaaaatacggacaaaaaatctcctgggctgacctctttatcctcgcgggtaacgtggcgctggagaactccggcttccgcacctttggtttcggtgccgggcgtgaagacgtctgggaaccggatctggacgtgaactggggcgatgaaaaagcctggctgacccaccgtgacccggaagcgctggcgaagcgcccgcttgcggccaccgaaatgggcctgatttacgttaacccggaagggccgaacgccagcggtgaaccgctgtctgcggcggcggcgatccgcgccacctttggcaacatgggcatgaatgacgaagagaccgtcgcgctgattgcgggcggccatacgctcggtaaaacgcacggcgcaggtgaagccacgcacgtgggcactgacccggaagcgtcgccgattgaagcgcagggcctgggctgggccagcacgcacggcaccggtattggcgctgacgccatcacctccgggctggaagttatctggtctcaaaccccgacccagtggagcaattacttcttcgagaacctgttcaaatacgaatgggtgcagacgcgtagcccggcgggcgcaattcagttcgaagccgtggatgcgccggaaattatgcctgacccgttcgacccgtcgaaaaaacgcaagccaaccatgctggtcaccgacctgacgctgcgttttgatccggaattcgagaaaatttcccgtcgcttcctgaacgatccgcaggccttcaacgaagcctttgcgcgcgcgtggttcaagctgacccaccgcgatatggggccaaaagcgcggtacatcggcccggaagtaccgaaagaagatctgatttggcaggatccgctgcctcaaccggtgttccatccgacgcaggaagatattgaaagcctgaaagcggaaatcgcggcctctggtctctccgtgagcgagctggtttccgtggcctgggcgtcggcatcgaccttccgcggcggcgacaagcgcggcggtgccaacggcgcgcgtctggcgctggcgcctcagcgcgactgggatgtgaacgccgcagcggtgcgggcgttaccggctctggaagccatccagcgcaccaccaacaaagcttcactggccgatatcatcgtgctggcgggtgtcgtaggcgttgagcaggctgcgaaagccgcaggtgtttacgtcaacgtaccgttcaccccgggccgcgtggatgcgcgtcaggaccagacggacatcgagatgtttaacctgctcgaaccggttgctgacggtttccgcaactaccgtgcgcaggtggatgtgtccactacggagtcgctgctgatcgacaaagcccagcagctgaccctgactgcgccggaactgacggtgttgatcggcggtttgcgcgtactgggtgcaaacttcgatggcagcaagaatggcgtgtttaccaaccgcgagggcgtgctgagcaacgacttcttcgttaatctgctggatatgaacacccagtggaaagcgaccgacgactcaaacgagctgtttgccggtagcgatcgcgccagcggggaagtgaaatacaccgcgacccgcgccgatctggtcttcggttcaaacgccgtcctgcgtgcgctggccgaagtttacgccagcagtgatgcacacgagaagttcgttcgtgattttgttgccgcatgggcgcgagtgatggatttggaccggtttgatgtgaagtaa

SEQ ID NO: 117609 - DNA, 1104 bp, Enterobacter cloacae
atggaccgtgtcattcaatccccgggaaaatacatccagggcgcagatgttctcactcgcctcggcgactacctgaagccgctggcaaatcgctggctggtggtgggcgataaatttgtgctgggttttgctgaagaaaccctgcgccagagttttaaaaaagccggactccatgccgaaattgcaccatttggtggcgaatgttcgcaaaatgaaatcgatcgcctgaaaaagctggccgacagcgctgactgtctggcggtgctgggtatcggcggcggaaaaacgctggatactgccaaagcgctggcccactttatggacgtgccggtggccattgccccgaccattgcctccaccgatgcgccgtgcagcgccctttccgtgatttataccgacagcggcgagttcgatcgctacctgatgctaccgcacaacccgaacatggtgattgtcgataccaaagtggtggcgggcgcacctgcacgcctgctggccgccgggattggcgatgccctggcaacctggtttgaagcgcgtgcctgctcacgtagcggcgcgacgaccatggcgggcggcaagtgcacgcaggcagcgttagcgctggcagagctgtgctacaacacgctggttgaagagggcgagaaagcgatgctggcggcggaacagcacgtggtcacaccggcgctggaacgcattatcgaagccaacacctatctcagcggcgtgggctttgaaagcggcgggctggcggcggcgcatgccattcacaacggcatgacggcggtgccggatgcgcatcatttctaccatggtgaaaaggtcgcattcggcacgctgacgcaactggtactggagaacgcgccggttgaagaaattgagaccgtcgccgcgctttgccacagtgttgggctgccgatcacgctggcgcagctgaatatcaaagaggatattccggccaaaatgcggctgatcgcggaggcgtcctgtgccgaaggggaaaccattcacaacatgcctggcggcgtaacgccggatcaggtctatgcggcgctgctggtggcggaccagtatggacagcgattcttgcaggagtgggagtaa

SEQ ID NO: 117610 - DNA, 195 bp, Enterobacter cloacae
atgctcagtgcccggcagcgctacgcttgccgggcacttctcgatcttcccccttccctgatctcctcctcaatctttgccaccggtaaggcaatcacgtttcccttagacgtagcgcaacaaatgaccggcacgccgggagtagagtcactcttagtgcagttcgaacaggacagaatttacctcaaacactaa

SEQ ID NO: 117611 - DNA, 2652 bp, Enterobacter cloacae
atgaacgaacaatattccgcgttgcgtagtaatgtcagtatgctcggcaaagtgcttggagataccatcaaagacgcactgggggagaacatcctcgaccgcgttgaaaccatccgcaagctgtccaaatcttcccgcgccggtaacgaggccaatcgtcaggagctgctcaccaccttgcagaacctctctaacgatgagctgctgcccgttgcccgcgccttcagccagtttctgaacctggcaaacaccgctgagcaataccacagcatttcgccaaaaggcgaagcggccagcaacccggaagtcattgcccgcacccttcgtaaactcaaagaccagcccgacctcaacgaagcgaccatcaaaaaagcggtggaatccctttcgctggagctggtgctgaccgcacacccaaccgaaatcacccgtcgtacgctgatccacaaaatggtggaagtgaacaactgtctgaagcaactggataacaaagacattgccgactacgaacgtaaccagcttatgcgccgtctgcgccagctgattgcccagtcctggcacacggatgaaattcgtaagcatcgcccaagcccggtcgacgaagccaaatggggctttgcggtggtggaaaacagcctgtgggaaggggtccccaactacctgcgcgagctgaacgaacagctggaagagaacctgggctaccgcctgccggttgattttgttccggtgcgctttacctcctggatgggcggcgaccgcgacggcaacccgaacgtgacggcggaaatcacccgccatgtcctgctgctgagccgctggaaagcgaccgacctgttcctgaaagatattcaggtgctgatctccgagctgtcgatggtggaagccacgccggaactgcgcgcgctggccggtgaagaaggcgccagcgaaccgtaccgtttcctgatgaaaaaactgcgcggtcagctgatggccactcaggcttggctggaagcgcgccttaaaggccagcgcctgccgaagccggaaggtctgctgagccagaacgaacagctctgggagccgctgtacgcctgctataaatcgctccaggcctgtgggatgggcatcattgccaacggcgaactgctcgacaccctgcgccgcgtgaagtgtttcggcgtgccgctggtgcgtatcgacgttcgtcaggaaagtacccgtcataccgaagcactgggcgagctgacccgctacctcggcatcggcgactatgaaagctggtcagaagccgacaaacaggcgttcctgatccgcgagctgaactccaagcgcccgctgctgccgcgcaactgggagccaagcaacgacacccgcgaagtactcaacacctgtaaagcgatcgtggatgcgccgaaaggatcggtggccgcctatgtgatctccatggcgaagaccccgtccgacgtgctgggcgttcaccttctgctgaaagaagcgggcattgactatgctctgccagtggccccgctgtttgagaccctcgacgacctgaacaacgctaacgacgtgatgacccagttgctgaacatcgactggtatcgcggctttattcagggcaaacagatggtgatgattggctattccgactccgcgaaagatgcgggcgtgatggcagcctcctgggcgcagtatcaggcgcaggatgcgctaatcaaaacctgcgaaaaagccggtattgaactgaccctgttccacggacgcggcggctccattggtcgtggcggtgcgcctgcacacgcagcgctgctctctcaaccaccaggaagcctgaaaggcggcctgcgcgtgaccgagcagggcgagatgatccgcttcaagtacggcctgccggaagtgaccatcagcagcctgtcgctctataccagtgcgatcctggaagccaacctgctgccgccgccggagccaaaagagtcctggtgccggatcatggacgagctgtctgacatctcctgcgacctctatcgcggctacgtgcgtgaaaacaaagactttgtgccttacttccgctcagcaacgcctgagcaggagctgggtaaactgcctctgggttcgcgcccggccaagcgtcgcccgaccggcggcgttgaatccctgcgcgccattccgtggatcttcgcctggacgcaaaaccgtctgatgctgccggcctggctgggtgccggtgcggcgctgcaaaaagtggtggaagacggaaagcagagcgaactggaaaccatgtgccgcgactggccattcttctctacccgtctgggcatgctggagatggtcttctcgaaagccgacctgtggctggcggaatactacgatcagcgtctggtgaaaccagagctgtgggcgctgggtaaagagctgcgcgagctgcttgaaggcgatattaaagtggtgctggatatcgctaatgactcccacctgatggaagacctgccgtggatcgccgagtctatccagctgcgtaacatctacaccgacccgctgaacgttttacaggctgaactgctgcaccgttcgcgtctggcggaggaggaaggtaaagagccggatccgcgcgttgaacaggcgctgatggtaacgatagcaggcgttgcggcaggtatgcgcaacaccggttaa

SEQ ID NO: 117612 - DNA, 1152 bp, Enterobacter cloacae
atgaaaatgaacttaccgccatttatcgagatttaccgcgccctgattgccacaccctccatcagcgcgacggaagaagccctggatcagagcaatgagtctttaatcaatctgctggcgggttggtttagcgatcttgggtttaacgttgaggttcagcccgtccccggaacacgccacaaatttaacctgctcgccagtaccggacatggcgcgggcggcctgctgctggctggccacacagacaccgtgccgtttgatgatggccgctggacgcgcgatccgttcacgctgaccgaacatgacaacaaactctacggtttgggcaccgccgacatgaaaggctttttcgcctttatcctcgacgcgctgcgtgacgtggacgtgacaaccctgaaaaagccgctctacattctggcgaccgccgatgaagagaccagcatggcgggcgcacgttatttctctgaaaacacatcgattcgtcctgactgcgcgatcatcggcgaaccgacctctctgcaaccgattcgggcgcacaaaggccatatttctaccgcggtgcgcgtgctcggacagtccggccactccagcgatccggcgcgcggtgtgaacgccatcgagctgatgcatgacgcgattggccgcatcatgaccctgcgcgacgatctgaaagagcgctatcactacgaggcgttcaccgtgccgtatccgacgctaaacctcggcagcctgcacggcggtgatgcgtccaaccgtatctgcgcctgctgcgaactgcatatggatatccgtcctctgccgggcatgacgctaagcgatctggatggcttactgaacgaagcgctggcaccggtcagcgagcgctggccgggccgtctgacggtctccgaactgcatccgccgattccaggctacgaatgtccgcctgaccatcagctggttcaggtggtggaaaaactgctcggcgagaaaaccgacgtggtgaactactgtaccgaagcgccgtttattcagacgctgtgcccgacgctggttctgggccctggctccatcaaccaggcccaccagccggacgaatatctcgaaacccgcttcatcaagcccactcgcgaactcattacccaggttgtgcatcacttctgctggcattaa

SEQ ID NO: 117613 - DNA, 1005 bp, Enterobacter cloacae
atgttgaatacgctgattgtaggcgctagcggttatgcgggcgcagagcttgtaagctacgtaaatcgccaccctcatatgaccataaccgctttgaccgtgtcagcgcaaagcaatgatgccggaaagttaatttccgatttgcatccacagcttaagggcattgtcgatctgccgttgcagcccatgtctgacatcagcgagttcaccgacggcgttgacgttgtatttttagccacggcgcatgaagttagccacgacctggctccgcaatttttagcggccggctgcgtggtctttgatctctccggcgcgtttcgcgttaacgacagcgcgttctacgaaaaatattacggtttcacccatcagcacccggatctgctcgaaaaagcggtgtacggcctggcggagtggagcgctgacaaactgaaagaagcggatctgattgccgtgccgggctgctacccgacggcggcgcagctttccctgaagccgctgatcgacgccggtctgctggatctgcatcagtggccggtgatcaacgccaccagtggcgtgagcggcgccgggcgcaaagcggcgatctccaacagcttctgcgaagtgagccttcagccgtatggcgtgtttaatcaccgtcatcaccctgaaatcaccacccatctgggcgcggaggtgatcttcaccccgcacctcggcagcttcccgcgtgggatcctcgaaaccattacctgccgcctgaagccgggtgtgaccaaagaacaggtgagcgaggtcttcacgcaggcgtatgcggataaaccgctggtgcgcctgtatgacaaaggcgtgccggcgttgaaaaacgtggttggcctgccgttctgtgacatcggctttgccgtgcagggcgagcatctgattgtggtcgccgcagaagataacttactcaaaggcgctgccgcacaggcaatgcagtgtgcaaatattcgtttcggcttccctgaaacgcaggctcttatttaa

SEQ ID NO: 117614 - DNA, 774 bp, Enterobacter cloacae
atgaatcctttaattatcaaactcggtggtgtactgctggacagcgaagaagcgctggagcgcctgtttaccgcactggtgaactatcgcgaatcacaccaacgtccgctggtgattgtgcatggcggcggctgcgtggtggatgagctgatgaaagggctcaacctgccggtgaaaaagaaaaatggcctgcgcgtgacgccagcggatcagattgacatcattaccggcgcgctggcgggaacggcgaacaaaacgctgctggcgtgggcgaagaaacaccatatcgcctccgttggcctctgtctgggcgatggagatagcgtaaaagtgacccagctcgacgaagagcttggccatgttggactggcgcagccaggttcgcctgagctgattaacaccctgctggaaggcggtttcctgccggtggtgagctcaatcggcgtgaccgaagagggcgaactgatgaacgtcaatgcggaccaggcggcgacggcgctggcggcaacgctgggcgcagacctgatcctgctctccgacgtgagcggcattctggacggcaaaggccagcgcattgcggaaatgaccgccgcaaaagccgagcagctgatcgatcagggcattattaccgacggcatgatcgttaaagtgaacgccgcgctggatgcggcccgcacgctgggccgcccggtggatatcgcctcctggcgtcacgcggagcaactcccggcgttgtttaacggcacgccgattggcacgcgtattctggcttaa

SEQ ID NO: 117615 - DNA, 1374 bp, Enterobacter cloacae
atggcactttggggtgggcgttttacacaggcagcggatcagcggttcaaacagttcaacgactctttgcgcttcgactaccgcctggccgaacaggatattgtcggctctgtggcctggtccaaagcgctggtgaccgttggcgtgctgaccgcagacgaacagcagcagctggaagaggcgctgaacaacctgctggaagaggtgcgtctggatccggagcaaatcctccagagcgatgccgaagatattcacagctgggtggaaggcaaactcatcgacaaagtcggccagttgggtaaaaagctccataccgggcgtagccgtaatgaccaggtggcgaccgacctgaagctgtggtgtaaggagaccgtcggcgaactgctggcggcgaatcgtcagttgcagagcgcgctggtggacactgcgcagaacaatcaggatgcggtgatgccgggttatacccacctgcaacgcgcgcagccggtgactttcgcgcactggtgtctggcctacgttgagatgctggcgcgtgatgagagccgtttacaggataccttaaagcgtctggacgtcagcccgctgggcagcggcgcgctggccggtacggcgtatgaaatcgaccgtgagcagctggcaggctggctgggctttgcctccgccacccgcaacagcctggacagcgtctctgaccgtgaccacgtgctggagctgctctcaaatgcctctatcgggatggtgcacctgtcgcgctttgccgaagacctgatcttctttaactctggcgaagccgggtttgtggagctgtccgaccgcgtgacgtccggctcctccctgatgccgcagaagaaaaacccggatgcgctggagctgatccgcggtaagtgtggccgcgtgcagggcgcgctaaccggtatgatgatgaccctgaaagggctgccgctggcgtacaacaaagacatgcaggaagacaaagaggggctattcgacgcgctcgacacctggctggactgtctgcatatgggcgcgctggtgctggacggcattcaggtgaaacgtccgcgctgccaggaagcggcgcagcaggggtatgctaactctaccgagctggcggactacctggtggcgaaaggtgtaccgttccgcgaggcgcaccatattgtgggtgaagcggtggtggaagcgattcgtcagggtaaagcccttgaagagctggcgcttgccgacctgcaaaaattcagcgcggttatcggggatgatgtctacccgattctggccctgcaatcctgcctggataagcgtgcagcgaaaggcggcgtgtcgccgaagcaggtagcgcaggcgattgcggatgcgaaaaaccggttggtttga

SEQ ID NO: 117616 - DNA, 918 bp, Enterobacter cloacae
atgaatattcgtgatcttgaatacctggtagcgttagccgagcaccgccactttcgccgcgcggcagattcctgccacgtcagccagccgacgctgagcggccagatccgcaagctggaagatgagttgggcgtgatgctgctggagcgcaccagtcgtaaagtactgttcacgcaggcaggtctgctgctggtggatcaggcgcgcaccgtactgcgcgaggtcaaagtgctcaaggaaatggcaagccagcagggggaagcgatgtccggcccgctgcatattggcctgatcccaaccgttggcccgtacctgttgccgcaaatcattccgatgctgcaccagacgttcccgaaactcgaaatgtacctgcatgaagcgcaaacccatcagctgctggcgcagttagacagcggcaagctcgactgcgcgatcctggcgctggtcaaagagagtgaagcgtttattgaagtaccgctgttcgatgagccgatgatgctggcgatctatgaagatcacccgtgggcgaaccgcgatcgcgtgccgatggccgatctggccggtgaaaaactgctgatgctggaagacggtcactgtctgcgcgatcaggcgatgggcttctgcttcgaagcgggtgccgatgaagatacccatttccgtgcaaccagcctggaaacgctgcgtaatatggtggcggcgggaagcggtattacgctgctgcctgcgctggcggtgccgcacgagcgtaaacgtgatggcgtggtctatctgccgtgtattaagccggagccgcgtcgcaccattggtctggtttatcgtccggggtcaccgctgcgcagtcgctatgagcagctggcagaggccatccggggtgcgatggatggccatttcgacagcgcgttaaaacaggcggtttaa

SEQ ID NO: 117617 - DNA, 1401 bp, Enterobacter cloacae
atgccacattcctacgattacgacgcaatagttattggttccggccccggcggcgaaggtgctgctatgggtctggtaaaacagggagccagagtagcggttattgagcgctaccataatgtcggcggcggttgcacccactggggcaccatcccttcgaaagccctccgccacgccgttagccgcattatcgaatttaaccagaacccactttacagcgaccactcccgacttcttcgttcctcctttgccgatatcctgaatcacgcagacacggtcattaaccagcagacgcgcatgcgtcagggtttctatgagcgcaaccactgtgaaattctgcaagggaacgcgcattttgtggatgagcacaccctggcgctggagtgccacgacggttcggttgagacgctcaccgctgaaaaatttgtgatcgcctgcggctcccgtccttaccatccggcagacgtggatttctcgcacccgcgcatttacgacagcgactccatcctcagcctgcaccacgagccacgccatgtgatcatctacggcgcgggcgtgattggctgtgaatatgcgtcgatcttccggggaatggaggtcaaagttgacctgattaacacccgcgaccggctgctggcgttcctcgatcaggagatgtcagattccctctcctaccacttctggaacagcggcgtggtgattcgccacaacgaagagtacgagaaaatcgaaggctgcgacgacggtgtgatcatgcacctgaaatctggtaagaagctgaaggcggactgcctgctgtacgccaacggccgtaccggcaacaccgattcattgcagctggagaatatcgggcttgaaaccgacagccgcggtcagctcaaggtcaacagcatgtaccagactgcgctgccgcacgtttacgcggtgggcgacgtgattggttacccaagcctggcctccgccgcttacgatcagggccgcatcgccgcacaggcgctggtgaaaggtgaagcgacggcgcatctgattgaagatatcccgacgggcatctacaccattccggaaatcagttctgtcggcaaaaccgagcagcagctgacagccatgaaggtgccttacgaggtgggtcgtgcccagtttaaacatctggcgcgggcgcaaatcgtgggaatgagcgtgggtacgctgaagatcctgttccatcgcgagacgaaagagatcctcggtattcactgcttcggtgaacgcgcggcggaaatcattcatatcggccaggcgatcatggagcaaaaaggtggtggcaacaccattgagtacttcgttaacaccacctttaactacccgaccatggcggaagcctatcgggtagctgcgctgaacggcttaaaccgcctgttttaa

SEQ ID NO: 117618 - DNA, 639 bp, Enterobacter cloacae
gtgatgggcgtaagagcacaacaaaaagagaaaacccggcgttcgctggtggaagccgcattcagtcaactgagtgctgagcggagttttgccagtttgagcctgcgtgaagtggcgcgcgaggccgggattgcgccaacgtccttctatcgtcatttccgtgatgtggatgaactgggcctgaccatggtcgacgagagcggtttgatgctgcgccagcttatgcgtcaggcgcgtcagcgtatcgccaagggcggcagcgtgatccgcacctccgtgtcgacatttatggaatttatcggcaataaccctaacgcgtttcgcctgctgttgcgtgagcgttccggaacgtcagccgcgtttcgtgccgccgtcgcgcgtgaaattcagcatttcatcgcggaacttgccgactatcttgaactcgaaaaccatatgccgcgtgcgtttactgaagcacaggccgaggcgatggtgacgattgttttcagcgcgggtgccgaagcgctggatgtcagcattgaacaacgtaagcaactcgaagagcgactggtattgcagctgcggatgatttctaaaggtgcgtactactggtatcgccgtgaacaagagaagttggcacatcaaaacgatgagtga

SEQ ID NO: 117619 - DNA, 360 bp, Enterobacter cloacae
atgaaacagtcaggtcaggataaaggaacgctgttgctggcattgatcgctggcttatccattaatggtacgtttgcggcggtttttagctcaattgtaccgttctcgattttcccgattatcgcgctggtgctgacggtgtactgcctgcatcaacgctatctgaaccgcacgatgccggttgggttaccgggactggccgcagcctgttttattctgggtgtactgctgtacagcaccgtggtgcgtgcagagtatccggatattggctctaacttcctgcctgcggtgctgtctgtggcgctggtgttctggattggctcgcgtatgcgtagccgcaagagccagttgccggagtaa

SEQ ID NO: 117620 - DNA, 1101 bp, Enterobacter cloacae
atgacccccgaacacctcccgacagaacagtacgacgcacagctggcagaaaaagttgtccgcctgcaaagtatgatgacgcctttcaacgcgcccgttcccgaggtgtttcgttctccggtcagccactaccgtatgcgcgctgagttccgcatctggcacgatggcgatgacctgtaccacatcattttcgatcagcagacgaaatcccgcattcgcgtagacagttttccggcggcgagtgagctcatcaaccagctgatgacgcgaatgatcgacggtgtacgcaacaatccggtgctgcgcaacaagctgttccagattgactacctgaccactcaaagcaatcaggctattgtttctctgctctatcacaaagcgctgaccgacgagtggcgcgagcaggcagaagccctgcgcgatgcgctgcgcgcgcagaacatcaacgtgcacctgattggccgcgcgaccaaaaccaaaatcatgctggaccaggattacatcgacgagcgtctgccggtagcaggtaaagagatggtttaccgtcaggtagagaacagcttcacccagccgaacgccgccatgaacgtgcagatgcttgagtgggcgctgaaggcgacagaagggtctaagggcgatctgctggagctctactgcggtaacggcaacttctcgctggcgctggcgcgtaatttcgagcgcgtgctggcgacggaaatcgccaaaccgtcggtggccgccgcgcagtacaacatcgccgctaaccatattgataacgtacaaattattcgtatggcggcagaagagtttacccaggcgatgaacggcgtacgcgagtttaaccgcctgcaagggattgatttgaagagctaccagtgtgagacaattttcgtcgatccgccgcgcagtggcctggacagcgaaaccgagaagatggtgcaggcgtacccgcgtattttgtacatctcctgtaacccggagacgctgtgcaagaatctggaaacattaagccagacgcacaaggttgaacgtctggcgctgttcgatcagttcccgtatacacaccatatggagtgcggcgtattacttaccgcacggtga

SEQ ID NO: 117621 - DNA, 1851 bp, Enterobacter cloacae
atgattaaaaaagtatcgctgttgacggcgttttccgtcacggcattttcgggctgggcgcaggaaagcgccgactcgttggtggtgacagcaaaccgtttcgaacaaccagcaaaaaccgttctggctccgacctccgtcgtgacccgtgaggatattgaacgctggcaggcaacgagtgttgtggaaatcatgtcacgcctgccgggtgtggacatcgcacaaagcggcgggatggggtcaacctcttcaacgtttattcgcggtacggaatcccgccatgttctggtactgattgatggtatccccctgaataatgccgggatcagcaatgttcccgatttaagccaaattccgacgtcgctgattcagcgtattgagtacattcgcggcccacgttcggcgctgtatggctccgacgcgattggcggtgtgattaacatcattaccgggcgcgacaagccgggtgcggaaatttctgcgggtgtcggttcaaaggggtatcaaaactataacggtgccttccagcaggtgttcgataaaaccaaaatcaccatggccggtgattatacctatacccgtggttttgatattgccgcaaaagatgccccgcgccagccagaccgcgatggttttatgagtaaatcgctgtttggctcggtggagcagcagtttaccgacagcgtcagcgggttcttccgtggctttggctacgataaccgctccgcgtatgacggttacgatcactatggcgcgaccggcattgatgggcggccggacacgcgtcaggtttacagccagaactgggacaccgggttgcgctataaccagggtattttccagtcacagctggtggcagggtatggccgtagcaaagatcagaactatgatccgaaaaaaggccgctacgctgactccgcaaccatggatgacgtgaagcagtacaccacccagtggctgaatacggttgaagtgggtcacggcaatatcggcgcgggtctggactggcagaagcagaaaacccaggcgggtacgggctatctggaaaaaggttacgaacaacgtaataccggcgtgttcctttcggcgatgcagcagttcaacagcgtgacgctggaagcggcggcgcgtaatgacgataactctaattttggcaatcacgccacctggcagaccagcgccgcatgggagttcatcgaggggtatcgcatcatcggttcttacggtacagcgtataaagcaccgaccatgagccagatccacagtaaagattacggtaatccggatctgaagccagaagagagtaagcagtgggaaggcggctttgaaggtctgacggggccggtaaactggcgtgtgacgggctatcgtaatgatatcgataacctcattaatagcgacccgcggacttaccgttattacaacgtcgatgaagcccgtattaaaggaatcgaggcgacggcccagttcgacactggcccggtagggcatcagatttcttacgactacgtcgacccgcgtaatgcgaaaactaacgaagtcctggctcgtcgctcaaagcaacaggttaagtatcagcttgactggcaggtgtgggatctcgactggaatctggcgtaccgttatctgggcactcgctatgacgttgccgttgatccgaatacctatgcaacagaacgcgtgaaaatgggcggcgtcagcctgtgggacgtcgcggtttcatatcctgtcacctctcatctcacagttcgtggtaaaatagccaacctgttcgataaagattacgagacagtttatggctaccaaactgcaggacgggaatacaccttgtctggcagctacaccttctga

SEQ ID NO: 117622 - DNA, 852 bp, Enterobacter cloacae
atggctaccaaactgcaggacgggaatacaccttgtctggcagctacaccttctgatccgcgtcccaccgtgctggtgtttgattccggcgtcggtgggctttcggtctatgatgagattcggcagctcctgccggatctccattacatctacgccttcgataacgtcgcgttcccgtatggggaaaagagtgaagactttattgttgaacgtgtggttgaaatcgtcaccgcggtacaaaagcgttatcccctggcgctggcggtcattgcctgtaatacggcaagcacggtctctcttcctgccctgcgcgaaaaattcccgttcccggttgtgggcgttgttccggcaatcaaacccgcggcgcgtctgacggcgaacggcattgtggggttgctggctacgcgcggtacggtaaaacgtccttatacgcgtgagcttatagagcgctttgccaatgaatgccagatcgccatgctcggctccgcggagctggtggaaatggcggaagcaaaactgcacggcgagacggtatcgcttgaagagctgcgtcgtattttgcgtccatggctgcggatgcaggaaccaccggatacggttgttcttggctgcacccatttcccgctattacaggaagagctgttaaaggttctgcctgaagggacccggctggtggattccggtgctgcaattgcgcgtcggacggcctggctgctggaacacgaggcgccggatgcgaaatcagcggatgcgaacatcgctttctgtatggcgataacaaaagaaaccgaacaacttttgcccgttttacgtcgttatggcttcgaaacgctcgaaaaactggcgctgtag

SEQ ID NO: 117623 - DNA, 663 bp, Enterobacter cloacae
atggatgttaaggcggtaatttttgacatggatggcgtcatcattgactccgaaggcctgtggcgtcaggcgcaaaaagcagctctggcaggctggcgtgctgaggtcagcgacgaagagtgtgagtcactgacaaaaggcaagcggctggatgagattgcccggacctggtgcgaatattgcaggcttgaggccgatcctgcactgattgaagcggccatccgtctgcgcatcatcgaactgattagccgggaaggcaaagcgatagagggcgtctacgacgtgatgacatacttccgtgaggcaggctaccggattgcacttgccacctcttcatcgtatgaaatcgtgcatgctgtgctagagaaactcagtatcggccactattttgaggtcatttgcagcgccgacgatgaacgctacggtaaaccgcatcctgcggtctatctctctgcgctgcgaaaattaggcctggcggcctcacagtgcatagtgattgaggacagccagagcggctaccgtgccgccctgagcgcggggctcaaaaccctcatcgtctcgccagcgtgccatcatgccagctttaacaatgccagtggccggtatgcgtctatgcatgcgctgctggaaacgcttgccgttccagccccggaagcgggttag

SEQ ID NO: 117624 - DNA, 1155 bp, Enterobacter cloacae
atgaaaattgaatctgtaaacgtcaccgtttttcagtacccgacgcgtcgggtctctgacgccgcggggcattcgcatcctgggccggagagcatggccaaaatggcgatgctgaccctcacggcagaagagggctcccgcggatattcgttcgcgccgccggaagtggtgcgcccctttgtggtcaataccttctttcgcaaagtgctggtggggcaggacgcattcaaccgggaacgcatctggcaggatctggcgcactggcagcggggaagcgcgcatcagctgaccgagcgtgcgctgggcttcgttgaacaggcgctgtgggatctgattggccgtaagctcaacctgccggtctggaaactgcttggcggctatcgcgataaggtgccggcctatggcagcaccatgtgcggcgacgatctgccgggcggattatccacgccagaggagtacgccagctttgccgaaaagctggtggcgcgcggttacaaggccatcaagctgcacacctggatgccgccggtctctttcgcccccaatccaaagatggacgtcaaagcctgtgccgccgtgcgtgaagcggttggcccggacattgacctgatgattgacggctaccactggtacagccgtaccgaggcgctgtacatcggcaaagcgctggaaaagcttgacttcgcctggtttgaagagccgatggaagaggagagcatggcctcctacgcgtggctggcggagaacctctcgattccggttatcgggccggaaagcctgggcggaaagcaccacagccgtgctgactggatcaaagccggggcctgcgacatcctgcgcgcagggtcgaacggcgtgggcggcatttccccaacgctgaaggtggcgaacctggcggaatcttttggcatggactgcgaaatacacggcaacggcgcggccagcctggcggtgattggcgccatcaaaaactgccgctggtacgagcgcggcctgctgcacccgttcctcgactacgaccaaccggcggcgtacctcaacagcctggtggacccgatggacgaacacggcatggtcagtctgccgacccgcccggggctgggcgaagacattaattttgcatatatcgaagccaataccgtcagccacgactga

SEQ ID NO: 117625 - DNA, 1617 bp, Enterobacter cloacae
atgaaacgatctcccttagccggggcgtgcttgctcgcgctctcgctgatgatggggagcggtgcggcgtacgcgaaaacgccgcccgaccagctcatcatcggcatgaacatgaataacctgctgactctcgatccggcggcaatgaccggtaacgaagtggtcggcattgtggtcaatctctacgactcgctggtggagctggacccgaacgcgctcaccaacgtcaggcccgcgctggcgacgtcctggaatatttcgccggaccgtaaaaccctgacctttcacctgcgtgacgacgttaaattccactctggcaacccgctgacggcggaggatgtggtctggtcgatgcgccgtctgctgcacctcaaccttgcccaggcgtcggtgtggaagtcgtatggattttctaagcaaaacatcgacagccaaatcagcgcccccgatgcctacacggtgcaaattgttctgcctaagcctaacgatccgcagctggtgatctactccctcggcgcgctcggcaacctcggcgtgctcgacagcaaaacggtgcaacagcacgcggtgaatagcgactggggcaaccgctggcttaccaccaacgaagcgggttccggcccgtttatgctggaaacctggcaggcgaaggacatgctgcgcatgcagcgcaacccgcaatactggcgggaagaacccaaaatgagccgggtggtgctgcgtcatttccaggagtcacaaaccctgcgcctgatgattgagaaaggcgatctcgacgttgccagcaacatggcggtggcggacattaacgccctgcgcaaagacccgcagctcaccgtcgaagccgtgcagaaaggcacggtctactacgtggcgatgagcatgaaagaggtccatttcgctaacccgaaggtgcgcgaagcggtgcgctatctgattgactatcagggcatcaacagcgcgctgatgccgggctacggcgtgctgcaccagcgcccgatcaaggcgggtatgccgtccacgctgccggacccgggctataggctcgatatcccgcgcgccagaaagctgctggcggaggcgggctacccggacgggtttgacaccaccctgcgggtgctggcggatcagccgttcctcaatatcgccatcgccgtgcagtcgacgctgatgcaggcgggcatcaacgccaaaatcatcaccggcaccgggaaccagatttacggcgcaatgcgcgagcgcaagttcgacatgctggtggggcgcggcggtagcggcgtcgaaccccatccgcactccagcctgcgggcgttggtctataacccggacaacagcgatggagcccgtctgaccaacttccagggctggcgtaccagcttctacgacaagccgctcaacgaaatgatcgacaaggccctgctggagcgcgatccggaaaaacagatcgccgactaccagcagatccaggtccgctacgacgaactgatcccggcgatgatccccctgtcacagatggtcgattcggtggtggtgcgtaacgaggtgaagaacttccagtcgcacccgtcggccaccaccttcctgcgtgaggtctacaaaaccggaggtgacaaatga

SEQ ID NO: 117626 - DNA, 1038 bp, Enterobacter cloacae
atgagtgtggcaattctcgcgcccggctcacggacccggcgcttctcaaagcggttaacgcaggtggtggtgacgctgttcggccttctgctgctgacctttttcatcggccgcgtaatgcccgttgatccggtgctggcgattgtcggaccggatgccgaccacagcacctatcagcaggtctatcaccagctgggattcgaccggtcgctgctggctcagttcggtatttacctcaataacctgctgcacggcgatctgggaaatgccctgctgacgggtaaaccggtgactgccgatattctgcgcgtcttcccggcgacgctcgagctggcgacgatggcgattatcgtcggtgcgggtctgggcattccgctgggcgtactggcggcggcgcggcgcaacagcgtttccgactacgtggtgcgcatcatcagtctggcgggttattccacgccgattttctgggtcgggatgatggggctgctgctgttctacgcctggcttggctgggtgggaggcgcgggacgtctggatctcggactggagggggtagtcccacgccgcaccggactgatgacggtggatgcgctgctggccgggaacggcgcggtgttctggaacgccattaaccatctggttttgcccgcgtcgctgcttggcttccactcgctggcctatatcagccgtatgacccgcagcttcatgctggcgcagctgtcgcaggagttcattatcactgcccgggtgaagggcttaactgaacgtcaggtgatctggaatcacgcgtttcgcaacattctcgtgcagctcctgacggtagtggcgctggcctacggctcgctgctggggggggcggtgctgattgaaaccgtcttctcctggccgggcttcggttcgtatctcaccggcagcctgctgctcggggatatgaacgcggtcatgggctgcgtgctgctggtgggggtcatcttcgtgatgctgaacctgctctccgacatgctgtatcaactctttgacccgaggacgaaatcatga

SEQ ID NO: 117627 - DNA, 906 bp, Enterobacter cloacae
atgaccgtttctctggattcgccgctggggaccgggccatccgaacgccgccagcgtatcagacgcacgctgggccgcgccgcgggcttcgtcggcaagatggcgcgcaatcggctcaccgccatcggcggcgggattatcctgctgctgctgattgtggcggcgtttgccccgctgatcgcgccgtacaacccgctggtgcaggacctcaataacgcgctggtcgccccgaacgcactgcactggttcggcaccgacgagtttggccgggacatcttcagccggctggtgtacggcgcgcgcatcacgctctacatcgtgctgctggtctccgtgaccgttggcccgctggggctgctgctgggcgtcaccgcaggctacttcggcggcagggtggacgcggtgctgatgcgcgtcaccgatatctttatctccttcccgagcctggtgctggcgctggcgtttgtcgcggcgctcgggccggggctggagcacgtggtgattgcgattacgctcaccgcctggccgccgattgcccgtctggcgcgcgccgaaactctctctctgcgccaggccgattttatctccgccgtgcggcttcagggtgcttccccggtgcgcgtactgtggcgtcacatcgtcccgctgtgcctgccgtcagtgattatccgcatcaccatgaacatggcggggatcattctcaccgccgccgggctgggctttcttggccttggcgcacagccgccggagccggagtggggagcgatgatctccagcggtcgtacctacatgatggagtgctggtgggtggtgactattccggggctggcgatcctgatcaacagtctggcgttcaacttcttaggagatggcctgcgtgacatcctcgatcctcgtagcgaataa

SEQ ID NO: 117628 - DNA, 861 bp, Enterobacter cloacae
gtgacatcctcgatcctcgtagcgaataacccgatgctcgacgtgcgcgatctccacgtcgattttatcaacggcggcgcggtcacccacgcggtgcgcggcgtctctttccagctcggacgtgaaaagctggcgattgtcggtgaatccggttccggtaaatccaccgtcgggcgggcgctgctacgcctgcatccggccaaagcgcagatccgcgccgcgcggatgcagtttggcgatgtcgatttacaggccgtcagcgaggcgcagatgcgcggcattcgcggcaagcgcatctcgatgatcatgcaggacccgaaatactcccttaacccggtggtgtgcgtgggcgaccaaattgccgaagcctggctgacccatcatccggggcgcaaggcggaagccaaagccagagtgctggagatgctcgacgtggtgcgcattcgccacccggagcgggtgtatcacctctgtccgcacgagatttccggcgggcaggggcaacgcatcatgatcgccatgatgctgatcgccgatcccgagctggtcattgccgacgagccgacctcggcgctggacgtgtcggtgcgcttgcaggtgctggggttactggatgacctggtgcagtcccgcggtctggggctgatctttatcagccacgacatcaacctggtgcgcagcttctgcgaccgggtgctggtgatgtacgccggacgggtagtggaatcgattgccgcgaaggatctgcacaacgccaggcatccctacacccaggggctcatcagcgcgctaccggaaatcaaccatcgccgaccgacgctgccggtattacagcgtcaggccagctggctcaacgagtaa

SEQ ID NO: 117629 - DNA, 774 bp, Enterobacter cloacae
atgatcgagatacaacaccttaacctgacgtttggcgagggcgagaagcgtaatcaggtgctggacgatgtgaatatcagcgtgagggacggcgagatttacggcctggtgggggagcccggttcgggcaaaaccacggtgctgaaatgccttgccgggctgtttacccactgggagggcgagctggcgattaacggcaagcggctggaaaaacgtatcagccaggaacgctgccgccgggtgcagatggtatttcaggatccgtacggctctttgcatccgcgtcacaccatcggcgatattctggaagagccgctgcacattcaccgcataaaagatcgggagcggcgcgttcacgccctgctggataaagttgggcttagccgggcgtttcgcgatcgctatccgcaccagctttccggcgggcagcgccagcgcgtggcgattgccagggcgctgattctggagccgcaggtgctgctgctggatgaacctacctcggcgctggacgtctcggtgcaggcggaaatcctcaacctgctggcggaacttcagcgtgagtcgaacctgacctacctgatggtgacccacgatctgggcgtgattgcccatctgtgtcagaaggtgacggtaatgcagtatggcaaaatccttgaaagcctgacggtggacgaactggtcgccgggcaggccaaaaccgactatacgcggatgctggtcaatgcctcacagcagtattcccgcgagatggcgcgggaggtggcggtgtattag

SEQ ID NO: 117630 - DNA, 900 bp, Enterobacter cloacae
atggcatcctatccagacagtttattaattctcaatggcaaaagtgcaggcaacgatctgttgcgccaggcgatcaccgaattgcgtgaagatggcgcgcgcattcacgtgcgggtgacctttgaaaaaggcgatgcggcacgctatatcgacgaaggcatcaggttaggtgctgagaccatcatttcaggcggcggcgacggaacaatcaacgagatcgctggtgcgcttattgacctcaacacagcacatcgcccggtgatgggcattttaccgctcggtaccgccaatgattttgccaccagcgccggcatacctgaggatttaggcaaagcactgcaactggctatcctcgggaaagcgaccgccgtcgacattgcacaggtgaatgaaagaacctgttttatcaacatggcaacgggcggtttcggcacgcggatcaccagcgaaacgccggagaagctgaaagccgcgctgggcggcgtctcgtacctcattcacggcctgatgcgcatggacaccctcaagcccgacagctgtgaaatccacggtgagaacttccactggcagggcgacgcgctggtgattggtatcggcaacggacgtcaggcaggcggcggacagcagctttgcccggaagccctgattaatgatggtcagctacagctgcgcatttttactggcgacgggctgctgcccgcgctgtttacgacgctgacgcagccagaggagagccccaatattatcgccgggaaatccgcgtggtttgaagtgatcgccccacacggcatgacctttaaccttgatggcgaaccgctgagcggagagaaattccgcatcgaagtggttccgggcgcgttgcagtgccgattaccgccggattgtcagctcttgcgctga

SEQ ID NO: 117631 - DNA, 1362 bp, Enterobacter cloacae
atgtttaaaccggaactcctttccccggcgggaacgctgcaaaatatgcgttacgctttcgcctatggtgccgacgccgtttacgcgggccagccgcgctactcgctgcgcgtgcgtaacaacgaattcaaccacgagaatcttcagctcggcatcaatgaagcgcatgccctgggcaaaaaattctacgtggtggtgaacatcgcgccgcacaacgccaagctgaaaacgttcattcgcgacctgaagccggtcgtggagatggggccggacgcgctgatcatgtcggacccgggtttaatcatgctggttcgggagaacttcccggagatggacattcacctctcggtgcaggctaacgccgtcaactgggcaacggtgaaattctggaaacagatggggctgacccgcgtcattctgtcccgcgagctgtccctcgaagagatcgaagagatccgcacccaggtgccggatatggagatcgaaatcttcgttcacggcgcgctgtgcatggcctactccggccgctgcctgctctctggctacatcaacaagcgtgacccgaaccagggcacctgcaccaacgcctgccgctgggaatataacgttcaggaaggcaaagaagatgacatcggcaatatcgtgcacaaacacgagccgatcccggtcaccaacgttgagccaacgctgggtatcggcgcgcctaccgacagcgtgtttatgatcgaagaagccaaacgtccgggcgaatacatgaccgccttcgaagacgagcatggcacctacatcatgaactccaaagatctgcgcgccatcgcacacgtcgagcgtttaacccagatgggcgtacactccctgaaaatcgaaggccgcaccaagtcttactactactgcgcccgtaccgcacaggtgtatcgcaaagccatcgacgatgccgccgccggtaaaccgttcgacactagcctgctggaaacgctggaaggtctggcgcatcgcggctataccgaaggtttcctgcgtcgtcacacccacgacgactaccagaactacgagcatggctactcgatttccgaacgccagcagtttgtaggcgacttcaccggcgaacgtaaaggtccgctggccgccgtcgccgtaaaaaacaaattcactaaaggcgacagcctggagctgatgacgcctcagggcaacatgaacttccgcctggagcacctggaaaacaaaaaaggtgacgcgatagaggtcgctcctggcgacggccatgtggtctggctgccggttcctgaagaggtagagctggagtttgcactgctgatgcgtaattttgaaggtgaaaatacccgaaatccacacggcaaatag

SEQ ID NO: 117632 - DNA, 939 bp, Enterobacter cloacae
atgcaaaatgttattggtaatttattcattatcatcaccacagctataagcgttgccagccttttcttggggttatttgcttataataaaaaaatgaaaacaaaagcaatacaaaaaatagaactcctcatacctaaaaaaaacagaataaccaagttttccgagcaatgggtaagcgcttttttcctggcattcggtaatcatgcattctcaaaaaggcaattaattaccataccgtttttattgattttatattccagtatcttatttgtagtttggtatctctgggtgctgacttttagaaatcctgagcacatcattcctcaacatctgccattgaccattaaagttgcattacatgactttattcattttggcttttggtactctttactgcttgatgtgatgtcaatttatcttatcagagcttacattaacgcaggtctatcgaaagggttttcgtctgtaaaatcgatcgtttatttttcttcaattgttctgggcgttatgctctcatttacacttatcgtcacccatcttaaaaatgcttcgattgaggacctctatatccagcaaggcctgtattttgaagacagacctgtaatgacatggaacccgctggaagtgatacggtcttcactggatttcatcgataacgaaaccatgattatctttacctcaaaaggggcaatatctaactacttcattccgcaggctatcatgttttacctttccatgtttacgcaattgacgctgcttattgttttcatcagctatatgatcacaaaaatactgcataacattcgaacagttgccatctggacagtcaagtattctggaacggctacgatgaatgccattggtttcattcttatcgccggtattattctacttgctttaatatatttgtgtttgtatgtcatatcgctaatggtttaa

SEQ ID NO: 117633 - DNA, 723 bp, Enterobacter cloacae
atgaccgagttaccgattgacgacaacacaccgcgtattttgatcgtggaagacgagcctaaacttgggcaactgctgatcgactatctgcgtgccgcaagttacgcgccaacgcttatcagccacggcgaccaggtgctgccctacgtgcgccagacgccgccggatctgatcctgctggatctgatgctgccgggtaccgacggcctgaccctgtgccgggaaattcgtcgtttctccgatgtgcccatcgtgatggtgacggccaaaatcgaagagatcgaccgtctgctggggctcgaaatcggcgccgacgattacatctgcaagccttacagtccgcgggaggtggtcgctcgggtgaaaaccatcctccgccgctgtaagccacagcgtgaattgcaggtgctggatgcgcaaagcccgctgatcgtcgacgaaagccgcttccaggcgagctggcgcagcaaactattggatcttaccccagcggagttccgcctgctgaaaacgctctcccacgagccgggaaaagtgttttcccgcgagcagttgctcaaccatctgtatgacgattaccgcgtggtgaccgaccgcaccatcgacagccacatcaaaaacctgcgccgcaagctggaggcgctcgacgccgaccagtcgtttattcgcgcggtgtacggcgtgggttatcgctgggaagcggatgcgtgtaggattgcttaa

SEQ ID NO: 117634 - DNA, 1404 bp, Enterobacter cloacae
atgaaattctggcgtccggggatcaccggtaagctttttgtggcgattttcgccacctgtatcgttctgctgattaccatgcactgggcggtgcgggtcagctttgagcgcggctttattgactacattaagcacggtaacgaacagcgactacagggcttaagcgacgcgctgggcgaacagtatagcctgcacggtaactggcgttttctgcgcaataacgatcgctttgtgtttcaaatcctgcgctcgctggagcacgataatgacgacgaccgcccggggccgggcatgccgccgcacggctggcgcacccagttctgggtgatagatcaggagatgcgcgtgctcgttggcccacgctctccggtaccgccggacggtacaaagcgcgccatcacctcgaacggcgcgacggtgggctgggttatcgcctcgccggtcgagcggctgacgcgcaacaccgacatcaactttgaccgccagcagcgtcagaccagctggctgattgtcgcgctttctaccctgcttgcggcgctcgccaccttcccgctggcgcgcggcctgctggcgccggttaagcgcctggtggaaggcacgcacaagctggcggcgggtgatttctcgacccgcgtggacacccgcagccaggatgaactgggcaagctggcgcaggacttcaaccagctcgccagcacgctggaaaaaaaccagcagatgcgccgcgactttatggccgacatttcgcacgagctgcgcaccccgctggcggtgctgcgcggcgagctggaggcgattcaggatggcgtgcggcagttcacccccgagtccgtggcctcgcttcaggcggaagtcggcacgctgaccaagctggtggacgatctgcatcagctttccatgtccgacgaaggcgccctggcctaccagaaagccccagtcgacgtgatcaatatccttgaagtcgtgaccggcgcattccgcgaacgcttcgccagccgtgacctgaaaatcaacctttcgctgccggacagcgcggtggtatttggcgacagagatcgcctgatgcagctgttcaataatctgctggagaacagcctccgctacaccgacggcggcggcgcgctgcatatctccggcaggcaggaaaacgggcgctttgccctgacctttgcggactccgcccctggcgtgaaagatgcgcagctggaaaaactgttcgagcgcttctatcgcaccgaaggttcacgcaaccgcgccagcggcggttccggccttgggctggcgatttgcgttaacattgtggaggcccacggcggcaccatccgcgccgcccattcgccttttggcggggttagcattacagtagagttacctctggaacgggatttatcgagggaagcatga

SEQ ID NO: 117635 - DNA, 1416 bp, Enterobacter cloacae
atgaccgacctacccagtaatgttcgctggcaattgtggatcgtcgcgttcggcttctttatgcagtcgctggacacgaccatcgtgaacaccgtcctcccctcgatggcgaaaagcctgggggagagcccgctgcacatgcatatggtgattgtcgcctacgtgctgacggtcgccgtgatgctgcccgccagcggctggctggcggataaagtcggtgtgcgaaacatcttcttcaccgccattgtgctgtttaccaccgggtcgctgttttgcgcccaggccaataccctcgaccagctggtgatggcgcgcgtgctacagggcgtcggcggcgcgatgatggtgcccgtcgggcggttaacggtgatgaaaattgttccgcgcgcgcagtatatggcggcgatgaccttcgtcaccctgcccggtcaggtcggcccgctgcttggcccggcgctgggcggtattctggtggagtatgcctcctggcactggatcttcctgatcaacctgccggtcggtattatcggcgcgattgccaccctgacgctgatgccgaactataaaatgcagacccggcgctttgatttcgttggctttatcctgctggcggctggcatggcgacgctcaccctggccctcgacgggcaaaaagggctggggatctcctccctgtcgctcgccctgctggtggcgctggggatcaccgcgattctctggtatctgtggcatgccagaggcaacgctaacgcgctgttcagcctgaatctgttcagaaatcccacctaccgtcttggtctcttcggcagctttgccggacgcatcggcagcggcatgttgccgtttatgacgccggtgtttttacagattgggatgggcttctcgccgttccacgccgggctgatgatgatcccgatggtgctcggcagcatggggatgaagcgtattgtggtgcaggtggtgaaccgctttggctatcgccgggtgctggtgaccgccacgatcgggctggcgttggtttgcctgctgtttatggccgtggcgctgctgggctggtactacatcctgccgctggtgctgttctgccaggggatcatcaactccatgcgcttctcgtcgatgaacaccctgacgctgaaagatctgccggacgagctggcgagcagcggtaacagcctgctgtcgatgatcatgcagctctccatgagcgtgggggtcacggtcgccggattgctgctcggcatgtacgggcagcaccatctcagcgccgacacccccgtcgcgcatcaggtatttttatacacttacctcagcatggcggtaattatcgccctgcccgcttttatctttgtcagagtaccgaatgacacgaccaaaaacgtcgtgatccgacgcggcaaaaggagtgcaccatga

SEQ ID NO: 117636 - DNA, 3078 bp, Enterobacter cloacae
gtgaagtttttcgccctcttcatttaccgtccggtggcgacgattttactctccgtcgctattaccctgtgcggcgtgctgggcttccggctgctgccggtggccccgctgccgcaggtcgatttcccggtgatcatggtcagcgcctcgctgccgggtgcctcgccggaaaccatggcgtcatcggtggcgacgccgcttgagcgctcgcttgggcgaattgccggggttaacgagatgacctccagcagttcgctgggcagcacgcgcatcattctggaatttaacttcgaccgggacatcaacggcgcggcgcgtgacgtgcaggccgcgataaacgccgcccaaagcctgctgccaagcggcatgccgagccgtccaacctaccgcaaggctaacccgtccgacgcgccgatcatgatcctgacgctcacgtcagagacctactcccagggcgagctgtacgattttgcctccacccagctggcgcaaaccatcgcccagattgacggcgtgggcgacgtggacgtcggcggcagctctctgcccgccgtgcgcgtggggctgaatccgcaggcgctgtttaaccagggcgtatcgctggacgacgtgcgttccgccatcagcaacgccaacgtgcgtaagccgcagggcgcgattgaggacaacagccaccgctggcagatccagaccaacgacgagctgaaaaccgccgccgagtatcagccgttgattattcactacaacaacggtgcggcggtgcgcctgagcgacgtcgccagcgtcaccgattcggtgcaggacgtgcgtaacgccgggatgactaacgccaaaccggcgattttgctgatgatccgcaaactgccggaagccaacattatccagacggtgaacagcatccgcgcgcgcctgccggagctccaggaaacgattccggcggccatcgacctccagattgcgcaggaccgctcccctaccatccgcgcctcgcttgaggaggtagagcaaacgctgatcatctccgtcgcgctggtgatcctggtggtgttcctgttcctgcgctcggggcgcgccacgctgatcccggcggtggcggttccggtatcgctgataggcacctttgccgccatgtacctgtgtgggtttagtcttaacaacctgtcgctgatggcgctgacgattgccaccgggtttgtagtggatgacgccatcgtggtgctggagaatatctcgcgccatctggaagcgggcatgaagccgctccaggcggcgcttcaggggacgcgcgaagtgggcttcacggtcctgtccatgagcctgtcgctggtggcggtgttcctgccgctgctgctgatgggcggcctgccggggcgactgctgcgcgaatttgccgtcacgctttccgtcgccatcggtatctccctggtgatttcgctgacgctgacgccgatgatgtgcggctggatgctaaagcgcagccaacctcactcgcagccgcgcaggaaaggctttggccgcgtcctgatggcgatgcagtcaggctatggcaaatcgctgaaatgggtgctgaaccacacgcgtcttgtcgggctggtgctgatcggcaccattgtgctcaacgtctggatgtatatcaccatcccgaaaaccttcttcccggagcaggataccggcgtgctgatgggcggtattcaggcggaccagagtatttcgttccaggcgatgcggggcaaactgcaagactttatgaaaatcatccgggaagatccggccgtggataacgtcaccggctttaccggcggctcacgcgttaacagcgggatgatgtttattacccttaagccgcgcggtgaacgtcacgaaacggcgcagcagatcattgaccgcctgcggctgaagcttgccaaagagccgggggcaaatctgtttttgatggccgttcaggatatccgcgtcggcggacgacaggctaacgccagctatcagtacaccctgctctcagatgacttagccgccctgcgcgagtgggagccgaagatccgtaaagcgctggccgcgctgccgcagctggcggacgtgaactccgacagccagaataacggcgccgagatggcgctcacctacgatcgcgaaaccatgtcccgcctgggcattaacgttgaagcggccaacagcctgcttaacaacgccttcgggcagcgtgaagtctccaccatctatcagccgatgaaccagtacaaggtggtgatggaagttgatccgcgctacacccaggacatcagcgcgctggacaagatgtttgtgatcaataatgacggcaaggcgatccccctgtcgtacttcgccagctggcagccgtcgaacgcgccgctgtcggtgaaccaccaggggctttccgccgcctcgaccgtgtcgtttaacctgccaaccggctcgtcgctgtctgaggccagcgacgccatcaaccgcgccatgacccagctcggggtgccctcctccgtgcgcggcagctttgccggtacggcgcaggtgttccaggacaccatgaactcgcaggtcattttgatcctggcggctattgccacggtttatatcgtgctgggcgtgctgtacgaaagctatgtgcacccgttgaccattctctccacgctgccttctgcgggcgtgggggcgctgctggcgctggagctgttcggtgccccgttcagcctaatcgcgctcatcgggatcatgctattaataggtattgtgaagaaaaacgcgattatgatggtcgactttgccctggacgcccagcgtaacggcaacctgacgccggacgaggcgatattccaggcctgtctgctgcgttttcgcccgatcatgatgaccacgctggccgcgctgttcggtgcgctaccgctggtcatatccggtggtgacggctctgaactgcgccagccgctggggatcacgattgtcggcggcctggtgatgagccagctgctgacgctctacaccacgccggtagtctatctgttctttgaccgactgcggctgcgtttttcgcgtaaaaagagaaccacggtgaccgagtaa

SEQ ID NO: 117637 - DNA, 3123 bp, Enterobacter cloacae
atgcaggtcttgccgccgagctctacaggtgggccatcacgcctgtttatcttacgtccggttgcgacgaccctgctgatggtggcgatcctgctggccgggatcattggctaccgttttctgcccgtgtcggcgctgccggaagtggactacccgaccattcaggttgtcaccctctatccgggcgccagtccggatgtggtgacgtccgccatcaccgccccgctggagcgtcagtttggccagatgtctggcctgaagcaaatgtcctcccagagctccggtggcgcttcggtcgtcacgcttcagttccagctcacgctgtcgctggacgtcgctgagcaggaggtgcaggccgcgattaacgccgccacaaacctgctgccgtctgacctgccgaatccacctgtttacagcaaggtcaacccggcggatccgccgatcatgacccttgccgtcacctcctccgccatgccgatgacccaggtggaagacatggttgaaacccgcgtggcgcagaagatttcgcaggtgaccggcgtggggctggtgacgctggcgggcggtcaacgccccgccgtgcgcgtcaaactgaatgcccaggccattgccgcgctggggttaaccagcgaaaccattcgcaccgccatcagcagcgccaacgtcaactcagcgaagggttcgctggacggcccgacccgcgcggtcacgctctccgccaacgaccagatgcagtccgccgatgagtaccgtcagctgatcattgcctaccagaacggcgcgccgatccgtttgggcgacgtggcaaccgttgaacaaggcgcggaaaacagctggctcggggcgtgggccaataagcagcaggcgattgtcatgaacgttcagcgccagccgggcgcgaacattattgataccgccgacagcattcgcaccatgctgccgcagctggtggaaagcctgccaaaatcggtcagcgtgaaagtgctctctgaccgcaccacgaatattcgcgcgtcagtgaccgacacccagttcgagctgatgctggcgattgcgctggtggtgatgatcatctacctgttcctgcgcaacgtcccggcaaccatcattcccgccgtcgccgtgccgctctcgctggtcggcaccttcgcggtgatggtgttcctcgacttctcgattaacaacctgacgctgatggcgctcaccatcgccaccgggtttgtggtggacgacgccatcgtggtaatcgagaacatctcgcgctatatcgaaaaaggtgaaaagccgttagccgccgcgctgaagggcgcgggggagattggctttaccattatctcactcaccttctcgctgattgcggtgctgatcccgctgctgtttatgggcgatatcgtcgggcggctgttccgcgagtttgccgtgacgctggcggtcgccattttgatctctgccgtggtgtcgctgacgctgacgccgatgatgtgcgcccgcatgctgagccacgagtccctgcgcaagcaaaaccgcttctcgcgcgcctccgagcggatgttcgagcgcattatcgccgcctacggccgcgtgctggcgaaagtgctgaaccatccgtgggcaacgctcggcgtggcgctcggcaccctggcgctcagcgtcatgctgtggattttcattccgaaaggcttcttcccgattcaggacaacggcattattcagggcacgcttcaggcgccgcagacggtctccttcgccaacatggcgcagcgccagcagcaggtgtctgagatcatcatgaaagatccggcggtggaaagcctgactgcctacgtgggcgtggacggcaccaacccgtcgctcaacagcgcgcgcctgcaaattaaccttaaaccgctcgatgaccgcaacgatcgcgttaacgcggtgattgaacgcctgcaaagcgcggtggcgcgcgtgccgggcattgagctgtatctgcaaccgatccaggatttaaccattgatacgcaggtgagccgcacgcagtaccagtttacgctccaggccacctcgcttgaggcactgagcacctgggtgccgcagctggtggacaagctgaaagcactgccgcaggtttctgacgtcagcagcgactggcaggataaagggctggcggcgtacgtgaacgtcaaccgcgacaccgccagccgtctgggcattaccatgtccgacgtggataacgccctgtataacgcctttggccagcgcctgatctccaccatctatacccaggccaaccagtatcgcgtggtgctggaacataacaccgaaaacacgcccgggctggccgcgctggacacgatgcgcctgaccagcaaagacggcgggattgtgccgctcagcgccattgccagcgtggaagagcgccacaccccactgtcgattaaccatctcgatcagttcccgtccaccaccatttcgttcaacgtgccggacgggtattccctgggcgaagcggtggaggccattctgggcgcggagaaagaactcagcttcccgtccgatattcagacccagttccagggcagtacgctggcgttccaggccgcgctgggcagcaccgtctggctgattgtcgcagcggtggtggcgatgtatatcgtgcttggcgtgctgtatgaaagctttatccatccgatcaccatcctctccaccctgccgacggcgggcgtgggggcgctgctggcgctgatgctggcggggagcgagctggacgtcattgcgatcatcggcatcatcctgcttatcggcattgtgaagaaaaacgccatcatgatgatcgactttgcgctggccgccgagcgcgagcagggtatggcgccgcgcgaggccatttaccaggcctgtctgctgcgttttcgtccgatcctgatgaccaccctcgccgccctgctgggcgcgctgccgctgatgctgagcaccggcgtgggggccgaactgcgccgtccgctgggcatcgggatggtgggcggcctgctggtgagccaggtgctgacgctgtttaccacgccggttatctacctgctgtttgaccgtctggccctgtggacgaaaagccgcttcccgaaacgtgaagaggaggcgtaa

SEQ ID NO: 117638 - DNA, 1200 bp, Enterobacter cloacae
atgaaaggcagtaacaaatcccgctgggcaatcgccgttggtctgattgtggtggtcctggccgcctggtactggcacagccagtccgcgaactccacggcacctgctggcgctaatagcccctcacaacgctcaacgggcggcgggcgccacggtatgcgcggcggtgcgctggcaccggtgcaggcggcaacggcggtgaataaagcggtgcctcgttatctctccgggctgggaaccatcaccgccgccaacaccgtgacggtacgtagccgcgtggacggtcagttgatggccatccatttccaggaaggtcagcaggtaaaagccggcgatctgctggcggaaatcgatccaagccagtttaaggtggccctggcgcaggcgcaggggcagctcgcgaaagacaaagccaccctcgccaatgcccgccgcgatttagcccgctatcagcagctggtaaaaaccaacctcgtgtcacgccaggagctggacacccagcagtctctggtcagtgaatctcagggcaccatcaaggccgacgaagccgcggtcgccagcgcccagctccagctcgactggagccggatcaccgcgccgattgacggccgcgtgggcctgaaacaggtcgatatcgggaaccaaatctccagcggcgataccacgggcatcgtggtgatcacccagacgcaccctatcgatctcgtctttaccctgccggaaagcgacattgcgacggtgatacaggcgcagaaggccggaaaagcgctggtggttgaagcctgggatcgcaccaacaagcagaagctgagcgaaggttcgctgttgagcctggataaccagatcgacaccaccaccggcaccattaagctaaaagcacgcttcaacaatcaggacgatgccctgttcccgaatcagttcgtcaacgcgcgaatgctggtcgcgaccgaagaaaacgcggtagtgatcccgacggcggccctgcaaatgggcagtgaaggcaactttgtctgggtgctgaacagcgaaaacaaggtcagcaaacatctggtgaaaaccggcatccaggacagccagacggtggtgatcagcgccggactgtccgctggcgaccgcgtcgtgaccgacggtattgaccgtctgaccgaaggggcgcaggtcgaggtggtggaagcgcaggatacaggagcaaaagcctga

SEQ ID NO: 117639 - DNA, 1353 bp, Enterobacter cloacae
gtgtttattggattcgactacggcaccgcaaactgctcggttgcgataatgcaaaacggacaaccgcagctcctgaaaatggaaaacggcagtacgctgttgccgtcaatgctttgtgcgcccacgcgtgaagcggtgagcgagtggctgttccgccaccatcaggttccggccacggcggcggagacccaggcgcagctgcgccgtgcggtcagctttaaccgcgaggaagatatcgacgttaccccgtccagcgtgcagttcggcctctcttccctcgggcagtatattgaagacccggaagaggtctacttcgttaaatcgccgaaatccttcctcggcgccagcggcctgaagccgcagcaggtggcgatgtttgaagatctggtctgcgcgatgatgctgcacatccgcaatcaggcgcagtcccaggtgccggatgccatcacccaggcggtgattggccgtccgattaactttcaggggctgggcggcgacgaagccaaccagcaggcgcaggggatccttgagcgtgcagcgcaccgggcaggcttccgcgacgtggtgttccagtatgagccggttgcggcggggctggattttgaagccacgcagacggaagagaaacgggtgctggtggtggacatcggcggcggtacgacggactgttcattactgctgatgggtccccagtggcatcaccgtcgcgatcgtgaaaatagtctgctggggcacagcggctgccgcgtgggcggtaacgatcttgatattgccctggccttcaagagcctgatgccgctgctcggtatgggcggtcaaaccgataaaggcatcgccctgccgatcctgccgtggtggaacgcgattgccatcaacgacgtccctgcccagagtgatttttacagcaccgcgaatggccgtttcctcaacgatctggtgcgtgatgcgcaggatgcagagaaggtcgcacttctgtataaggtgtggcgtcagcgcctgagctaccgggtggtgcgcaccgccgaagagagcaaaattgccctttccgatcgtccagagcatacggtttcgctgccgtttatcagtgacgatctggctacggctatcactcaggaagggctggaaatggcgctgactcagccgcttcagcgtattctggagcaggtgcaactggcgcttgagaacggcaacgtgaagccggacgtaatttacctgactggcggtagcgcccgttcgccgctgatcaagaaagcgctggcggaacagctgccggggatcccgattgccggcggcgatgactttggctccgttacggcagggctggcgcgctgggcgcaggtggtgtttagctaa

SEQ ID NO: 117640 - DNA, 873 bp, Enterobacter cloacae
atgtacaccctgaactggcaaccgccctacgactggtcgtggatgtttggctttcttgccgcgcgtgcggtcacgggggttgaaaccgttacggaggattactacgagcgcagttttggctatgccgggcaccagggcgttttccgggttacgccagacagcgcaacccctacgctggcggtgtcgctcagccctggcctgatcccggtggcggatatctgcctcgaccgcatctcccgcctgtttgacctcgattgcgacccgctgcacattgcgcagactctcggcgagctcggcgcggcgcggccgggcttacgtttgcccggcgcgatggatgcatacgagcagggcgtgcgcgccattctcgggcaactggtgagcgtggcgatggcggcaaaactggcgtcacgggtggtggcgctgtgcggtgaacccattgaggatgcgccgggctatctctgctttcctccgccagaggtgctggccgcggcagatccgctggcgttgaaagccctcgggatgccgctcaggcgtgcggagtcgttgattcatctggcgcagtcggtggtggacggtgaattcccgctgttcccgcctgcgaacgttgaggccgggatgaaggcgctacagcagcgccccggcatcgggcgctggaccgcgaattatctggccctgcgcggctggcaggcgaaggatgttttcctgccggatgactatctgattaaacagcgctttgccggtatgacgcccgcgcagatccgtcgctatgccgaacgctggcagccgtggcgctcgtatgcgctgttacatatctggtacaccgacggctggtcgccgtcagttgatggcgaaatagctggtattcagcagtag

SEQ ID NO: 117641 - DNA, 3330 bp, Enterobacter cloacae
atgaataaacaataccagcgggttttggttactaccccacatcctttactgcggcttgtctgtctgggtctggtcacgttcatcttcaccttattttccctcgagctgactcgcttcggtacgctgctggcgccactatggttcccgacttcaattatgatggtggcgttttaccgccatgcgggaaaaatgtggcccggcattgcgctcgcctgctcctttggcaatatttttgcctcgtggatgctcttctcatgggcatcgatcaacatcacctacacggcgatcaatatcattgaggccacggttggcgcgctgttactgcgtaagttgctcccctggtataatccgctgcaaaacctcaacgactgggtccggcttgccctcggcagtgccctggtgccgccgctggtggggggcgttctggttcattttctggtgccgagcgcggagccgctgcgtaatttccttgtctgggtactttcagaagccattggcgcactggcgctggtgccgttaggtctgctgtttaaaccgcattacctgctgcgccaccgcaacccgaaactgctgctggaaacgctggtgaccctggtcgtcacgctggttcttagctggacggcaatcacctggctgccgtggccattcacctgcattatcgttctgctgatgtggagcgcggtccgtctgccgcgtatggaagcgttcctgatatttttattcaccatcatgatggtgtccctgatgatgacgcgaaatccgctctccatgacgccctccaccatgattgtcaccttcaacgcgccgtggctccccttcctgatgatgctgctccccgccaacattatgacgatggtgatgtatgccttccgggccgagcgtaaacatattacggaaagcgaagaacgttttcgcaatgcgatggagtattccgcgattggtatggcgctggtgggcgttgagggccagtggctccaggccaacaaggcgctgtgcaatttcctcggttacagccagtctgagcttcagtcgctcacgttccagcagttaacctggccggaagatttaaataccgacctggagcagttgcaacagctgattcacggcgagatcaacacctacaccctcgaaaaacgctactacacccgcagcggagaggtggtgtgggcgctgctggccgtctccgttgtgcgccatgccgacggcacgccgctctactttattgcccagattgaagacatcaacgatctgaaacagaccgagtgggtgaataagcgtctgatggagcgtatcactctcgctaacgaagccggcggaatcgggatttgggagtgggatctcgagccggacgtaatcagctgggataaacggatgtttgagctgtacgagatcccctcgcacattaaacccacctggcagctctggcatgcggccatggtgcctgaagatcgtacgcacgccgaacaggtcctgcgtgagtcactccaggccagggtacctttcaagctggaatttcgcattcgcgtcaaggatggcattcgccacattcgttcgctggcgaaccgggtgctgaacaaacagggcgaagtggagcggctgttagggatcaacatggatatgaccgaggtgaagcagctgaacgaggcgctgttccaggaaaaagagcgcctgcatatcaccctcgactccatcggcgaagcggtgctgtgtaccgacatcgacatgaacatcacctttatgaacccggtcgccgagaagatgagcggctggtcgcaaagcgaagcgctgggtcagcccgttctgaaggtgctgcacattaccttcggcgagaacggtccgttaatggaaaacatccacagcggcgatatgtcccgtaccgatatcgaacaggatgtggtgcttaactgccgcaatggcggcagtttcgacattcattacagcattacccccctcagcactctggaagggcacaccatcggctcggtgctggtgattcaggacgtcaccgagtcgcgcaaaatgctgcgccagctgagctacagcgcttcccatgacgcccttacccacctggcgaaccgcgtcagctttgaaaaccaccttaagcgcctgttgcagacggtacaggagacccatcagcgtcacgcgctggtctttatcgatcttgaccgtttcaaggcggtgaacgatacggcaggccacgcggcgggcgacgctctcctgcgcgaactctcttcgctaatgctgaccatgctgcgctccagcgacgtgctggcgcgtctgggcggcgacgagtttggcctgctgctgccggactgcaacgtcgaaagcgcacgctatattgcgggccggttgatcgacgccatcaacaactatcatttttcctgggaaggacgcctgcaccgcattggcgccagcgcggggattacgctgattgacgacaccaattaccaggctgcggaagtgatgtctcaggccgatatcgcctgctacgcctcgaaaaacagcgggcgcggcgtggtcaccgtctacgaaccccagcaggagcggatccacagcacgcgcagcatgatgtcgctggacgagcagtggcacatgattaaagataaccatctgctgatgatcgcccgcagcgtcgcctcgccgcgcattcccgagagcagtagcttctggctgatttccttgcggctgtggaccagccagggggaagtgctggaagagcatgccttccgcgccgggctggcggagccggagctgctgcacgccctggaccgacggatattcagcgaatttttccgtacctatgccgcacaggtggcggccaaaggaatgggcgtcgcgctgccgctctcagaagcgggtttagccagcgtcacgctggtggatgagctgctcgacctgatcaccagaggtccgctgccggcgcggctgctgcatctggcgatcgccgttgatgtgctgagcaatacggatgaaaacgtgcagcagggtctgcaaaagcttcgtcaggccggctgtcgcgtggtgctgacccgggtcggacgcgatatgaacgtcttcagccagctcagcgccaacaccgccgattatctgctgctggatacagacatggtgaccaacgtccacggcaatctgatggatgagatgatggtgacaatcattcagggccacgcccagcgtctgggcataaaaaccattgccgggccatgccatcagtcgatcatgatggatacgctgtcgggcatcggcgttgattttatttacggcgacaccatcggggaagcgcagccgctcgatctactgctgaataccagctatttcgccatcaactga

SEQ ID NO: 117642 - DNA, 642 bp, Enterobacter cloacae
atgactgataagtctcatcagtgcgtcatcataggcatcgccggcgcatcggcttcaggtaaaagtcttattgccagtacgctttatcgcgaactgcgtgaacaagtgggtgatgagcatatcggtgtgattcccgaagatagctattacaaagatcaatcccatctttcgatggaagagcgcgtaaaaaccaactacgaccaccccagtgcgatggatcacagcctgctgttccagcatctggaagcgctgaagcgcggcgaggcgattgagctgcccgtctacagctacgtggaacatacccgcacccaggaaacgatccgtatcgagcccaagaaggtgattatccttgaagggattttgctgctcaccgacgcccgtctgcgcgaatctatgaacttctcgattttcgtcgacactccgctggatatctgcctgatgcggcgtattaaacgcgacgttaacgaacgcggccgctccatggactccgtgatggcgcaatatcagaaaaccgttcgcccgatgttcctgcaatttattgaaccttcgaaacaatacgccgatattatcgtgcctcgcggcggtaaaaaccgtattgccattgatatcttaaaagcgaaaatcagtcagttttttgaataa

SEQ ID NO: 117643 - DNA, 582 bp, Enterobacter cloacae
atgcgtctttgtgaccgcgatatagaagcctggctggatgaaggccgcctgtctatcaccccgcgtccgccggttgagcgtattaacggcgtgaccgtcgatgtgcgtctggggaataaattccgcaccttcagcggccacacggcaccgtttatcgacctcagcgggccgaaagacgaagtcagtgcggcgctggatcgcgtcatgagcgacgaaatcgtcatcgaagaaggagaggcgttttatctccatcctggcgaactggcgctggcggtgacctttgaatcggtcacgctgcctgcggacctggtcggctggcttgacggacgctcttccctggcgcgtctgggcctgatggtgcacgtcaccgcgcaccgtatcgatccgggctggtctggccgtatcgtgctggagttctttaacgccggtaaattgccgctggcgcttcgtccgggaatgatgattggtgcgttgagctttgaaccgctgaccggcccggcagaccgtccttataaccgccgtcaggacgcaaaatatcgcgaccagcagggtgcggttgccagtcgtatcgataaagactga

SEQ ID NO: 117644 - DNA, 1851 bp, Enterobacter cloacae
atgagaagagttctgacaacgctgatgattttgctggtggtgctggtggctggcctttcagcgttggtgctgctggttaacccgaatgacttccgggcctacatggtgcggcaggtggaagcgcgcagcgggtatgaactcaagctggacgggccgctgcgctggcacgtctggcctcagctcagcattctctccggacgtatgtccctcaccgcgccgggtgccgcgcagccgctggtcacggcggataacatgcgtcttgatgtcgcgctcatcccgctcttatcccatcagctccaggttgaacaggtgatgctgaaaggggcggtgattcagcttacgccgcaaaccgaagccgttcgtcaggcggatgctccggtcgcaccgcgtgaaaacaccttgcctgacgtcccgtctgacaccggctggtcgttcgatattggtaatctgaaagttgccgacagcgtgctggttttccagcatgaagatgacgaacagatcaccgtacgcaatatcaacctcaggatggagcaggatgccaaccatcacgccaccatggagttctccgggcggatcaaccgcaatcagcgcgatctcaacctgtcgatgaacgcgaacgtgaacgcctctgattatccgcaccagctgactgcggacgttcagcagcttaactggcagctgaccggcgcggatttacccgcgaaggggattgccggccagggcacgatgaaggcggtgtggcatgaagagcgcaaacagctcgaactgaacgcgctcaacctccaggccaacgacagtgccctgaaggggcaggcgagcgtcacgcttgatgagaaacctaagtgggtgctggatctgcaattcgacaagctgaacctcgagaacctgcttccgccccaaccggtgaacgcgaccgatgagggagccacgcaggtggggcaaagccaggtcacgcagtcgcgtccggtgatctcctcaaatctcgatcagcctgactacaacggcctgcgcggatttaccgccgacattctgctgaaagcgaacagcgtgcgctggcgtgggattgattttactgacgtcagcagccagatgttcaaccacaacggcctgctggtcatctccgagctcagcggaaaaatgggagcagggaacctctccctgccgggcacgctggatgtacgcaaagacgttgccagcgccgcgttccagccgcgtctggaaaacgttgagattggcaccatcctgaaagcctttaattacccgattgccctcacggggcagctgtcgctggcaggggatttctctggtacgaagattgatgcggacgccttccgtcgtagctggcaggggaaggcgcacgttgagctgaaagattcgcgcatggaagggctgaacttccagcagctggtgcagcaggcggtagaacgcagcagcagcgtgaaagcgaatgaaaactacgacagcgcaacccgtctggacagctttaccagcgagcttgccctcgacaacggtcagctctcgcttgacgacatgcaggggacgtcgtcactgctggcgctgaccggaaccggcgcgctggatctggtgaaagagacggcagacacccgcttcaacgtccgcgtgaaggctggctgggaaggcgaaggccagcttgtggagttcctgaaagagacgccgataccgctgcgcgtatacggaaaatggcaggagttgaattacagtttgcaggtcgatcagatcctgcgtaagcaccttcaggatgaagcgaaacgtcggctgaatgactgggcggaccgcaataaagagtctcagtcaggtaaggacgtgaaaaagctgctcgataagctgtga

SEQ ID NO: 117645 - DNA, 1584 bp, Enterobacter cloacae
atggaatggattgccgatccatcaatctgggccgggctggtgacgctggtcgtcatcgaattagtgctcggcattgataacctggtgtttatcgccatccttgccgataaattacccccttcacaacgcgaccgcgcccgcgtgacgggtcttctgctcgccatggtgatgcgtctgctgttactggcctcaatctcctggctggtgacgctgaccaaacccttattcagcgtgcagggtctgagctttagcgcccgcgacctgatcatgcttttcggcggattgttcctgctgttcaaagccacggttgagcttaatgagcggctggaaggaaaagacagtgaaaaccccacccagcgacgcggtgcaaaattctggccggtggtcgcgcagatagtggtgctggatgccgtcttttctctcgactccgtgatcacggccgtcgggatggttgaccatctggcggtgatgatggccgccgtgatcatcgccatcaccctgatggtgctcgccagcaaagccctgacgcgctttgtgaacagtcacccgactatcgtcatcctctgtctgagcttcctgctgatgattggctttagcctggtggcggatggttttggcttccatatcccgaaagggtatctgtacgccgccattggtttctcggtgctgattgagtttctcaaccagctagccattttcaaccgtcgccgttttctctccgcgaaccagacattacgacagcgcaccgcagatacggtgatgcgcctgctgagcggcaaaaaagaggatgccgagctggatgctgaatccgcggcgatgcttgccgaccacagcgacgggcagatcttcaacccgcaggaacgccggatgatagagcgcgtgcttaacctcaaccagcgctcggtgagcagtatcatgacctcccgccatgacattgagcatattgacctgacggcgccggaagagcagatccgcgccctgctggataaaaaccagcacacccgcgtggtcgtgaccggcggtgaagaggaagaagagctgctgggcgtggtacacgtgattgacctcctgcaacagcagctccatggcgagccgctcaacctgcgggcgctggtgcgccagccgctggtcttcccggaagcgctgccgctgctctccgcgctggagcagttccgcaacgcgcgtacccacttcgcgtttgtcgttgatgagtttggttctgtggaagggctggtgacgctcagcgacgtgatggaaaccatcgccggtaatctgcctaatgaggtggatgagatcgatgcgcgtcacgatattcagaaaaacgccgacggcagctggaccgccaacggccatatgccgctcgaagatctggtgcagttcgttccgcttccgctggatgagaagcgcgaataccacaccatcgccggtttgctgatggaatatctgcaacgtattccgcagccgggcgaagaggtccaggtgggggattacatgatcaaaaccttgcaggtagagagccatcgcgtgcagaaggtgcagctgataccgctgcgcggtgaagatgagatggattttgaagtgtaa

SEQ ID NO: 117646 - DNA, 1137 bp, Enterobacter cloacae
atgatgaaatccaaaatgaaattgatgccattattggtgtctgtgaccttgatgagtggttgcacggtctttcccggcagcaatatgtcgacaatgggcaaggatgtgattaaacagcaggatgctgattttgatctcgacaaaatggtgaatgtgtatccattaaccccacgtctggtggaacaattacgcccacgtccaaatgttgctcagccaaatatgtctctggaccaggaaattgcctcttaccagtatcgtgtgggtccgggtgacgtcattaatgtgaccgtctgggatcaccctgaactgaccacgcctgcgggccagtaccgcagctcaagcgacaccggtaactgggtacagtccgatggcaccatgttctatccctacattggcaaagtgcacgtcgcgggcaaaacgcttgctgagatccgtagtgatattaccggccgcctggcgcagtacattgctgacccgcaggtggacgttaatatcgccgcgttccgatcccagaaagcctatatctctggccaggtcaataaatccggccagcaggcgatcactaacgtcccgctcaccgttctcgatgcgatcaatgccgcaggcggcttaaccgacggcgctgactggcgcaacgtggtgctgacccacaacggcaaagagcagcgcatttcgcttcaggcgctgatgcaaaacggtgacctgacccagaaccgcctcctttatccgggcgatattctgtacgtgccgcgcaacgacgatctgaaagtgttcgtgatgggtgaagtgaagaaacagagcaccctcaagatggacttcagcggtatgaccctgaccgaagcgctgggcaatgcggaaggcatcgatctgaccgcctccaacgccagcggtatcttcgtgatccgtcctatcaaaggcgagaacgcgaagggcaagattgccaacatctaccagctggatatgtccgacgcgacgtccctggtcatggcaacgtcgttccgtctccagccgtacgatgtggtctatgtcaccaccgcgccggttgcccgctggaaccgtctgatcaaccagttgctgcctaccatcagtggcgttcgctacatgacggatacggcgagcgacgttcataactggtaa

SEQ ID NO: 117647 - DNA, 444 bp, Enterobacter cloacae
atgtttaacaaaattctggtggtgtgcgtggggaacatttgccgttcccccacggctgaaaggctgttgaaaaattaccagcctgcgttaacggtcgactccgcagggctgggcgcgctggtcggaaaaggtgccgacgaacgtgccgcaagcgttgcccttgagcataacctctcactcgacgggcacgttgcccgtcaggtctctggccggatgtgccgggaatatgacctgatcctcgcgatggaaaaacgccacattcacgcgctgtgcgatatcgcaccggagatgcgcggcaaggtgatgctgtttggtcactgggatggtgagcgcgaaattcccgatccgtatcgcaagagccgcgaggcctttgaggcggtatacaccttactagaccagtctgcccgtcagtgggcgcaggcactgaaagctcagcagggataa

SEQ ID NO: 117648 - DNA, 2163 bp, Enterobacter cloacae
atgacagaaaaaacaagaccttctgccgccccgacgtcgggcagtgatgaaatcgatatcggtcgcctggtcgggaccgttattgaagcgaaatggtgggtgctgggtattaccgccatctttgccgtggcggcgatcgtttatacgctgttcgcgacgcctatttacagcgccgacgcgctggtgcagatcgaacaaaataccggaaactcgctggttcaggatatcggctcggcgctggccaacaagccgccggcatcggaagccgaaattcagctgatccagtcgcgcctggtactgggcaaaacggttcacgatctggggctggatatcgcggtcaccaaaaacaccttcccggtatttggcgcaggctgggatcgcctgatggggcgcagtaacgatacggtaaaagtgaccgacttcgtgatcccaaaaggggcaggggaccaaacctttaccctgaccgtgctgggaccaaaacagtatcagctgaccagcgacgcgggcttcagcgcacgcggtgaggtggggcagatgctgactaaagagggcgtcagcatcaaggtcagcgcaattcaggcacatgagggcggggagtttacggtcaccaaattctcgacgctcgggatgatcaacaacctgcaaaacaacctgaccgtcaccgaaaacggcaaggacaccggcgtcctgagcatgaccttcaccggtgaagacaaggatcaaattcgcgacatcctcaatagcatcacccgcaactatctggagcagaacgttgagcgtaagtcagcggaagctgcaaaaagcctggcgtttctcagtaaacagctgccggaggtgcgcgcccgtctggatgacgctgagaacaagctgaacgcgtaccgtcaggacaaggattccgtcgatctgccgctggaggcgaaatcggttctcgactccatggtgaatattgatgcgcagctgaacgagctgaccttcaaagaggcggagatttccaagctctataccaaacgtcacccggcgtaccgcacgctgctggagaaacgtcgtaccctggaagaagagaaggcgaagctgaatgaccgcgtgaccgcgatgccgaagacgcagcaggaaattgtacgcctgacgcgtgatgtggaatccggccagcaggtttacatgcagctgctgaacaaacagcaggagctgaaaatcaccgaagccagcaccgtcggcgacgtgcgtatcgttgacccggcgattacccagccgggcgtgctgaagccgaagaaagcgctgattattctcggcagcattattctcggcctgatgctttccatcgtcggcgtgctgctgcgctcgctgtttaaccgcggtatcgaaagcccgcaggtgctggaagagaacgggatcagcgtgtacgccagcatcccgctctccgagtggcagaagtcccgtgacagcgtcaaaaccgttaagggcgtcaagcgctacaagcagagccagctgctggccgtgggtaacccgaccgacctggcgattgaagcggtgcgcagcctgcgtaccagcctccatttcgccatgatgcaggccaaaaacaacgtcctgatgatgaccggtgtcagcccgtcaatcggtaaaaccttcgtctgcgccaacctggcggcggtggtgagccagaccaacaagcgcgtgctgctgatcgactgcgatatgcgtaagggctacacccacgagctgctgggcaccaacaacgttaacggtctgtcggaaatcctgctcggtaaaggggaaatcagcgagagcgccaagccgacgtcgattccgaaatttgacctgatcccgcgtggccaggtgccgccgaacccgtctgaactgctgatgagcgagcgcttcacgcagttgattgagtgggcgagcaaaaattatgacctggtgctgatcgataccccaccaattctggcggtcaccgacgctgccgtggtagggcgtcatgcgggcaccacgctgatggttgcacgctatgcggtgaacaccctgaaggaagtggaaaccagcctgagccgctttgagcagaacggtattgaggtgaagggggtcattctgaactccatcttccgccgcgcgaccgggtatcaggattacggctactacgagtacgaatacaagtctgacagtaaataa

SEQ ID NO: 117649 - DNA, 906 bp, Enterobacter cloacae
atggtgcagcttttctccctctccctccgggagagggtcggggtgagggataaggggaagaccatgaccacacaacgccctttgatttctatctatatgccgacatggaatcgtcagcagctggcgatccgcgcgattaaatcggtcctgcgtcaggattacgataactgggaactgattatcgtggatgactgttcctcctcttacgaacaactgcaaaagtttgttgaagacctgaacgacccgcgcgtggtgtacacccacaacgccatcaactccggggcgtgtgcggtgcgcaaccaggcgattatgcaggcgaaagggcagtatctgaccggtatcgacgacgatgacgaatggacgccaaaccgtctgtcaatcttcctgtcgcacaaagcgcagctggtgacccacgcgtttctgtatgccaatgactatgtctgccagggcgaggtctattcgcagccggccagcctgccgctgtatccgaaatcaccgtattcccgccgcctgttctacaagcgcaacattatcggcaatcaggtgtttacctgggcatggcgctttaaggagtgcctgttcgataccgagctgaaggccgcgcaggattacgacatcttcctgcggatggtggtggagtacggcgagccgtggaaggtggaagaggccacgcagatcctgcacatcaatcacggggagatgcaaatcacctcgtcaccgaagaaattctcgggctacttccatttttaccgcaagcacaaggacaagtttgaccgtgccagccggaagtatcagctcttcaccctgtatcagatccgtaataagcgcatgaactggcgcacgctgctgacgctgctgtcggtacgtaacggcaagcgtctggctgacgggcttcgggggaaataa

SEQ ID NO: 117650 - DNA, 492 bp, Enterobacter cloacae
atgtttctggaagattgccgcgctaacagctggagcctgcgcccgtgctgcatggttctggcctaccgtattgcgcacttttgctcggtgtggcgcaaaaaaaatgtgctgaacaatatctgggccgcgccggtgctggtgctgtaccgcatcatcaccgaatgcttttttggctatgaaattcaggccgctgccaccattggccgccgctttaccattcatcacggctatgcggtggtcatcaacaagttcgtcgtcgcgggtgatgatttcaccattcgccacggggtgacaatcggcaaccgcgggccagatagcctggcctgcccggtgattggcaataacgtcgagctgggcgccaacgtggtgatgatcggggacattaccgtgggcaataacgtgacgattggcgcaggcagcgtggtgctggacagcattccggacaacgcgctggtggtgggcgagaaagcccgcgtgaaggtgattaaatga

SEQ ID NO: 117651 - DNA, 1218 bp, Enterobacter cloacae
atgaacattctgcaatttaacgtacgcctcgcagagggcggggcggcaggcgtagcgctggatctgcaccagcgcgcgctgcaaaaaggattacagtcgcgttttgtttacggttacggcaaaggcggcaagaaaagcgtcagccatgataactatccgcaggtgctgaagcagacgccacgtctgacctccatcgccaatattgcgctgttccgtctgtttaaccgcgacctgttcggcaacctgaataatctctaccgcaccgtcacccgcactcgcggcccggttgtgctgcacttccacgtgctgcacagctactggctgaatctggaagaggtggtggcgttttgtggcaaggtgaaggcgcacaagccggatacccgatttgtctggacgctgcacgaccactggagcgtgaccggacgttgcgcctttaccgacggctgcgaaggctggaaagataactgccagaaatgccctacgctcagcaactacccgcctgtgaaggtcgatcgcgcgcatcagctggttgagggtaagcgtcagctgttccgcgatatgctctcgctcggctgcacctttatctccccaagccagcacgtggcggacgcttttaatagcctgtacggagcagggcgctgccagatcatcaacaacggtattgatgtggcaacggaagcgatcctggccgaactgacgcccgtagccgttacccccggtaggccgaaaattgcggtcgtcgcccatgacctgcgctacgacggcaaaaccaaccagcagctggtgcgcgacatgatggcgctcggcgacaaaattgagctgcatacctttggcaaattctcgccgtttgatggcgctaacgtggtgaaccacgggtttgaaaccgacaagcgcaaactgatgagcgcgctgaacggtatggacgcgctggtgttcagctcccgcgtggacaactacccgctgatcctgtgcgaagcgctctccatcggcgtaccggtgattgccacccacagcgacgccgcgcgggaagtgctggagaaatccggcggtaaaactttcagtgaaaatgaggtgctgccgctggtgcagttgtcgaaggccgatatcgcgcaggctgtttttggcacggacctggaatcgttccgcaaccgtagccgcaaagcgtacagtggacaacagatgctggaggagtatgtctcgttctatcagaatctgtag

SEQ ID NO: 117652 - DNA, 1221 bp, Enterobacter cloacae
atgtctcgttctatcagaatctgtagttatctgctgctgccgctgatctacctgctggtcaacgttaagattgcccagctcggtgaaagcttcccgatcactatcgtcaccttcctgccggttctgctgttgctttacgttgacaagcttaacctcaaaaagctgatgatttcactgggcatcgggtttggtctgacggcgtttaactacatctttggtcagtcgctggacgccagcaaatatgtcacctccaccatgctgtttgtttatatcgttatcattattggcatggtgtggagtattcgctttaaaactatttctccgcacaattataggaaaatcctcaggttcttttatattgtcgtcgggctgattgttgtgcttgcggcaatggagatggcgcaaattattctcacaggcggcagtagcctgatggaaataatttcgaaatatcttatatacagtaacagctatgtactgaacttcattaagtttggtggcaagcgtacaaccgcgctctattttgaaccggcgttttttgctctggcattaatctcaatttggctcagcatcaaacagttcggtatcaaaacccccaagaccgatgctatgattcttgcaggaatcgttctgtcagggtcgttctccggggtaatgacgtttattctgttttacctgctggagtgggcgttccagtacctgaacaaagaggcgattaagaaaaaactgccgctggcgataatctctctgacggtatttttagtgggcgtaatatttgcgtttccgtacatttctgaacgtctgggtgatttgggaacggaaggttcgtcgtcctattatcgcatcattggtccactggtgatggtgggttattccttaacccatattgatggcgtagtaagattcggctcactttacgaatatgttgcatcattcggaatctttaacggtgcggatgtcggtaaaaccatagacaatggtctgtatctgttaattatctatttttcctggttcgccgtactgttgacactgtggtatctgtttaaagttttcaaaatgatgattaacgcgtttggtgataaccagaactttcgcttgcaactttatctgttcacaccggtgtcgttgttttttaccgggtcaatatttagcccggaatatgcattcttaattgtatgtccgtttattttgcgcaaagcgctgaatattacgagcgtatga

SEQ ID NO: 117653 - DNA, 747 bp, Enterobacter cloacae
atgtttcttagcgtcattactgtcgcctttcgtaactacgaaggggtggtaaaaacctggcgctcgctgcgcaacctggcgcgcgatccgagcctcacctttgagtggatcgtggtcgatggcggctcgaacgacggcacggcggagttcctggaaaaactcaacggtgagttcaacttacgttacatcagcgagaaagataaaggcatttacgatgccatgaataaaggcatcaacatggcgcaggggcgttacgccatcttcctcaattccggcgatgtgttccatgaagatgtggcgctgtttgcccgtcagctggcgcgccagaaagaagatgccatgtttattggtgatgcgctgcttgatttcggcgaggggaaaaaagtgctgcgcggcgcgaaaccaggctggtatatctaccacagcctgccggccagccatcaggctattttcttcccaatgagcggcctgaaaaaacagccttacgatttgcgctataaagtgtcatcagattatgccctggcggccagcctgtacaaatctggctacccgttccgtcgaattaaaggactggtatctgaattttcaatgggtggcgtgtcaacctcgaataatctggaactgtgccaggatgccaaaaacgtgcagcgtaaaatattacgcgtgccggggttctgggcggaattatcttatttcttacgtctgaaaacgacgggtaaagcgaaagccttatataacaaagcctga

SEQ ID NO: 117654 - DNA, 555 bp, Enterobacter cloacae
atgcaggaattaaatggattctccgtgccgaaaggttttcggggcgggagcggtattaaagttcaactgtggtgggctgtacaggcaacgttatttgcctggtcgccgcaaatactgtaccgctggcgcgcatttttactgcgtctgtttggcgcaaaaataggaaaaaacgtagtcattcgaccttcggtgaaaattacttatccctggaaattaacgcttggggattacgcctgggttggggatgacgcggtgttatatacccttggcgagattacgattggcgcaaattcggtggtttcacagaagtgttatttgtgcaccggcagccacgattttatgagcccgcattttgatattaccgcttcgcctgttgtgatcggtgaaaaatgctggctggcaacagacgtctttgttgcacccggtgtttctgttggcgatggcacggtagtcggtgcccgcagcagcgtttttaaatcgcttccggcaaataaaatttgccgtggcaaccccgcagtggtgatacgcgaacgcgttgaaactgaaaaactttga

SEQ ID NO: 117655 - DNA, 1122 bp, Enterobacter cloacae
atgtctaaagtcgctctcatcaccggcgttaccggacaagatggttcttacctggcagaattgctgctggaaaaagggtatgaagttcacggtattaagcgtcgtgcctcttcattcaacaccgagcgtgtcgatcacatttaccaggatccgcatgcggcaaacccgaaattccatctgcactacggcgacctgaccgatacctccaacctgacccgcatcctgcaagaagtacagccggacgaagtgtacaacctgggggcaatgagccacgttgcggtttccttcgagtccccggagtacaccgctgacgtggatgcgatgggtacgctgcgtctgctggaagcgattcgcttccttggtcttgagaagaaaacccgcttctaccaagcatctacctctgagctgtacggtctggtgcaggaaattccgcagaaagagaccacgccgttctacccacgttctccgtacgctgtggcgaaactgtacgcttactggatcaccgtgaactaccgtgaatcctacggcatgtacgcctgtaacggcattctgttcaaccacgaatctccgcgtcgcggcgaaaccttcgtgacccgcaaaatcacccgcgcgatcgccaacatcgctcagggcctggagtcttgcctgcacctcggcaacatggattccctgcgtgactggggccatgcgaaagactacgtgaaaatgcagtggatgatgttgcagcaggaacagccagaagacttcgtgatcgcgaccggcgtgcagtactccgtgcgtcagttcgttgagatggctgcggcacagctgggcatcaagctgcgctttgaaggcaccggcgtggaagagaagggtatcgttgtttccgtgaccggccacgacgcaccgggcgtgaagccaggcgacgtgattgtccaggttgatccgcgttacttccgtcctgctgaagtggaaaccctgctgggcgacccaaccaaagcgcacgagaagctgggctggaaaccagaaaccaccctgcaagaaatggtatccgagatggtggccaaagatcttgaagcagcgaaaaaacactccctgctcaagtctcatggctacgaggttgccatcgcgctggagtcctga

SEQ ID NO: 117656 - DNA, 966 bp, Enterobacter cloacae
atgacaaaacaacgtatttttgtcgccggtcatcgcggaatggtgggttccgcgattgttcgccagctggaacagcgcggcgacgttgaggtgattgttcgcacccgcgacgagctgaacctgcttgacagcaaagcggtgcaggacttcttcgccagcgaacgtatcgaccaggtgtatctggcggcggcgaaggtgggcggcattgtcgctaacaacacctacccggcggatttcatctacgagaacatgatgattgagagcaacatcattcacgcggcgcatctgtacaacgtgaataagctgctgttcctcggctcatcctgtatctacccgaaaatggcgaagcagccgatcgccgagagcgaactgttgcagggcacgcttgaagccactaacgagccgtatgcgattgccaaaattgccgggatcaagctgtgtgaatcctacaaccgtcagtataaccgcgactatcgctcggtgatgccgaccaacctgtacggaccgcacgacaacttccacccgagcaattcgcacgtgatcccggcgctgctgcgtcgtttccacgaggcgactgccgaaaacgccccggacgtggtggtgtggggcagcggtacgccaatgcgtgagttcctgcacgtggacgacatggcggcggccagcattcacgtcatggagctggatcgcgaggtgtggcaggaaaacaccgagccgatgctgtcgcacattaacgtcgggaccggcgtggactgcaccattcgcgagctggcgcagaccatcgcgcaggtggtgggctacaaaggacgcgtggtgtttgacgccaccaaaccggacggcacgccgcgcaagctgctggacgtgacccgtctgcatcagctgggctggtatcacgaggtctcactggagcaggggctggccagcacctaccagtggttcctggaaaaccagcaccgcttccgggggtaa

SEQ ID NO: 117657 - DNA, 483 bp, Enterobacter cloacae
atgatgtttttaagtcaggaagattttgccacggtagtgcgttccactccgctgatctcaatcgatttgatcgtggagaatgaacgcggcgagttcttgctggggaaacgaaccaatcgtcctgcacagggcttctggttcgtgcccggcgggcgcgtgcagaaggatgagacgcttaccgatgcgtttgagcgtctcactctggcggaactgggcctgcaactgccgatggcagcgggccagttttacggggtctggcagcacttctatgacgataacttttcaggcaccgggttcaccacgcactacatcgtgctggggttccgcctgaaggtgagtgaggcagacctgcgtctgcctgattctcagcatgacgattaccgctggttaacgccagaggcgctgctggcaagcgacaacgtccatgacaacagtcgggcgtacttccttgcggaacgtcaggccgaggtgccaggtctatga

SEQ ID NO: 117658 - DNA, 1224 bp, Enterobacter cloacae
atgaaaatcctcgtctacggaattaactactcgccggagcttaccggtatcgggaaatacaccggcgagatggtcgagtggatggcgagccagggacatgacgtgcgggtgattactgccccgccgtattacccggagtggaaggtaggcgaacgctattccagctggcgctaccgccgcgaagagggcgccgcgatcgtctggcgctgcccgctctacgtgccgaaacagccctcgacgctgaaacgtttaattcatctgggcagctttgccctgagcagtttcttcccgctgatggcgcagcgtcgctggaagccggatcgcatcatcggcgtggtgccgacgctgttctgcacgccaggcatgcgcctgctgggcaaactctccggcgcgcgcaccctgctgcacattcaggattatgaagtggacgccatgctcgggctggggatggccgggaaaggcaagggcggcaaggtggcgaagctcgccagcgcctttgagcgcagcggcctgcacaacgtggattacgtctcgaccatttcgcgctcgatgatgaacaaggcgcaggagaagggcgtcccggcggaaaaagtgatcttctttccgaactggtccgaagtggcgcgcttccgcgatgtgacagaccaggatgcgcaggcgttacgcgcgcagctcgggttgcctgctgagcaaaaaatcattctttactcaggcaacatcggcgaaaaacaggggctggagagcgtgattgacgccgcgcttcagctgagcgaacacccgtggatgttcgtgatagtcgggcagggcggcggtaaagcgcggctggaaaaaatggccagcgagcgcggactgaccaacatccgcttcttcccgcttcagtcttatgacgcgctgcccgcgctgctgaaaatggcggattgccatctggtggtgcaaaaacgcggcgcggcggatgcggtgctgccgtccaagctgaccaacattctggcagtgggcggaaacgcggtgattacggcagaagccgcaacagaattaggccagctgtgcaacagctacccgggcattgccgtttgcgtggagccggaatcggttcctgcgctggtgaccggaattgagcaggcactcgccatgccaaaagagaacacggtggcacgtgaatatgccgaacgcacgctcgagaaagagaacgtgctgagccaatttattgcagatatacggggataa

SEQ ID NO: 117659 - DNA, 1437 bp, Enterobacter cloacae
atgagtcaaaccactttgtatccggtcgtaatggcgggtggatccgggagccggttgtggccactgtcccgcgtgctttatccaaaacaatttctgtgcctgaaaggcgacctcaccatgctgcaaacgacggttaaccgtctgcacggcgtggagtgtgaaagcccggtggtgatctgtaacgaacagcaccgctttatcgttgcagagcagctgcgccagctgaacaaactgaccgaaaatatcattctggagcctgccggacgcaacacggcgcctgccattgcccttgcggcgctggcggcaaaacgcagcagcccggactgcgacccgctgatgctggtgctggcggctgaccacgtcatccagcaggaagaggccttccgcgacgcggtacgcgcggcgattccttacgctgagaacggcaagctggtgaccttcggcatcgtgccggatctcccggaaaccggctatggctacattcgccgcggcagcgttacgcctggtgaaggcgacagcgtggcctttgacgtggcgcagtttgtcgaaaaaccgaatctggaaaccgcgcaggcgtacgtggccagcggggaatactactggaacagcggtatgttcctgttccgcgccggtcgctacctggaagagctggaaaaatatcgcccggatatcttgcgcgcctgcgaaaaagcgatggcggtggtggatccggatctcgattttatccgtgtggacgaagaagccttcctcgcctgtccggaagagtccattgactatgcggtaatggaacgtacggcagatgcggtagtggtacctatggatgcgggctggagcgacgtcggctcctggtcgtcactgtgggagatcagcgcgcataccccggagggtaacgtccatcacggggatgtgatcagccacaaaacggaaaacagctacgtctacgccgaatctggcctcgtcaccacggtaggggtgaaggatctggtggtcgtgcagaccaaagacgcggtgctgattgccgaccgtaatgccgtgcaggacgttaaaaaagtggtggagcagatcaaggccgatggccgccacgaacaccatattcaccgcgaagtctaccgcccgtggggcaaatatgactccatcgacgccggcgagcgttaccaggtgaaacgcatcaccgtgaagccgggagaagggctgtcggtgcagatgcaccatcaccgcgccgaacactgggtggtggtggcggggaccgccaaagtgaccatcgacggtgaagtgaagctgctcggtgaaaacgagtccatttatattccgctgggggcgacgcactgtctggagaacccggggaaaattccgctcgacttaattgaggtgcgttccggctcctatctggaagaggacgacatcatccgcttccaggatcgctacgggcgcgtgtag

SEQ ID NO: 117660 - DNA, 1371 bp, Enterobacter cloacae
atggaaaaattaacctgttttaaagcctacgatattcgcggcaagctgggcgaagagctgaacgaagacattgcgtggcgcatcggccgcgcgtacggcgaatacctgaaaccacaaactattgtgctgggcggcgacgtgcgtctgaccagcaaatccctgaagctggcgctggcgaaagggctacaggacgcgggcgtcgatgtgctggacattggcctttccggcaccgaagagatctattttgccaccttccccctgggcgtggacggcggtatcgaagtgacggccagccataacccgatggactacaacggcatgaagctggtgcgcaagggcgcgcgtcctatcagcggcgacaccggcctgcgtgacgtgcagcgtctggccgaggccaacgacttcccgccggtgaatgaagccacacgcggcagctataagcagattaacctgcaaaaagagtacatcgaccacctgctgggctacatcaacgtggcgaacctcaaaccgctgaagctggtgattaactccggcaacggcgcggcaggcccggttgtcgatgcacttgaagcccgctttaaggcgctgaacgtgccggtgaccttcgtcaaagtgcacaacacgccagacggcaacttcccgaacggtattcctaacccgctgctgccggagtgccgcgacgacacccgcaacgcggtgattgagcacggcgccgatatgggtatcgcctttgacggcgatttcgaccgctgcttcctgttcgacgagaaagggcagtttatcgaaggctactacatcgttggcctgctggcggaagcgttcctcgagaaaaacccgggggcgaaaatcattcacgatccgcgtctttcctggaacaccgtcgacgtggtgaaggccgcgggcggcgagccggtgatgtccaaaaccggccacgcgtttatcaaagagcgtatgcgtgaggaagacgccatctacggcggcgagatgagcgcccaccactatttccgtgattttgcctactgcgacagcgggatgatcccgtggctgctggtgactgagctgctgtgcctgaaagggcagagcctgggtgaactggtgcgtgaccgcatggcggcgttcccggcgagcggcgagatcaacagcaaactggcacagcccgctgaggccattgcccgcgtggaacagcactttgccattcatgcgctggagattgaccgtaccgacggtatcagcatggcgttcccgcagtggcgcttcaacctgcgctcctccaacaccgagccggtggtgcgcctgaacgtggagtcccgcgccgataccgcgctgatggaagcccgaacgaaggacattctggcgctgttgaatcagtaa

SEQ ID NO: 117661 - DNA, 1395 bp, Enterobacter cloacae
atgacaaatctaaaaaagcgcgaacgagcgagaacgaatgcatcgttaatctctatggtgcagcgtttttctgatatcaccatcatggtcggcggactgtgggcggtgtgttgggtcagcgggcagtcgttcttatacatgcacttgctgatggcgttgattgcgctggtggtgtttcagatgatcggcggcatgaccgatttctatcgttcatggcgcggcgtcaaaatgaccaccgaactgatgctgctgctccagaactggaccttaagcctggttttcagcgcagggctggtggcgttcagccatgattttgataaccgtcttgtgacctatctctgctggtatctgttaaccagcattggcatggtggtctgccgctcgctgatccgctttggcgcgggctggctgcgcaaccgcgggtataaccgtcgcttcgttgccgtggcgggcgacctgccggtgggacaggtgttgctcgatagcttccgcaaagagccgtggttaggttttgaagtggtcgggatttatcacgacgcgaagcccggcggcgtgccgtccgactgggcaggtaactacgaacagcttattgacgatgcgaaagccggcaaaattcataacgtctacatcgccatgcagatgaaagatgaatcccgcatcaagaaactgatgcgcgagctggcggataccacctgctcggtgatcctcatcccggatgtcttcaccttcaatattctccactcccgtattgaagaggtgaacggggtaccggttgttccactgtacgacacgccgctgtcggggattaaccgcgtgctgaagcgcgtggaagatatcgtcctttcgtccctgatcctgctgctcatctccccggtgctgtgctgcattgcgctggcggtgaagctcagctcgccggggccgatcatcttccgtcagacccgctacggcatggacggtaagccgatcatggtgtggaaattccgctccatgaaggtgatggagaacgacaaggtggtgacccaggcgacgcagaacgatccgcgcgtcacccgcgtgggcaacttcctgcgccgtacctcgctcgatgagctgccgcagttcatcaacgtgttcaccggcgggatgtccatcgtcgggcctcgtcctcacgccgtggcccataacgagcagtaccgcaccctgattgaaggctacatgctgcgccataaggtgaagccaggcatcaccggctgggcgcagatcaacggctggcgcggcgagaccgacacgctggaaaaaatggaaaaacgtatcgagttcgatctggagtacatccgcgagtggagcctctggttcgatatcaagattgtttttctgaccgttttcaaaggtttcgtgaacaaagcggcgtactaa

SEQ ID NO: 117662 - DNA, 1479 bp, Enterobacter cloacae
atgagcttacgagaaaaaaccatcagcggcgcgaaatggtcagccatggccaccatcgtcatcattggcctcggcctggtgcagatgacggtgctggcgcgcattatcgataaccaccagtttggtctgctgaccgtctcgctggtgattatcgccctggccgatacgctgtcggactttggtatcgccaactccattatccagcgcaaggagatcagccacctggagctgaccaccctctactggctgaacgtcgggctgggtatcttcgtctttgtgctggtgttcctgctgagcaatgtgattgccggcgtgctgcataacccggatctggcgccgctgatgcgcaccctgtcgttcgctttcgtggtgatcccgcacgggcagcagttccgcgcgctgatgcagaaggagctggagttcaacaaaatcggcatgattgaaaccagcgccgtgctggcgggctttaccttcaccgtggtcagcgcccatttctggccgctggcgatgaccgccatcctcggctacctcgttaactctgccgtgcgcacgctgctgtttggcttctttggccgtaagatttatcgcccggggctgcatttttcgctggcgtctgtttcatccaacctgcgcttcggcgcgtggctgacggcagacagcattatcaattacgtgaatactaacctctccacgctggtgctggcgcgcattctgggcgcgagcgtcgcgggtggctacaacctggcgtataacgtcgcggttgtcccgccgatgaagctcaaccctatcattacccgcgtgctgttcccggcgttcgccaaaattcaggacgataccgaaaagctgcgcgtgaacttttacaagctgctctccgtcgtggggatcatcaacttcccggtgctgctggggctgatggtggtcgccagcaatttcgtaccgctggtgtttggcgagaagtggaacagcatcatcccgatcctgcaactgctgtgcgtcgtggggctgctgcgctcggtggggaacccgattggttctctgctaatggcgaaggcgcgcgtggatatcagcttcaagttcaacgtgtttaaaaccttcctgtttattccggcaattattgtgggcggccacacggcgggcgccattggcgtgacgctcggcttcctgctggtgcaaatcgtcaataccgtgctgagctacttcgtgatgatcaaaccggtgctgggctccagctaccgtcagtacatcctcagcctgtggctgccgttctatctctccttaccgacgcttgcggtgagctacggcctgggcgtggtgctcaacgggcatctgccgctggcggcgctgcttgcggtgcaggtcgcggcaggcgcgctggcgttcggcgtgatgattgtgctgtcacgcaatgcgctggtggtcgagatgaagcgccagttttgccgtaacgaaaaaatgaaaacgctgcttcgcgcaggctaa

SEQ ID NO: 117663 - DNA, 1281 bp, Enterobacter cloacae
atgaaattacttattcttggcaaccatacctgcggcaaccgtggcgacagcgccatcctgcgcggtttactggatgcaattaacacccttaagcctgagacagaagtggatgtgatgagccgttatccggtcagctcatcctggttactgaaccgcccggtgatgggcgacccgctctacagccagatgaaacagcacaacaacgccgcgggcgtgatggggcgcgtgaagaaagtgctgcgtcgccgctaccagcatcaggtgctgctttctcgcgtgaccgacaccggcaagctgcgcaacattgccatcgcgcagggctttaccgattttgttcgtctgctgtccggctatgacgccattattcaggtgggcggttcgttcttcgtcgatctgtacggcgtgccgcagtttgagcatgcgctttgtacgttcatggcgaaaaagccgctgtttatgatcggccacagcgtcgggccattccaggatccgcagtttaaccagctggcgaactatgtcttcggccactgcgacgcgctgatcctgcgtgaatcggtcagcctcgacatgatgaaacgcagtgaaatcgacaccaccaaagtggagcacggtgtggacaccgcctggctggtggatcatcaggatgacagtttccaggccagctacgcggtacagcactggctggacgtggcggcaaagcagaaaaccgtcgccattaccctgcgtgaacttgcgccgttcgataaacgcctcggcacgacccaggcggcgtacgagaaagcctttgccgacgtggtgaaccgcgtgctggacagcggttaccaggtgctggcgctttccacctgtaccggtatcgacagctacaacaaagatgaccgtatggtggcgctcaacctgcgcaacctggtgaacgatccgtcccgctatcatgtggtgatggacgagctgaacgatctggagatgggcaagctgctctccgcctgcgacctgaccgtgggcacgcgtctgcactcggccattatctcgatgaacttcggcacgccagccatcgccattaactacgaacacaagtctgcgggcattatgcagcagctcggtatgccggaaatggccgtcgatattcgtcatctgctggacgggtcgctgggtgcgatggtgggcgacacgctcggtcagctgcctgcgatcaacgaacgtctggcggtggcggtaaaagccgaacgcgaaaaaggtattggcatggtgaaatccgtactcgaccgcgtccgggaggggaaatga

SEQ ID NO: 117664 - DNA, 1221 bp, Enterobacter cloacae
atgaaggttggtttcttcttactgaaatttccgctgtcgtctgaaacctttgtgctgaaccaaatcaccgcgtttatcgatatggggtatgacgtggagattatcgccctgcaaaagggcgatacgcaaaacacccatgcggcgtatacccggtatgggctggaggcgaaaacccgctggttgcaggatgaacccaccggacgaatgaacaaactgcgccatcgcgccagccagacgctgcgcggccttcatcgcgcctcgacgtggcgggcgctgaatatgtcgcgctatggggcggaggcccgcaacctgatcctttccgccatttgcgggcaaacggcccagccgtaccgggccgatgtctttatcgcccactttggcccggcgggcgtaactgcggcaaaactgcgtgagctgggggtgattgacggcaaaatcgcaaccattttccacggtatcgacatctccagccgggaagtactgaaccactacacgccggaatatcagcagctgtttcgccgtggcgacatgatgctgccgataagcaacctgtgggccggacgcctgaaaaccatggggtgcccgagcgagaaaatcaccgtttcacgcatgggcgtggatatggaacgtttcactcagcgaccggttaaggtgccgggcaagccgctgcaaattatctctgttgcccgcctgaccgaaaagaaagggctgcacgtagccatcgaagcctgtcgccagctgaaggcgcgcggcgtggacttccactaccgcatcctgggtatcgggccgtgggagcgtcgcctgcgcacgctgattgaacagtatcagctggaagacgtggtcgagatgccgggcttcaagccgagccacgaagtgaaagccatgcttgatgacgcggatgtgttcctgctgccttccgtaaccggcgctgacggcgatatggaaggcattcccgtggcgctgatggaggcgatggcggtcggcattccggtggtctcgaccctgcacagcgggatcccggagctgatcacctctgaacactccggctggctggtccctgaaaacaatgcgctggcgctggcggatcgtctggccgcgttcagcgatatcgatcagcagacgctgatccctgtgctgcaaaatgcgcggcaaaaagttgaagcagaattcaatcagcaggtgattaatcgccagttagcgagcctgctgcaaacgctgtaa

SEQ ID NO: 117665 - DNA, 1392 bp, Enterobacter cloacae
atgctgaaaaagattacccgacgccgatttgtctcttctttatccgtcctggctgccatgccgctgctgtcgccccgcgctgtgcgggcggcaaccgggaagacggtttctgtcgatcgctacaacaataacgactggatcgccgcctttaagcaggcatttaccgagggcgataccgttgttgttcccgccgggttaacctgtgaaaacatcaataccggcattttcattcctgatggcaaaaccctgctgatccgcggtgcgctgaagggcaacggccgcgggcggtttgtgctccaggaaggctgtaaggtcattggggaaggagaggggcgcacgcataacattacgctggacgtgcgtggctccgactgtgtcattaaagggctggcgatgagcggcttcggccccgtcacccagatctacatcggcggtaaaaagccgagagtgatgcgtaacctgcttatcgatcgtatttccgtgagccaggccaactacgccattctgcgccagggttttcataatcaggtggacggtgcgcgcattaccaacagtaaattcagccacttgcagggggacgcgattgagtggaacgtggcgattaacgaccgcaatatcctgatctctgaccacgtgatcgataacatcaactgcacaaacggcaagatcaactggggcataggcattgggctggctggcagcacgtacgacaatgactatccggaacagcagaccgttaaaaacttcgtggtggcaaatatcaccggcagcaactgtcggcagttggtccatgttgaaaacggtaaacactttgtgatccgtaatatcaaggccagcaatattacccccgacttcagtaaaaaggccggaattgataacgcgacggtagctatttatggctgtgataatttcgttattgataatatcgatatggtgaacagcgccggaatgttaatcgggtatggcgtgatcaagggcgattatctgtcgataccgcaaaacttcaaacttaacgatattcgcctggataaccgccagctggcctataagctgcgcgggatacagatttcctccggcaatgccacctcgtttgttgccatcaccaacgtcaacatgcagcgagcaacgcttgagctgcacaacaagccacagcatcttttcttgcgtaatatcaacgtgatgcaggagtcagcgacgggaccagcgcttaagatgaacttcgacttgcgcaaagacgtgcgcgggaagtttatggccaaaaacgagacgctgttgtcgctcgcgaacataaaagcggttaatgaaaaggggcagagttcggtggatattgatcgggtcgatcaacacgtggtgaatacggaacggttgaattttgcgctgccgcacaggtaa

SEQ ID NO: 117666 - DNA, 897 bp, Enterobacter cloacae
atgattaatttgaaagcagtcataccggtagcgggtttgggcatgcatatgttgcccgccacaaaggccattcctaaagagatgctgccgatcgttgacaagccgatgattcagtacatcgtcgacgagattgttgctgcggggatcaaagaaatcgttctggtgacgcactcttcgaagaatgccgttgagaaccacttcgacacctcttatgaactcgaggcgctgcttgagcagcgtgttaagcgccagcttctggcagaagttcagtctatctgtcctcctggcgtgaccatcatgaacgtgcgtcaggcgcagccgctgggtctggggcactcaattctctgcgcgcgcccggtggtgggtgataacccgttcatcgtggttctgccggacatcattattgataccgcttccgccgatccgctgcgttacaacctggcggcaatggtcgcgcgcttcaacgagacgggccgtagtcaggtgctggcgaaacgtatgaagggcgatctctctgagtattctgtaattcagaataaagagccactggagacggaagggcaggtgagccgtatcgttgagtttatcgaaaaacccgatcagccgcagaccctggactccgacctgatggcagttggccgttatgtgctgaatgcggatatctgggctgagctggaaaaaactgagccgggcgcctgggatcgtatccagctgaccgatgcgattgctgagctggcgaagaagcagtctgttgatgccatgctgatgaccggcgatagctacgactgcggtaagaaaatcgggtatatgcaggcatttgtgaactacggtctgcgtaacctgaaggaaggggcgaagttcagaagccggattgagaagctgctggctgaagactga

SEQ ID NO: 117667 - DNA, 1257 bp, Enterobacter cloacae
atgacaaggttaaaaaaaaatatattctcgctttttatactccagggctcaaattatctcatccccctcattattttcccttatcttgtcagagtgctggggcctgcggaatatggaaggatagggttggcgacaagtataattcagtatttttgcctgtttattgatttcggattcaacctcacagcatcgaaagctatagcagtgagtagtaaaacaaaagaagaaattagtgctattttttttaaaacaatgctagctaaattgtttttattgttattatctatcggcctgattttttttctttcctgcaaggttgagcaatttcatagtatcaattcattgctgcatatattatgctttcagttagtaggggccatgttgttacccgtttggtttttccagggcgttgaaaaaatgtcctctgttacgataagctatattttagcaagagggttgagtatacccttgacatttatcttcgttcaagaacagaatgatataaatatcgcagctttaattcagggaggagcgactttcgtagcgggaatgatttcgatttattttgtttataaaacaaattgtattactttgaaatttagattacgaatatctgaagtatttgacacgttaattaaatcatcgccaatatttatcggaagtattgccatgagtttatatacgatgagcaatccatttatattgggaatggtgagtcaggttgagcaggtaggaatatatgtcgctgctgataaactaaggcaggctttaatgggcgctttcttgattttaggtggtgctttatatccaagagttaatgctctttttaaagaatcaagagaaattggattttcttttgttaaaaagataattttgatacaaggcggtttggctttaatcgcaagcataatgttttatatatgctcgaaatatatttcaaactttatgcttggcaaagattttgaagaagctatcattattctaaaattaatgtcaccaatgataatcttgatagtattatctgtaattttatgcaattatgtgcttttacctcttgggcataataaactatatgcaaagctgcctattgttacggggttgctgcatttatcttatgctattcctctgtcttctttatatggtgcatctggcgcatcattgtctatacttattacagaaatacttacttttattatgctattgataattaccttcaaaaaaggatatctgaaagaaatatggaacagttatgagtga

SEQ ID NO: 117668 - DNA, 978 bp, Enterobacter cloacae
atgagtgatattacattaagtattataataccatgctacaatgttgaaagttatataaaagaatgtttagattcagtatttatacagttggatgcgaatagtgaagttatcattgtaaatgatggttctaccgatagcacaaaaaatattattgaatctttatgtgttggtaagaagaatataaaaataatcaatcaaatcaacgttggactttcaggtgctagaaatgctggtttaataaaagcgcagggaaaatatattgcatttttggatggtgatgatgttctccatccagaatatatacgcaatgtttcgaatgctatttttgagttttgccctgatattattgagatagatgcatatcggtttactaaagaatctactgagacttttaatttatgtacttattctggtcaaaaagtaatcgataataaaatagaattaatgcctgtttttgaactcaaccagtggtatgtttggggcagaatttacagtaaaaaaattattaattgtgtatattttgaagatgggcgtcgatacgaagatattatgtttactccctatctttacctgaaggcaaagattatttatagcataaataagccattgattggttataggcatactcctaatagtattaccaagagtataaaagaacgtgattaccttgatataatttacgcattgcaaaagtttaaaaaccatgcaaacaaagaagttggtaacgaggaaaaaatccttttactttactcgagggttcgtacatttagttatctgaaatttattagtaacaatgttaatggatattttagaactttagaagaaacaaaacgcattgcaaatgatattttaaatgataataattctttggatgtaaaatatcaaataaaatggtcaaaattaataactgtaaaatactatcgattatcaagcacattttcatggttcaaaaaaaaactcaaggccgctctcaattaa

SEQ ID NO: 117669 - DNA, 1092 bp, Enterobacter cloacae
atgaaaaataaaaagatttgtctcttcattaatgccctgcataattccggtggtacagaaagaattatcaccgtattggcaaatgaacttacaaaaattaattatgaagttcacattgttacgattctaaaaaatagtaagcccttttttcacttaaacgaagaaataaacttagtaagtttatgcaattatgaatcattaacttcgcattgggataggttaaaaataattttagcgctccgaaaatatttacaaaattatgaaattaacactgtcattacggttgattcattattatgcatatattcattacctgctgtactgtttactgatattcgtcatatatgttgggagcattttaattttaagattgatcttggtgtaaaaacccgtagtttagcgagacagttatctggattattttcggatgaaattgttgtattaagcgaaaaagatagaaaatattggcaagaaaatctctggttaaataaaagcaaattacaagttatttataatgcctcacagtttcaaataactactaatgattatcctgtggaaagcaaaaacatattaagcgtaggaagattaacagatcaaaagggctttgatcttcttatacaggcttgggaagaggttcataacgaatttcctgattggactttaacaattattgggagtggtcccaacaaagacagtttagagaatttagcaacagaattaagtttgaacacgtcgataaaattcattgctgctacacaaaatattactgattattatcaaaattgtgcatttttatgtctcccgtccagatatgaaggatttggcttggttctcattgaagctatgtcttttggcgttccggcgattgcgttcgattgtgattgcggaccttctgaaatattagatatggataatggaatcttagttccaaatgagaacattaaaatattcgctgaatctttaagattgatgattagtcaaaaagttttaagaataaatatgtccaataatgctaaattaaaggctaatgcgtttacagttaaaagatttagagaccgctggaatactatactaaaaaatgagaaagtataa

SEQ ID NO: 117670 - DNA, 1149 bp, Enterobacter cloacae
atgtattggattatttttttaactctgcaattgatatgtgttttattaagttggcaattcccacctattaaaaaaatcatatttaaattaatgatttttacatttatgctttttatggttgatggatattttaacggtatcgattgggtaaattattattatgggtttattacttatacagatttagtagagtatttttcatcatatgaacctttattcggtttcgaggtttatattctcaagtatttatttacggatttctatttatctgtagctatgtactatcttatattatcggtgttgctttatttcgctataataaaactaaggggtttatttgattttaatatatgtctgttcctcttcttgctaatcataatcaatggtatagatctatttaatgatcaacttagacaagcaatggcatttgtgatggcaatgtttgcttttatccaattattaaaaaatgagaaaactcgatttatcattctttcatgtttagctatttgtttccatttttccgccgccgtagtgttattgttttaccctctggtaaagaaaaataaaataagtgttattttctttggcagttgttccgcattttgtatagttatacttagtctttcgaatgaactgttttctaatataatatctttattaggtacaccaggtgctgttatctcaacaaaaattaaagtctatttttcacaatttgaacctacattcggattgctcgctattataaatttgttgattatatttagatatatcattgtaaaaaaacatgaaactgaaattgaacgtattctttggaatggaagttttattgcctctttattacatttgtcgttttattttttcccaatactgcatcgtttaaatccttattttaatctattttattgtttgctttgtgcatattacctgcgtaacttaacaagagtgttaacaataaacaggattgtaaactacatatcaatattactaatcattacctcagtgaatatatcctatttcaatgatcccgcaaggcctgaaaattataggggatatatcttagattattggctaggatattatgatatcgataatgataaaatcaaaagatgtgactcatttaatacagatgttcctttttgtcggtggtaa

SEQ ID NO: 117671 - DNA, 1104 bp, Enterobacter cloacae
atgaaagttgttttttcttcaaatacagcatggtatctatataactttagaaaaggtactataaaaagatttattgaaaaagaatatgaggttgttattatagcgcctactgataaatattcctatctattaaaagaattaggctgtaaaattaatcatttatatatacgtagtaattcacttaatccagtccatgatagtgtcactttagtgcatttactatctttatacatcaagataaagcctgatattatttataactttacgccaaagattaatatatatagttctcttgtctcatacttttttccccgagtaaaggtaattaataatattgctgggttaggcacggcatttattaatgaaggtatgaaaaaaatttttttaacttacttatataagctttcacagaaaagagcagattttgtttttttccaaaataatgaggaccataactactttgtcaaagaaaaaatcgtttgcgagagtaaaagtaaaagaattttaggttctggtgttagtttagatttttttaaacctactaaaataaataaagaagatcatattaaatttttgcttgtggctagattgatcgaacaaaaaggtatcaggttatatgctgaggctgcgaaaattataaaagagaaatatcctcatgttgagttttctcttttaggtccaataatttctaacaatccgtttgctattcatgaaaaggaaataaaaaattgggaagatttggggactcttaattatttaggtcattctgataatgtggcagaagtccttattgattatgattgcgtagttttgccatcattttatcgcgagggtgttccaaaatctctactcgaagctgctgcttcaggtaaaattattattacgacagataatattggttgtcgcgatgctgttattgatggtgtaacaggttttttgtgcaagccaaaatctttagaaagcttattggaagctttttataaagtattacaattagattacgatagcttcgtaaaaatgaaaataggtgccagagaactagccaaggcaaaatttgatgagaatattataattgaagaatacctcaaaacagcatctaattag

SEQ ID NO: 117672 - DNA, 1056 bp, Enterobacter cloacae
gtgaacataattcttagctcactgtattatgagaaaaatcgagtaactggtgctaataagcgattcgatttttttgggaagaacttacaatcaagggaaaatataaatcttactgttttggtcagagaaggtgaaactcctgactgggctgaaaatattattaccctccctcgctatgattcaatgccttctgtcatccgtcggcttgtctattgtataaaattgacttatattttttataagcatgaaggagtgattattaatgattttatgccagtcccgttagttttttcgaaacgtaattattactatcaacttgtccatgatattagaaatttcaccgattttaatcgcgcggcagtaaaaaaaatctcaagtttgtttcaaaaaatacaatggagaatagtgccaaatattcttactgtaagttctttcaccaaaaatcagttaattaaatattgcaatgttaacccatataaaattgctgtatcatacaatggaattgatcctgtaaagcgcaaaaaagttaaaaaagatattgattttttatatatagccacatttgaaaagcggaaaaatcatgataacttaattatagctttttctaactatgtaaaaaaatatgaacagcatgctacattatttctcataggtcgtgacctgggttatcgaaaacacattgaggccttgatctcaaaatatcagattggtgagtttgtaactattattgaaaaaatatctgagagcgaattaaacattctttacgaacgaacttactgttttgttaacccatctctatatgaaggcttcggtatgccattaattgaagctatgtattttgattgccatgttatttgtagtgatatagatgttttccatgaaattgctaaagaacatgcatattattttgatcccctcgatcatgaaagtattctcaacgcgatgaaggaaatcaagaatactgagataaaagatggatgcaaaacaagctatgcaataaaaaacttttcatggtctgcaattgctgataattttataaacttattggtcaaataa

SEQ ID NO: 117673 - DNA, 291 bp, Enterobacter cloacae
atgctcaatagcaattttaaatttatcaacatccttaataacatgatccgcggccaaaataagcagcagtggatcatcgccgtgactttcttttatttttttagaaaaaaaagcagcaagagcaactgctggagctgtatttttacctatgggttcaagaataataccattgacatcaactttagcgtctcgcagttgctcagcaacaataaatctatgctcttcattacaaataacaactggtgcggcatgtttaatttctttcaaacgggaaagggtgttttgaagtaa

SEQ ID NO: 117674 - DNA, 279 bp, Enterobacter cloacae
gtgaaacgcatcaccgtgaagccgggagaagggctgtcggtgcagatgcaccatcaccgcgccgaacactgggtggtggtggcggggaccgccaaagtgaccatcgacggtgaagtgaagctgctcggtgaaaacgagtccatttatattccgctgggggccacgcactgtctggaaaacccggggaaaattccgctcgacttaattgaggtgcgttccggctcctatctggaagaggacgacatcatccgcttccaggatcgctacgggcgcgtgtag

SEQ ID NO: 117675 - DNA, 1371 bp, Enterobacter cloacae
atggaaaaattaacctgttttaaagcctacgatattcgcggcaagctgggcgaagagctgaacgaagacattgcgtggcgcatcggccgcgcgtacggcgaatacctgaaaccacaaactatcgtgctgggcggcgacgtgcgtctgaccagcaaatccctgaagctggcgctggcgaaagggctacaggacgcgggcgtcgatgtgctggacattggcctttccggtaccgaagagatctattttgccaccttccacctgggcgtggacggcggtatcgaagtgacggccagccataacccgatggactacaacggcatgaagctggtgcgcaagggcgcgcgtcctatcagcggcgacaccggcctgcgtgacgtgcagcgtctggccgaggccaacgacttcccgccggtgaatgaagccacacgcggcagctataagcagattaacctgcaaaaagagtacatcgaccacctgctgggctacatcaacgtggcgaacctcaaaccgctgaagctggtgattaactccggcaacggcgcggcaggcccggttgtcgatgcacttgaagcccgctttaaggcgctgaacgtgccggtgaccttcgtcaaagtgcacaacacgccagacggcaacttcccgaacggtattcctaacccgctgctgccggagtgccgcgacgacacccgcaacgcggtgattgagcacggcgccgatatgggtatcgcctttgacggcgatttcgaccgctgcttcctgttcgatgagaaagggcagtttatcgaaggctactacatcgttggcctgctggcggaagcgttcctcgagaaaaacccgggggcgaaaatcattcacgatccgcgtctttcctggaacaccgtcgacgtggtgaaggccgcgggcggcgagccggtgatgtccaaaaccggccacgcgtttatcaaagagcgtatgcgtgaggaagacgccatctacggcggcgagatgagcgcccaccactatttccgtgattttgcctactgcgacagcgggatgatcccgtggctgctggtgactgagctgctgtgcctgaaagggcagagcctgggtgaactggtgcgtgaccgcatggcggcgtttccggcgagcggcgagatcaacagcaaactggcacagcccgctgaggccattgcccgcgtggaacagcactttgccattcatgcgctggagattgaccgtaccgacggtatcagcatggcgttcccacagtggcgcttcaacctgcgctcctccaacaccgagccggtggtgcgcctgaacgtggagtcccgggctgatgtgccactcatggaagaaaaaacagaggaaattcttgcgttgctaagaaagtaa

SEQ ID NO: 117676 - DNA, 1407 bp, Enterobacter cloacae
atgtccaagcaacagatcggcgttgtcggtatggcagtgatggggcgcaacctggcgctcaacatcgaaagccgtggttataccgtctccgttttcaaccgctcccgtgataagaccgaagaagtcatcgctgagaatccaggcaaaaaactggttcctttctatacggttaaagagttcgttgagtctctggaaacacctcgtcgtatcctgttaatggtgaaagcgggcgcaggtaccgatgcagctatcgattcactgaaaccatatctggataaaggcgacatcattatcgatggcggcaacaccttcttccaggacaccattcgtcgtaaccgtgaactgtctgctgaaggtttcaacttcattggtaccggcgtatccggcggtgaagagggcgctctgaaaggtccatccatcatgcctggcggtcagaaagaagcgtacgaactggttgcgcctattctgactaaaatcgcagccgtagctgaagacggcgagccatgcgtgacctatatcggtcctgatggcgctggtcattacgtgaaaatggttcacaacggcattgaatacggcgatatgcagctgattgctgaagcctactctctgctgaaaggcggtctgaacctctccaacgaggagctcgcagagaccttcaccgagtggaacaaaggcgagctgaacagctaccttatcgacatcaccaaagatatcttcaccaagaaagatgaagagggtaaatacctggttgatgtgattctggatgaagccgctaacaaaggtaccggtaaatggaccagccagagctctctggatctgggtgagccgttgtccctgatcaccgaatccgtatttgcacgttatatctcttctctgaaagaacagcgcgttgcagcgtctaaagtgctgtctggcccgcaggctaaactcgctggtaataaagcggagttcgtagaaaaagttcgtcgcgcgctgtatctgggtaaaatcgtctcttacgcgcagggcttctctcagctgcgcgcggcatctgacgagaataactgggatctgaactacggtgagattgcgaagatcttccgtgccggttgtatcattcgcgctcagttcctgcaaaaaatcaccgatgcttatgctgaaaatgcaggtatcgcgaaccttctgctggcgccttacttcaagcagattgctgacgaatatcagcaggcgctgcgtgatgttgttgcgtacgcggtgcagaacggtatcccggttccgaccttctccgctgcggtggcatactatgacagctatcgtgctgccgttctcccagcgaacctgattcaggcacagcgtgactacttcggtgcgcatacctataagcgtacggataaagaaggtgtgttccacaccgaatggctggattaa

SEQ ID NO: 117677 - DNA, 1086 bp, Enterobacter cloacae
gtgaaaattctagttactggcggtgccggttttatcggttccgcggttatccgacatattattagcaatactcgggatagcgttgttaacgttgataaattgacctatgccggtaatctggaatccttgcgtgaagtaagcgatagcgaacgctatgtttttgagcatgccgatatatgtgataaagaggcaatggcgcgtatttttgctacccatcagcctgatgcgataatgcacctggctgccgagagccatgtcgaccgttctattaccggtcccgctgcgtttattgaaaccaatattgttggcacgtatatcctgttagaaacaagccgtgcttactggtcttcactggatgaggcagcaaaatctactttccgtttccatcacatttcaactgatgaggtttacggcgatctgcctcatcccgatgaacattctgactccaccctgttaccgctgtttaccgagaaaacagcgtaccagccaagtagcccttactcagcgtcaaaagcgtccagcgaccatttagttcgtgcctggatacgcacctatggtttacctgggattgtgacaaattgttcgaataattatggcccataccactttcctgaaaagctgatcccacttgttatcctcaatgcgctggataataaaccattgccgatttatggaaagggcgatcagatccgtgactggttatacgttgaagatcatgctcgtgcactgtatacggttctgaccacgggtaagccgggagaaacctataatattggcggtcataacgagaagaaaaatattgaagttgttcagaccatttgtgatctgctcgatgaaatggtaccgaaagaaacatcctatcgcgcacaaattacttatgtcgcggaccgaccaggtcacgacagacgttatgcaattgatgctcataaaattagcgacgagcttggatggactcctgtggaaacctttgaaagtggcatccgtaaaacggttgaatggtatttgaataaccaggagtgggtatcgaatgtaaaaagcggcgcctataagagctggattgagcaaaattatggggagcgtaagtaa

SEQ ID NO: 117678 - DNA, 882 bp, Enterobacter cloacae
atgacgaaacgtaaagggattatattagctggcggatcgggtacacgtctttatcccgtgactatggccgtaagcaagcaattgttgccaatttacgataagccaatgatctattatccgctctctacgcttatgctggcaggtatacgggatattctgattatcagcacgcctcaggacactccgcgttttgaacaactgctcgggaacggtagccagtggggattgcatatccagtacaaagtgcaaccaagtcctgatggactggcacaagcttttattctgggtgaagagtttatcggtgaggataattgtgcgctggtattaggcgataatattttctacggacacgatctccccagactgcttgaaggcgcagcaagccagcaagagggtgcgaccgtattcgcctatcatgtcagcgacccggaacgctatggcgtcgttgagtttgataaagacggtactgcaattggccttgaggagaagccgcagcaacccaagagtaattacgcaataaccggtctttatttttacgacaacgatgtgattgagatggccaaaagcttaacgccgtccgagcgaggtgaactcgaaattaccgacatcaaccgcatctatatgcagcagggacgattgtctgtcgcgatgatgagacgcggttatgcctggctggataccggaacgcatcagagtatgatcgaggcaagcaattttatcgccacaattgaagagcgacaggggctaaaagtttcatgtcctgaagagattgcgttccgacgaggttttattgatgccgaacaacttcgggtactcgctgaaccattgaaaaagaccgggtatggtcagtatctgctgaatctgaccaagggattagtctga

SEQ ID NO: 117679 - DNA, 1167 bp, Enterobacter cloacae
atgaaaataaccatctccggaacaggctatgttggtctctcaaacggtattctgattgcacaaaaccatgaagtggttgcgctggatatcgtgcaggcaaaagtggacatgcttaaccagaagaagtccccgatcgtcgataaagagattgaagaatacctcgcgaccaaaccgctgaacttccgcgctaccacggacaaagaagatgcttaccgcgatgcggatttcgtcatcatcgccaccccaaccgactacgatcctaaaactaactacttcaatacctcaaccgttgaagcggtgattaaagacgttacggcaatcaacccgaacgcagtgatgatcatcaagtcgacaattccagtgggtttcaccaaatcgattaaagaagagttgtgtattgataatgtcttcttctcgccggaatttctccgcgagggcagggcgttatacgataacctgcacccatcccgtatcgtgattggcgagcgttccgagcgtgcggagcgttttgctgcgttgcttcaggaaggtgcaatcaaaaaagatattccggtcctgttcaccgattcaaccgaggcagaggccattaagcttttcgccaatacctatctggcgatgcgtgtggcttacttcaacgaacttgacagctatgccgagagcttaggtctgaacacccgtcagatcatcgagggcgtgtgtcttgacccgcgtatcggtaaccattacaacaacccgtccttcggttacggtggttactgtctgccaaaagataccaagcagctgctggctaactatcaggcggtgccgaacaacctgatttccgccattgtggatgccaaccgcacgcgtaaagactttatctcggattccattctcgcgcgtcagccgaaagtggtgggcgtgtatcgcctgatcatgaagagcggttccgataacttccgcgcttcttccattcaggggatcatgaagcgtattaaggcgaagggcgtgcaggtcattatttatgaaccggccatgcaggaagacgagttcttccactctcgcgtcattcgcgatctggatgcattcaagaaagaagcggatgtaattatctccaaccgtatggcggaagagctggcggacgtgaaagataaagtctatacccgcgatttgttcggcagcgactga

SEQ ID NO: 117680 - DNA, 1005 bp, Enterobacter cloacae
atgaaatttctggtaacgggcgcggcgggctttatcggttctcatgtcagcaagcgcctgcttgatgcagggcatgaagttgttgggcttgataatctgaatgattactatgaccctaacctcaaactcgctcgcctcgaactgctcaaatccgagagtttcaccttccacaagctggacttagcggaccgcgagggcatggctgcgctcttcgccaatgagaaatttgaccgcgtaatccatcttgccgcacaggcgggcgtgcgttactcgctggaaaacccgcatgcctacgctgatgcgaacctggtaggtcacctgaacgtgctggaaggctgtcgccacaataaggttcagcatcttctgtatgcgtcatccagctctgtgtacggcctcaaccgtaagatgccgttttctactgacgactccgtagatcatccggtatcgctgtatgccgcaaccaaaaaagccaatgagctgatgtcgcatacctattcgcatctgtataacctgccgaccactggcctgcgcttctttaccgtctatggcccgtgggggcgcccggacatggcgctgttcaaattcaccaaagccatgattgaaggcaacagcatcgacgtatacaactacggcaagatgaagcgcgacttcacctatatcgatgatattgcggaggcgattattcgcctacaggacgtcattcctcaggccgatgccgactggacggtcgaaaccggttcgccagcaaccagttctgccccgtatcgcgtgtataacatcggtaacagttcacctgtcgaactgatggattacatcaccgcgcttgaagaggcgctgggcaaagaagcggtgaaaaatatgatgccgatccagccgggggacgtgctggagaccagtgcggacaccaaagcgctgtatgacgttattgggtttaaaccacaaacctcagtcaaagaaggcgtgaaaaacttcgtcgactggtaccgcaacttctataacgtttaa

SEQ ID NO: 117681 - DNA, 981 bp, Enterobacter cloacae
atgacgcaaaacaacaacaacctggtcacacgcaacaatgacccggagcaaattgatttactggatttagtgctacagctgtggcgtagtaagtgggtaattggggcatttgttgctgctttcattgttctcgccgttatttatattactgtagccaaagagaaatggacgtcatctgctatcattgctcaacctgatgccgcacaaatagctacctattccaatgcgttgaatattctttatggcggtgctgcaccgtcgatgcttgatattcagaatcgtgcaataggtcgtttcaactcctcgttctctgcattagcccaggcgcttgataatcaggaagatccagaaaaactgacaatcgaaccgactgttaaaggacagggattacccttaacggtgacctatcagggcgaatcggctgaagcggctcaaaaacaacttgctcagtacatccagcaggttgacgaacagacagcaaaagaacttacgcttgacctcagagacaacctcaagcaacagatcacaaccctgaacgactctcttctgaaccaggagaaagtggcacaggagcaaaaagatctgcgtatcaagcaaatttctgaggcgcttaagaacgcggaggcggcgaaaattagcacaccgcagctccagcaaacgcaggatgttactcaggaaaccatgttcctgctgggcaccgtagcgctcaaatcaatggttgataacgaggcgtcccgtccgctggtcttccctggctcttactatcagaccaaaaagaacttactggacattgaaaacctcaacgttaacccagacacgttacatgtctatcgttacgtaatgaaaccagatctgccaatcaagcgtgacagccctaaaaaggccatcaccctcatccttgccgttctcctcggcgggatcatcggttctgctgtcgtcctcggccgtaacgcgctgagaaactacaaaccaagagcctga

SEQ ID NO: 117682 - DNA, 612 bp, Enterobacter cloacae
atgttaacagagcaacaacaagcgcagctggactgggaaaaaactgacggattactgccggtggttgtacagcatgccgtttcaggcgaagtgctgatgctgggatacatgaaccaggaggcactggcaaaaacgatcgacagcggcaaggtgacgtttttctcgcgcaccaaacagcgcctgtggacgaaaggggaaacctcgggtcacttcctgaatgtggtcagcattacgccagactgcgacaacgacaccctgctggtgctggtaaacccgattgggccgacctgccacaaaggtaccagcagctgctttggcgaggcgagccaccagtggctgttcctctatcagctggaacagctgctggcagagcgtaaatcagcggatcctgagagctcgtacacggcgaagctgtacgccagcggcaccaaacggattgcgcagaaagtgggtgaagaaggtgttgaaacggcgctggcggccaccgtgcatgaccgggaggagctgacgaatgaagcgtcggatttgatgtatcacctgctggtgctgcttcaggatcaggagctggatttaacgacggtgattgagaatttgcggaaacgacataaataa

SEQ ID NO: 117683 - DNA, 777 bp, Enterobacter cloacae
atgctggcaaaacggataattccctgcctggacgtgcgtgatggtcaggttgtaaaaggcgtgcagttccgcaaccacgagatcattggcgacatcgttccgctggcaaaacgctatgccgaagaaggcgtagacgaactggtattttacgatatcaccgcctccagcgatggccgcgtggtggataaaagctgggtggcgcgcgtggcagaggtgattgatattcccttctgcgtggcgggcgggattaaatctgctgacgatgcggcgaaaattctctctttcggtgcggacaaaatttcgattaactcccctgcgcttgcagatccggagctgattacgcgtctggcggaccggtttggcgtgcagtgcattgtcgtggggatcgacacctggtttgattccgcgacaggcaaatatcacgttaaccagtacaccggcgatgaaagccgcacgcgcgtcacccaatgggagacgctggactgggtgcaggaagtacaaaaacgcggtgcgggtgaaattgtgctgaacatgatgaaccaggacggcgtacgcaacggttacgacctcgagcagctgaaaaaagtgcgcgcggtgtgccaggttccgctgattgcctccggcggcgcaggcaccatggaacacttccttgaagccttccgcgatgcgaacgtagacggcgcgctggccgcttccgtgttccacaaacagattatcaatattggtgagttaaaaacgtacctggccgaccagggcgtggagatcagggtatgttaa

SEQ ID NO: 117684 - DNA, 738 bp, Enterobacter cloacae
atgataattcccgctttagatttaattgacggcacggttgttcgtctccaccagggcgattacgggcagcagcgcgactacggcaacgatccgctgccgcggttacaggcttacgccgccgagggcgctgaggttttgcacctggtcgatctgaccggcgcgaaagatccgtcgaagcgccagatcccgctgcttaaaacactggtggctggcgtggacgtccccgtgcaggttggcggcggcgtgcgtacggaagccgatgttgccgccttactggacgcgagcgtggcgcgcgtggtggtcggttcgaccgctgtgaaagatcctgagacggtcaagggctggttccgccgcttcggtgcggatgcgctggtgctggcgctggatgtgcgcattgacgcgcagggtaaaaagcaggtcgcggtcagcggctggcaggaaaactccggcgtaacgctggaagagctggtcgggatgtatcttccggtagggctgaagcacgtcctgtgcacggatatttcacgcgatggtacgctcgcaggctcgaacgtctcgctgtatgaagaggtttgcgcgcgttatccgcaggtggcgtttcagtcctctggcggtatcggcgacctggcggatatcaccgctctgcgcggaaccggtgtacgcggcgtgattgtgggtcgcgcgctgctggaaggcaaatttacggtgaaggaggcgattcaatgctggcaaaacggataa

SEQ ID NO: 117685 - DNA, 591 bp, Enterobacter cloacae
atgaacgtggtgattctggacaccggatgcgccaacctgaactccgtacagtcggcgattatgcgccacggctacgagccggtggtgagccgcgacccggacgtggtgctgcgcgcggataaactctttctgccgggcgttggcaccgcccaggcggcgatggatcagatccatgagcgcgagctggtggagctcatcaaagcctgtactcaaccggtgctgggcatttgcctcggcatgcagctgcttggccgccgcagcgaagagagcaacggcgttgatctgctgggcattatagaagaagacgtgccgaaaatgaccgaccacggcctaccgctgccgcacatgggctggaaccgcgtttatccgaaggcgggcaacaggctgttccagggtatcgaagacggcgcgtacttctatttcgttcacagctacgccatgcccgtgaatacctataccatcgcccagtgcaattacggcgaggcgttcaccgccgccgtgcagaaagataacttttacggcgtgcagtttcacccggaacgctccggcgcagccggtgcgcaactgctgaaaaatttcctggagatgtga

SEQ ID NO: 117686 - DNA, 1068 bp, Enterobacter cloacae
atgagtcagaagtatctctttatcgatcgtgacggcaccatcatctcggagccacccagcgattttcaggtcgatcgtttcgacaaactggcgtttgaacccgacgtgatcccggtgctgctgaagcttcagaaagcaggctataagctggtgatgatcaccaaccaggacggtctgggcaccgacagcttcccgcaggtagactttgacggcccgcacaacctgatgatgcaggtgctgacctcgcagggcatcgccttcgacgaagtgctgatctgcccgcatatgcctgccgacgagtgcgactgccgcaagccaaaagtgaagcttgttgagcgttatctggcggaagaggcgctggataaaggcaacagctatgtgatcggcgatcgcgtcacggatatcacgctggcggacaacatgggcattgcgggcctgcgctataaccgcgacacgctaaactgggcgatgattggcgagcagctcacccgacgcgaccgctattcccacgttgaacgcaacaccaaagagacgcagatcgacgtgaaggtctggctggaccgcgaaggcggcagcaagatccacaccggcgtcggtttctttgaccacatgctggatcaaatcgccactcacggcggcttccgcatggagatcaccgttaagggcgacctgtatatcgacgatcaccacaccgtggaagataccggcctggcgctgggcgaagccctgaagctggcgctcggcgacaagcgcggcatcaaccgcttcggctttgttctgccgatggacgagtgcctggcgcgctgcgcgatggatatctccgggcgtccgcacctggaatataaagccgactttacctaccagcgcgtgggcgatctcagcaccgagatggtggagcacttcttccgctcgctttcttacactatgggcctgacgctgcacctgaaaaccaaaggcaaaaacgatcaccaccgcgtcgagagcctgttcaaagcctttggccgtaccctgcgccaggcgatccgcgtggaaggtgacgccctgccctcgtcgaaaggagtgctgtaa

SEQ ID NO: 117687 - DNA, 1062 bp, Enterobacter cloacae
atgaacatcgaagaattagcccgcgaaaatgtccgtcgcctgacgccctatcagtctgcgcgtcgtctgggcgggaacggcgacgtctggctgaatgccaatgaatatcccacggcggtggcctttgagctttcgcagcagacgctgaaccgctacccggagtgtcagccgaaagcggtgatcgagaactatgcgcagtatgcaggcgtgaagcctgagcaggtgctggtcagccgtggggctgatgaagggattgagctgctgatccgcgccttctgtgagccgggtaaagacgcggtgatgtactgccagcccacgtacgggatgtacagcgtcagcgccgaaacctttggcgtagcctgccgcaacgtgcaggcgctcgacaactggcagctggatttgcagggcatcgccgataacctcgacggcgtgaaggtggtgtttgtctgtagcccgaacaaccccaccgggcagattattcatccgcaggatatccgcaccctgctggagatgacgcgcggcaaggcgctggtcgtcgctgatgaagcctatattgagttctgcccgcaggcgacgctggcaggctggcttgaggagtatccgcatctcgttgtgctgcgtaccctttccaaagccttcgccctcgccggccttcgctgtggatttacgctggcgaataaagcggttatcgacctgctgctgaaagtgatcgccccgtatccgctctcaacgccggttgccgatattgcggcacaggcgctggccccgcagggcatcagcgcgatgcgcgagcgtgtggcgcagatcctggaagagcgtcagtatcttgtcgatgcccttaaaacgattccgtgcgtggagcaggtgttcgactcggaaaccaattacatcctggtgcgcttcaccgcctcaagcgcgatatttaaatcgttgtgggatcagggcattatcttacgagaccagaataaacaacctaccctgagcggctgcctgcgtattaccgtcggcacccgtgcagagagccagcgcgtgattgacgccctgaaagcggagaaagtatga

SEQ ID NO: 117688 - DNA, 1305 bp, Enterobacter cloacae
atgagctttaacacaatcatcgactggaatacctgtagcgacgcgcaacagcgcgagctgctgatgcgcccggcaatttccgcctcggagagcatcacccgcactgtggcggagatcctcgataacgtcaaagcccgcggggacgacgcgctgcgcgagtacagcgcgaagtttgataaaactgaggtcgacgcgttacaggttaccgagcaggacatcattgatgccagcaatcgtctgggtgatgacatcaaacaggcgatggccgtcgcggtgaaaaatattgataccttccacaccgcgcagaaattgcaggcggtggatgtggaaaccctgcccggcgtacgctgccagcaggtgacacgcccggtggcgtccgtcggcctctatattcccggcggctctgccccgctgttttcgaccgtcctgatgctggccaccccggcacgtattgccggttgtcagaaggtggtgctctgctctccgccaccgatcgccgatgagatcctgtacgcggcgaagctgtgcggcgtgcaggcgatctataaagtgggcggtgcgcaggcgatttctgccctggcgttcggaacagtatccattcctaaggtcgacaaaatctttggcccgggcaatgcctacgtgaccgaagcgaagcgtcaggtcagccagcgtctggacggcgcggcgattgatatgcctgccggtccgtctgaagtgctggtgattgccgacagcggcgctacaccggatttcgtggcctctgacctgctctcgcaggccgagcacggccctgactcgcaggtgattttactgacgccagatgccgacatggcaaaacgcgtgggcgacgccgttgagcgtcagctggctgacctgccgcgtgcggaaacggcgcgtcaggcgctatccgccagccgcctgattgtggcccgcgatcttgaccagtgcatcgccatctccaaccagtacggtcctgagcacctgattattcagacccgcaacgcgcgcgatctggtcgacagcataaccagcgcaggctcagtgttcctcggggactggtcaccggaatccgccggggattacgcctccggcaccaaccacgtgctgccgacgtatggttatacctcaacctgctccagcctggggctggcggatttccagaagcgcatgaccgtgcaggaactctcccgcgagggatttgcctcgctggcgtcgaccattgaaaccctggccgccgccgagcgcctgactgcccacaaaaatgccgtgacgctgcgcgttgccgccctgaaggagcaagcatga

SEQ ID NO: 117689 - DNA, 900 bp, Enterobacter cloacae
atgttagataactcacgtttacgcatagctattcaaaaatcaggccgtttaagcgacgattcacgcgaactgctggcccgctgcgggattaaaatcaacctgcacacccagcgcctgatcgccctggctgaaaatatgccgatcgacattctgcgcgtacgtgatgacgatatcccgggcctggtgatggatggcgtcgttgatctcggcatcatcggcgaaaacgtactggaagaagagttattaacccgccgcgcgcagggcgaagatccgcgctactttaccctgcgtcgtctggactttggcggttgccgcctgtcgctggctacgccggtcgatgaagcctgggacggcccggccgcgctgaacggcaaacgtatcgccacctcttaccctcacctgctgaagcgttacctcgatcaaaaaggcgtgcagtttaaatcctgtctgctgaacggctccgttgaagtggcgccgcgtgcgggcctggccgatgccatctgtgacctcgtctccaccggcgccacgctcgaagcgaacggcctgcgcgaagtggaggtgatctaccgctccaaagcgtgccttatccagcgcgacggcgagatggccgacgccaaacagcagctcatcgacaagctgctgacccgcattcagggcgtgattcaggcgcgtgaatccaaatacatcatgatgcatgcgccgaccgagcgcttggacgaagtgattgccctgctgccgggcgctgagcgtccaaccattctgccgctggcgggcgaccagcagcgcgtggcgatgcacatggtcagcagcgaaaccctgttctgggaaaccatggaaaaactgaaggcgctgggcgcaagctccattctggtgctgccaattgagaagatgatggagtaa

SEQ ID NO: 117690 - DNA, 825 bp, Enterobacter cloacae
atgaaaaaggtcgcgattgtcgggttaggatggttaggaatgccactggcgatgtcattagccgcgaaaggctggcaggtgacagggagtaagaccacccgagatggggttgaagcggcacgcatgtgcggcattgatggtgttgagctgcgtctcgaacccgagcttatctgcgataccgacgagctggatgaactgatgaatgtggacgcgctggtcattaccttaccggcgcggcgcagcggcccgggtgagtctttttacttgcaggcggtgcaggagatcgtcgacagcgccctggcgcaccatattccgcgtatcattttcaccagctccacctccgtctatggcgatatcgacggtacggcgaaagaaaacaccgagcgccgtccggtgaccgccagcggccgggtactgaaagagctggaagactggctgcacaatctgcctggcacgcaggtggatatcttacgtctggccgggctggtggggccggggcgtcatccggggcgcttctttgccggtaaatccgcgccggatggccagcacggggttaatcttgtgcatcttgaggatgttatcggcgcaatagaactgcttttgcaggctccgaaaggggggcacatctataatatatgtgcgccttcgcatccgccgcgcagtaccttttatccgctgatggcgcgccagctgggtctggcgccgccggtattcagcgaggcgcagggggaacgcaaaggcaaaattattgatggtaatcgtatttgccatgaactgggatttgaatatcagtatcccgatccgctggttatgcccatggaataa

SEQ ID NO: 117691 - DNA, 930 bp, Enterobacter cloacae
atgaaaccgctgctggatgttcttgttattctggatgcgctggaaaaagaggggagctttgccgccgcctcggcgaagctctataaaaccccttcggctctgagctacaccgtgcaaaagctcgagagcgatcttaatatccaaatccttgaccgcaccgggcatcgcgcgcgtttcacccgtacagggcagatgctgctggaaaaagggcgtgacgtgctgcatacggttcgcgagctggaaaaacaggccgtcaaacttcaccagggctgggaaaatgagctggtgattggggttgatgatacattccctttctccctgcttaccccgcttattgaggcgttctatcagcgccacagcgtcacccggctggtttttatcaatggcgtgctgggcggttcctgggaggccctgacgcagggcagggcggatatcatcgttggggcgctgcatgagcctccccagttgagcgaatttggttttgcgcggctcggcgttctggagcaggtttttgccgttgcgcctcatcacccgctggcgaatgaaccggagcctgttacccgacgcgtcattaaaaactatcgcgccattgtggttggagacagttctcgcccggaatgcggcatttcatcgcagctgctggatgagcaggaggccatcaccgtttttgattttaaaaccaaactggagctgcaaataagcggcctggggtgcggttaccttccccgttatttagcgcagcggtttattgacagcggagcgctggtggaaaaacaagttttagcgcaaagcagtaacgaatcggtatgggtaggctggaatgaacagaccgccgggcttgccagcgcctggtggcgagacgaaattttagcaaatagtgctatcgccacagtttacgctcaggcagatgatgggaaatcaatcagttag

SEQ ID NO: 117692 - DNA, 1359 bp, Enterobacter cloacae
atgtcgcataacgcaactccaaacacctctcgcgtggaattacgtaaaacgcttacgttgattccggttgttatgatgggccttgcctatatgcaaccgatgacgctgttcgatacattcggtatcgtatcaggccttactgacggtcacgttgcaacggcgtacgcctttgcgctggtcgccatcctctttacagcgctgagctacggtaaactggttcgccgtttcccgtccgcaggctctgcgtacacctatgctcagaagtccattagcccggcggttggctttatggtgggctggtcatcactgctggactacctgttcatgccgatgatcaacattctgctggcaaaaatttacttcgaagcgctggtgccttccgtgccgtcgtggatcttcgttgtggcgctggtggcctttatgaccatctctaacctgcgcagcatcaagaccgtggctaacttcaacaccctgattgtgatccttcagatggggattgttgcggttatcgttgggctgatcatctacggcgtttcccacggggaaggcgcaggtacgctgaccagcacccgtccgttctggtctgaaggcgctcacgtagtgccgatgatcaccggtgcaactatcctgtgcttctcgttcctgggcttcgacggtatctcttctctgtctgaagagaccaaagacgctgagcgcgtgatcccgaaagcgattttcctgaccgcgctgattggcggcctgatcttcatcggtgcgtcttacttcttacagctgtacttcccggatatctctcgctttaaagatccagatgcatcacagcctgaaattatgctgtacgtggcgggtaaaaccttccagtggggcgtgctgatcttctccagcgtcaccgtactggcttccggtatggcagcgcacgcgggcgtctctcgtctgatgtacgtgatgggccgtgacggtgtgttcccaacccgcttcttcggttacgtgcatcctaaatggcgtaccccggcgtggaacgtgctgctggtgggcgctattgccctgctggcgattaaattcgacctggtaacggccacggcgctgattaactttggtgcgctggtggcgttcaccttcgttaacctctccgtgatttcgcagttctggatccgtgagaagcgcaacaagacgctgaaggaccacatcaactatctggtgctgccagtgtgtggtgccctgacggtgggtgcgctgtggattaacctggaagagagctcaatggttctgggtctgatctggggtgcgatcggtctgatttacctggcttgcgtgaccagaagcttccgcaacccggttcctcagtacgaagacgtcgcgtaa

SEQ ID NO: 117693 - DNA, 1425 bp, Enterobacter cloacae
gtgtctgactctgccgcgcgcccgacttttttgttccacgattacgaaacctttggcacccatccggcgctggaccgaccggcgcagtttgcggctatccgtaccgatgacgaatttaacgtcatcggcgaacccgaggtgttttactgtaagcccgccgatgactatctgccgcagccgggcgcggtaatggtgacgggcatcacgcctcaggaagcgcgggataaaggcgttagcgaagcagaatttgcccgtcgcatccacgacctgttcacggtgcccaatacctgcgtggtgggttacaacaacatccgttttgacgatgaagtgacgcgcaatatcttctatcgcaacttctacgatccgtatgcctggagctggcagaaccgtaattcacgctgggatttgctggatatcatgcgcgcctgctatgcgctgcgcccggaggggattaactggccggagaacgacgacggcttgccgagcttcaggctcgagcacctgacgcgggccaacggcattgagcacagcaacgcccacgacgcgatggcagacgtttacgcgaccatcgctatggcgaaacttgtaaaaaccgcgcagccgcgcctgtttgagtatctgttgagccatcgcagcaagcaaaagctgatgacgctaattgacgtgccgcagatgaaaccgctggtgcatatttcagggatgttcggtgcgtggcgcgggaatacaagctgggtggcgccgcttgcctggcatccggacaaccgtaacgccgtcatcatggtggatctcgccggagatatctccccgctgcttgagctcgacagcgacaccttacgtgaacggctctatacgccgaaagaggcgctgggtgccctgccagccgtaccggtaaaactggtgcacatcaataagtgcccggtgctggcgcaggccaacacgctgcgcccggaagacgccgatcggctggggattaaccgtcagcactgcctcgataacctgaaagtgctgcgcgacaacccgcatgtgcgcgagaaagtcgtcgccatttttgccgaatcagagccgttcgtgccgtctgtgaatgtggatgcgcagctttataacggcttcttcagcgacgccgatcgcgcggcgatgaatatcgtgctgcaaaccgacccgcgtaacctgcccgcgctggatatcaccttcgcagataagcgcattgagaagctgatgtttaattatcgcgcgcgcaactatcccggcacgctggatgaagcagagcaggaacgctggttacagcatcggcgcaacgtgtttacgccggagtttcttaatagctacgcccaggagctggagatgctttacggtcagtatgaagggaatgctgagaagcaggcgctgctgaaagcgctgttccagtatgcgcaagaaattgtctga

SEQ ID NO: 117694 - DNA, 1167 bp, Enterobacter cloacae
ttgaaacgccgtctgtttattgctgtttctttactcgcttcgagtatttcatccgcgctggctgccgagccgctggatttttcacctcagccgcctgccatccaggctggctcctgggtattgatggattacaccacgggtcaaatcttaacggcgggcaacgaacatcagcagcgtaatccggcgagcctgaccaaactgatgacggggtacgttgtcgatcgtgctattgatagccaccgcatcagtcccgatgacattgtgacggtcggacgtgacgcctgggcaaaaggcaatccggtctttgacggttcgtcgctgatgtttctgaaggagggcgatcgggtttccgtgcgcgatctcagccgcggcctgattgttgattccggcaatgacgcctgcgtggcgctggcggatcacgtggcgggcggtcagccgcagttcgtcaggatgatgaatgactacgttgaaaagctgaacctgcgcgatacccacttcgaaaccgtacacgggctggatgcaccgggtcagcacagctccgcttacgatctcgccgtgctttcccgggccatcattcacggcgagcctgagttctatcacatgtacagcgaaaagagcctgacctggaacggcatcacccagcagaaccgcaacggcctgctgtgggataagaccatgaacgtggatggcctgaaaacgggtcacacctcgggcgcgggctttaacctgattgcctccgcggtggacggtcagcgtcgactgattgcggtggtgatgggggcagacagcccgaaaggacgtgaagatcaggcgcgcaagctgctgcactggggacagcaaaattttgatacggtgcagatcctgcataacggtaaaaaagtgggaaccgagcgcatctggtacggcgataaagagcagatcgcgctgggcacggatcaggacttctggctggcattacccaaatcggaagtgccgaacatcaaggcgaaatacgtgatggataaaaaagagctggaagcgccgatcgccgcgcatcagcgggtaggggagatccagctgtacgatcgtgacaaggtggtagcgcactggccattggttacgctggaaagcgttgaaaagggcggccttttctcccgcctcggcgattatctgcatcataaactctga

SEQ ID NO: 117695 - DNA, 474 bp, Enterobacter cloacae
atggactacagcatcaggcagcaacagaaacgtacgatcgctggctttcatctcgtggggccgtgggaaaagacggtcaagcagggatttgaacagctggtcatgtgggtagacgggcgtcatattcagccgcaggagtgggtggccgtttattatgacaatccggatgacgtgccggcagaaaagctccgctgcgttaccgccgtaacggtaacggacgatttcactatccctgaaaacagcgaaggggtgatgatgaccgaaattgctgccggagagtatgctattgccgccgcgcgcgtcgaaaatcatgatttcgccactccgtggtatcagttcttcaactccctgctggaagacaacaaattccagatcgcggcaaaaccctgcttcgaacgctatctgaacgatggcaatgctgacggctactgggatattgagatgtttgtaccggtagagcacaaagtgggataa

SEQ ID NO: 117696 - DNA, 1059 bp, Enterobacter cloacae
gtgcgccccgacaagtcattaaccccttttgaaattcggttatacaaacattatcgcgtggtgcacggttgccgcattgcgctggcgtttgtgttgaccttcgtactggttcgtctgctggatatcccggaagggacgtggccgctgatcacgctggtggtggtgatggggccgatctcattctgggggaacgtggtcccgcgcgctttcgaacgcataggcggcaccgttttaggctcagcgcttgggcttatcgccctgaagctggagctgatctcgtttccggtcatgttgctgtggtgcgcggtggcgatgtttctttgtggatggcttgcccttggcaagaaaccgtatcaggcgctgctgattggcattacgctcgcggttgtggtcggcgcaccggcgggcgatatgaccaccgcattgtggcgaagcggggacgtgatccttggctcgttgctcgccatgctgtttaccggcatctggccgcagcgcgccttcctgcactggcgcattcagatggcaaactacgtcacggcatttaaccgggtctaccaggccgggttttcgccgaatctgattgagcgcccgcgtctggaaaagcacctgcaaaaaatcctcaatgatgtggtcaaaatgcgcgggttgattaccccggcaagcaaagaaacccatatccagaaagccatttttgaagctattcagacggtcagccgtaatctggtctgtatgcttgaactgcaaatcaatgcccactgggcctcacgccccagccatcttctgatgctcaacgcgcatacgctaaaagagacgcagcagatgacgcaacaaaccctgctgaccatcgcccatgcgctctacgaaggtaacccacagccgatacgggcgaacagcgagcggctgaacgaaatcgtcgccgagcttaaacagctgatgaatgagcgccagggcgacaatgtggcggaaacgcccatccatggttatgtctggctgagtatggagctggcgcgacagctggagttgttatcgcagctgatttgccgggcgctgcgcaaataa

SEQ ID NO: 117697 - DNA, 336 bp, Enterobacter cloacae
atggaaactaccaagccttcgttccaggatgttctggagttcgtccgcctgttccgccgcaaaaacaagctacagcgcgaaatccaggacgtagagaagaagatccgtgacaaccagaaacgtgtcctgctgctggacaacctgagcgactacatcaagcctggcatgagcgttgaagctattcagggcatcatcgccagcatgaaaagcgattatgaagatcgcgttgatgactacatcatcaaaaacgctgagctgtccaaagagcgtcgcgacatctccaagaagctgaaagtgatgggcgaaatcaaaaacgtcgacgctaaaggcgagtaa

SEQ ID NO: 117698 - DNA, 1029 bp, Enterobacter cloacae
atgaatcactcccttaagccctggaatacctttggtattcaacggaatgctaatcaaattgtacgtgccgacagtgctcagcagttgctgaatgcatggcaaaacgcaacagaaaacggtgaacccgtacttattctgggcgaaggaagtaatgtcctgtttctcgatgattttgcggggacggtaatcgtcaatcgcatcatggggattgagcgtaaagagagcgctgacagctggcatttacacgtgggtgctggcgagaactggcaccatctggtgcaatataccctcgaaaaagggatgccagggctggaaaacctggctctgatcccgggctgtgcaggatcatctcctattcaaaacatcggtgcctacggcatcgaactgaaacacgtctgcgaatatgtcgactgtatcgaactcgcgaccggaacggcgaagcgcctgaccgcagagcagtgccgctttggctatcgcgacagcattttcaagcacgactatcaggatcgtttcgtcattgtggccgttggcctgcgcctggcgaaagcctggaaacccgctctgacttacggcgatctgacccgtctcgacccggctaccgtcacaccgcgtgaggtatttgattccgtttgccacatgcgaatgaccaagctcccggacccgaaagtaaacggaaatgcgggtagtttcttcaaaaacccggtgatcagcagcgaaaatgcaaaagcgtttctcgccggctggccaacggccccgcattatcctcaggcggatggtagcgtgaagctggccgcaggctggcttatcgatcagtgtgaattaaaaggtacgactcttggtggcgctgctgttcatcgtcagcaggcgctggtactgatcaaccagtccaacgcgacaagtgaagatgtcgtcaacctggcgcatcatgtgcgccagcgcgtgggcgaaaaattcgacgtctggctggagcctgaagttcgctttattggccgaacgggcgaagtgaatgccgtggagaccattgcgtga

SEQ ID NO: 117699 - DNA, 963 bp, Enterobacter cloacae
gtgaaggacaatactattccgttaactctcatcggtatccttgccgatggcgagtttcattctggcgagcagctgggcgaacagctgggcatgagccgtgctgcgatcaataagcatattcaaacgctccgcgactggggcgtggatgtgtttacggtgccgggaaaaggctacagcctgccggaaccgatccagttactgaatgaagaggtcatccgcagccagattgggcacggtaacgtcgcggtattgccggtcattgattcgacgaaccagtatctgctggatcgcctgagcgagctgaaatccggtgatgcctgcgttgccgagtaccaacaggcaggacgtggccgccgggggcgtaagtggttctcaccatttggcgccaacctctacctttccatgtattggcggcttgaacaggggccagctgcggccatcgggctgagcctggtgatcggcattgtgatggcagaggtgctgcacgatctgggtgccgatcaggtgcgggtaaaatggcccaacgatctgtatctcaacgatcgaaagctggcggggatcctggttgaactgacgggaaaaacaggcgatgccgcacagatcgtcattggggcgggactgaacatggtgatgcgaaacgtgcagaacgatgtcgtgaaccaggcctggaccaacttgcaggaagcggggatcaccatcgatcgcaatacgcttgccgtccgcatgatcaatgagttgcgtagttcgctgacgctctttgaacaagaggggttagcgccattcctgtcccgctgggaaaagctggataactttattaaccgaccggtgaagctgctgattggagataaagaaatttacggcacatcacgcggcattgacgcgcagggcgcgttgcttcttgaacaggatggcgtgattaagccctgggtgggcggtgaaatttcgttacgaagtgcggagtaa

SEQ ID NO: 117700 - DNA, 717 bp, Enterobacter cloacae
atgatgggccataacggtcagttcggtaacttcctgaaagaagtgcgtgaacagggtggcatgcaggccccgctgatggaccagaaagggctgccggtaacgttgctgggctttgatggctcgccggtgtatgacgataccgccgtgcttcagcgctggttagataccgtcggcaaagaggaagggacacgtagtgcgacgttctataacacgctgccgctgcacgacgggaaccattatcccggcgtgagtaaaacggccgattataaggcccgtgctcagaagttctttgacgagctgaacgcgttcttcaacgagctggaaaaatcaggtcgcaaagtgatggtggtggtagtaccagaacacggaggggcgctgaaaggcgacaggatgcaggtgtctggtctgcgcgatatcccaagcccgtccatcactaacgttccggccgggattaagttctttggcatgaaggcgccgcatcagggagcgcccattgaaatcacccagccaagcagctatctggctatctcggaactggttgctcgcgctgtagacggtaagctgtttgtggaagatagcgtgaattgggatcaactcaccagcgggctgccgcagacggcggaggtatcggaaaacgccaatgcggtggtgatccagtatcagaataagccttatgtccgactgaatgccggggattgggtgccgtatccgcagtga

SEQ ID NO: 117701 - DNA, 801 bp, Enterobacter cloacae
atgactaattctacctatacctcttcggcgccctcgccactctggcaatactggcgcggcctgtccggctggaatttctactttctggtgaagtttggtctgctgtgggcaggctatcttaatttccaccctctgcttaacctggtgtttatggcattcctgctgatgccaatcccgaacttcaggctgcaccgtatacgtcactgggtcgctatccccatcggtttcgccctgttctggcatgatacctggctgcccggccctgaaagcatcatgagccagggctcccaggtcgcaggtttcagtgcggactatatgctcgatctggttgagcgctttattaactggcagatgattggcgcggtatttgtcctgctggttgcctggctgttcctgtctcagtggatccgggtgacggtgtttgtcgtcgcgattatgatctggcttaacgtcctgacgctgacgggcccgagcttctcgctgtggccagccggtcagccgacgacaaccgtgaccaccacgggcggttccgccgccgcgaccgttgcgacagcaggggatacgcctgtggttggggatattcctgcgcagactgcaccgccgacatccactaacctgaacgcgtggctctccagtttttacgctgcggaagataagagtcagacgaaattcccggacgcgctgcctgccgatgctcagccgtttgagctgctggtcattaacatctgttctctgtcctgggctgacgttgacgcggctggtttgatgtcgcacccgctgtggtcgcatttcgatatttag

SEQ ID NO: 117702 - DNA, 195 bp, Enterobacter cloacae
atgaatatcagcgatatcatccaactggttgttctgtgcgcgctgatttttttgccgcttggctactatgcacgccatcccctgcgccgtattcgcgatacgatcagattactgttcgtcaaacctcgctatattaaacccgccggaacactgactcgcgctccgaacgtcaaggcaaaccgaaaacatgactaa

SEQ ID NO: 117703 - DNA, 1092 bp, Enterobacter cloacae
atgagtgaataccgttctctctatggcctggccagtattcgggtccagaccgacagccatctttacgacgtggctttctggtgcaatgaaaaaggggtgagctcccgacaacaacttaccctcaaacatgtcggggatgagtggcatcttgctcaacaggaagagacggtagttcagccacgcagtgatgaaaaacgtgttctgagccatattgcggtactggaaggtgcgcctgcactgtctgagcactggtcactgttcgataccaatgaagccttatttgatgaggcgcgcaccacgcaggcggcgactattatcttctcgttgatccagaataaccaaatcgaaacgctggcaaggcacattcacacattacgtcgccagcgcggcagcgcgttaaaaattgtggtgcgtgaaaataataccagcctgcgcgccaccgatgagcgcttattactgggctgcggcgcgaatatggtcattccgtggaatgctcccctgtcgcgctgtctgacgctgatcgaaagcatccagggccagcagtttaatcgacatgttccggaagatatcagcaccctgctttcaatgacgcagccgatgaaactgcgcggctaccagaaatgggacaccttctgcgatgcggtgggcaacatgatgagcaatacgctgttaccggcagacggaaaaggggtgatggttgccctgcgccccgtgccgggtattcgcgttgagcaggcgctcactctgtgccgccctaaccgtatcggggacatcatgaccattggcgataaccgcctggtgctgttcctctccttctgccgggtgaacgatctggatactgcacttaaccatatcttcccgcttcctaccgcggatatcttctcgaaccgtatggtctggtttgaagataacctgatcgcggctgagcttgtccagatgcgtgccctgccacctgaaaagtgggccaaaccgttgcctgtcacaagcggcgccaaaccggttctgaacgcgaaacatgacgggcatgtctggcgacgggtacccgagccgctacgcttactggatgagaacaaggagagcgcgccattatga

SEQ ID NO: 117704 - DNA, 471 bp, Enterobacter cloacae
gtggactccatattttctattggcatccagtcattatgggacgaattgcgccacatgccagtcggaggagtctggtgggttaatacggatcgtaatgaagatgccatcagtctggtaaaccagacgatagcggcgcaggggaaggattcccgcgtggccgtcattacgatgggcgaagagccgaagtcaatcatcagactcgacagtgaccgtggaccccagacagtacgattattttccatgcctgcggaggctgacagtctatactttttaccccacgatattcagtgtcctattgttcctgaacactatttactgattctaaaatgctctaatgatggcctgcaaaatataccgtctgaaaagcttctgaaatggctgggaagaatcaacagatgggcaaaaaatcaaattgcaccttattggttgttaacccaggcagtaataatgacaagcttttttcacttttaa

SEQ ID NO: 117705 - DNA, 189 bp, Enterobacter cloacae
atgcaaaataacgaacccgcaaccccagtcgactcaagtctgggttacacattccagaacgattttttggcactcacgcaggctttttctttgcctgaaatagattacaccgatatttcccagcgtgaacagttggcggcggctattaaacgttggccgttattagctgagtttgcccaacaacaataa

SEQ ID NO: 117706 - DNA, 753 bp, Enterobacter cloacae
atggctgtactaggattacagggcgtccgtggtggagtgggtacaacttccgttaccgcggcgctggcgtggtcattgcaggtattaggtgaatcggtactggtcattgatgcctgttccgataatttgctgcgcatgtcattcaatgtcgactttacgcatgcaaacggctggggacgcgcgcttctggacgataaagactggcgggatgcgggtttgcgttatacctcccagctcgatttgcttccctttggtcaattgaccgaaaccgagcgcgggaatgaagccgcgtaccagcgcctgttctctcgcttcatcaccgcattgcagagcctgaaagagagcgggcactatcagtggatcctgctggacctgccgcacggtgccgcgtcgctgacccgccagctgctggcgcagtgcgaccatgtgctctccatcgcgaacgtagatgcgaattgtcatatccgtctgcatcagcagccgatgcctgccaatgcccatattctgatcaacgatctgcgcattggcagccagatccaggacgatctctaccaggtctggctccagagtcagcgccgcctgttgccgatggtgatccatcgtgacgaagcgatggcggagtgcctcgcgtccaaacaacctctcggggagtaccgtagcgattcactggcggcggaagagatcctgacgctggccaactggtgtctgctgcactttgctaaacggccggagcctgccgggagttcagtatga

SEQ ID NO: 117707 - DNA, 1530 bp, Enterobacter cloacae
atgagccgcctgactaactggctgctcattccgccggtcagttcgcgcttaagtgaacgctaccgccattaccgtcatcacggcgcctcgtcgctgagcgctgcgctgggctgtttgtggatgattctggcgtggatgttcatccccctcgaacatccccgctggcaacgcattcgtgcgcgccacggtgaactctatccgcatatcaaccctgacaagccgcgtccgctggatcccgcgcgctacgctattcagtccatctggctactaacgacctcaacgggcgcggagaaaaaaacgtcccgctggcgcagcttcgatcgtgtgcagtacctgcgtgaacactaccaccagtggcttgaccggctacctgaccgggtgggcgacaaaacgggtcatttagataatcacaaagagctcgggcacctacacccgggcttgcggcgttttattctcggcgtggttgtggtgttctcgctgattcttgcgctggtctgtattacccagcccttcaatccgctggcgcagttcaccttcctgatcctgctgtggggcgtggcgctgctggtgcggcgcataccagggcgtttttctgctctgatgctgattgtgctatcgctgaccgtctcctgccgctacatctggtggcgatatacctcaacgctgaactgggacgatccggtcagcctggtgtgcggcttagtgctgctgtttgctgagacttacgcctggatcgtgctggtgctgggttacttccaggttatctggccgctgaatcgacagccggtgccgctgccaaaagacacgacccagtggcctacggttgaccttttcgtgccgacctacaacgaagatctgtcggtggtaaaaaacaccatttacgccgcgctgggtatcgactggccgaaggataaaatcaaaatctggatcctcgatgacggtggccgtgccgagttccgccagttcgcggacgaagtgggggtagagtacatcgcccgtaccacgcatgaacacgcgaaagccggtaacatcaacaatgcgctgaaatatgccaaaggggagttcgtctctattttcgactgcgaccacgtgccaacgcgctcgttcctgcaaatgaccatgggctggttcctgaaggagaaagagctggcgatgatgcagacgccgcaccacttcttctcgccggacccgtttgaacgtaacctcggccgttttcgtaaaaccccgaacgagggcacgctgttctatggactcgtgcaggacgggaacgacatgtgggacgcaacgttcttctgcggctcctgtgcggtgatccgccggaaaccgctggatgaaattggcgggatcgccgtcgagacggtcacggaagatgcgcacacctcgctgcgtctgcaccgtcttggctatacctccgcatgcgcattcctcaggcggcggggctggccacggaatccctgtcggcgcacatcggccagcgtattcgctgggcccgcggcatggtgcaaattttcaggctcgataacccgctga

SEQ ID NO: 117708 - DNA, 1083 bp, Enterobacter cloacae
atgggtaaagggctgaagctggcgcaacggctgtgctacgtcaacgccatgttccacttcctgtccggtattccacggcttatcttcctcactgcgccgctggcgttcctgctccttcacgcttacatcatctatgcgcctgcgctgatgattgccctgttcgttctgccgcacatgatccacgccagcctgacgaactcgaagattcaggggaaatatcgccactccttctggagtgaaatttacgaaacggtgctggcctggtacatcgcgccgccaaccatggtggcgctgattaacccgcataaagggaaattcaacgtcaccgcgaagggcgggctggtggaagaggagtatgtcgactgggtgatctcccggccctatatcttcctggtgctgctgaatattgtgggcgtgattgttgggatctggcgctacttctacggcccggaaaacgaaattctgacggtcttcgtgagtatggcgtgggtgttttataacctgattatcctcggtggcgcggtggcggtatcggtggagagcaaacaggttcgccgtgcgcatcgcgtcgaaatcagcatgccagcggccattgcccgcgacgatggacatctcttctcctgtaccgtacatgacttttcggatggcggtctgggtatcaagatcaacggtcaggcgaaggtgctggaggggcagaaggtcaacctactgcttaagcgcggccagcaggagtatgtcttcccgacgcaggtggtgcgtgtgagaggaaatgaagtgggtctgcaactgatgccgctgaccaaaaagcaacacattgattttgtgcagtgtacgtttgcccgcgcggatacgtgggctctctggcaggacagcttccctgaggataagcctctggaaagcctgctggatattcttaagctggggttccgtggctatcgtcaccttgcagaatttgccccgtcgtcggtgaaattaattttccggtcacttacttcactggtttcctgggtcgtgtcgttcattccgcgtcgacctgagcgagatgaagcgaagcaagcggacccggttatggctcaacaatga

SEQ ID NO: 117709 - DNA, 2388 bp, Enterobacter cloacae
atggggatgagtgcgctccctgcaacagtggctaacgcagcgcctgataacgcagcggccacgcccgcgccaacggtgcctgtcgtcgcgcaagcgaccgatccggttgtgacggccgcgccggggcagacggaaaacgtcgtcccgaatcagccgacgacggggaatacgctgcccgccgacaacccggtggttgggcaggtcatgcctggcgtgccgggagccagtgcgccggtggttgccgaaaatacgccgtcgcgtgacgttaagctgacgtttgcccagatcgcgcctcctccgggcagcatggttctgcgcggcatcaacccaaatggcggtatcgaattcggtatgcgcagcgatgaagtcgtgtcgaaagcgatgctcaacctggaatacaccccatcgccgtcgctgctgccggtgcagtcccagcttaaggtctatctgaatgacgagctgatggacgtcctgcccgtcaccaaagagcaactgggtaagaaaaccctggctcaggtgccgattaatccgctgtttatcaccgactttaaccgcgtgcgtctggagtttgtcggccactaccgcgatgtctgtgaaaacccggccagcagcaccctgtggctggatgtcgggcgtaactcttcgcttcagatgacctatcagccgctggcgttgaaaaacgatctctccgccttcccggtgccgttcttcgacccgcgtgataaccgtccgctgaacctgccgatggtctttgccggctctcccgatgtgaccgaacagctggcggcctctatcgtggcatcctggtttggttcccgctccggctggcgtggtcaaagtttcccggtcatgtacgacaaaatgccggacaaaaacgcgatcgtgtttgccaccaacgccaaacgtccggctttcctgcgtgaccatccggaggtgaaagcgcccaccatcgagatgatcagccatccggacaatccgtacgtgaagctgttggtgatcttcggccgtgatgacaaagatctggtgcaggcggcgaaaggcattgcgcaggggaatatcctgttccgcggtaacagcgttgtggtggacgaggtgaaaccgctgctggcacgtaagccttatgatgcgccgaactgggtacgtaccgaccgggccatcacctttggcgaactgaaaacctatgaagagcaattgcagtcaaccgggcttgaaccttctcctgtcagcctgtcgctgaacctgccgccggatctctatctgctgcgcaccaacggcattgatatcaatctgaactaccgttacaccgcgccggcgaccaaagacagctcgcgcatggatatcagcctcaacaaccagttcctgcaatcgttcagcctgaccagcagccaggagacaaaccggttgatgcttcgtctgcctgtattacaggggctgctggatggcaaaaccgatgtgtcgatcccggcgctgaagctcggtgcggtgaaccagctgtggtttaacttccagtatatgaaccccatgccgggtggatcggtggaaaactgtattaccttccagccggtgcaaaaccacgtggtgattggcgatgattccacgatcgacttctcgaagtattaccactttattgcgatgccggatctgcgtgcctttgctaacgccagcttcccgttcagccgcatggcagacctctctgaatcgattgtcgtgatgccaaaagcggccaacgaaggccaggttaccacgctgctggacaccatgggcaccgtcggggcgcaaaccggcttgccggctatcaacgtgacggtgacggatgacgggagccagatccagaacaaagatgccgatatcatggtcatcggcaacattccggacaagctgaaagacgagaagcgcgtcgatctgctggtgcaggcggctcagtcgtgggttaacacgccgctgcgtcagaccgagttcccgagcatcatgccggacagcggcgatcgtcaggccaatatcagggcgaccgtaagctcaacgggtccgatggccgcgattgtcggcttccagtcgccgtataacgaccagcgcagcgttatcgccctgctggcggacagccctcgcgggtatgagctactcaacacggccatgaacgacagcggtaaacgggcggcaatgttcggttccgtctcggtgatccgtgagtcgggggtaaacagcctgcgcgtgggggatgtctactacgtcggtcatctgccgtggttcgaacgcctgtggtacgccctgtctaaccacccggtgctgctggccgtgctggctgcgctcagcgttgtactgctggcgtgggtactgtggcgtctgctgcgaatcatcagccgtcgtcgtcttaacccggaccatgagtaa

SEQ ID NO: 117710 - DNA, 1107 bp, Enterobacter cloacae
atgaaaatctttcgcgggtgtgtagtcgcagcgttgatgctggcggcggcgaatcttcacgccgcctgtcgctggcctgcctgggagacgttcaagcaggattatatgagcgaaagtggacgcgtcattgatcccagtgacgcgcgcaaaatcaccacctccgaagggcaaagctacggactgttctttgccctcgcggcaaacgatcgcaaggcgttcgatctgctgctggcatggacgcgcgataaccttgccgagggagatttaacccaacatctcccggcctggctgtgggggaaaaaggacgacgaaacctgggcggttatcgaccctaactccgcgtctgatgccgatatctggattgcctggtcgctgctggaagccgggcggctgtggaaaaatcccgattacacgcgcacgggtaaggcgctgttgacgcgcattgccagtgaggaagtggtgaaggtgccggggttgggttctatgctgctgccgggtaaagtcggttttgccgaagagagcgtctggcgcttcaaccccagctacctgccgccgcagcttgcgagctatttcacccgttttggcgcgccgtggacgacgctccgtgaaaccaacctgcgtctgctgctggagaccgcgcctaaaggattttccccgaactgggtgaaataccagaaaaagggcggctggcagctgtcgcaggatgcatccctgatcggcagctacgatgcgattcgcgtctatctgtgggtagggatgatgaacgataacgatccgcagaaagcccgactactggcgcgtttcaagcccatggcgaccaccacaatcaaacaaggcttgccgccggagaaagtggacgtcgcgaccgggaaacgcaccggagatgggccggtagggttttctgcctccctccttccgtttttacaaaaccggggcgcgcaagcggtgcaacgccagcacgtcgccgatcgttttcccgataacaatgcttattacagctacgttctgaccctctttggacaagggtgggatcagcatcgttttcgtttcaccgtgcaaggtgaattactaccggactggggccaggaatgcgcacgttcacactga

SEQ ID NO: 117711 - DNA, 3483 bp, Enterobacter cloacae
atgcgcacgttcacactgaatctactcaccttatcgcttggcctggcgctaatgcccctggcccaggccgccaactccccgcagcagagacagctgctggaacaggtccgtctgggggaatccacccagcgtgaggatttagtgcgccagtcgctctatcgccttgagctgatcgaccccaacaacccggacgtgattgccgcgcgcttccgctacctgttacgacagggcgatacggcgggcgcgcaaaaagagctggatcgcctgaaaggaatggcgcccgattccagtgcctatcagtcctcccgtactaccatgctgctctccacgccggatggtcgccaggccctccagcaggctcgcctgcttgccaccaccgggcacacacaggaagccattgccgcgcatgacaaactgtttgacggtaagccgcccagtggcgacatcgcgacggagtactggaacgtggtggcgaaagagccagcccgccgcaaccaggccattaatcagcttaagaaaataaacgccagcagtccgggtaacgtcccgctacagtcctcgctggcacagcttttgttccagagcggacggcgtgatgaagggttttcggtgttacaggagatggccaaatcgaacaatggccgcagtcaggcgtcggacatgtggtaccagcagatcaaagatcagccggccagcagcgccagcgttaccgcgctgcaacaatacctgagcgtgttcagcgatggcgataacgtgacggcggcgcgcgcccagcttgaagcgcagcaaaaacagcttgccgatccggcgttccgcgccaaagccgaagggttagccgcagtggatgccgggcagggcagtaaagcggtaacggagttgcaaaaagcagtcagcgccaaccacgccgacagtgaagccgtaggcgcgctggggcaggcctattctcagaaaggcgatcgcgcgcgtgcggttgcgcagtttgaaaaggcgatcgccctcgatccgcagagcgataaccggggcaaatgggacagcctgctgaaggtcaaccgatactggctgctgatccagcagggggataacgccctgaaagccaacaatacggcccaggccgaacgctattaccagcaggcgcgcaatatcgacaatacctacagctacgcggttctgggcctcggtgatgcggcggcggcgcgcaaagataacgacgcggccgagcgctattaccgccaggcgttgcggatggacagcggcaacagcaacgcggtacgcggtctcgccaatatttatcgcgcgcagtctccggagaaggcgacgcagtttattcagtcgctctctgccagccagcgccgcagcattgatgatatagaacgtagcctgacgaacgagcagctgtcagcccaggccgaacagctggaaagcgaggggaaatatgcgcaggccgcagaaattcagcgccgacgccttgcgctttccccgggcgacgtgtggatcacctaccgactgtcacgcgatctgtatagcgcgggtcagcgcagccaggcggataacctgatgcgtcagctggcaagccagaaaccgggcgatccggatcaggtttacgccagcgggctgtacctgtccggtaacgatcaggaccgggcggcgctggcgcatctgaacacgctgccgcgcgacaagtggaacggcaacattcaggcgctggcggaccgcctgcaaagtaaccaggtgctggaaaccgccaaccgcctgcgcgacagtggaaaagagcaggaggcggaaacgttgcttcgccagcagcctccgtccacccgtatcgacctgacgctggcggactgggctgaacagcgtggcgatcatgaggccgcgaaaaccgcctacaacaccgtcctgcaacgcgaaccgcagaacgaagacgcgatcctcggcctgaccgaggtctctcttgcccagggtaacaaggacgcggcgcgcgcggcgctggcgaaactgcccgcggcacagaacggcgaaccgctctccatcaatatgcagcgccggcttgccatggcgcaggctggcctgggtgatcatgccgcggcagaaaagaccttcaacgccattcttccgcaggccaaatcgcagccgccttcgatggaaagtgcgctggtgatgcgcgatgccgcccgtttccaggcacaaaatggtcagcctaagcaggcgctggacacctggaaagatgcgatggtctcatcgggcatcacaacgacccgtccgaccgataacgacagctttactcggctcacgcgtaacgatgagaaagatgattggctgaagcgcggcgtgcgcagcgatgcaggcgatctttatcgtcagcaggatctgaacgtcacgctgcaacacgactactggggctccagcggcacggggggctattccgacctgaaagcgcacaccaccatgctccaggttgatgcgccgctgtcggacggacgtatgttcttccgtagcgatctggtcaatatgaacgccggttcctttgacaccgataacggaacctacgatccgacatggggtacctgtgccgaaacgccatgtcacggcagcacgaaccagtcggccaacggcgccagcgtggccgtcggctggcagaacaaaacctgggcgtgggatatcggtacaacgccgatgggcttcgacgtggtcgatgtggtgggtagcctgagctacagcaacgatttagggccgattggctacaccctgaacgcccatcgccgtccgatttccagctcggtgctggccttcgccgggcaaaaagatcccaataccgacaccacctggggcggcgtgcgtgccaccggtggcggcgtgagcatgagctacgacaaaggcgaagctaacgggatctggtcaagcctgagtgccgacagcctcaccgggaagaatgtcgaagataactggcgcgtccgctggatgaccggctattactacaagctcattaatcagaacaacgaacgcctgacggtgggcgtgtccaacatgctctggcattacgataaggatttaagtggctattcgctgggccagggcggttactacagtccccaggagtatgtgtcgttcgccttaccggtgaactggcgtaaacgcacagagaactggtcatgggagctgggcggctccgtctcctggtctcattcaaaaacaaaagatgtgatgcgttatccgttacaggggctgatcccggacaatgagccaggccgttataccgataaaggtgtaatggaaaccggaagtagctcgtcagggacgggttataccgcaagggcgattgttgaacgccgcgtgacgtccaactggtttgtcggactgggcgtcgatattcaggaagcaaaagactataccccgagccatgcgctgctctacgttcggtattctgccgcgggctggcaaggtgatatggacttaccaccggaaccgctggtgccttatgcagactggtga

SEQ ID NO: 117712 - DNA, 2007 bp, Enterobacter cloacae
ttgcgtgtcagccgttccttaacgatcaaacagatggcgatggtgtctgccgtcacaatgctgtttgtcttcatcttctgcgtcattttgctgtttcactccgtacagcagaatcgctataacacggcttcgcaactggaaagtattgcccgctcggtgcgggaacccctgtcagcctcgatcctgaaaggggatatccccgaggcggaatccatcctgaagcgcattcagcccgccggtatcgtgagccgcgcagatgtcgtgctgccgaaccagttccaggcgctacggatgagctttatcccggagcgtcccgtcccgatgatggtgatgcgcctgtttgaactgccggtgcaaatttccctgcctctctattccctggaaagaccggctaacccgcagccgctggcctacctggtgctacaggccgactcgtaccgcatgtataaattcgtcatgagttgggttgctacgttagtgactacttacttacttttgacactaatgctgagcgtggcgctgacgtggtgtatcaaccggttaattgtgcatccgttgcgccgcatagcccgggagctgaacgacctctctccacaggagcacatggggcatcagcttcccttgccgcgcctgcatcacgacgatgaaattggcatgctggtccggagttacaatatcaaccagcagcgtgtcctgcgtcagcaggaagagctcagtagcaacgccacccgttttccggtatccgatctgccaaacaaagcgtttttaatggccttgctggagcagaccgtcgcccgccagcagaccaccgcgctgatggtgattgcctgcgaaaccttgcaggacacggcgggcgtgctgaaagagagccagcgcgagatgctgttgctgacgctggtggaaaaggtgaaatccgttctggcgccgcgcatggtgctcacccaggtcagcggttatgacctggtggtgatcgcgcacggtgttaaagagccgtggcacgccattacgctaggtcagcaagtactcactgtcattaatgagcggctgcccattcagggtatccagcttcgcccgagcgccagcatcggtattgcgatgtactacggggggctgaccgccgagcagctttatcgtcgggccttctcggccgcgttcaccgcgcgccggaaaggcaaaaaccagatccagttctttgatccggagcagatggaaaaagcccagcagcgcctgacggaagagagcgacattctgacggcgatggacaatcgccagtttgcgctctggctacagccgcaggtcaatttgcgcacgggtgaagtgaccagcgccgaagcgttgctgcgtatgcaacagccggacggcacgtgggagctgcctgaggggatgatcgaacgtatcgagtcctgcggcctgatggtcaccgtcggctactgggtgctggaagagtcctgccgccagcttgcggcctggcaacaacggggcatcacgctgccgctgtcggtgaatctctctgcgctacaactgatgcacccgaccatggtgccggagatgctcgagttgatccaccgctaccgcattcagccccacacgttgatcctggaagtcaccgagagccgttgtatcgacaatcctgacgatgctgtcgccattctgaaaccgctgcgtaatgccgggatccgcattgcgctggacgattttggtatggggtattctggcctgcgtcagctccagcacatgaaaacgttgccggtggacgtcctgaaaatcgacaaaacctttgtggaagggctgccggaggattgcagcctggtacaggccattattcagatggcgcacagcctgaatctgcacgtaattgccgaaggtattgaaaccgacgcccagcgtgagtggctggctgcggcgggcgtggagagcggacagggcttcctgtttgaccgcgccgtaccgacggatatctttgagcaacgctatctcgccgacgctggcaataacgcaaaagtgtaa

SEQ ID NO: 117713 - DNA, 1287 bp, Enterobacter cloacae
atgaaaacctcactcttcaaaagtctttacttccaggtcctgacagccatcgctatcggtattctgctcggtcactactacccggagctgggcgcgcagatgaaaccgcttggcgacgcgttcgttaagctcatcaaaatgatcatcgcgccggtcattttctgtaccgtggtgaccggtatcgctggcatggaaagcatgaaggcggtcgggcgtacgggggcggttgccctgctgtacttcgagattgtcagtaccatcgcgctgattatcggcctgataattgtcaacgtggtacagcctggcgcgggcatgaacgtcgacccggccacgctggatgcgaaagcggtggcggtttacgctgaacaggcgaaagatcagggtattgttgccttcctgctggacgtgatcccgagcagcgtgattggcgcgttcgccagcggaaacatcctccaggtgctgctgtttgccgtgctttttggctttgccctgcaccgtcttggcagcaaaggccagctgatttttaacgtcattgaaagcttctcgcaggtgatcttcggcatcatcaacatgatcatgcgtctggccccgattggcgcctttggcgcgatggccttcaccatcgggaaatatggcgtcggcacgctggtacagcttggccagctgatcgtctgtttctacatcacctgtattctgtttgtggtggtggtgctcggctccatcgcccgtgcgaccggcttcagtatcttcaaatttatccgttacattcgtgaagagctgctgattgtcctcggcacatcctcttcggagtccgcgctgccgcgtatgctcgataaaatggaaaagctgggctgccgtaagtcagtggtggggctggttattcctacgggctactcctttaacctggacggcacctcgatatacctgacgatggcggcggtctttattgcccaggccactaacagccacatggatatcttccatcagattacgctactggtggtgcttctgctctcttcaaaaggggcggcgggcgtaacgggcagcggatttatcgtgctggcggccaccatttcggcggtgggccatctgccggtggcgggcctggccctgatcctcggtattgaccgctttatgtctgaagcccgtgcgttaaccaacctggtcggcaatggcgtggcgacgattgtggtggcgaagtgggtgaaagagctggatcacaagaagcttaacgatacgctgaataaccgcacatctgaggacaaaacccccggtttatcctcttaa

SEQ ID NO: 117714 - DNA, 1491 bp, Enterobacter cloacae
atgcagggcacaaaaattcgactcttaaccggcggtttgctgatgatggcagcagccagttatgtgcaggcagatgcgctccagccagacccggcctggcaacagggaacactggcgaatggtttccagtggcaggtattatccactccgcaacgtccgagcgatcgcattgaaatccgtctttctgtgaataccggctccctcactgaaagcacccagcagaccggcttaagccactttattcctcgactggcgctcacccagagcggcagtttgcaggcggttcaggtgcgttctttatggcaacaggccatcgatccgaaacgcccgctgcccccggctgtggtctcctatgactacaccatgtttaacctgagcctgcccaacaaccgtaacgatctgcttaaagaagcgctgacctatctttcggatgccaccggcaaactggcgattacgcctgagaccgttaactatgcgttgagcaacagcgacatggtggcgacctggccgacggataccaaagaaggctggtggcgctaccgcctgaaagggtcaacgctgcttggccacgacccggcagagccgctgaaacagccggttgatgccgcgcaggtgaaatctttctaccagcagtggtacaccccggatgccatgaccctgattgtggtgggcaacgtggacagtcgtgcggtgatagaacagatcaacaaagcatttggcgatctgaaagggaagcgtgaaacgcccgcccctgttcctaccttgtccccgctgcgtcctgagacggtcagcatcatgacggataccgtgcgtcaggatcgtctttcaatgatgtgggatacggcctggcagccgatccgcgagtcttctgcgctgttgcgttactggcgtgcggatctcgcgcgtgaagcgctgttctggcacgttcagcagacgctcagcaagaacaacgtgaaagatattggcctgggatttgactgccgtgtgctgttccagcgcgcccagtgcgccattaacgtggaatcgccgggtgataagctgaatgccaatctcggcgtggtggcgaaagagctggctaaggtgcggaaagagggcctgtctgaagaggagtttaacgcgctggtggcgcagaaatccctcgaattgcagaaactgttcgccacctatgcccgcgccgataccgatatcttaatcagccagcgcattcgctccttgcagaatcaggtggtggatatcgcgccggagcagtatcagaaactgcgtcaggacttcctgaacggtctgaccgtggagatgctgaatcaggatctgcgtcagcagctgtcgcaggatatggcgttgattctgttgcagccgaaaggtgagccggaatatgacatgaaagagttgaaggccacctggagcgccatcatggcgacgccgccgcagccagcgcaaacggcagccgatgatttacaccaggatgcgagcgatattccgcagggccagtaa

SEQ ID NO: 117715 - DNA, 930 bp, Enterobacter cloacae
atgtctaaaaaaattgccgtgattggcgaatgcatgattgagctgtcccagaaaggcgcggaagtcagccgcggttttggtggcgatacattgaacacctccgtttacattgcccgtcaggtcgcccccgacgcgctgagcgtgagctacgttaccgcgctgggaacggacagcttcagccagcagatgctggaagcctggcagggtgaaaacgttgggacctcgctcatccagcgaatggaaaaccgcctgccgggtttgtactacatcgaaaccgacagcaccggcgagcgcaccttctattactggcgtaatgaagcggccgccaaattctggctggaaagcgaggccgccgctgccatttgcgaagaactggcgaccttcgattatctctacctgagcgggatcagcttggcgatcctgagccaggagagccgtgaaaagctgctgtcactgctgcgcgaatgccgtgccaatggcggtaaggtgattttcgataacaactaccgtccgcgtttgtgggccagccgcgaagagacgcagcaggtctaccagcagatgctcgaatgcaccgatatcgccttcctgacgctggatgatgaagatgctctgtggggcgaaaaaccggttgatgaagtcattgcccggacgcaggctgccggggtcagcgaagtggtgatcaagcgcggggcggagtcttgcctggtggcggttgcaggtgaagccgtgacagaggtgccggcggtgaagctggcgaaagagaaggtaatcgataccacggcggcgggagattctttcagcgcggggtatctggcggtacgtctgacggggggaacgccggaagcggcggcgcagcgcggtcacttgacggccagcacggtgattcagtatcgcggagcgattattccgcgcgaggcgatgcctgcttaa

SEQ ID NO: 117716 - DNA, 774 bp, Enterobacter cloacae
atgaagtcagagcaggttatccagcggctgagcactacgcctgaggcaagtattgagaacttgcaggagcatcgctactggctgcaatgtgagcgagcgtacacctatcagcccatctaccgtaccgacggtcggttaatggcgattgaggtgttaacggtcgtcactcatccatcgaatccttcacagcgtattgcaccggaccgctattttgcggaggttgccgtgcgtcagcgtatcgacgtgctggaagagcagctgagaatgctggcgacgaagcaggcgttcttcgagcagcacggtattctggcgtcggtgaacgtggatggcccaaccctgatggcgttacgtcagaacgcgacattgcaggcgctgattgccaccttgccgtggatgcgcttcgagctggtggaacatgttcagctgccacaggactcctcgtttgcctcgatgtgtgagtttggcccgctgtggctggatgatttcggtaccggtatggccaacttctccgccctgagcgaagtgcgttatgactacatcaaagtggcccgcgatctgtttatcatgctgcgccagacgccggagggacggaacctgtttacgatgctcctgcaactgatgaaccgctattgccagggcgtcattgtggaaggcgtagagacgctggaggagtggcgcgacgtgcaaaattccccggcagcggcggcacagggttatttcctctctcgtcctgtccccatggataccctggaaaaggtgataaccaccctctga

SEQ ID NO: 117717 - DNA, 2043 bp, Enterobacter cloacae
atgacaaaaacaaccagggtgatttcctggacagcagggattttcttgttgctgatcgtggtcttaatcatcattatcgccacgtttgactggaaccggctcaaaccgaccatcaaccagaaagtctcaaccgagctaaaccgccccttcgcaatacgtggcgatttgggtgtcgtgtgggagcgccagaaagaggaaaccggctggcgaagctgggtgccatggccgcacgttcacgccgacgacatcattctcggcaacccgccggacatccccgaagtgaccatgatccacctgccgcgcgtggaagccacgctggcgccgttagccctgttaaccaaaacggtgtatctgccgtggatcaaacttcagcagcccgacgcgcggctgattcgcctgtcagagaaaaacaataactggacgtttgatctcgccagcagcggcgataaagatcagaatgcgcagccctcttcgtggtctttccgcctcgacaatattctgttcgatcgggggaggatcgccattgacgataaggtgagtaaggctgacgtggagatcctcgtcgatccgctgggcaagccgctgccgtttagcgaagtgacgggcagtaaagccaaaggcgatgacagcaaagcgggcgattacgtcttcggcctgacggcgaaagggcgctacaacggccagccgctgaccggtaaaggcaaaatcggcggcatgctggcgctcaggagtgagggcacgccgttcccggtgcaggcggatttccgctcgggcaacacccgcgtggcgttcgtgggcacggttaacgacccgatgaacatgggcggcgtcgacctccagcttaagtttgccggggattcgctgggtgaactgtacgatttgaccggcgtgctgctgccggataccccgccgtttgaaacggacgggcgcctggttgccaaaatcaacaccgaaaaatcgtccgtctttgactaccggaattttaacgggcgcatcggcgacagcgatatccacggcacgctgacctacaccaccggtaaaccgcgcccgaaactggagggggacgttgaatcccgccagctgcgtctggccgatcttggtccgctgattggcgtagattcgggcaaaggcacgaagtctaaagaggttaaaaaggacgttcagcctgcgggtaaagtgctgccctatgaccgcttcgaaaccgacaaatgggacgtgatggatgcggatgtacgcttcaaaggacgtaaaattgagcatggcagcacgctgccgctgagcaacctctcgacccatatcatcctgaaaaacgccgacctgcgcctgcaaccgctgaagtttggcatggccgggggaaccatctcatcgaatatccacctggagggggataaaaagccaatgcagggaagggcggagatccaggcgcgtcggctgaagctgaaagagctgatgccggacgtggagctgatgcagaaaaccctcggtgagatgaacggcgacgcggatattcgcggcacgggtaactcggtagcggcgctgctgggtagcggaaacggcaacctgaagctgctgatgaacgacgggctggtgagccgtaacctgatggagatcctggggctgaacgtcgggaactttatcatcgggcaaatcttcggtgacgacgaagtacgcgttaactgcgcggcggcaaatctggatctggtcaacggcgtggcgcgtccgcagatcttcgctttcgacacggaaaacgcggttatcaacgtcaccggtaccgccagcatggcgtccgagcagctggatttaaccatcgatccggaaagtaaaggtattcgtatcatcaccctgcgctcgccgctgtacgttcgcgggaccttcaaagatccgcaggcgggcgtgaaggccgggccgttgattgcgcgtggtgcggtcgccgccgcgctcgctacgctggtcactcctgcggcggcgctgctggcgttgatttcgccgtcggaaggcgaagcgaatcagtgtcggacgattttgtcgcagatgaagaagtag

SEQ ID NO: 117718 - DNA, 1323 bp, Enterobacter cloacae
atgcaagcaacagccaccacacttaacgaaggggcggaacacgttccggtcaactcgcgcaataaagtcgtcgtcgcatcgctgattggcaccgccattgagttcttcgacttttatatttacgccaccgctgcggtcattgtctttccgcatattttcttccctcagggcgacccgacggcagccacgctacagtctttagccacctttgctatcgccttcgttgcgcgtccgattggttcagcggtctttgggcattttggcgatcgcgtcggccgtaaagtgacgctggttgcctcgctgctgacgatggggatctccaccgtcgccatcggcctgctgccgacctatgaaactatcggcattctggcgcctgtgctgctggcgctggcgcgctttgggcagggtctggggctgggcggggaatggggcggcgcggcactgctggcgaccgaaaacgccccggcgcgcaaacgagccctgtatggctctttcccgcagctgggcgcaccgattgggttcttctttgctaacggcaccttcctgctcctctcctggctgctgactgatgaacagttcatgaactggggctggcgtattccattcgtcttctccgccgtgctggtgctgattggcctgtacgttcgcgtgtcgctgcacgagacgccggtcttcgctaaagtcgccgcggcgaaaaagcaggttaaagttccgctggggacgctgctgaccaaacacctccgcgtgaccgtgctgggcacgttcatcatgctggcaacctacacgctgttctacatcatgaccgtttactccatgaccttcagtaccgccgccgcgccggtcggcctgggcctgccgcgtaacgaagtgctgtggatgctgatgatggcggtcatcggatttggtgtgatggtgcccatcgcgggcctgctggcggataaatttggccgtcgttcaagcatgatcgtcatcacctcgctgattattctgttcgcgctgtttgtcttcccgccgctgctgggttcaggtagccctgcgctggtgatggcgtatctgctgattggcctgagcctgatggggctgacttttggcccaatgggcgcgctgctgccggagctgttcccgactgaagtgcgttacaccggcgcgtcgttctcctataacgtttcgtcgattctgggcgcctcggtggctccgtatatcgccacatggcttcaggcgaactatggcctattctatgtgggtgtctatctggcggcaatggcagcgctgacgctgattgcgctgctgctgacgcacgagacgaagcatcaggcgctgtaa

SEQ ID NO: 117719 - DNA, 1026 bp, Enterobacter cloacae
gtgacgccggaaaataacccgcaacgaccgactcaacatttagattatgaacccatcaaaaagatggataacgagcctgaagcgccgaaagagcctggaacggccagcaaagcgctgggcaccgtgaccggcatagccgaaaaaattcagcagatacccgcgattgctcacctgatacgcgccgctgagcgctttaacgaccgcatgggaaatcagtttggcgcgacgattacctatttctcgttcctgtcgatgatccccatcctgatggtgtcatttgccgccgccggttttgtgctggcgtctcacccgacgctgttgcaggacatcttcaataagatcctgaccaacgtcagcgaccagacgctcgccgcaacgctcaaaagcaccatcaacaccgccgtgcagcagcgtaccaccgtgggtatcgtcgggttgctgattgcgctctattccggggtgaactggatgggcaacctgcgtgaggctattcgcgcccagtcgcgtgacgtctgggagcgtagaccgcaggatcaggagaagatatgggtgaagtatctgcgcgactttatttctctgattgggctgctggtggcgctggtcattacgctctccatcacctcggtcgccggttccgcgcagcagatgattatctccgcgctgtacctggattacattgaatggctgaaaccggcctggcgcggcattgggctggccatctccatctttgctaactaccttctgttcttctggatcttctggcgtttgccccgccatcgtccgcgcaagaaggcgctgatgcgcgggacattgattgccgccattggttttgaggtgatcaagattgtgatgacctatacgctgccgtccctggtgaagtctccctccggcgcggcctttggttcggtgctggggctgatggctttcttctatttcttcgctcgcctgacgctgttctgcgccgcgtggatcgccacggcagagtataaagatgacccgcgcatgccgggtaaaacccaccgctga

SEQ ID NO: 117720 - DNA, 882 bp, Enterobacter cloacae
atgcagcttttccttcgggtcgcggaactggaaagtttttcccgcgcggcggagacgttaagcctgccgaaggggagcgtatcgcgacagatccaggcactggaaaacgcactcggcacgcagctgctgcaccgtactacccgccgcgtcagcctgacgcaggacggcatggtttattacgagcgtgctaaagatctgctgatgaatctggacgaactggacggcatgttcctgcacgacccttcaaccatcagcggtcggctacgtgtggatatgcccgttgccattgcgcgaaatgtagtcattccgaaactgcctgcatttttacaacagtttcccggcattgagctggagctgagtagcagcgatcgtctggtcgatgtcatccgcgaaggatttgactgtgtggttcgcgtgggaaacttaaaggactccgggcttatcgcccgcccgcttgggaaactctcggtgattaactgcgccagcccggattatctgacgcgattcggctaccctgagacgctggacgatttggcttcgcatgccctcattcactactccgccacgctgggcacgcgtccgcagggttttgagtattacaacggcagcgcgacccagtgggtgaaaacgggaggcgtattgacggttaacagcacggaaacctaccaggccgcctgtatcgccgggcttgggattattcaggttccgcgcgtcggggtgcgtgatgccctgcgcacgaaaaaactcgttgagatcctgccgcaataccgggctgaaccgatgcccgtctccctcatttatccccaccgccgtaacctctcccgccgggtgcatgtgtttatggagtggcttaccgaactcacaaaaggttacgtcgactag

SEQ ID NO: 117721 - DNA, 759 bp, Enterobacter cloacae
atgagtgaacgtattgctttagtgacgggcggtagccgcggcttggggaaaaatgccgttttgaagctggccgcggaagggacaggcatcatcctgacctggaacaacagccagcaggaggcgcaggaagttgtgcgcgaaatcgagggaacaggtggaaaagcggcagcattgcagcttaacgtcggcgatacggcaagcttttcgcgctttgctcagcaggtgaaggataccctcaaacacgtctggcaacgtgacacctttgactatttagtgaacaacgcaggcacgggcttgtacgcaccctataccgagacgacggaagcgcaatttgatgatgcgctgaacattcacttcaaagggccgtttttcctcacgcaacagctgctgccgctcataaaagacggagggcggatcctgaacgtctccagcggactggcccgttttactcagcccggttcaggcacctacgcggcaatgaaaggggcgatggaagtgctgacccgctatcaggcaaaagagcttggtgcgcgcggaatttccgtcaatatcatcgcgcccggcgcgattgaaaccgactttgggggcggacgcgtgcgggataatgcggagcttaaccagctgctggcctcgcagacagcgctgggacgcgtgggcctgcccgatgatattggtgacgccattgcggcgttgctcagtgacaaactgggctggatgaatgcgcaacgtattgaagtttcaggcggtatgttcctgtaa

SEQ ID NO: 117722 - DNA, 603 bp, Enterobacter cloacae
atgcgagtaatcatgtttgacaggcagtcattatttattcatggagcgatgtacagtttgcagaagttaattccgaaaatagagatgacaggggctcgtcagactgatgaattatgggcgcaattatccgcgtcaccctccgctatcgtcatgatagatgggtatttaattcgtgataatggtgtggctttactggaagagattatggatcgttttccagcgtcgcgcgtggtgttggtgttaacgaaaaaagagcgacgttgggttgagcaaatgtttcagcgcaacgtggtggcgataattccccgcaatgcgaatcccgaacgcttttccgcagtgctggattccgtatcgcgagggatggtctgttttcccggcgagtggctgaagcagcactcctctcaggatgaactgtcagtgttaagcgagcgccagcgtgaggtattgaagttactggcggccggagagtccaataaagagattggtcgtaatctcaacatcagtgcggcaacggtaaaagcccatctggagacgcttttccggcgtcttgatgtcaaaaaccggacgcaggccgcgatgtactacacccgggcgacggcctga

SEQ ID NO: 117723 - DNA, 339 bp, Enterobacter cloacae
atgacgggttatgcaatgcagatatcttctgctgcaatcgcattaattaaaaaacaacagggtctttccctggagaaataccgtgacgaaaagggtatatgggttattggttatggtcacgtgattcgccagtgggaaaaatttaacagtctcatcacgccgattgaggcggagaatttgctttttaatgatattcaattatgtgaggcgctgctgcgggaaatgaacaaacgcccattaacccaacagcagcatgacgccctgatattaaccctcttcagttttggggaagagtcccctctgcctgagaagatccttcaggccgtcgcccgggtgtag

SEQ ID NO: 117724 - DNA, 534 bp, Enterobacter cloacae
atgcccgccttaaccaccgcgcgtctcacctgctcgccgctgcaagagcaagactggcccttttttctgtcgctacagcaaaatcctgaggtgatgcgttttgtcgcccctgcgcgtagcgaggcggacattcgggaagcctttgagtctcgtctgttgccgtggacgccgggcagctcgcactggctctgccttgtggtgcgtgagacggccagccagacgccgctgggcgtaaccggctatgtgcaccgggaagcagattgtgctgaagtcggttttctctttgcgccctctgcgcaggggaaaggttacggctttgaatctctgcgggctgtgtgtgatttcgcgctgactcagggtaatatccgtcggctcaccgccaccgtgacggcgggaaatatcgcctcaaggcgactgctggaaaaaacaggttttcaactggaaggtgagttgcgtgagagttatttcctttcagggcaatggcataacgactggctattcggtttactgaaaaaggaattcccgttcagttaa

SEQ ID NO: 117725 - DNA, 1587 bp, Enterobacter cloacae
atgatgattagctcatcgcatcatacccgcgaacagtttgaacactgtctggcagcgatccgtcaggcgtctgttgaaattttacttctgttgaatgtacatgtttctgaaggaaaagatccacgctggtttctggagcaactggatagcgcccgcctggggctgggcgggtggggcgccgtagccaggaagctgaatctgaatgatgcggaaatgacggcctttacgctgcaattacgcttgcttcagcagcgtgttccccagtatgaaagcgggcaggatgtcagcgaaaatcagctgattgcggcgatgcgcttcgtcacctcccttgaatatctgcgtctgcaacagcccctcctgacctacgaaaccgggagggtgccagagaaggagagccagcttcaggcgcagaaacaggtgcgtgccattgagctgatgattaaagggctgatacagcaggcgtggcccgatccggtgcggctgaataatcatcttaagaccttgtttaacgctgaacgcgtgcgtcgctggctgaaaaacggtgagattaatgatgttctgagcggcatgttgttcagcgaactggcccagctgctggtggataaaaaagaatttagccgctactacgcgccgctgtttaacgctccggacatgctgacgctgctggtagagccccgcaaaaccctgcaaaccttcctcgaagatattcgacaaatccgcaacagcatcaccgtgcagcagccgttaagcggggcgcaaatccagctgctcgactgctattacacgcagatcacccgctccgttcagcgcgcgtttgaggaagggcggacacgcgttaacccggcggcgctgatggcggtggacgaaagcgagctgcacgcgttctgggaaaaggcgcaaaaaatggaccgcaccacaggcggcgatctttttgaagtgcgcgacagtatagaaaaaccgactcagcgcgccgcgcgtacgccagagcagcgcgaacagctgatttccggcgtgctgtggggagcggttggcgtgatggttatcgcgattgtcgtggggggattctggctggtgaccagcagtaaaccgcagccggctgtggccagtacggcatctcccgcgcaggtgcaggagatgcgcgaaacgccttcctcacgcgagacgttaacccgcatgggtgttacctgggatgagaataatttccgctcggccatcaatcgcaatgacacccgcgtggcgctcctgtttttgcagggcgggatggactggaaaatgtcatggacggaggaggcgttgtcggcaggctacgacgatgtactggaagtaatgttgcgctaccgcctgcaaatgacagagcaaaagccctgccgacgctttattaatacgcttagccatgcgatggcgaacggcgaatcgctgacgcctatgcgtaagcagtacctggaagcattctgtaccgttcccgcggtggtgaaacgccagcagcacgacgccgatatggcaacgcgccgcgcgaagacgcagcccgatgccagcacaaaaaaatggcagtccatccagactgccatttatgaggtgatccgctga

SEQ ID NO: 117726 - DNA, 1650 bp, Enterobacter cloacae
atgttcaaccagaaactacagactgccgaggatatcgagttcgagattgcagaagagctgcgctacgaaaccgatccctgtgagttaaaactggatgagatgatcgaggcagagccggaaccggaaatgattgaagggctgccggcgtccgatgcccttacgcccgcagaccgctaccttgaactgtttgaacacgtccagtcgtcgcggctgtttgcggacagcaaaacctttcccgactgcgcgccgaagatggatccgctggatattttgatccgctatcgcaaggtgcgtcgtcaccgtgattttgacctggcgcgctttgtggagaatcacttctggctgccggaggactacagcaaagagtacgtctctgaccccggcctgtccctgaaagaacatattgataatctgtggccggtgctgacgcgtgagccgcaggatcacatcccgtggtcgtcgctgctggcgctgccgcaggcctatattgtgcccggcgggcgattcagtgagacctactactgggactcttacttctccatgctggggcttgctgaaagcggtcgtaacgatctgctgaaatgtatggccgataacttcgcctggctgatagagcgctacggccatatcccgaacggcaaccgtacctactatctcagccgctcccagccgcccgtttttgccctgatggtggagctgtttgaagaggacggcgtgcgcggggcgaagcgctatcttgagcatcttaagatggagtacgccttctggatggacggggcggaatcgctgctgctcaatcaggcctatcgcagtgcggttcgcatgccggatggctcattgctcaaccgctactgggacgatcgcgacacgccgcgagatgaatcgtggattgaggacgtggaaaccgcccgtcattccggtcgtccgccgaacgaggtgtatcgcgacctgcgcgccggggcagcctcaggatgggattactcatcccgctggctgcgcgatcctgcgcggctggccagcatccgcacgacacaatttatccccattgatttgaacgcattcctgttcaaactggagagcgctatcgccaatatctccgcgtcgaaaggggataaagagacggctgatctgttccgccagaaagccagcgaccggcgcgcggcggtgaaccgctatctgtgggacgaagagaacggctgttatcgtgattacgactggcggcgtgaagccctggcgctgttctctgcggccagcattgtgccgctgtatgtgggcatggcgacgcatgagcaggctgaacggctgtccgatgccgttaaagcccgtctgctcacgccgggcggtattctcgccaccgaatatgaaaccggggagcagtgggataagccgaacggctgggcgccgctccagtggatggcgatccaggggttcaagcagtacggcaacgactcgctgggagatgagatcgcctggagctggctgcacacggtgaaccattactacaaaacccattataagctgattgagaagtaccacatcgccagcagcacgccacgcgaaggtggcgggggtgagtatccgttgcaggatggcttcggctggacgaatggcgtggtgcggcggttgattgggctgtatggggagccctga

SEQ ID NO: 117727 - DNA, 282 bp, Enterobacter cloacae
atgcacgtaaagatcaccgcaaaactgatggccaaaatgcaccttgtactcgcgctggtatgggcgatactgactattcctaccctgctgtggtggaaaaacagcattctgtgggtgtcgttaatgagcatttacgccatcgtgatttcccatctggctgcgtacagcgccgcccatgcggaaaaagcggccagcaaagcgatggataaaagcgaaggcgccagccagaaagccaatcaaaccgccaacagccttcagggcgatgcgcgtcaggcacattaa

SEQ ID NO: 117728 - DNA, 1353 bp, Enterobacter cloacae
atgactaagcattatgactacatcgcaatcggcggcggcagcggcggcatcgcctccatcaaccgtgcagccatgtacggccagaagtgtgcgctgattgaagccaaagaactcggcggcacctgcgtgaacgtgggttgtgtaccgaagaaagtgatgtggcatgccgcgcaaatccgtgaagctatccatatgtatggcccggactacggctttgacaccaccatcaaccacttcgactgggataaactgatcgccagccgtaccgcctacatcgaccgtattcacacctcgtacgataacgtactgggcaagaataacgtcgacgtgatccgcggcttcgcccgtttcgtggatgcgaagacgatcgaagtgaacggcgagacgatcaccgccgatcacatcctgatcgccaccggtggccgtccgagccacccgaacattccgggcgcggaatacggtatcgactccgacggtttcttcgagctgcctgctctgccagaacgcgttgccattgtgggcgcaggttacattgcggttgagctggccggcgtgattaacggcctgggagcggaagcgcacctgttcgtgcgtaaacacgcgccgctgcgcagctttgacccgctgatcgtcgacacgctggtcgaggtgatgaacgccgaaggcccaaccctgcacaccaacgccgtgccaaaagcggtggtgaaaaatgcggacggtagcctgactctggagctggaagatggtcgcagccagaccgttgattgcctgatctgggcgattggtcgtgaaccggccaccgacaacttcaatctggccgcaaccgggatgaaaaccaatgaaaaaggctacattgtcgttgataaattccagaacaccagcgtaccgggcatttatgccgtcggtgataacaccggcgccgtagagctgacgccggttgccgtggcggcggggcgtcgtctttccgagcgtctgtttaataacaagccggacgaacatctggactacagcaacatcccgaccgtggtcttcagccacccgccaatcggtaccgtcggcttaaccgagccgcaggcgcgtgagcagtacggcgatgaccaggtgaaagtgtataaatcggcgtttaccgcgatgtataccgcggtcacctcgcaccgtcagccatgccgcatgaagctggtctgcgtgggcccggaggagaagatcgtcggcatccacggcattggtttcggcatggacgagatcctgcaaggcttcgcagtggcactgaagatgggcgcaacgaagaaagacttcgataacaccgtggcgatccacccgactgcggcggaagagtttgtgactatgcgctga

SEQ ID NO: 117729 - DNA, 843 bp, Enterobacter cloacae
atgctcagttatcgccacagcttccacgcaggcaaccacgccgacgtcctcaaacataccgttcagagcctgatcatcgaatcgcttaaagaaaaggataaaccgttcctttatctggacacccacgcgggcgcgggccgttatcagctgagcggcgagcatgccgagcgtactggtgaatatctggaagggattgcgcgtatctggcagcaggacgatctgcctgccgagctggagccgtacattggcgtggtgaatcacttcaaccgcaacggccagctgcgttactacccgggttcaccactgattgcccgccagctgctgcgcgagcaggacagccttcagctgacagagctgcacccgagcgacttcccgctgctgcgttctgagtttcagaaagataaccgcgcccgcgtggacaaagccgatggctaccagcagctgaaagccaaactgccgccggtttcccgtcgcggcctggtgctgatcgacccgccgtacgaaatcaaaaccgactatcaggcggtggtgaccggcattaacgaaggttacaaacgctttgcgaccggcacctatgccctgtggtatccggtagtgctgcgcgcgcaaattaaacgcatgatcaaagacctcgaagcgaccggcattcgtaaaatcctgcaaattgagctggcggtgcgccctgacagcgaccagcgcggcatgaccgcgtccggcatgatcgtcattaacccgccgtggaagctcgaagcacagatgaacaacgtgctgccgtggctgcacaaaacgctggtgccagccggtacgggtcacgccaccgtgagctggatcgtgccggagtaa

SEQ ID NO: 117730 - DNA, 2043 bp, Enterobacter cloacae
atgaccaatccattactgacgcctttttcgttgccaccgttttctaaaatcctccctgagcatgtggttccggccgttacccagtcgctgaacaactgccgtgcggcggtagaaaacgtggtcgcgcagggcgtgccgtacacctgggaaaatctgtgtcagccgctggccgaagtggacgacgtgctggggcgtatcttctccccggtgagtcacctgaactcggtgaaaaacagcccggagctgcgtgaggcctacgaacagaccctgccgctgctctctgagtacagcacctgggtcggtcagcatgaggggctctacaaagcctaccgcgacctgcgcgacggcgaccactatgccgaactgaacacggcgcagaaaaaatcggtcgataacgccctgcgtgatttcgaactgtccgggattggcctgccaaaagaaaaacaggttcgctacggcgaaatcgccgcgcgcctgtccgagctgggcaaccagtacagcaacaacgtcctcgacgccaccatgggctggacgaagctgattaccgatgaatctgaactggcgggtatgccggaaagcgcgctggcggcggcaaaagcccaggccgaagcgaaagagcaggaaggcttcctgttaacgctggatatcccaagctatctgccggtgatgacctactgcgacaaccaggccctgcgcgaagagatgtaccgcgcctacagcacccgcgcctccgatcaggggccgaatgccggtaagtgggataacagcccggtgatggcggagatcctcgccctgcgccacgagctggcacagctgctgggcttcgacagctatgccgataaatcccttgccaccaaaatggccgagaacccacagcaggtgctcgacttcctgaccgatctggcgaaacgcgcccgtcctcagggtgaaaaagaactggctcagctgcgcgcctttgcgaaagcggagttcggcgtggacgagcttcagccgtgggatatcgcgtactacagcgaaaaacagaaacagcatctctacagcatcagcgacgaacagctgcgtccgtacttcccggaaaacaaagccgttaacggcctgttcgaggtggtgaaacgcatctacggcattaccgcgaaagagcgtaccgacatcgacgtctggcatccggacgtgcgcttcttcgagctttatgacgagaaaaacgagctgcgcggcagcttctatctggatctttacgcgcgtgaaaacaaacgtggcggggcgtggatggacgactgcgtgggccagatgcgtaaagcggatggttccctgcaaaaaccggtcgcctacctgacctgtaacttcaaccgcccggtgagcggcaaacctgcgctgtttacccacgatgaagtgatcaccctgttccacgagttcggtcacggcctgcaccacatgctgacccgcatcgaaaccgctggcgtcgccggtatcagcggtgtgccatgggatgcggtcgagctgccaagccagtttatggaaaactggtgctgggagccggacgcgctggcatttatctccggccattacgaaacgggcgaaccgctgccgaaagaactgctggataaaatgctggcggcgaaaaactaccaggcggcgatgttcatcctgcgtcagctggagttcggcctgttcgacttccgcctgcacgccgagttcagcccggagcagggggcgaaaatcctcgaaaccctggctgagattaaaaagcaggtcgcggttattccaggcccgacctggggacgcttcccgcacgcgttcagccatatcttcgcaggcgggtacgccgcaggctactacagctacctgtgggccgacgtgctggcggcagatgccttctcgcgcttcgaagaagaggggattttcaaccgcgaaaccggtcagtcgttccttgataacatcctgacgcgcggcggttcagaagagcctatggagctgttcaaacgcttccgtggccgcgagccgcagctggatgcgatgctggagcattacggaatcaaaggctga

SEQ ID NO: 117731 - DNA, 795 bp, Enterobacter cloacae
atgcgatgctggagcattacggaatcaaaggctgattgctacgtgaagatctgcttagtagatgaaacaggcgccggggacggcgccttatctgttctggcggcccgctgggggctggaacatgatgaagacaacctgatggcgctggtgatgacgccggaacatctggagctgcgcaagctcgatgagccaaagcttggcgggatttttgtcgattttgtcggcggcgcgatggcgcaccggcgtaagtttggcggcggtcgcggtgaagcggtggccaaagcggtcggcattaaaggcagctatctgccggacgtggtggatgccacggcggggctggggcgcgatgcctttgtgctggcgtctgtcggctgtcgggtgcggatgctggagcgtaatccagttgtcgccgcgctgctcgacgacgggctgacgcggggctacgcggacccggaaatcggcccgtggttacaggaacgtttgcaacttattcatgcctccagcctgacggcgctgaccgatatcaccccgcgcccgcaggtggtctatctcgaccccatgttcccgcataagcagaaaagcgcgctggtgaagaaagagatgcgggtgtttcagtctctggtggggccagatttagatgccgatggcctgctggagccggctcgtcagctggcgacgaagcgggtggtggtgaagcggccggactatgcgccgccgctggcggacgttgcgaccactaacgcggtgaccaccaaaggacaccgatttgatatttattcgggaacgccagaataa

SEQ ID NO: 117732 - DNA, 438 bp, Enterobacter cloacae
atggcttacaaacacattctcatcgcggtagacctctccccggagagtaaagtgctggttgataaagcagtatccatggcacgtccctacaacgcgaaagtttcgctgattcacgttgatgtgaattactccgacctctacaccggtctgatcgacgtgaatctcggcgatatgcagaaacgcatctccgaagagactcaccacgcgctgagtgagctttctaccaacgcgggctatccaatcactgaaaccttaagcggtagcggcgatctgggccaggtgctggttgatgcgattaagaaatacgatatggacctggtggtatgcggtcatcaccaggacttctggagcaagctgatgtcttccgcgcgccagctgattaacaccgtacacgtggatatgctgattgttccactgcgtgacgaagaagacgagtaa

SEQ ID NO: 117733 - DNA, 336 bp, Enterobacter cloacae
atgattagcaccgtcgcattgttttgggcgttatgcgtggtttgcatagtgaatatggcgcgctacttctcatcgttacgtgcgctgttagtggtacttcgtggttgcgatccgttgctttatcagtatgtggacggtggagggttcttcacctcgcacggacagcccagcaagcagatgcgtctggtggggtatatctactaccaacgctaccgcgatcaccacgatgaagagtttatccgtcgctgcgagcgcctgcgtcgtcagttcattttgaccagcgccctgtgtggtctggttgtggtgagtatgattgcgctgatgatttggcactga

SEQ ID NO: 117734 - DNA, 1500 bp, Enterobacter cloacae
atgctacatttgtttgccggcctggatttacataccgggcttttattattgcttgctctggtttttgtgctgttttacgaagcgatcaacggcttccacgacactgcaaacgcagtagcaacggttatctacactcgcgcaatgcgatcgcagcttgcggtcgtgatggcggcggtatttaacttttttggtgtcctcctgggcggactgagcgttgcgtatgccattgtgcatatgctgccaacggatctgctgcttaacgtgagttccggtcatggcctggccatggtgttctcaatgctgcttgctgcgattatctggaacctcggtacctggtatttcggcctgccggcatccagctctcacaccctcatcggcgcgattatcggtatcgggttaaccaatgccctgatgaccgggacctccgtcgttgatgcgctgaatatcccgaaagttctcggtattttcggctctctgatcatctcccctatcgtcggtctggtggtggcgggtggcttgattttcatcctgcgtcgctactggagcaacacgaaaaaacgtgcgcgtatccatctgacgccagcagagcgtgagaagaaagacggcaagaaaaagccgccgttctggacgcgtatcgcgctgatcatttccgctattggcgtcgccttctctcatggcgcgaacgatggtcagaaaggtatcggcctggtgatgctggttctaattggcgtcgcaccggcgggcttcgtggttaacatgaacgcctccggttacgaaatcacccgtacccgtgatgcggtaaacaacgttgagacttacttccagcagcatcctgatttgctgaagaaagcgaccggcgtggaccagctgattccttctccggagtcaggcgcaacgacggcaccgggcgagttccattgccatccggcaaacgcgattaacgcgctggaacgtgcgaaaggtatgctggccgatatcgaaagctatgacaaactggctgttgaacagcgtggtcaactgcgtcgcatcatgctctgtatctccgacgtgacggataaagtcgcgaagctgccagaggttaatgctgacgaccaacgtctgctgaagaaactgaaaggcgatatgctcaacaccattgagtacgcgccaatctggatcatcatggcggtcgcgctggcgctgggtatcggtacgatgattggctggcgtcgtgtggcgaccaccatcggtgagaagatcggtaagaaaggcatgacctatgcgcagggtatgtccgcgcagatgacggcagcggtatctatcggtctggcgagctacaccggtatgccagtctccaccacccacgtactctcttcgtccgtggcaggtaccatgattgttgacggcggcggtttgcagcgtaaaaccgtgaccaacattctgatggcctgggtgttcaccctcccggcgtccatcctgctgtctggcggtctgtactggatttcgctgaagctgatttaa

SEQ ID NO: 117735 - DNA, 1203 bp, Enterobacter cloacae
gtggaaaggtttgatgccgtagtaattggcgccggtgcggcgggtatgttttgtgcggcgatggccggacaagcgggtcgtcgcgtgctgctgctggataacggaaaaaagcctggccgcaagatcctgatgtctggcggcgggcgatgcaactttactaatctttatgtcgagcctgcggcctatttgagccagaaccgtcatttttgcaaatctgcgctggcgcgctacacccagtgggattttatcgagctggtgggtaaacacggtatcgcgtggcatgagaagacgctgggacagctgttctgcgacgactccgcgcagcaaattgtcgatatgctggtggccgagtgcgaaaaaggcggcgtagttatgcgcctgcgcaccgaagtgctggacgtcgcccgtgacgagcagggctacacgctgcaactcaacggtgaaaccgtcagcgccgataacctggtgatcgccagcggcggcctctcgatgccggggctgggcgcttcaccgttcggctataaaattgccgagcagtttggcctgaaggtactgcccacccgcgccgggctggtaccgttcacgctgcataagccgctgctggaacagcttcagacgctctccggcgtgtctgtgccgtcggtcattacggccgaagacggcacggtgttccgcgaaaatctgctctttacccatcgcggactctcgggcccggcggtattgcagatctccagctactggcagccgggggagtttgtctccgtaaacctggtgccggactgcgatctggacgccttccttaacgagcaacgcgctgcgcacccgaatcaaagcctgaaaaataccctggcgatgcagctgccgaagcgtctcgtggagtgcttgcaggtgttagggcaaattccggatgtcgcgctcaagcagctcaacagccgcgagcaggaaacgctggtggagacgctgacgaactggcgcgtacagccaaacggcaccgaaggttaccgcacggcggaagtgacgctgggcggcgtggatacaaacgaactctcatcccgcacgatggaagcccgcaacgtgccgggtctttatttcattggtgaagtgatggacgtgaccggctggctcggcgggtataacttccagtgggcgtgggccagtgcctgggcatgcgcgcaggcactcgctgatgtccgaggacaataa

SEQ ID NO: 117736 - DNA, 843 bp, Enterobacter cloacae; identical to SEQ ID NO: 11328

SEQ ID NO: 117737 - DNA, 2124 bp, Enterobacter cloacae; identical to SEQ ID NO: 11329

SEQ ID NO: 117738 - DNA, 1449 bp, Enterobacter cloacae
atgaatcttatacggcgcgtttcagcgatatataaagaacaggagttacctgagtatcgtggcaatcccttaattgaagcacttcctgaagcgcttacggaagatgaagtacttctggaaatgagttatttccccgaaattgacgaaaaaatccgctggactgccccggcgaatgttagagagcagtatgtcgaacgtataaagaaattccgttgccctcaaaccaatcttatccaggcttataagatgatcttacgggcacttagggaaagctatgcagctcgtaatcctttaaaaagcggaacaattcaatatcttcattactatggaaatgagcgtcctgatattgagccagaaagtggatattttaaatcccaggctgaaactattacgatagttggaatgagtggttctggaaaaactaccatgattgagcaagtcatggatcatttccctcagattatagaacacagcagctataaaggagtttttcccggcttcagtaagcaaattgtatgggtaaagattaattgtccatacaattcaagtgtgagagacctttgtgaagagattttacaaaaattagaagatgcaattggtattgaacgaactacacctgagattagaaatggtgctctggctcgccagattgcacaaagaattaaatcatcatttttgggtatccttgttattgatgaaatgcagaggcttaaattttcaagaaccgggggtgagagtaagttgattgattttttacatgaaattgtagattccatgggggtatctatggttttttgtggaaatcatccttttgacgagacgctgacaaagaaaatgagaattgccaggcgggcagagtctggtggttacatgaaaattaagaatgttagatacgattcacaagactggcaatcgtttattcattatttatggccattacaatggacaaatgttgaaactccattaaatgatgagttaaacgaaaaattattcattttatctaaaggcaatattggattggctcagatgatttatcggggggcacaattaaaggttatcggtagcggcaatgaaatcatcactggcgcagtcttgtcggcctctgtaccggtactcgtgagtcatacggaggaatataaggatactccactcccgggggccgcgactgaagatgaggaagctaaatggctctctgcatctaatgagggtgatgcttcggctaaaatcatggcagagaagtccctaaagtctttgatccctggggatatagacaggccacagcacaaggaattcgtaggaaaaatagacgaggttttgcgcaatttcgacgagaaaatactgtctcttgaccacgatcttgttatcaacagaacagctgaaaagaaaaatacctacgatgctcttcagcgttgcgggcttataaatatagatccacttaataaattgtaa

SEQ ID NO: 117739 - DNA, 1557 bp, Enterobacter cloacae
atgagaatgttgcctgttttgcctgatgaatccttgttcagccggttttgtcggacaactaccgtgtacggtatgtccccatcttctctgttaacgatcattttcaacaaacctgatatgaacgtccatccaattctcaattcaggattaaaggctatttctcttcatacatccgaaagggcagatcagctctggcatgaacagactttactccctctttttgcctgggcactaccaatcagtcgtaatgaaattatggatttcaacacgacccctgccaggcttaatcgattgtgccgccttagtaatttttcactagggcagcgcacactattgaagttttgcccggtttgcgctcgtgaagatacttttcattatggtgttacttattggcatctggcgcatcagcttcatggggttacaacctgccatcggcatccggtagcgcttgaaagcatccatgtcccttcttcaccgcacatacgtattggactgatgcctcctgtttcgtatacagaacaacttagcaatgagatagacttcgattttgctaagttttgttatgagtccctaaatataatcagaagaaaagatattacacaccccaattacatggatgtacttaaaaagttgaatttattatcattggatggaaatttaaagaaaaatgtattctacgcacatgtttatgctaagtgccagttatttggggagggttcatcgggacttataccaacatccctaactgattatcattactgggagcctatactcaaagacaaatgttgtcagcatcccacaaagcatcttttgctttgttattgtttgttaaatacttgctggccaacgtatgcaggaagtcgtactaataaaaagaaagaaatctttaaaagtcataagaaatacagttttcatatagttgaaaataatactagtgttagcaaccttgggaaggaatttagtcgcagcagatgttacattaaaacacttatttataaaaaatacctgagggcgtttaagcgaaacacaaaaattaatatattcactgaattgcttatcaagtctatggctgtaagggggtttagtctggcatccatagctgagaaaaactcattatcggaaggagctgtatcctctgtaatttcatcttgttacggtttatgctcatggcgtaaaaaatgtaaaaaagattctttaagacggcgtcataagcagaaaatattaagatttatacataatcaatccgtttctataacacgaaagttagtcaaagaaagttgttatgcaagtttctattggctaaataaacatgaatgtgactggcttaattcctgtcttcctaaaacaatacgatgctataaaaataaaagagtagactggagcgagagagatattatctcatcatcattaataaatgatgttttatctcaggggcagtactcgatgtcacttacaagtctagatgctttactgggagggcatggctggcttttgaaatacagagataaactaccaatgacaatgatacttctcagaaaaatggaactaattaaataa

SEQ ID NO: 117740 - DNA, 927 bp, Enterobacter cloacae; identical to SEQ ID NO: 11456

SEQ ID NO: 117741 - DNA, 1827 bp, Enterobacter cloacae; identical to SEQ ID NO: 11454

SEQ ID NO: 117742 - DNA, 351 bp, Enterobacter cloacae; identical to SEQ ID NO: 11453

SEQ ID NO: 117743 - DNA, 432 bp, Enterobacter cloacae
atgaaaaatatcgtattagcatccttgctgggctttggcttaatttcttcggcctgggccactgaaaccgtgaatatccatgagcgggtcaacaatgcacaggcacctgctcaccagatgcagtctgctgcggctcctgtcgggatccaggggactgcacctcgtatggccggtatggaccagcatgaacaggccattattgctcatgaaaccatgacgaacgggtcggcggatgcgcaccagaaaatggtggaaagtcatcagaggatgatgggaagtcagaccgtttcccctaccgggccgtcgaagtcattagcggcaatgaatgagcatgaaagagctgcagttgcccatgaatttatgaataacggtcagtctggcccacatcaggccatggccgaagcgcatcgtcgcatgctcagtgcaggctga

SEQ ID NO: 117744 - DNA, 1482 bp, Enterobacter cloacae
atgcatagcaaaccttccagacgccctttctcactcgctctgcggctgaccttttttatcagcctgtccacgatactggcttttatcgcattcacctggtttatgctgcattctgttgaaaatcattttgccgagcaggatgtcagcgatcttcaacaaatcagcaccacactgaaccgtatactgcagtccccggtggatccggatgataaaaaaataagcaaaataaaggaatcaattgccagctaccgcaacgttgcccttttgctcctcaatcccaggggggaagtgctctttagctcagctcagggggcggcactacgcccggcagtgaattcagcagattttagcgagcacagccgcgcacgggatgtctttctctggacggtggaggatcctgcgggaccgatggataccgggtccgaaatgaagatggaaacatacaggattatcgcctcctctggtcaggcgatatttcagggcaaacagcagaactatgtcatgctgactggcctatccattaatttccatctccattacctcgatgcgctgaaaaagaacctgattgcgattgccgtcgtgataagcctgttgattgttctgatcattcgaatcgctgtccgtcaggggcacctgccccttcgtaatgtcagcaatgccattaaaaacatcacctccgagaatcttgatgcgcgactggaaccgacacgcgttcccattgagctggagcaactggttatctcgttcaatcatatgattggaaagattgaggatgtctttacccgccaggccaatttctctgccgatatcgcgcatgagatcagaacgcccatcaccaatctggtgacgcagactgaaatcgcactgagtcaggatcgaacacagagggaacttgaggatgtcctctattccagtcttgaagagtataaccggatgaccaaaatggtcagcgatatgctgttcctggcacaggcagataataatcagctgatacctgacagggtcatgtttgacctcagagcggaagtcatgaaagtcttcgagtttttcgaagcctgggccgaagaacgcaatatcacgctcaaatttaacgggatgccctgcctggttgagggagatccacaaatgttcagaagggcgatcaataatctgttatccaatgccctgcgttataccccggagggacaggcaatcaccgtctcaataagagagcaggagagcttttttgaccttgtgattgaaaatccggggaaaccaatccctgaagagcatttatcaaggttgtttgaccgtttttatcgggtggatccgtccagacaacgaaaaggagaaggcagcggcatcggccttgcgattgtgaagtcaatcgtggaagcacatcacggaagagtgcaggtggaatcggacgtacactcaacgcgttttatcttatccgtgcccagactggagaaaatgattccggacacccagtgctgggaataa

SEQ ID NO: 117745 - DNA, 681 bp, Enterobacter cloacae
atgaaaatattgatcgtcgaagacgaaattaaaacaggtgaatatctcagcaaagggcttacagaggcagggttcgtagtggatcacgctgataatggtcttaccggatatcatctcgccatgacagccgagtatgatttagtcattctggatatcatgctacctgatgtgaacggctgggatatcatccgcatgctgcgcactgccggaaagggtatgccggtcttactgctgacagccctcggcacgatcgaacatagggtcaaaggactggaactgggtgcggacgattatctggttaaaccctttgcgtttgccgaactgctcgcccgggtgagaacccttctgaggcggggaaacacgatgatcacggaaagccagtttaaggtggctgacctctcgattgatctcgtatccagaaaagtcagtcgcgccggaaaccgcattgtgctcaccagtaaagagttcagcctgctggaattcttcattcgccatcagggagaggttcttccccgctccctgattgcctctcaggtctgggacatgaattttgacagcgacactaatgcgatcgatgtcgcagtaaagcgactccgcgctaaaatagacaacgattacgagacaaagctgatccagacagtccggggcgtgggctacatgctggaggtcccggatgcatag

SEQ ID NO: 117746 - DNA, 1386 bp, Enterobacter cloacae
atgttcaaattaaaattactcagcattagcacgatattcatcctggcaggctgcgtgtcgcttgcgcctgaatatcagcggcccgcagcaccggtaccccagcagttttcactgtcccataacagcctgacgccagcggtaaatggctatcaggatacgggctggcgtaacttttttgtcgatccccaggttacccggttgatcggtgaagctctgactaataaccgtgatttgagaatggctgccctgaaggttgaagaggcccgagcccagttcaacgtcacggatgcagatcgttatccccagctgaatgcctcatccgggataacatacagcggtggtctgaaaggtgacaagccgaccacacaggagtacgacgcgagactggagctcagctatgagctcgattttttcggcaaacttaagaacatgagtgatgctgatcgccagaactactttgccagcgaagaagcccgtcgggccgtacacatcctgctggtatccaacgtttcacaaagctatttcagccagcaactggcgtacgaacaacttcgtattgcgcgggaaacgctgaaaaattatcaacagtcctatgctttcgttgagcagcagctcgtgaccgggagtacgaacgttctggcacttgaacaggcgcgaggacaaatcgaaagtacccgcgccgaaatagccaaacgagaaggcgatctggctcaggcaaacaatgccctgcaactggtgctgggaacgtaccgcgcacttccgtcagaaaaagggatgaaaggcggggagatagccccagtaaaattgccaccaaatctgtcttcacaaattttgctgcagcgaccggatattatggaagcggaatatcagctgaaagcggctgatgccaatattggcgcagcgcgagcggcctttttcccctcaattaccctgaccagtggtctttccgcaagcagtacggagctgtccagcctgtttacgtcaggaagtggaatgtggaattttatccctaaaattgaaattcctatatttaatgctggcaggaataaagccaatctgaagctggctgaaattcgccagcaacagtcggtggttaattacgaacaaaaaattcagtcagcctttaaggatgtttccgacacgcttgcgctgcgcgacagccttagccagcaacttgagtcacagcagcgttatcttgattcacttcagataactctccagcgtgccagaggattgtatgcaagtggtgctgtcagttacatcgaagtgctggatgcagaacgttccctcttcgctacccagcaaaccattctcgatcttacctattcccggcaggttaacgaaattaatctgtttaccgcgctgggtggcggttgggtagagtaa

SEQ ID NO: 117747 - DNA, 354 bp, Enterobacter cloacae
atgcgtaattcacttaaagccgttttatttggtgccttctctgtcatgttttctgccggtcttcatgctgaaacacatcagcatggcgatatgaatactgccagtgatgcttcggtacagcaagttatcaagggcaccggtgtcgttaaagacattgatatgaatactaagaaaatcaccatttcgcatgaagcaattccagcggtgggctggcctgcaatgaccatgcgctttacttttgttaatgcagacgatgctattaatgccctgaaaacaggcaaccatgtcgatttctcgtttattcagcagggcaatatctccttactcaaaagcattaacgtgacgcagtcctga

SEQ ID NO: 117748 - DNA, 1293 bp, Enterobacter cloacae
atggcttctttaaagataaaatatgctgcaataattatcagcagcctcatagcaggggggctgatatcggttactgcctggcagtatgtaaactcagcacaaaagacagaaaaaacagaacaaaaggcaccggaacgaaaggtgcttttctggtatgacccaatgaaaccggataccaaatttgataaacccggaaaatcgccctttatggatatggacctggtgccaaaatatgctgatgacagtggcgataaaagcagtggcgggatccgtatcgacccaacccaggttcagaatctgggattaaaaacgcaaaaagtcacgcgaggaatgctgaattattctcagacaatcccggctaatgtcagctataacgagtatcagtttgttattgtgcaggcgcgttctgacgggtttgtcgaaaaagtctaccccatgacgattggcgatcatgtgaagaaggggacgccacttatcgatattaccattccggactgggtggaagcacagagtgaattccttctgttatccagcaccggtggtacttccacgcaaattaaaggcgttctggaacggcttcgcctggcaggtatgccggaagaggatattcagagactgcgttctacccggagcattcagacccgttttaccattaaagcacctattgatggtgtcattactgcatttgacctgcgcaccggcatgaatatttcgaaagataaggtggtggctcagattcagggaatggacccggtctggatcagcgctgcagtgccagaatctatcgcctatctgctgaaagatacgtcgcagtttgaaatttcggtaccggcttatccggataaaacattccatgtcgaaaaatggaatattcttcccagcgtggatcagacaacccgtacgcttcaggtccgtctccaggtttctaataaggatgagtttctcaagccgggcatgaatgcctatctgaaactgaataccagaagccaggagatgctgctgataccaagccaggccgttatcgataccggcaaagaacagcgcgtgattactgttgatgatgaaggcaagtttgtgccgaaacagatccacgttctgcatgagtcacagcaacagtccggcatcggctccggcctgaatgaaggcgataccgtggtggtcagtggcctgttcctcattgactctgaagccaatattacgggcgcactggaacgtatgcgccaccctgaaaaaacagaaagcagtatgccagcaatgtctgaccagcctgtaaatatgcattcagggcactga

SEQ ID NO: 117749 - DNA, 3147 bp, Enterobacter cloacae
atgattgaatggattatccggcgctctgtcgccaaccgtttcctggtcatgatgggggccctgtttctcagcatctggggcacatggacgattattaacacgcctgtcgatgccttgcctgacctgtcagatgtgcaggtcattatcaaaaccagctatcccggccaggccccgcagattgtagaaaaccaggtcacctatccacttaccaccaccatgctgtccgtgcctggcgcaaaaaccgtgcgtggtttttcacagttcggtgattcgtatgtgtatgtcatttttgaagacggcaccgatctgtactgggcccgttcccgcgtgctggagtacctgaaccaggtacagggaaaactgcccgccggtgtgagttctgaaatcggtccggacgccacgggggtgggctggatatttgaatatgcccttgtcgatcgcagcggaaaacacgacctttcagaactgcgttctctgcaggactggttcctgaaatttgagctgaaaaccatcccgaacgtggctgaggtcgcttcggttggcggcgtggtgaaacagtaccagattcaggtcaatccggtaaaattgtctcagtatggtatcagcctgcccgaagtgaaacaggcccttgaatcgtctaaccaggaggccggtggctcatccgttgaaatggccgaagctgagtatatggtccgtgccagcggttatcttcagagcattgatgattttaataacatcgtcctgaaaacaggcgagaacggcgtgccggtttatctgcgggatgttgcccgcgtgcagaccgggcctgaaatgcggcgtggtattgccgagctgaacggccagggcgaagtcgctggcggcgtggtgatcctgcggtcgggtaaaaatgcacgcgacgttatcacggcagtgagggataaacttgagacgctgaaggccagcctgccggaaggcgttgaaatcgtgaccacctacgatcgcagccagctcatcgaccgggcgattgataacctcagttccaaacttctggaagagtttatcgtggtggccatcgtctgtgccctgttcctgtggcacgtacgttctgccctggtggcgattatctctctgccgcttggtctgtgtatcgcctttatcgtcatgcacttccagggactgaacgccaatatcatgtcgctgggagggatagcgattgccgtcggtgcgatggtggatgccgccattgtgatgattgagaatgcgcataagcggcttgaggagtgggatcatcagcatccgggtgagcagattgacaacgccacccgctggaaggtgattaccgatgcctccgttgaagtgggacccgcactgtttatcagcctgctgatcatcaccctgtcctttattcctatctttaccctggaaggtcaggaaggacgtctgtttggcccgctggcattcacgaaaacgtactccatggcgggcgcggccgcgctggccatcatcgtcattccgattctgatgggattctggatccgggggaaaattcctgcagagaccagtaaccccctgaaccgggtactgatcaaagcgtatcatccattgctgttgcgggttctccactggccaaaaacaaccctgctggttgcggccttgtccattttcaccgttatctggccgctgagccaggtgggcggtgagtttctgccgaagattaacgagggcgacctgttgtatatgccgtcgaccctgccgggtgtctctccggctgaagctgcagcgctcctgcagacgacggacaagttaatcaaaagcgttcctgaagtggcctctgtatttggcaagaccggtaaagcagagaccgccacggattccgcaccgctcgaaatggttgaaaccacgatccagctcaaacctgaggatcagtggcgtccaggcatgacgattgacaagattattgaagaactcgacaggaccgtccgtttaccggggctggcaaacctctgggtgccgccaatccgtaaccgtattgatatgctctcaaccgggatcaaaagcccgataggtatcaaggtgtccggaacggttctgtccgatatcgatgcaacggcgcagagtatcgaagcggtcgccaaaaccgtacccggcgtagtgtctgctctcgcagagcgactggaaggcgggcgctacattgatgtggatatcaaccgggaaaaagcctcccgctacggaatgacggtgggcgatgtgcagctgttcatctcatcagccatcggcggcgcgacggtaggggaaacggttgaaggcgtggcccggtacccgattaatatccgctatccgcaggattaccggaacagcccgcaggccctgaaacagatgccgatcctgaccccgatgaagcagcagatcacgctgggcgatgttgcggatattaaggtcgtttccgggccgactatgctgaaaacggaaaatgcccgtccagccagctggatttacattgacgcgcgcggcagggatatggtgtcggtggttaatgacattaaaacggcgatcagtcagaaagtgaaactgagaccgggtaccagcgtgtcattctccggacagtttgaactgcttgagcatgccaacaagaaactgaagctgatggtgccgatgacggtgatgatcatcttcatcctgttgtatctggcattccgccgggttgatgaagccctgctgatcctgatgagcctgccgttcgccctggttggcgggatatggttcctgtactggcagggcttccatatgtctgtcgcaaccggaacggggtttatcgctctggccggggtggcagcagagtttggcgtggtcatgctgatgtatctgcgtcatgccattgaagcgcacccggaattgtcccgtaaagagacgttcacaccggaaggccttgatgaagccctctatcatggtgccgtactgcgtgtccggccgaaagccatgaccgtggcggtgatcattgcgggtctgctgccaatactctggggaaccggtgcaggttcagaagtcatgagccgtatcgcggcacccatgattggtgggatgatcacggctccgctgctgtccctgttcattattcctgccgcctacaaattaatctggctgcgcagacataaaaaaagcgtgtcctga

SEQ ID NO: 117750 - DNA, 441 bp, Enterobacter cloacae
atgaaaaaagtggttctgatggcgctggctctcggcctttcactgcccgcgatggcgagtgaaaaagtgattgatatgtacaaatctgaaaactgtggctgttgttccctgtggggcaaagcgatggaaaaagacgggtttgaagtacgaactcacgtcatgaatgatcaggcgctgtcagccctgaaagaaaagcatgctattcctgcaggactgcgaagttgtcataccgcggttgccggtaatttgatcattgaaggccatgtgcctgcgacaacgatacataaggcaatgcagtctggttcaggtatatacggtctcgccacccccggtatgccagcaggaagtcctggaatggagatgggagcccgaaaagaggcttacgatgttatcgcattctcaccggatggaagtaaaaaagtcttccagcgaatcgaatag

SEQ ID NO: 117751 - DNA, 2448 bp, Enterobacter cloacae
gtgaaaaatgacaatgcagtgcaacacaacaaccagactgcttctgagcagacattatccccggacgagggccacgtattgcataaggtgagagatcccgtgtgcgggatggccatcctgcccgacagggcgcacagcagcattcgataccaggaccatcaactttatttctgctccgccagctgtgagagtaaatttaaagcccatcccgatcgttatcttaccgaagatgccagtgaacattcccatcaccatcaccacgatcatcacgaagtcagccctgatcagataaaacagcctcaccaccaggcggaaaaagagaattctgaaggtgtgtggacatgtccgatgcacccggagatacgccgcagtggtcccggaagctgtcctgtctgtggaatggcactggagccgctcgtagctacggcatccacggggccgagtgatgaacttcacgacatgacaagacgcttctggctggggttgttgctggcgtttccggttctggtactcgaaatgggatctcatctgtttcccgagttgaggaatacagtaccgccacagtacaacacatggctgcagctgcttctggcctcccctgtcgtgttgtggtgtggctggccattcttcgcccgggccggaatgtcgttacgtaaccgctccctgaatatgtttacccttgttgcaatggggaccggcgtagcctgggtttacagcgtcattgcaaccgtcttcccctcctggtttcctgcatcgttcagaaacatggatggcctggtggccgtttattttgaagccgcagcagttattacggtgcttgttctgctgggacaggttcttgagctgcgggcacgggaacaaacctcaggcgccattactgcgcttctgaaccttgcccccaaaaccgccagacggctggatcatgacggtcatgaaacggatattaatgcggaagatgtcctgcctggcgataagctccgcatcagacctggagagagtattccggtcgacggtatcgtgatcgaaggcaaaacaaccgttgatgaatcgatggtgaccggggaatctatgccggttaccaaaacggagggtgaccctgtcatcggggggaccattaatcagacagggagtctcatcatccgtgcagagaaagtcggtgatgaaacaatgctctcacgaattgttcagatggtcgctgatgcacagcgttcgcgtgcccccatccagagaatggctgacagcgtttcaggctggtttgttcctctggtgatacttatcgcggttgttgctttcgtgatctggtctgtctgggggcccgagcccaggatggcgcacggtctcattgcggctgtgtcggtcctgattattgcctgtccctgcgcgctggggctggccacgccgatgtcgataatggtgggggtgggcaaaggagcccaggccggggtgttaatcaggaatgccgaagcccttgagcgtcttgaaaaagtggacacgctggttgtcgacaaaacaggcacgctcacggaaggttcgcctacggtgacagggattatcagtctcaatccgggtggggaaacatctcttttgcgtgtaacagccgcagtggaaaaaggctcgcagcatccgctgggtatggcagtagttaaagcagcacaggaaaaggggatcgcaatacccgcagtcactcatttcgatgcaccgtcgggtaaaggtgtctcaggcgatgtcgaaggtcaacgggttgttattggtaatgaactggctatgcaggaaaacagtatagttattgataatcaaaaggccgttgcggatacgttgcggatggaaggcgctaccgttatctatgtggccacagacggggaccttgcaggcctgatagctatctcggatcccgtgaaaacaaccacgccggatgcgcttaaagctttgcgtcaggcggggatccgcatcgttatgctcaccggggataaccagcttactgctgaagcagtcgcacggaaactgggaatagatgaggttgaagccggaattctgccggatggcaaaaaagcagtgataacccgactgaaagcgtctggccatgtggttgcgatggccggagacggtgtgaatgatgccccggcgctggcagcggctgacgtgggtatagccatgggaacgggtacagatgtggcaattgaaagtgccggagtcacccttctcaaaggcgacttgatgatactgaacagggcccgtcatctgtcagagatcaccatgaaaaatatccgtcagaatctgttttttgcatttatctacaacgcacttggcgtgcctgtggctgcaggtctgctttatcctgtgtatggaatactgctgtcgccagttattgcggcggcggccatggctctttcctccgtcagcgtcattgtgaatgcgttgcgtctgaaaagtgtcaggctcgggaaataa

SEQ ID NO: 117752 - DNA, 198 bp, Enterobacter cloacae
atgaaaagtaccacctatgcgcttattgctgtcgccgcgatcgcggcatttgccctcctgcgcgaacactggtcacatgtggcaggttactggccatatctgttattgctggtctgcccgctaatgcatcttttccacggccacggagggcatggagatcatcaacatcacggaagtgaaaacgataaaaaaaattaa

SEQ ID NO: 117753 - DNA, 738 bp, Enterobacter cloacae
atgtattctaccgatgtcgtaaaagaaaatgcctacctttcagccacccgctcggggctggaatcgaacgagatcgctactcttcagcgctccttgccttcccggtttaatctgcggcatttgaaaaaaaatgaatcattaaaactcgtactgcaaaagaaagcgggaaaatcacgtgtcgtggcctataaatttacgtccggttcatttaattacacggcgtatcgtatatcagataaaaagttctataacctttccgatacttccgggaaaggcagtctcgattatccgttaccggccacagcaagactcagttcgcctttcaatcctgcaagacttaacccggtatcgggaaaagtgagtccccataatggcattgattattccatgcccatgaacacgaaaatagtcagcgtcatcgacggaaaaatcacccgggccgaatacaacagtaccatgggatattttgttgaagtaacgggaaaagccggtgttaaaactcgctatctccacctcaataaaatactcgttactaaaggggccagggttacacggggaggtgctattgcgttatccggtaacagcggacgttcatccggtcctcatctgcattacgagctggtcatcaataacaaccctgttaactctctggcgttccgggcagcggcacccgctgataacaaactcgaacagcatgcctttgcgcatgccagagactacgaacgatacctggactga

SEQ ID NO: 117754 - DNA, 450 bp, Enterobacter cloacae; identical to SEQ ID NO: 97793

SEQ ID NO: 117755 - DNA, 1818 bp, Enterobacter cloacae
atgctgttgaaaacgtctcgacgaactttcctgaaggggttaaccctctctggcgtagccggaagtcttggcgtatggagtttcaatgcgcgttccagtctgagcctgccagttgccgcatccctgcagggtactcagtttgacctgaccattggtgaaacggccgtcaatatcacgggcagtgagcgtcaggccaaaacaatcaatggaggcctgccggggcccgttcttcgctggaaagaaggtgacaccattaccctgaaggtcaaaaaccgtcttaatgaacagacgtccattcactggcacggcattattcttccggccaatatggatggtgttccggggctgagttttatgggcatagagcctgatgatacctacgtttacacctttaaggttaagcagaacgggacttactggtaccacagccattccggtctgcaggaacaggagggggtatacggtgccattatcatcgatgccggggagccagaaccgtttacttacgatcgtgagcatgtggtcatgttgtctgactggaccgatgaaaatcctcacagcctgctgaaaaaattaaaaaaacagtcggattactacaatttcaataaaccaaccgttggctcttttttccgcgacgtgaataccagggggctgtcagccaccattgccgatcggaaaatgtgggctgaaatgaaaatgaatccgactgacctcgcggatgtcagtggctacacctacacctatctcatgaacgggcaggccccgctgaaaaactggaccggactgttccgtcccggtgaaaagatacgcttacggtttatcaacggctcggcaatgacctatttcgatatccgtatccccgggctgaaaatgacggtcgtggctgcagatggccagtatgtaaacccggttaccgttgacgaattcaggattgccgttgccgaaacctatgatgtcattgtggagcctcagggtgaggcctataccatcttcgcacaatccatggacaggaccggttacgctcgagggacactggccacgagagaggggttaagtgctgccgttccccccctcgatccccgtcctctgttgaccatggaagatatgggtatggggggaatgggacatgatatggcaggaatggaccacagccagatgggaggcatggataacagcggagagatgatgtctatggacggtgctgaccttccggatagcgggacatcctccgcgcccatggatcacagcagcatggccggtatggatcattcccggatggccggaatgccgggtatgcaaagtcatcctgcgtcagaaacggataacccactggttgatatgcaggcgatgagcgtctctccgaaattaaatgatccgggtattggtcttcgaaataacggaagaaaggttctcacgtacgcggatttgaaaagccgctttgaggatcctgacggacgtgaacctggccgtaccatagaactgcatttaaccggccacatggaaaagtttgcctggtcatttaacggaatcaagttttcagatgccgcaccggtgctgctgaaatacggtgagcggctcaggatcacgctgatcaacgataccatgatgactcaccccattcacctgcatggtatgtggagcgatctggaagatgaaaacggtaatttcatggttcgtaaacacacaatagatgttccccctggtacaaaacgcagttacagagtgacagcagatgcgcttggccgctgggcgtatcactgccatttgctctatcacatggaaatgggaatgtttcgtgaagtccgggtggaggaatga

SEQ ID NO: 117756 - DNA, 897 bp, Enterobacter cloacae; identical to SEQ ID NO: 19852

SEQ ID NO: 117757 - DNA, 381 bp, Enterobacter cloacae; identical to SEQ ID NO: 19851

SEQ ID NO: 117758 - DNA, 930 bp, Enterobacter cloacae
atgaacgacctgattatgattgttattcgttttcttctttatctggatttgatggtaatatttggattgccattttttcagatatatggaataagcggtgtcagacatgaaacctataacctgactaatttcaggtcgtttataacttttgctgttgttacaggcatcattcttactggcattaatatgctcctggtatctaatgccatgagtggagtaactgacctcagagaattatccatccatgttatcgagatggtgatagaagaaactgatgtgggtattagctggattgtcaggctctgtgccctgtttaccacactcggtgctttgttcctttacactaataagagagtattgtcctgcctgctgatgacgatgagtgggggcgtggcgctggctacacttgcctggggaggacacgccgttatgcatgacggtctgcattactatctccatttactgagcgatctgacccatctcggcgctgcaggtgcctggacaggtgctctggttgcatttgctatcctgctgatgcgcagaaacgagcataatgcacagagcgtcattgtgatatctgactccctggcaaaatttgccacggcaggaacggtgattgttgtagccctgatcctgagtgcgctggtcaactatctgtatattgctgagggtaacttaactcccttattcaacagttcctgggggaggatattgcttgccaagacggctctgtttgttctgatgcttcttctggctgcagcaaaccggtttcacctgggtccccggcttgaagttatggtcagggaagggaattatgatcgcagcgttgccctgatgcgaaacagcatcctgacagaattcgttgttgcgattatcattctgggcgccgtagcgtggctcggaatgcttgctccgtctcaggtcagctag

SEQ ID NO: 117759 - DNA, 681 bp, Enterobacter cloacae; identical to SEQ ID NO: 19849

SEQ ID NO: 117760 - DNA, 855 bp, Enterobacter cloacae
atgggaagtggatggcatgaatggccgctggtgatcttcaccgttttcgggcagtgcgtggccggcgcgttaatcgtgatgggcttcgtctggcttaaggaaaatgatgacaaggccagaatgcgcatcgtgcgcagcctgttttttctctggctggtaatgggtattgggtttatggcctcggtactgcatcttggctccccgctgcgtgccttcaactcgcttaaccgcgtgggcgcgtcagcgctgagtaatgagatcgcggcgggttcgatcttctttgccgtgggcggtttctggtggctggtgtcggttatcggtaaaatgcccccagctttgggcaaaatctggctggttgtcagccagatcctgggcatcgtttttgtctgggcgatgacccgggtctatcagattgagactgtcccgacctggtatacgggttacaccacgctgagcttcttcctgacgatggttctggctggtcctctgctggccgcgctgctgctgcgcgttgcaaacgtgacattcaaaagtactcttgccgcgtcagtcagcgcactggcacttatcgtctgcgtggcggtcgtcgtgttgcaaagcaatacgctggggacaatacagagttccatccagcaggctaacgccctgcttccggattatggttcgcttcaggtatggcgcatcgcgttgctggcggcgggtttaggctgctggatctgcccgctgattcgtcgtcaggagccaaaaacgctcggcctgtttgcaggtgtcgcgctggtggcgctgggtgaactgattggccgtgggctattttatggtctgcatatgaccgcagggttagcaattgcaggttaa

SEQ ID NO: 117761 - DNA, 615 bp, Enterobacter cloacae
atgaatgacgtctcacaccgcgaatcgttcgcgttcagcgcccgggtactgggcgcgctgttttatttcgctccagacagcgagcagaccgcgccgctggtgagtgccctgaccgcaggtgactgggttcaggactggccgctggcggaggaaaatctgctgcctgtcgccagtatgtttaagaccccatcggatgaagcgttgaaagacgcctggcagcgtctgtttattggcccgtatgccctgcccgcccccccgtggggctcggtctggcttgatcgcgagtccgtgctgtttggcgattcgaccctcgcgttgcgtcagtggatgcgtgaaaaccatatcgcctttgagatgcagcagaatgagcccgaagatcatttcggaacgttgctgatgctggcggcatggcttgccgagaacggtcgcgaaacagaacgcgaccagcttcttgcctggcatctgctgccatggagcacgcgtttccttagcgtattcgttgaaaacgcggcccatccgttctacaccgcgctgggtaaacttgcccagctgacgctggcggaatggcagtccactttgctgatcccgattgtcgaaaaaacgctgtaccgataa

SEQ ID NO: 117762 - DNA, 264 bp, Enterobacter cloacae
atgacatttgccagtaagaaagaggctgacgctcacgacaagctgctcgatatggcagaagcgtttaccgactggctgttgcaaagcggaatgcagatggatgaaacgcaggcggagaaccttggtctttatctcgccgagcagaaagagtccgtgcagcatatcctgcgtaccagcaagcttcccgagctcaatgctgaaacggataaaacagcatcagatgcggacagcagcaaaaaaatccgggccgtcaaagccgcctga

SEQ ID NO: 117763 - DNA, 315 bp, Enterobacter cloacae
atggaaccgaattttacgccagaacagattgaaatgattaaccgcattgttttcgagcagatcgagatcatgcatgagaaagtagctgaaataatcgcagatacagagacggtggcgcatcagcgcctgaaggataacgggatcactacgacagatttctatcctgcaaataaaaacttcctgatgatgacccttgtacaggatctgatagataaagtgcacgggggcgataaggacctggccaaaacaatgataaccatggaagcaaaaaggctgaatatcagcgtaaacgttgaggcggacaaatcaagataa

SEQ ID NO: 117764 - DNA, 678 bp, Enterobacter cloacae
atgacaaaaataatgccagaatatacggtagttgacttatcacgttgggcaagaaaggaacactttgaagtatttcagggctttgctcaatctacatttaaccaaacggttcagctggacattaccgtgctgctaaagcatatcaaagaggttggctggaaattttatcctgcgattatttcccttatttctgacgtcgtaaaccggcatccggaattccgtatggccatgaaggatgatgaacttgtaatatggaatgaggttcatccaagctatacccttttccataaagaaacggagacattttcatcgttatggagtcattacgatggaaatattcaccattttcagcgcgtttatgcagaagatgttgcccgctatggcaatatccttgcttactggcctaaagaagagtcccgggagaatatattcttcatatcggatattccgtgggtcagctttagcagtttcaacgtcaacgtcgctaacatgcggaatttttttgcgcccatgttcacgtttggaaaatactataaccaggatggaaaggtcttgttgcctttcgccgttcaggtccatcattctgtctgtgacggtttccatgtggccaggctgatcaacgagttacaagagttgtgtgataatttaccgcaccattcagaggcgctcaacgtgtga

SEQ ID NO: 117765 - DNA, 885 bp, Enterobacter cloacae
atggcgaagcgggaaaactacaatgagctgtatctgtttatccaggtggtgcgggagggaagcttcacggcagccgcgcaacggctcgggctggcacaatccgggatcagtcgatcggttcgcgagctggaagagcggctgggcgttcggcttctggtgcgtacaacgcgcaaactgtcgctgacccacgccggggagcaactttaccagaccgctggttcagcctttgatgcgctcgataccgggctgaccagactggcgcattaccgccagacgccatccggcacggtgcgcattaatgccagccagcacgccatcgaaaaatgcctgctgccaaagctcgctatcttcaaacagcgttacccggatatccgtctggaattgatgaatgagagccggttcgtggatatcattgccgagcgattcgacgcgggcgtccggcttgggccggaggtgggacaaggaatgattgccgtgcgcatcacgcccgatatggagatggctgtggttgccgctccggcgcattttcggcgctatggtttcccgcagacgcccgccgatctggatgctcatccctgcattgcctaccagtttgccgacggtaaccactatcaatgggagcttgttcaggacgggaagcatgttactcaccgcccggaggggcaatgggccttttccgacagctacatggaggccgaagcggcccggctgggactcgggctggcctatgtcccggttgagctggtggctgacgatctggagcgtggcacgcttatacgcgtcttacagcgctacagcctgcggatggacggactgtacctctattatccacaccgcaacgtatccccggcgctgagagcggtgattgatacgcttaaaatttag

SEQ ID NO: 117766 - DNA, 1059 bp, Enterobacter cloacae
atgagttatgcagaaacacgaaatcctgccgcccccgtttcgatggtgacaacctgggataagaccttcgtcgagagcaataaagtcgaccaccgcaaggtgacgttcgagaaccgatacgggatcaccctggtcggcgatctgtacattcccaggaacagcggcgaccagaagctggcggcgattgccgtcagtggaccgttcggtgcggtaaaagaacaatccagtggtctttacgcccagactctggctgaacaggggttcgtgaccctggccttcgacccatcctacacgggtgaaagcggcggccagccgcgtaacgttgcctcccctgacatcaacaccgaagactttagcgccgcagtggatttcctcggattacagaaagaagtcgaccgtaaccgtatcggcattctcgggatctgcggctggggtggtatggcgctgaacgcggcatccatggatacccgcgtgaaggcggccgccaccagcgtaatgtacgatatgagccgcgcgatgggtcacggcgtgggcgacgggaaagatcgttattcagcggccgatcgccgggccgtgttgcagtatctgaacgcgcaacgctggaaagatgctgaaagcggcaccttcgcccatggcggccacgatatttatgtcgatgaaaacggtaaggtaacggcggccgggcgtattctgccggaagcattgcccgccgatccgcatccggtactgaaagaattctatgattactaccgtatgccgcgcggcttccatgcccgttccgtaaactccaccggcgcatggaccgcgaccatgccgttgtcctttatgaatatgccgctgctgagctatgccggggagatcaccatcccaacgctgattgtgaccggtgaaaacgcgcactcacgttattttgcggaagatgcgtttaaagctgtcggcagcaaacagaaagaactggtgattgttcccggtgcgaatcacgttgatctctacgataacgtcgcagggaaaatcccgttcgcgcagttcgggcagtttttcaaaaccagtctggattaa

SEQ ID NO: 117767 - DNA, 1185 bp, Enterobacter cloacae
atgtccacactgaatcaaacctcatcccgtgatgctgagcgtgcacactggggcggtatttttgccatgaccctgtgcgtttttgtcctcattgcctcggaatttatgcccgtcagtctgctcacgcccctcgccagagatttaggggtgacagaggggacggctggccaggggatcgccctctctggtgcgctggctgtcctgaccagcctttttctttcccggcttgccgggaatatgaatcgcaaacatcttctttcaggcatgaccgtcctgatggcgctgtcagggatcattatcgccttcgccccgaatgctctgatgtatatggcaggccgggcgttgatcggcatcgccattggcggtttctggtcgatgtctgctgccaccgccattcggctggtgcctcagcatcaggtctctcgtgcgctggcaattttcaacggcggcaacgcgctggcgacggtggtcgccgccccgctgggcagttatctcggctcgaccattggctggcgcggcgcgtttctgtgcctggttcccgtggcgattgtggcgttcatctggcaatattttagcctgcccaacatgggcgggaaccagggtccgtcgccacgtaaaagcctatttcgcctgctccaccagcctgcggtttcgatgggtctgatggcgtgcggcctgttcttcatgggacagtttgcgttatttacctatgtgcgccccttcctcgaaaccgtcacccacgtcagtccttccgccttatcgctgatcctgctcactatcggtatcgcaggtttcatcggcacgctgatcgtcgcgctggccctgaatgccgcgttttacctcaccttaatggccataccgctgcttatgacgctgattgcaggggtattaatgctcaccggtgacagcctgtggatcgtggccctgctgttaggtttctggggaatgctggcaactgcggcccccaccggctggtggacgtggatagcccgtacgttaccggaagatgccgaggctggcggcgggctaatggtcgcggtgatccaactctctattgcgcttggctcaacggcgggtggcgtggtgtttgatacctttggctggcagagcaccttcgctttaagcagcatattactcctgagtgcaggggtgttgacttttacgacgtcgcgccatcggaaataa

SEQ ID NO: 117768 - DNA, 750 bp, Enterobacter cloacae
ttgctgattaaattaaagaaagaacgaacgcatcaggaggatcgtcgtcttgccctctggctggcgacctccgcgggactgctgaatgccattgcgctgggcgcgttcggtttttttccctcgcatatgacgggcaatacctcgcagctatccagcgaagtttcctccaccgatctcagcgatattcttttctttggcgccattattctttcgtttgtctcaggcgccatcgctgcgcggattattgttatctgggggattatccataacgtcaggctggtattcagccaggttctgtttgttgaagggctattactggccggggtatccctgtacgaaatgtattttcactccttcgccacgaatcaggagattattattttcctgtgcgggttgatgggaattcataattctacctctactcaactatccggcggtcgggtgagatccacgcacatcaccggcacgctgaccgatgcgggcatttcgctggcctccgttatggtcgccatgctgcgccgggattactccaaagatacggccgcacaaaagagtcagctcaaaacccatttaactacccttttctcctttatcagcggcgggatcgcggggctgatcctgttcagagagtttggattccacgcgatgctggcgctgggcctgttgctggtaatcgtcgccgccttctctatcgtccgcatctcgtggcgcgtacgcaaggtgcgcgccgcgctcagtcgacaggtataa

SEQ ID NO: 117769 - DNA, 711 bp, Enterobacter cloacae
atgcacccattacttaaacgttcgctgctttttgtcggcgcgattatcgtggttctcgctctcctcacctggggaattggactggagacgattaaggcgcgccaggttgacctgatttacctcgggcaacagcacctgattctggtcttttcatccatgttctttgccctgctggtgggtattccaagcggtattctgctgagccgtccggccgcgcgtggtatcgccgaatatgtgatgcaaatctttaacgtgggcaacaccctgccgccgctggccgttctggcactggcgatggtggtgattggcatcggtgataaaccggccattatcgccctctttctggcctctctgctgccgattgtgcgtaacacctatgccgggctgtgctctgttcccgcgtcgttgctggaagcggcaaatggtatcggcatgaccaaatggcagcgcctgcgtcaggttgagatccctaacgcgtggccggtgatgctttccggtattcgcattgccactgcgattaacgtcggtaccgcaccgctggcattcctgattggcgccagcagctacggcgagctgattttcccggggatctatctgaatgatttcccgacgctgatcctgggcgcggcggccaccgctctattcgccctgattctggatacgctgctggcggcactgggccgattactgagcccgcatctcgcgcgataa

SEQ ID NO: 117770 - DNA, 900 bp, Enterobacter cloacae
atgagactgttttccgggctgacggcgctatgcgccgccgcgctcttcaccagccaggcgctcgccgcgccgctgatcctggccaccaagagctttaccgagcagcacattctctcggccatgaccgtgcagtatctgcaaaagaaagggtttcaggtacagcctcagaccaatattgcaacggtgatttcgcgtaacgcgatgatcaacaagcagattgatatgacctgggagtataccggcacctcgctgatcatcttcaaccacatcaacaaacgcatgtcgccgcaggaatcgtacgagacggtgaaacgcctcgatgcgaagcacggtctggtgtggcttaaacctgccgatatgaacaatacctatgcctttgccatgcagcgcaagcgcgccgaggctgaacatatcaataccatgtctgagatggtggcaaagattgagcagatccgtaaaaccgatccggataacaactggctgctgggccttgacctggaatttgccgggcgcagcgacgggatgaaaccgttgcaggcagcctacaacatggagctggaccgcccgcagatccgccagatggatccgggcctggtctataacgcggtgcgcgacgggtttgtcgatgcggggttgatctacaccaccgacgggcgcgtaaagggcttcgatcttaaagtgctggaagatgataaaggcttcttcccgagttatgccgtgacgccagttgttcggaaagacacgctggaggctaatccggggctggaggaggcgctgaacaccctttcagcccagctcaataacgacgttatcaccgaactgaataagaaggtggatatcgaccatcagtcaccgcagcaggtcgcccgtgatttcctgcgtagcaaacagttgctgtag

SEQ ID NO: 117771 - DNA, 648 bp, Enterobacter cloacae
atggagacgattcactatattctcgacaactgggactatctcttaaccctgacgctgcaacacctgtggctggtggcgctcgccgtgggcctggcgattattattggcgtgccgctgggcattttaattgtccgccataaatggctggcaacgccggtgctggggattgccaccattgtgctcaccatcccgtcaattgcgcttttcggcctgatgatcccgctcttttcgctgatcggtcagggcattggcgccctgcccgcgattacggcggtgttcctctattcgctgctgccgattgtgcgtaacacccacacggcgctcgacagcctgccgccgggcctgcgtgaagcgggacgcggcatcggcatgaccttctggcagcgtctgcgctgggtggaaatcccgatggcgttgccggtgatttttggcggcatccgcaccgccgtggtgatgaacatcggcgtcatggcgattgccgccgtgatcggtgcgggcgggctgggcctgctgctgcttaacggtattggcgggagtgatattcgtatgttgattgcgggcgcactgatgatttgtcttttagcgattgtgctcgactggttgctgcaccgtttgcaggtggtactgactccgaaggggattcgataa

SEQ ID NO: 117772 - DNA, 1149 bp, Enterobacter cloacae
atgataaaactggaaaacctcaccaaacaattttcacagaaacacggccagacgtttaaggccgtcgacaacgtcaacctgaacgtgcctgaaggggaaatgtgcgtgctgctcggcccgtccggctgcgggaaaaccactaccctgaagatgatcaaccgtctcattacgccaagcagcgggacgatcctgattaacggcgaagacaccagcggaatggacactgtgaccctgcgtcgcaacattggctacgtgatccagcaaattggcctgttcccgaacatgaccatcgaagagaacattaccgtcgtgccgcgcatgctgggctgggacaaagcgcgctgtaaatcccgtgccgaggagctgatggatatggtggcaatggatccgcataaattccttcaccgctatccgcgcgaaatgtccggcggtcagcagcagcgtatcggcgtcatccgcgcgctggcagcggatcctccggtcctgctgatggatgaaccgttcggcgcggtcgacccgattaaccgtgaggtgatccagaaccagttcctggagatgcagcgcaagctgaaaaagaccgtgatgctggtgagccacgatattgacgaagcgctgaagctgggcgaccgtattgccgtcttccgtcagggacgtatcgtgcagtgtgccagcccggacgagctgctggcgaaacccgcgaatgagtttgttggctcgtttgttggtcaggaccggacgttgaaacgcctgctgctggtatcggcgggcgacgtcaccgaccagcagccgacgattacggtacgcgaatcgacgccgttgccggaggccttcgccaccatggatgacaacgatattcgcgccattaccgtggttgatgagcacggcaaaccgctcggctttgtgaagcgccgcgaagcgcgtaacgccagcggcagctgcggggatattctgcatccgttccgcatgaccggtaaggccgaggataacctgcgcgtggtgctttctcgcctgtatgagagcaacaccagctggatgccgattgtggacgaggacggacgctataacggcgaaatatcccaggattatattgcggagtatttgagctcagggcgtacgcgccgggcgttgaatattcatagcgagagttaa

SEQ ID NO: 117773 - DNA, 1311 bp, Enterobacter cloacae
atgcaacgtcttcacgcttaccccgacatccgcgcgatgtttcgtcgtctcctgattgctaccgtcaccggcgtgctggcggcgctggccgttgcggtgttccgccacagcatgtatctgctggagtggctatttctcagcaacgaaagcggaagtctggtgaacgccgcagccgcgttatcaccctggcggcgggcgctgacgcctgcgctgggtggtctggccgcgggaatgctactgtggggatggcagcgcatgacggcacaacgtccccacgcccccaccgattatatggaagcgcttgagacgggtgacggccagtttgattacggcgccagcctggtgaaatccctcgcgtcgttgctggtggtcgccagcggcagcgccatcggccgtgaaggcgccatgatcctgctcgccgccctcgccgcctccttttttgcacaacgttgtacgccgaaatccgaatggaaactgtggatcgcctgcggtgccgccgccgggatggccagcgcctatcatgcgccgctggcgggcagcctgtttatcgcagagatcctgtttggcacgctgatgctggcctccctcggcccggtggtgattgctgctgtagtggccctgctgaccacgcgcctgttaagtcccggcgcgaatacgctatatgatgtccatctcagcgagatgcttacggcggtggattatttcctgatcgttggcgtgggtctgctggctggcgtttgcggcccgctgctgatgtggctgatggcggccagccacaggctgtttctgcgtctcaaactttcaccgccgtggcagctggcgctgggtggtctgatcgtcgggctgctgtcgctgctaacgccgaaggtatgggggaatggctatagcgtggttcaggcgtttttgcagtcgccgccgctgctgtcggtgattgctggcgtctttatttgcaagctgctggcggtgctggcaagcagcgggtccggcgcgccgggaggcgtgttcacgccaaccttgtttgtcggtatggcaacgggaatgctgtttgcgcagatctttgcgctgtggtttcctggctctgagacggcgatcctgctcgggctggcgggtatggcgacgctgctcgccgccacaacgcatgcgccaatcatgtcggccttgatggtatgtgagatgaccgggcagtattttttacttcccggtttgctggttgcctgtgttgtggcgtcggtattgtcgagaacgctacgccacgactcgatctacggccagcataccgccgaaagccgagagatcgatgtagtgcgctaa

SEQ ID NO: 117774 - DNA, 696 bp, Enterobacter cloacae
atgcttaagcgtttctttattactggtacggatacgtctgtcgggaagacagtcgtatcccgcgcgttacttcaggccctggcggcaagcggtaaacgcgttgcaggatacaagccggttgcaaaaggcagtaaagagacgccagaagggctgcgcaataaggatgccctggttctgcaaagcgtctcgtctctggaactgccttatgatgccgttaatcctatcgccttaagcgaagaggaaagcagcgtcgctcacagtgggcttatcaactacagcctgctttctgatggcctggcaaatctgagtgaaaaggttgaccacgttgtcgttgaagggaccggcggctggcgcagcctgatgaacgatttacgtcccctttccgaatgggtggtgcaggagcagttgccggtgattatggtcgtgggcattcaggaagggtgcatcaaccatgccttgctgacggcgcaggctatcgctaatgacggcctgccgctgattggttgggtggcgaaccgtattaacccgggccttgcgcactacgctgaaatcatcgatgtgctgagcaaaaagctgcctggcccgctggtgggcgaactgccttatctgccccgcgccgagcagcgcgaattagcgcactacatcgatctctcggctttcggcggtatgctggccgtagatcgagtcgtggcgtag

SEQ ID NO: 117775 - DNA, 1221 bp, Enterobacter cloacae
gtggttgctgatagtcagccagggcatatcgatcagatcaagcagaccaacgcgggtgccgtttatcgcctgattgatcagcttggtccggtttcgcgtatcgatctttcgcgcctggcacaactggcacccgccagtattaccaagattgtccgcgaaatgctggaagcccatctggttcaggaaacagaaattcaggagccgggcagccgtggccgtccggcggtagggctggtggtggaaacggaagcctggcactacctgtcgctgcggattagccgcggggaaatcttcctcgcgctgcgcgacctcagcagcaagctggtggtggaggaccggctggaactcccgcttaatgcagagcaaccacttctcgatgccattctgacccacatcgaccagttctttattcgtcaccagcagcgtcttgaacgtttaacggcgattgcgatcaccctgccgggaattattgataccgaaaatggcattgtgcaccgcatgccgttttatgaaaacgtcaaagagatgccgctgggcgacgtgctggaaaaccacaccggtgtgccggtctacattcagcatgatatcagcgcctggacgatggcggaggcattgtttggtgcctcccggggcgcgcgcgacgtaattcaggtggtgattgatcataacgttggcgcaggtgtgatcaccgacgggcgtctgttgcatgctggcagcagtagcctggtggagatcggccatacgcaggtcgatccgtacggaaaacgctgctactgcggtaaccatggctgtctggagacgattgccagcgtcgaaagcgtgctggagctggcgcaggtgcggctcagccagtcgatgagctccacgctgcacggtcaaccgttaagcgtcgaggcactgtgcgctgcggcaaggcagggcgatctgctggcgaaggacattattaccggcgtgggcaataatgtcgggcgcattctggccattatggtgaacctgtttaacccgcaaaaaatactgatcggctccccgctcagccaggcggcggatatcctctttccggcgatttccgcctgcatcaatcagcaggcgcttcccgcgtacagtaaaaacatcgtggtcgaaagtacgcaattttccaaccagggtacgatggccggcgccgcgctggtaaaagatgcgatgtacaacggctcgttactgattcgtttgctacagggctaa

SEQ ID NO: 117776 - DNA, 906 bp, Enterobacter cloacae
atgaatatcgagctgcgccatctgcgctattttgtcgccgtcgccgaagagctgcattttggtcgtgcggcggcaaggctgaatatctctcagccaccgctaagccagcagatccagatcctggagcagcaggtcggggcgcgtctgctggcgcgaaccaaccgcagcgtgagcctgacggcggcgggaaaacagtttctcgccgatagccggcagatcctgagtatggtggaggacgccgccgccagagcggaacggctttatcttggggagacgggggagctgcgcatcgggtttacctcatcggccccctttatcagcgctgtttcacaaacgctatcctcgtttcgccgtaactttccggatgtgcatattcagacgcgcgaaataaatacccgggagcagatatcgccgcttaacgaaggatcgctcgacctggggctgatgcgtaacacgcagttgcctgataccctggcgtggcaggtgatcctccgcgaaccgctgatggcgatgatcccccgggatcatccgctcgccgcgcagcacagcgtctcgctggctgaactggcgaaagagccgtttgtcttttttgacccacaggtgggtaccgggttgtatgacgatattcttggtctgatgcggcgatatggccttgtcccgactatcgcgcaggaggtgggggaagccatgacgatcattggtctcgttgccgcagggcttggcgtgtcgattctcccggcctcatttaaacgggtacaactggcggaaatgcgctgggtgaagatagccgagcaggatgcagtctcagagatgtggctggtgtggtctaaacatcatgaacagagccatgcggcacagcgtttcaaagaacaattaattaccgcttctcgcgggcattatttatag

SEQ ID NO: 117777 - DNA, 1254 bp, Enterobacter cloacae
gtgagccgtacaacgaccgttgatatcgcgccggccagcgacatcgatgatttacccgcagcaccgcagccggttcagtttattaaacgtggtaccccccagtttatgcgcgtcacgctggcgctcttctcagcgggtctcgccacttttgccctgctctactgcgttcagccgatcctgccggtcctgtcgcatgaatttggcgtgtcgccagccagcagcagtatttcgctctccatttcaaccgggatgctggcgatcggtctgctgttcaccgggccactttcggatgccatcggacgtaagcaggtcatggtaacggcgttaatgctggcctccgtgtgtaccttgctgtccaccatgatgaccagctggcacggcattctggtcatgcgcgcgctgattgggttatccctcagcggcgtggcggcggtcgggatgacctatctcagcgaggagatccacccgagcttcgtggccttctccatggggctgtacattagcgggaactctatcggcgggatgagcggacgcctgctcagcggtgtgtttactgatttctttaactggcgcattgcgctggccgttatcggctgcttcgccctcgcttcggcgctgatgttctggaaaatcctgccggaatcgcgccatttccgcccgacctccctgcgtccgaaaacgttatttatcaactttcgtctgcactggcgcgatcaagggctgccccgtttgttcctgaccggtttcctgctgatgggctcgttcgtgacgctgtttaattacatcggctatcgtctgatgctttcaccgtggcatcttagtcaggcattggtgggtttgctctctgtggcatatctcaccgggacatggagttcgccaaaagcgggcgccatgaccgcgcgcttcggtcgtggtccggtgatgctggtttccaccgccgtgatgctgttcggactgctgatgacgcttttctcttccctgtggctgatttttgccggaatgctgctcttctctgcgggcttctttgccgcgcattccgttgccagcagctggattggcccacgcgcgcgccgcgccaaaggtcaggcttcgtcactgtatctgttcagttactatctcggttccagcatagccggtacgctcggcggggtgttctggcataactacggctggaacggcgtgggcggatttatcgcgctgatgttgtgcgcggcgctgctggtgggcgcgagcctgcataaacgactgcattaa

SEQ ID NO: 117778 - DNA, 1485 bp, Enterobacter cloacae
atgaaaaacaataactatcaacaactcacccgcaccttccagcgcctctcccgcttctcgcacctctcctccatcgccagctgggacatgttcaccatgatgccgccaggcggcagcgccgcgcgcggtgaagcgctggcggagatgagcgtcctgcaacatcagatcctgaccgataaaaaaatgggtgaatggctggcggcggcggcagacgaagatctgaatgacgttgagcaagccaacctgcgtgaaatgacacgccactaccagcaggccactttactgccggaatcgctggtggaggccaaatcgctggcgggcagcaggtgtgaacacgcgtggcgcactcagcgtccggccaacgactggcagggcttttcagccaacctgaaagaggtggtgaaactcagtcgtgaagaagcccgcctgcgcgctgaggctaaaggctgcacgccttacgacgcgctgctggatatctttgaacccgacatgaccagcgctcgcctggatgtgctgttcggcgatctgaagtcctggctgccggagctgctggcaaaggttgtggaaaaacaggctcaacgatcgttcgttccgccacagggtcccttcccgaccgccacgcagcgcgagctgggcctggaagcgatgaaaatgcttggcttcgattttaacggcggtcgtctggacgttagcgcccacccgttctgcggcggcgtgccggaagatgtgcgtatcaccacgcgttacgatgaagatgaactgctcagcgcgcttttcggcgtgatccacgaaaccggacatgcccgctacgagcaaaaccttccgcgagcgtgggccggccagcccgttgcgctggcgcgctctacggcgatccatgaatcccagagcttgttctttgaaatgcagctgggccgcagcgacgctttcctgaagcatctgcttccggcggttcatgcccgtttcggtagccaggcggcattcagcgaagagaattttattgcctggaaccagcgcgtgaagccgggctacatccgcgttgatgcggatgaagtgagctatccggcgcatgtagtgctgcgctatgagatcgagcgtgcgttaatcaacggcgaaattgaagtcgatgatattcccgcgttatgggatgagaaaatgcaggcctggcttgggttatccaccaaagataactaccgcaacggctgtatgcaggatatccactggaccgacggcggttttggctacttcccgtcttacacgctgggggcaatgtatgcggcacagctgttccatgccgccaaaactgcgctgcccgggttgcaggcatccattgccgggggcgatttctcggcgctgtttgactggctgcgtcagaatatctggcagcacggcagccgtttcagcacgtcgcagctcatcacccaggctacaggtgaagatctgaatatccgctacttccgcgaacacctgacgtcccgctacctgtaa

SEQ ID NO: 117779 - DNA, 306 bp, Enterobacter cloacae
atgaaaaaagtattagctctggttgttgccgctgctatgggtctgtcttccgctgcattcgcggctgaaactaccgccaccgcagcgcctgcggcatccaccgctgctccggccaaaacggttcaccataaaaaacatcacaaagcggctaaaccagcggcagaacagaaagcgcaggccgcgaaaaagcaccataaaaaagcggcaaaacctgcggtagagcagaaagcccaggcggctaaaaagcatcacaaaaaagcagcaaaacacgaagcggctaaacctgctgcacagccagcagcgtaa

SEQ ID NO: 117780 - DNA, 822 bp, Enterobacter cloacae
atgcgtaaatctgttgtgttgttactgggaacgtttagcctttttgctggcttttcacatgcggatgatggcgacgatgacgccattagcgccaaagaggtaaagacgctgttttttggtcatgacgatcgtacgcgtgtcaccgatcctaccgaatcgccctgggatgccatcgggcaactggaaaccgccagcggcaatttatgtaccgcaaccctcattacgccacgccttgcgctgacggcgggtcattgcctgttaatgccgcctgaaggcaaaccggataaagcgatcgccctgcgctttgtgtcgcaaaaaggaatatggcgctacgaaattcacggtattgaggggcgagtggatccgtcgcttggcaaacgcctgaaaccggatggcgatggctggattgtgccgcccggggcggcctcctgggatttcgggctgatcgttttacgttatccgccgtccgggatcaccccgctgccgctctttgatggcgataaggccgcgctcaccgccgccctgaaagccgccgatcgaaaagtgacgcaatcaggttatcctgttgatcacctcgattcgctgtacacccatacggactgcgtggtgacgggttgggcgcaaaacagcgtactgtcgcatcagtgcgatacgctaccgggtgatagcggatcgcccctgatgttaaaaaccgataacggctggcagctgattggcgttcagagttctgcgccagcggcgaaagaccgctggcgcgccgataaccgggcgttgtcggtgaccggttttcgcgaccggctggaagccctggcgcagcagtag

SEQ ID NO: 117781 - DNA, 330 bp, Enterobacter cloacae
atgcagcagtttgaatggatccacgcggcctggctggctttcgccatcgttctggaaattattgccaacgtctttctgaagttctccgacggttttcgtcgtaaagcctacggcctgttatcgattgccgcggttctgggggcgtttagcgccctgtcacaggcggtgaaaggcatcgatctgtccgtagcctatgcgctgtgggggggcttcggtattgccgccaccctggcggcaggctggattatgttcgggcagcgtttaaacaataaaggctggatagggctggtattactgctcgccggcatgatcatgattaaactggcctga

SEQ ID NO: 117782 - DNA, 363 bp, Enterobacter cloacae
atgttttactggattttattagctctggcgatcgtcgctgaaattaccggcaccttgtcgatgaaatgggcaagcgtgagtgatggcagcaccggttttattttgatgctggtcatgattacgctttcctatattttcctctcttttgcggttaaaaaaatcgcgctgggcgtggcatacgcattgtgggaaggtattggtattttattgattacgctgtttagcgtcatgttatttgatgaaaccctgacgacaatgaaaattgccgggctgacgaccctggtcgcaggtatcgtgctgattaaatcgggtacacgcaaaccggcaaaacagcagaaggagcagacccatgcagcagtttga

SEQ ID NO: 117783 - DNA, 1041 bp, Enterobacter cloacae
atggccaaacctattatcaccctcaacgggcttaagatcgtcatcatgctgggcatgctggtgatcattctgaccggcgttcgttttgcggccgatatcatcgtgccttttatcctggcgctttttatcgcggtgatcctcaatccgctagtgcagcgaatggtgcggctacgcatcccgcgtgtgctggcgataagcctgcttatcagtattattatcgttgcgatggtgctgttagtcgcctatctgggaacctccctgaacgagctggcgcggacgctaccgacataccgctcttccctggcgaccccgctgctgcaaattgaaccctggctgcaacgcgcgggtatcgaagtctcggttgaggaactgcttaaatatatcgatccgaatgccgccatgacgattgtcaccagcctgctggcacaactctccaacgccatgacctcgattttcctgctgttcctgacggttgtgtttatgctgctggaagttccacagctgcctgcaaagctccagcacatcatggtgcgtccggtagagggaatgggcgccattcagcgcgcgctcgacagcgtttcacgctatctggtgctgaaaacggccatcagcctggtgacgggattagtggtctgggggatgctcgccgcgctggatgtgcgttttgcctttgtctgggggctgctggcctttgcgctcaactatattcctaacatcggctccgtgctggcggcgatcccccctatccttcaggtgctggttttcagcggtttgtatgatgccctgattctgctggcaggctatctggtgattaaccttgtcttcgggaacattctcgaaccacggatcatgggacgcgggctggggctttcaacccttgttgtattcctgtccctgattttctggggctggctgctcgggcctgtcggcatgctgctctccgttccgctgacaattattgtcaaaattggcctggagcagaccgccggtggacaaagtatcgctgtactgctgagcgacatgagccataaggccgattaa

SEQ ID NO: 117784 - DNA, 846 bp, Enterobacter cloacae
gtgcgcatgcttttttccccggtgaacgcctccgatctcatccccatcaccggagcatatcgccatcgcacgccgctgcctgcgatagccggttatgaaggggtcggaatagtgaccgaaacgcccgccgcttatccggcgctgctgggcaagcgggtcctgccgttacgggggcagggaacctggcagcgctatgtcgactgcccggcggcgtatgcggttcccgtcccggacgacgtcgactcgctacttgccgcgcgggcgtatatcaacccgcttgccgcacagatgatgctggaccgctatcctccggtcgggaaaacggtgctgctcaccgctgccggttctgactgcgccgttctgctcgggcaatgggcacgccaggcgggcgcagaggcggtttacgggatccatcgctcgcccgtgcacgctcaacgtctggctgaaatggggatcgtcccgattgcgcaacatgatacgaccgccgtcaacgctgccgccgcgcaagcggaggtggtgtacgacgccacgggcggcagtctggcggagacgatcctgagcgtgatgcccgaaaccggcacctttgtctgctacgggctactctccgggcagaccttccggcagcagcggccgttgccgcgcgtggcgtggtttcacattcgtaactatctggacgcgctgagcgctgaggcgtggcaggcggagtttcggcgcatctggcctaaactgcgcgccagccagtgcagcgatgtcaccctctacccgctgtcggaatggcagcgggcagtgggcaactatcgcgaagcgggaagaacgggtaagcccatgctgtcgatggacaattaa

SEQ ID NO: 117785 - DNA, 1035 bp, Enterobacter cloacae
atgaaaaagatcggatttttgtcgtttggtcactggacgccgtcaccccagtccggcacgcgaaccgcggctgacacgctgctacagtccatcgatctggcggtcgccgccgaagagctgggcgcggacggggcttatttccgtgtgcatcactttgcccgccagctcagttcgccattccccttgctggctgcaataggcgcgaaaaccaaacgcattgaaatcgggacgggcgtgatcgacatgcggtatgaaaatccgctgtatatggcggaagatgctggcgcggcagatctcatctccggcgggcgattacagcttggtatcagccggggttccccggagcaggtgattgatggctggcgttattttggttacgtgccgcaggaaggggaaaacgaatctgatatggcgcgccgccacactgaggtactgcttgatgtattacgcggtgaagggtttgcaaagcctaacccacagccgatgttcccaaacccgccgggattattgcgtctggagccgcattcagaaggcttacgcgatcgtatctggtggggggctggctctaatgcaacggcagtatgggcggcaacactggggatgaacctgcaaagctcaacgctgaaagatgatgaaaccggcgagccgttccatattcagcagtcaaaacagatccgtgcctaccgacaggcctgggctgaggcagggcatacccgtcagccacgcgtttcggtcagccgcagtatttttgccctgatggacgatcgcgaccggatgtatttcggttcaagccgcaatgaaagcgacagcgtgggctatctggatgagaaaacgcgggccattttcggacgcagctatgccgcagagccagacaagctgattgaacagttgaaaaaggatgaagcgatcgcggaagcggatacgctgttacttaccgtgccgaatcagctgggcgtggaatacaacgcacatgtgatcgagtccatcctgaaacatgtcgcaccggaaatgggatggcgcgatcgcaatgcttaa

SEQ ID NO: 117786 - DNA, 894 bp, Enterobacter cloacae
atgaaaagacgctatgtcattgcagatgtttttacgaatacgccgtttctcggcaacccagtcgccgttgtccttgatgctgaaggtatgagcagtgaacagatgcagcaggttgccgttgaatttggctacagcgaaacgacgtttgtgctgccgccagaaaatctctcgagtacggcacgcgtgcggatattcaccccctcgcgcgaaatacctttcgccgggcaccctaacgtcggaactgcctttgtgttggcgcatcacgccatagaaaacgggcagacattatccgacaccttgcacttcgaagaaatcgcggggatggtgccggtgcggctgttaaaacagaacggcacagtgacgggagctgagctgttagctcctgaggcgctttcctgccattctgaagtcagcgcggaacaggttgcagcctgcctttccttaagcccggatgatatacgcagggacgtgcataatcctgttgttgcctcggtgggcctgccctttttgatcgtagagctggtctcccgcgatgcgcttcgtcgatgcgtgcccaacttacaaggtttccgcgcgattctgccgcttgacggcgcagtctctgtctatacgtataccttagacagggcttcagatgagtcctgcgatcttcaggcacgtatgtttactcctcgaatgacggaagatccggcaacaggcagtgcagccgcagcagccacggcgttgctggccctgcgtcgtgatcaaaccacactttcactgaagattagccagggcgttgatatggggcgtacaagcgtgttgttttcggaatacgatgcatcgtcaggaagggctgtggttcgggtcggtggtgaatgtgtcattacgcttgagggaacatttacgctttga

SEQ ID NO: 117787 - DNA, 348 bp, Enterobacter cloacae
atggctctgatccccaaaaactacgcacggctggaaagcggctaccgtgaaaaagcgctaaaaatctacccctgggtttgtggacgctgctcgcgtgagtttgtttattcaaatcttcgtgaactcacggttcaccatatcgaccacgatcacaccaataacccggaagatggcagtaactgggagctgttgtgcctgttttgtcacgatcacgaacactcaaagtacaccgaagcggatcagtatggcaccaccgttgtcgcgggtgaggatgcgcaaaaagacgtgggtgtcgccacgtttaacccctttgccgatctcaaggcgatgatgaacaagaagaagtaa

SEQ ID NO: 117788 - DNA, 447 bp, Enterobacter cloacae
atgcgggagagcattaacgttctttttgtggtgctgtcttttgtggcactgattatgctgatacgctttttcgtcaggcgtattcggcatccaacgcgcatcgttgccgatagccggggaatgaaaaaaatctcaacccatcctgtctggtttggcggctcgtcaggtaaaacctacttttatgatgagcagtatttatacgaggttataaagagcagcacccgtaaaattgagctggcgactatcataaaaattaaaccaggctcgatagtgataaataacaggcggatctggtctgtgagttatcttgagggaacccgtgaaaaacaggtgcaattttataataatctgacggtgtttaatcaaaacttcgctgcgtttttagaggcagtaaaacgcgtgaaccctgaggcagatattaaagccgtgtcattgttcaacctgtga

SEQ ID NO: 117789 - DNA, 1485 bp, Enterobacter cloacae
atgtacggagaggagaagtcggactcgctcatagtagcggcgaagcaggcgaacaacccgaaaggagcggagtcagtggagcgaaggagcggggccaaggggaacgcggaacagccacacatgcgccggacacagagccgggaaagcatgtcacagaggctgtcacgcgtgcgggaagctgcgaagcagcggaagaaagaacggtttacagcattgttccacctgctgacagtcgaagcactggaagccgcattcctctccctgagcaggaaagcggccgccggagtggatggcatcaggtggatggactacgccggaaacatgaagaacaacataacagatctgcaccggaggctacatcagggcagctacagggcgcagcccggcaggcgtcactacatcccaaaagcggatggaaaacaacgcccgctcggcatcgcctcgctggaggacaagatcgtccagtatgcgctggtgaaaatcctgaacgcagtctatgaaaacgactttatggggttctcatacgggttcagacccgggcgaagccagcacgatgcactggacgcactggccacagggctggtacgcactaacgtaaactgggtactggatgccgacatcagtcagttcttcgacagggtgagccacgaatggctgatcaggttcacagagcatcggatcggcgaccggagggtaatcaggctcatacgtaagtggctcacagccgggacgtcggaggagggtcaatggcgagcaacggaggaaggcaccccacagggtgcggtcatctcaccgctgctggcaaacatatacctccactacgtcttcgatctgtgggcgcatcagtggcgacgtcgctatgccacaggcaatgtggtaatggtcagatacgccgatgacatcgtcatcgggttcgacaaacgatacgatgcccggcgcttccgtatagccatgcagcgcagactgagggagttcggactcacggttcacccggagaaaacccgtctgatggagttcggccgcttcgctgccgaaaaccgtgccatcaggggaaaaggcaaaccagaaacgttcaacttcctcgggttcacgcacatcagcgggaaagatcgcaacggcaggttcatgctgatacgaaagacccgccgggatcggatgacggcaactctgaaagccatcaaagacggtctgcgaaggcgctggcattactcaatccccgaacagggaaaatggctcaggagagtggttcagggatacctgaactatcactcggtaccgggcaacttccccaccatgcagaagttcaggacacacgtaacaaacctctggcgccgggcgctcaggcgcaggagccagaaggatgatacgacctggacgaaagcaaacaaactggcagcagcatggctaccaagggttcgggttcttcatccatggcctgtggagcggttcaccgccagacacccgaggcaggagcccggtgcgtaa

SEQ ID NO: 117790 - DNA, 1266 bp, Enterobacter cloacae
atgtttgcactgtgtgatgtgaacgctttctatgcttcctgtgaaacggtttttcgcccggacctgaagggacgaccggtggtcgtgttgtccaataacgatgggtgcgtcatctctcgctccgctgaagccaaaccctttgtgaaaatgggtgaaccgtacttcaaacagaaagatctcttcaggcatcatggcgtggtttgtttcagcagtaattatgaactttacgcggatatgtccaaccgggtaatgaacacgcttgaagagatgtcgcctcgtagcgaaatatactcaattgatgagatcttttgcgatcttaccggcgtgcgtaattgtcgcgatctttccgattttgggcatgaaatgagagcgaccgtactgcaacgcacccatctgaccgtcggggtgggcatcgcacccacaaagacgctggcgaaactggcaaatcacgcggcgaaacgctggcagcgccagacgggaggcgttgttgatttatccaatgtggatcgtcagagaaagctgatggcggcgctacccgtcgaagacgtttggggggtaggacgtcgcatagcgaagaagcttgagatgatggggattaagaccgtcctgcaactggcagacaccgatatccggttcataagaaaacatttcaatgtcgtgctggagagaacggtgcgtgaattacggggcgaatcgtgtcttgaactggaagagtttgccccggtaaagcaagaaatcgtctgttcgcgctcgtttggcgaacgcctcaccgaatatgacgatgtacgccaggccatctgtagttatgccgcccgggcagcagaaaaacttcgcaatgagcatcagcattgccgctttatctccgtatttgttaaaccctcgcccttcgcgcttaacgagccatattatggcaatagcgcgtcggtaaaactgctcaccccaacccaggatagccgggatattatcggcgcatcagttcgttgtctggatgcggtctggaagaacggccatcggtaccagaaagccggagtgatgctgggagatttttatagccagggcgtcgcgcaacttaatctgtttgacgacaacgcacccaggaaaaacagccaaaagttaatggatgtattagaccatctgaatgctgaaaatggccgtggcacgctttacttcgcgggacagggtatacagcagccgtggcagatgaaacgggaaatgctttcaccccgctacaccacccgctttgcggatctcctcactgttaagtga

SEQ ID NO: 117791 - DNA, 1020 bp, Enterobacter cloacae
atggcgatttttgatggtcacaatgacctgttgcttaatttatggcttcaccatcgccaggatccggtaacggccttcttctccggcattgagaacggacacctcgattatccacgcatgcagcaaggcggattttccggcgggctgttcgcgctgttcgtgccgccgcaggagtatatcgcccgcatggcgccacaatacgccagcgagccgtggcagccggtcgacattctctggcagcagttgacgatccttaagcagcttgtcgcccactccgatggccgggcacgattgtgcctgagcgcggcggatatcgaacgctgccgtcaggataaagtgctggcgatggtggcgcatattgagggcgcgggcggttttgacggcgagggaggcgatctacaggctttttatgccgccggggtgcgcagcattgggcctttctggaacattgctaaccgttttggcaccggcgttaacggggcgtttcccggcagcccggacagcggcccagggcttaccgctgagggtatcgccctcattaagcacgctaacgccctgaacatgctgattgacgtttcgcatatgaatgaaaaagcgttctgggataccgctcgtcattcctcttcaccgctggtcgccacccattccaacgcccatacgctgtgcccgcaaccgcgcaatctgaccgatcggcagctactggctatccgcgacagcggcggcgtggcaggcgtcaatttcggcaacgcgtttttgcgcgccgacggtaaacgcgatagcgataccccgctgagcacaatcgttcgtcatatcgactatcttattaacatcatgggtgacgatcatgtcgcgctgggctccgattttgacggcattacgttgcctgatgacttacacgatgtgagtggtttaccgcggctaatcagcgcgttgcgtgacagcggctatgatcaatttgtgctgaataagctgctgtggggcaactggcaaaaggtattgcaaaatgtttggcaacaataa

SEQ ID NO: 117792 - DNA, 918 bp, Enterobacter cloacae
atgtttataaaagtcctcggttccgccgctggcggtggtttcccccagtggaactgtaactgcgccaactgtcagggtttgcgcgacggtacccttcaggcgacccctcgcacccagtcgtcgatcatcgtcagcgataacggcaaagagtgggtgctgtgtaacgcctcccccgatatcagccagcagattgcccatacgccagaactgaataagaaagaggttctgcgcggcacgcatattggcggcattattctcaccgatagccagattgaccacaccaccgggctgctcagcctgcgcgaggggtgcccgcatcaggtatggtgtacgccggaggtgcatgaagatctttccagcggattcccgatttttaccatgctccggcactggaacggtggcctgattcaccacccgatcgcgccgctcaccgcctttagcgtggaagcctgccctgatttgcagtttaccgctgtccccatcgccagtaacgcgccgccctattcgccgtggcgcgaccacccgctgccggggcataacgtggcgctgtttatcgaaaaccgccgcaacggtcagacgctgttctacgcaccgggtctcggtgaacccgatgacgccatcctgccgtggcttaaaaaagcggactgtctgctgattgacggcaccgtctggcaggacgatgaactccaggccaccggcgtcgggcgcaataccggccgcgacatggggcatctggcgctcggcgatgaacacggcatgatggcgctgctggcctcgctgccggcaaagcgcaagattctgatccacattaataacaccaacccgatccttaacgagcagtcgccgcagcgtcacgcccttgcgcagcagggaatagaagtgagctgggacgggatgaacatcacgcttcaggactaa

SEQ ID NO: 117793 - DNA, 756 bp, Enterobacter cloacae
atgcacattcgcgaaacgctctcgccgcaagagtttgagcacgcccttcgggcgaaaggcgcctactatcatattcaccatccgtaccatatcgcgatgcataacggcgaggccagccgcgagcagatccagggctgggtggcgaaccggttttactaccagacgacgatcccgctgaaagacgcggcaattatggcgaactgcccggatccgcacacgcgtcgcaaatgggtgcagcggatcctcgatcacgacggtagcaacggtcatgacggcggtatcgaagcctggctacagctgggcgaagccgtggggctcagccgcgaggacttaatcagcgaacgccacgtgctgcccggcgtccgtttcgccgtcgacgcttacgttaacttcgcccgccgcgccaactggcaggaggcggcatgcagctcgctcaccgaactgttcgccccgcaaatccatcagtcgcgtctcgacagctggccacagcactacccgtggatcaaagaggaaggctatttttatttccgcagccgcctcagccaggccagccgcgacgttgaacacggtctggagctggcgaagcgttactgcgatagcgcggaaaagcagaatcgaatgctggagatccttcagttcaaactcgatatcctgtggtcgatgctcgacgcgatgaccatggcctacgcgctacagcgtccgccttatcacacggtcaccgacaaagcggcctggcacacaacccgactggtataa

SEQ ID NO: 117794 - DNA, 279 bp, Enterobacter cloacae
atgcaaaaaaactccatcgtcgcctttcgtcgcggctatcgcctgcaatgggaagccgctcaggacagccatgtcatcctctatccggaaggcatggctaaactcaatgagaccgcggccgcgatcctcgaactggtcgatggccaacgcgacgcggcggccatcattgccatactcaacgaacggttcccggaagccggcggcgtggatgacgacgtcgtagaattcctgcaaatcgcttatcaacagaagtggattattttccgtgagccagaataa

SEQ ID NO: 117795 - DNA, 1143 bp, Enterobacter cloacae
gtgagccagaataaacccgccgtcaatccaccgctgtggctgctggcggagctgacctatcgctgtccgctacagtgtccttactgctctaacccgctggacttcgcccggcaggatcaggagctgaccaccgaacagtggattgaggttttccgccaggcgcgggcgatgggcagcgtgcagataggtttttccggcggcgaaccgttgacgcgtaaagatctgccggagctgatccgcgccgcccgcgatctcggtttttataccaacctgatcacctcgggaattggcctgacggaaagcaaactcgacgcgttcagcgaggccggtctggaccatatccagattagcttccaggccagcgatgaagtgctcaacgctgcgctggcggggaataaaaaagccttccagcagaagctggcgatggccaaagcggtcaaagcccgtgattacccgatggtgctgaatttcgtcctgcaccggcataatatcgatcagatcgataaaatcatcgagctgtgcatcgaactggacgccgacgatgtcgaacttgccacctgccagttctacggttgggcgttccttaatcgtcaggggcttctgccgacgcgggaacagattgcccgcgcggaacgcgtggttgccgaatatcggcaaaaaatggccgccagcggcaatctgaccaacctgctgttcgtcacccccgattattacgaagagcggccaaaaggctgtatgggcggctgggggtcgattttcctcagcgtgaccccggaaggcacggcgctgccctgccacagcgcgcgccagctgccggtggatttcccgtcggtgcttgagcagagcctagaatccatctggtatgactctttcggcttcaaccgctatcgcgggtttgactggatgccagagccgtgccgctcctgcgatgaaaaggagaaggacttcggcggctgccgctgccaggcctttatgctcaccgggaatgctgataacgccgatccggtgtgcagcaaatcgccgcatcatcataaaatcctcgaggcgcgccgcgaagcagcctgtagtgatatgaagatcggtcagcttcagttccgcaaccgtacccgttctcagcttatctataaaacccgggaactgtaa

SEQ ID NO: 117796 - DNA, 2271 bp, Enterobacter cloacae
atgaccacccgcatcgtggaactggcaggcggtttgcgcgcaacgctggtgcatcagccgcaggcgacacgcgcggcggcgctggcgcgcgtgagtgccggaagccatcacgagccaccgcgcttcgccggtctggcgcatttgcttgagcacctgctgttccgcggtagccagcgctatcagggcgatgatcgactcatggcctgggtccagcgccagggcggcagcgtcaatgccaccacgctggctcgccatagcgcttttttcttcgacgttgccgccgataacctgtccgacggcgtcgcgcggctgcgggatatgttgctggcgccgctgctttcaccgcatgacatacagcgcgaagtggcggtcattgatgcggaaaaccggctcatccagcaacatgattccgccaggcgcgaagcggcggcgcgccacgcgatggaagaacccgcggtttttcgccgttttcaggtgggtagcaaggagtctctcgggcaggacccggtatcgctgcaaaccgcgttgcgcgactttcatcgtcgctattatgtagccgggcacctgcaattgtggctgcaagggccgcaaacgctggatgtcctggccgagcttgcccatacgtttgcgtcaggttttgcgtcaggaggcatgcctgaaaccgctcccccgttgcgtcttagcgctgaagcagattatcagctggcggtgacggagcgacccgcactgtggcgttgtccgttaatccgaaaaagtgacaacgtcactttatttcgggagtttttactggacgacgcccccggaagcctgattgccgggctacgggcgcgcgggctggcagaagaggtagccctgaactggctttatcaggatgacgattacggctggctggcgctaacggttgatagcgaacggcccgaggacattgacccgcatattacccactggctacgggcgctacagcaaacgacggatgagcagcagcggcattattatcggctggcacagcagcgtttcagcgccctgccgacgctggagcagctgcgccagcgggcatttggttttgcacccggcgcggcgcccgtgggtttttacgccttttgtgccaacttacgggcggcgcccacctcgtatctggcctgcaaaaaaatggaaaccgctgaaattattgccagccagggctttgccctgccgcttagccattggcgtcgccagccggttgcagatgatagccccatcgcgttttccttctacccgcagactgccaggtatgctgcgccagccccgacgtcagaagccgctccgctgctgcatttgtcggcgcagacacaaccgccgacgctgatcctgcgcaggcctttttattcgcgtgtggaacgcgcacacggggtggcgatgggcaaacagttacgccctctccttgctgaactgcgccatatcgacggcagcgccgagtggcaaacggttgacggtagctggcagctcaccctgcggcttcctgacgccatggtgacggcggaacccatcatcggggcgataatcgatcgcctctcccaccccgctccggctactacgtcagtgccagaaggcattgccatccgtgagctgcttcagcaattgcctgaacgtctggcatcggatccgccgcgggacggctggctggcggcgttagttggcggcagcgccgggcacgcgcacgggttagcccggcagcttggcctgctccggacgccggttaacgctacgccgttgccgttaagcggttgtcccggcgggatcgaacacattccgcacgccagcgcggattcggcgctgctggtgtttattcccctgccgccgggcgcgtcgctcgccgcgctgcggctgctggcgttatgctgcgaaccgcaatttttccagcgcctgcgcgtggaacagcagattggctacgtggtcagctgtcgttatcagcgtattgccgatcgcgatggcctgctgctggcgttacagtcgcctgaccgttctcccgtgaacctgttgggttgctgcaaacgatttttgcgtgagctgacgccgtgcgatgaggcagcgttcagcgtgttgcgacagcagctggcgacgcagatccgctcaccgatggatgccagcgccacggcagtggccgccctgcgccagcgctatggtttgccggtgttaacaccgcaggctattgatgccctgcaacctgacgagataatcgcgctatggcgcgagatgactcgccgacgctggcgggtgcttttcacgggctga

SEQ ID NO: 117797 - DNA, 2430 bp, Enterobacter cloacae
atgtcagacaataatccccgcccatccggctggttaggcccgtggtgcctgctggtgggtgtgatacttcttgtaacggggctcttttttgccatcggcggttttaaactggtttccctgggggggagttggtattttctcatcgccggggttatcactctgctctctgcgattcagttcttccgccgcaagtcctctgccgtggggctgtttgccctggtgtttcttggcaccctgatttgggcatttttcgatgccgggctcgacttctggccgctggtttcccgtttaatggtacccgccgggctgatggtgctggcagccgccacctggcctgcattgcgtaaacgtgaaggaaaaccgtcctgcgcaaaaggagccgtgggggtctgcgcggtccttattatcgccatgggcgtcacctttgttcagatgtttcaaccccatccgaccgtgccgtttagcggtgaaaaacgcccgctggtgccggtaaaagatgatgcgaaacagcagaactgggatcactacggtaatacggctggcggtagtcgctttgtggcgctggaccagataacccgtgacaacgtgaaaaacctgaaaccggtctggacctaccataccggtgacgtaccggaaagtccggacggcaatggcgcagaagatcagcaaacgccgctacaggttggcgatcgtgtcttcctctgtacgccgcataacaacgtgatcgccgtggatgccgatagcgggaaagagatctggaaagcggaaatcaacgccaagtctgcaatctggatgcgctgccgtggcctggcgtactttgatgccaccaaaccgctggcgcagccaacggtagccggctccacgccggttctgccagcgcaggtcgcaccgggcgctgcatgccagcgccgtatcctgatgaataccatcgacggtaagctgatcgcgttagacgccgataacggcaaattctgcccggacttcggcactaacggcagcgttaacctgcatgaagggatgggcgacgcgtcagatcccacctacgtgctgacgtcggccccgacgctggcgggtacgacggttgtcgttggcggtcgcgttgcggataacgtcagcaccgatatgccgggaggcgttatacgtggttatgacgtgatcaccggccagctgcgctgggcgttcgacccgcgtaatccggatccgaactatgttctgaagccgggcgaacactacaaacgtagctctgcaaactcctgggcccctatgtcctgggatgcgtcgatgaataccgtgtttatcccgatgggaagttcctctgtcgacctgtggggcgctgaccgtattccggaagatcacaaatacgccacctcaatcctcgcgctggatgcgactaccgggaaagagaagtgggtataccagaccgtgcataacgacctctgggatttcgatatcccgatgcagccgagcctggttgatttcccgacgaaagagggcaacaagcccgcggtggtggtgggcaccaaagcggggcaaatttacgttcttgatcgcctgacgggtaaaccgctcactgaagtgaaagaggttccggtaaaaccagcggatattccacgtgaacagtacccggcaacgcagccgcgctctgtgggaatgccgcagattggcgcggaaaccctgaaagaatcggatatgtggggggcgacgccgtttgaccagctggcctgtcgtatcagcttcaaatcaatgcgttatgacggtctgtacacgatgccgggaaccgatatttccctgagcttcccgggctcgctggggggaatgaactggggtagtctgtccacggatccgaacaaccagtacatcttcgtcaacgacatgcgtctgggtctgtgggtccagctgattaaacaagatccgcagagcgcggtggcaaacacgggcggtgaagccgtgaacgccgggatgggcgccgttccgatgaaaggaacgccgtattcggtcaacaaaaaccgtttcatgtcaccgctgggcattccgtgccagaaaccaccgtttggctctctctccgcgattgacctgaaaacgcagaaaatcgtctggcaggtgccggtcggtaccgttcaggataccggtccgtttggggtaaaaatgcgcatgccaatgcctgtcggtatgccgacgctgggcggtacgctggccacgcagggcggtctggtcttcattgcgggaacccaggattactacctgcgcgcctttgattcctctacgggggaagaagtgtggaaagcgcgtctcccggtgggtagccagggcggacctgtcagctatgtatcaccgaaaaccggcaaacagtacattctgatctctgccggcggtgcacgtcagtcgccggatcgtggtgactacgtgattgcctacgcgctggataaataa

SEQ ID NO: 117798 - DNA, 420 bp, Enterobacter cloacae
atgatctttttcagacccgcagagttacgtgaaatcgttgctattccacttttcagcgacttagtacagtgcggcttccccagcccggcagcggattatgtagagcggcgtatcgatttaaacgagttattagtcgcccatcccagctccacttactttgtcaaagccgccggtgactcgatgatagaaggggggattaataacggtgatttgctggtggtagacagttcccgcaagcctgagcatggcgatatcgtgattgcggcggtagagggcgaatttaccgtgaagcgcctccagttgcgtcccaatattcaactcaaccccatgaacagcgcctattcaccgattattgtcggcagcgacgatacgctcgatatctttggtgtagtgacgtatatcgtgaaatccgcgagctga

SEQ ID NO: 117799 - DNA, 201 bp, Enterobacter cloacae
atgcccgcccgtgattatcccgataagcgtgttgctcgcggtgtcgcaaaggaggccgaactcaggatgttaagcgcgcgcatcgatcctgcgctgatggagtacatccgcattactgcgtatgaaacacggaaaagtaagcaggaaatcgtggcggaagcattagcgcttcaccgccaaagaagtcagattggatcataa

SEQ ID NO: 117800 - DNA, 867 bp, Enterobacter cloacae
atgagcagcatagataaaagcggaacgttcacgctcggaacgcgtacggttaaacgatttggctatggcgcgatgcagcttgccgggcctggcgtttttggtccgccaaaagacaaaaatgcggcgctggcggtgctgcgtgaagcggtggcgtcgggtgtgaatcacattgataccagcgatttttacggacctcatgtgaccaaccagcttatctgcgaggcgcttcatccgtaccgggacgaccttacgattgtgaccaagatcggagcccgacgcggcgaggatgcctcctggctgccggcgttttccgcgcaggagctgacgcaggcggtgcatgacaacctgcgtaacctgaagcgggatgtgctggacgtggttaacctgcggatcatgtttagcacccacggaccggcggaaggttcgattgccgcgccgctgagcactcttgcggagctacaacagcaggggctggttcgccatattgggctgagcaacgtcaccgcttcgcaggtcgctgaagcgcagaagatggtttccgtggtgtgtgtacagaacatgtacaacgttgtgaatcgcggtgacgatgcgctggtcgattcgctggcgcagcaggggattgcctgggtgccgttcttcccgctgggaggtttcacgccactgcaatcttccggactacaggcggtggcggattcactgggcgcgacgccgatgcaggtggcgctggcatggctgctgcaacgctcgccaaatatcctcttgatcccgggaacctcgtcggtggcgcatctgcgtgaaaacctggcggcagccgatctggtattgccgcctgaggcgctggagacgttaaattcgctggtggggtaa

SEQ ID NO: 117801 - DNA, 1662 bp, Enterobacter cloacae
atgctgaaaaatctgcacgtgattaccggtattatctttgccctaaccatattctgtctgttgcaagttgtcacgggagggttgttctactctgccgttaacaacgatcgtcacaactttcagaactccgggttactcaatgcccaacaggagagcctgagcgacagcgtgaacacgctggtgaaaacgcgcgttaccgtcacccgcgtggcgatccgctacctgaaaaaccagcgcgatccggcctctctcgcagcaatcaacacgctgttgggcaccgcgaacggttcgctgaccaaagccgaagactattacaaaaactggcaggcgatttcgcaggtgaagggccagaatgccgcgctcaccgaagagatgcagaaagcctggaagcaaatgcacgaggtgatgcgcttgtccattgagtatctgcgcgccgataactatcaggcctatggcgacctggacgcccagcaggcgcaggatgagatggaggcggtctatacccgctggcgcgctgaaaacaacgtgctgctgaaagccgccgccgaagagaatcagagcagctttacccagatgcagtggacgctggcggcgatcttcctgactgtgatcgccgtgctggtggtgatctggcagggtttacagcacctgctcctgaaaccgctcaacgccatcatgaaccatattcgcaccatcgcgagcggcgatctgacgcaaaatgtcgcgattaccgggcgcaacgagatgggccagctggctgctggtctgcacgagatgcagcagtcgctggtgagcaccgtcagcgccgtgcgcggcagcaccgattcgatctacacgggcgcaggagaaattgccgccgggagtaacgacctttccgcgcgaaccgagcagcaggcagcctcgctggaagagaccgccgccagcatggaagagctgactgccacggtgaaacagaactcggataacgcccgtcaggcgacgctgctggcgaagaatgcgtctgaaaccgccgcacgcggcggtcaggtggtggataacgtggtgcgtaccatgaatgacattgccgacagttctcagcaaattgcgcatattaccggcgttatcgatagcattgccttccagaccaacattctggcgctcaacgcggcggttgaagccgcccgtgccggggaacaaggtcgcggctttgcggtcgtggcaggtgaagtacggacgctggccagccgcagcgcgcaggcggcaaaagagatcaaagggcttatcgagaactctgtcagccgggtgaataccggctcggaacaggtgagcgaggcgggtgcgaccatgaaagagatcgtcgcggccgtgacgcgcgtgaccgatattatggctgagatttcctcggcgtctgacgagcagagccgcggtatagagcaggtcagcctggcggtctcgcagatggacagcgtcacgcagcaaaacgccgcgctggtacaggagtcggcaacggcggcggcagcgctggaagatcagtctgaacagctgcgtcaggccgtggcggcattccggctgaacgctcaggcatcgctggcggctcgccctaaaaacgtgaaaacgcccgtactgctgcgcccgtcagcggcaggcgcgaatacagctgacgcgaactgggaaaccttctga

SEQ ID NO: 117802 - DNA, 564 bp, Enterobacter cloacae
atgaaccctgacgacaaatcactttttcttgacgccatggaggatgtccagccgctcaaacgctgcgcggatattcactggcagcagagccgcaacacgcgggcgcgtcaggaaatagatactgagcagctcgataactttctgacgctggggtttctggaactgttgccccttgccgagccgctcatgtaccagcgcgaaggggtacagcagggggtatttgataagctgcgttccggcaaatattcccgtcaggccagcttaacgctgttacgccagcctgcggagcaatgccgccagctggtctattcctttattcgccaggccggacgtgacgggctacgcaacctgatcatcgtgcatggtaaagggcgtgaacagcagtcgcatcctaacgtggtgcgcagctatcttgcgcgctggctgaccgagttcgacgaagtacaggccttttgcgaagcgcagccgcatcacggcggcagcggagcatgctatgtctcgttgcgtaagtcagaggatgcgaagcgagataactgggagcgccacgccaagcgcagccgctaa

SEQ ID NO: 117803 - DNA, 906 bp, Enterobacter cloacae
atgtcatttcagattaaatttcatcaaatcagggcgtttgtcgaagtggcgcgtcagggcagcattcgcggcgccagccggacgcttaatctttcgcagcccgcgctgaccaaatccattaaagagctggaggagggtatggcggcccagctatttgtgcgccggagtaaaggcgtcgcgctgaccgagtgcggggaagggttttatcaccgcgctaatttgattctggaagagctgcgtgcagcgcaggatgacatccgccagcggcagggcgaacttgccgggcagatcaatattgggatgggggccagtatttcacgcagcctgatgccagccgttattacgcgttttcatgcgcagcatcctcaggtcaacgtccggattatggaaggccagctggtgtcgatgattaatgaattacgtcagggtgagctggactttaccatcaatacctattatcaggggccgtacgatcacgaatttacgtttgaaaagctgttcgaaaagccttttgccgtattttgtcgggcagggcatccggcgacaggggcgacctcaattaatgagcttctgcaatataactggacgatgcctacgccccggggaagttattataaacagttgcaggatacttttaaccaccgctctcaaataccgcgaattggcgttgtctgtgagaccttttcctcctgtattagcctcgtcgcacaaagcgatttcatcagcattttaccgcaggagctgggctgcgatccgcttctggcgcaccgtctgataatgctgccggttgtcgaaaccctgcctaaagcagcatattatttaattcagcgtcgtgattctcgccagacaccgcttgccgaatcattaatcacgcagtttcgaagggaagccaggaaattaatttaa

SEQ ID NO: 117804 - DNA, 1311 bp, Enterobacter cloacae
atgaacgcactggcgcagtacattcagacattagctccacaactgagcgcatggcgtcgcgatttccaccattttgcggaatccggctgggtagagtttcgaacagctgcgaaagtcgcggaaatcctcgactcgctgggctacgaactggcgatgggtcgcgacgtggtcgatgccgaaagccgtatgggactgcccgatgatgccaccctttcgcgagagtttgcccgcgcccgggcgcagggtgcgccggagaaatggctggcgccgtttgagggcggatttaccggcattgtggcgaccctgaataccggacgtccgggcccgacgctggcgtttcgggtagacatggatgcacttgatttaagcgaagcgcttgacgaaagtcatcgccccttccgcgacgggtttgcctcctgcaacccgggcatgatgcacgcctgtggccacgacgggcataccaccattggtctggggcttgcgcaggtgcttaagcagcatgaagcgcagctcaacggcaccatcaaactgatcttccagcctgccgaagagggtacgcgcggcgcgcgggctatggtcgccgcaggcgcgctggacggcgtggactactttaccgccattcatatcgggaccggcgtgccgaaagggacggtgatctgcggcagcgataacttcatggcgaccaccaaatttgacgtgcgctttaccggggtcgccgcacacgctggcggtaaaccagaagagggccgtaacgccctgctcgcggctgcccaggccgccatcgcgctgcatggcatcgcaccacacagcgaaggcgcgtcccgggttaacgtcggggtcatgcaggcgggcagcggacgcaacgtggttccggctgatgcgttgcttaaggttgaaacccgcggcgaaagcgaggctattaatcagtatgtctttgagcgcgcacaggcggtaattaccggcgcggcggcgctctacggcgtaacagccggggtaaacctgatgggggcggcgacctccagcgccccttccccggcctgggtcgattatctgcgcgaacaggcaagccaggtgcccggcgtgactcatgccattgataaggtcaaagcgcctgcgggctccgaagatgccacgctaatgatggcccgcgtacagcagaacggcggcatggcctcgtatatggtcttcggcaccgagctgagcgccggacatcacaacgaaaaattcgattttgatgagcaggtgatgaacgttgccatcgaaacgctggcgcgaactgcgcttaatttcccgtggacgcgaggtgtgtaa

SEQ ID NO: 117805 - DNA, 1446 bp, Enterobacter cloacae
atgcaggagaactacgcttttatcgccgatgccatcgacacgcgatgtcagacgtttaccgatattgccgacgacatctgggatcatcccgaaacgcgcttcgaagagttctggtccgccgaacggctcgccagtgcgctggaagccgagggctttgccctgacgcgggaagccggaggcattcccaatgcctttattgccagctacggcagcggcaagcccgttatcgcccttctgggcgaatacgatgccctggccgggctaagccagcaggcgcactgcgcgacggcgcaatccgccaccccgggggcgaacggccacggctgcgggcataacctgttaggcactgctgccttcgccggggcggtggcggtgaaaagctggctggaacaacacggcggcagcggaacggtacgattttacggctgccccggcgaggaaggcggctccggtaaaacctttatggtacgtgaagggctgtttaacgacgtggacgctgccgtgacatggcacccggaggcctttgccgggatgtttaacgtcagcacactggccaatattcaggccgcctggcggtttaaggggatcgccgctcatgccgcaaactccccacatctggggcgcagcgcgctggatgccgtgacgctgatgaccaccggtacaaacttcctcaacgaacacatcattgaaaaagcgcgcgttcattacgccatcaccgataccggcgggatttcgcccaacgtggtacaggcccaggccgaggtgctgtacctgatccgcgccccggagatggccgatgcgcagcagatctacgcgcgcatcgagaaaatcgcccagggtgcggcgatgatgaccgaaaccaccgtcgagtgccgctttgataaagcctgctccagctatctgccgaaccgtacgctcgaagcggcgatgtaccgcgcattgcagcattatggcacgccggcctggacggaagaggaacgcgaatttgcccgtgaaatccgcgccacgctcacggcaaacgacctgcaaaacagcctgaaaaacattgccgcaacgggggccgaagagggaaaagcgtttgcccgacgccatcaggagacgctgctggtggatgaagttgccccttacgccatcaccgataacgtgctggcaggctccaccgatgtgggggatgtcagctggaagatgcctgtcgcacagtgctttagcccctgttttaccgtcggcaccccactgcatacctggcaattagtggcgcaggggcgtacctcaattgcccataaaggcatgttgctggccggaaaagtgatgggcgcgaccgcgctgcatctgcttcaggatgccgacctgttgcgaaaatgccgggaagagttcgaacaacacataacagaaaaaccgtacgagtgtccgatcccgcagggcgtgacaccgtcacctttaaaataa

SEQ ID NO: 117806 - DNA, 1527 bp, Enterobacter cloacae
atgagtatgtcttccataccttcgcattccccatccggtaagctctatggctgggttgaaaggatcggcaataaagtgccgcaccctttcctgctttttatctatttaattgtcatcctgatggtcgcgacggccgtgctgtccgcctttgatgtgagcgtgcgcagcccggccgacggcagcatggtggcagtgaaaaacctgctcagcgttgaagggttgcactggtttttgccgaacgtgattaaaaacttcagcggttttgcgccgctgggcgccatcctggcgctggtgttaggcgcgggactggccgaacgcgtgggtctgctgcccgcgctgatggtgaaaatggcctcgcacgtcagcgcgcgttatgccagctatatggtgctgtttattgccttcttcagccatatctcgtccgacgcggcgctggtgatcatgccgccgatgggggcgctgattttcctcgccgttggccgtcatcctgttgcgggtctgctgtcggcgattgcgggcgtcggctgtgggtttaccgctaacctgcttatcgtgaccaccgatgtgctgctctccggcatcagcacagaggcagccagcaccatcgatgcgactatgcacgtcagcgtgatcgacaactggtactttatggccagttcggtgattgtcctgacgattgtcgggggtctgattaccgataagatcattgagccgcgcctgggtaaatgggaaggccggagcgatgaaaagctggagacgctgagcaaagagcagcagttcggcctgcgcgtagccgggatcgtctcgctggcgttcattgcggtggtggcgctgatggtggtgccggagaatggcgtgctgcgcgatccgatcaaacacaccgtcttgccctcgccgtttattcagggcattgtgccgctgataattctcttcttcttcgtcgtttcgctcgcgttcggcatcgccaccggcaaaatccgccgtcagggagatctgccgcacctgatgatcgagccgatgaaggagatggcgggttttatcgtgatggtgttcccgctggcgcagtttgtcgccatgtttaactggagcaacatgggcaagtttatggccgtgagcctgacggacgcgctggaggcggcggggttgagcggtgttccggcgtttgtcggcctggcgctgctgtcgtccctgctgtgcatgtttattgccagcgggtcggccatctggtcgattctggcgcccatctttgtccccatgtttatgatgctcggcttccatcctgcgttcgcccagatcctgttccgtgtcgccgattcctcggtgatcccgctggcgcccgtgtcacccttcgttccgctgtttttaggcttcctgcaacgctacagaccggaggctaagctgggtacctattattcgctggttctgccctatccgcttatcttcttaggggtatggctggtgatgctggtggcgtggtatcttgtcggcctgccgattggaccgggtgtttacccgaggctgaactaa

SEQ ID NO: 117807 - DNA, 516 bp, Enterobacter cloacae
atgctgagattactcgaagataagattgcgacgccgctggggccgctgtgggttatcgcggatgaagcgttcaatctgcgcgcggttgaatgggaagagcacagcgaccggatggttgagctgctcaacatccattatcgcgccgagggttacgagcgtattactgcccgtaatcctggcgggctgagcgataaactgacggcctacttcgagggcgatctcagcattattaataccctgccaaccgccacggcgggcacccctttccagcgcgaggtgtggcaggcgctgcgtaatattccctgcgggcaggtgatgcactacggtcagctggcagaacagcttggccgtgccggcgcggcgcgcgcggtcggtgcggcaaatggctctaaccccgtcagcattgtggtgccttgccatcgcgtgatcgggcgcaacggcaccctcaccggctatgccgggggcgtacagcgcaaagagtggctgctgcgtcacgaagggtatttcctgctgtaa

SEQ ID NO: 117808 - DNA, 753 bp, Enterobacter cloacae
atgatcccggaaaagcgaattatacgacgcattcagtctggcggttgtgctatccattgccaggattgcagcatcagccagctctgtatcccgtttactctgaatgagcacgaactcgatcagcttgacaatatcatcgagcgcaaaaagcctattcagaaagggcagacgctgtttaaggcgggagacgaactgaaatcgctctatgctatccgttctggcactatcaaaagctacaccattaccgaacagggcgacgagcagatcaccggcttccatctggcaggcgatttagtcggctttgacgccatcggcagtggccatcacccgagctttgctcaggcgctggaaacctctatggtctgcgaaattccgtttgagacgctggacgatctgtccggtaagatgccgaacctgcgtcagcagatgatgcgtctgatgagcggtgagattaaaggcgatcaggatatgatcctgctgctttccaaaaagaatgccgaagagcgtctggccgcctttatctataacctctcccgccgtttcgcggagcgtggcttctccccgcgtgaattccgtctgaccatgacgcgcggtgatattggcaactatctgggcctgaccgtggaaaccatcagccgtctgctgggtcgcttccagaagagcggaatgctggcggttaaaggtaagtacatcaccatcgaaaacggtgaagcgctggccattctggcgggtcactcacgtaacgtggcataa

SEQ ID NO: 117809 - DNA, 951 bp, Enterobacter cloacae
atggcaaagtatcaaaacatgctggtggctatcgatcctaatcaggacgatcagccggcattacgacgtgctgtgtatttacatcaacggattggtggcaaaattaaagcctttttgccgatttatgacttctcatacgagatgaccacccttctgtcgcctgacgagcgcaccgctatgcgtcagggagtgatcagccagcgtaccgcgtggatccgcgagcaggcgaaatattacctggaagcgggcgtaccgattgatatcaaagtggtctggcacaaccgacctttcgaagccattattcaggaagtggtggccggtgggcatgacctgctgctgaaaatggcgcaccagcatgacaaactggaatctgtgattttcactccaaccgactggcacctgctgcgcaaatgcccttgcccggtatggatggtgaaagatcagccatggcctgagggcgggaaagccgtcgtggcggtgaatctggccagcgaagaggattatcacaattcgctgaacgagaagctggtgaaggaaaccatccagcttgccgaccaggttaaccacaccgaagtccatctggtgggtgcctatccggttacgccaatcaatatcgccatcgagttgcctgaatttgacccgagcgtgtataacgacgcgattcgcggtcagcatctgctggccatgaaagcgctgcgccagaaattcagtatcgatgagaatatgacgcacgtagaaaaagggttaccggaagaggttattccggatctggcggagcatttgcaggccgggattgtggtgctgggcaccattggccggaccggtatctctgccgcgttcctgggaaataccgccgagcaggtgatcgaccacctgcgctgcgaccttctggtcatcaaaccggatcagtatcaaacgccggttgaactggacgatgaggaagacgattga

SEQ ID NO: 117810 - DNA, 1110 bp, Enterobacter cloacae
atgcgatttttgtcccgcttcgacatcatcgagctgatgatgacgccatctttctggatcggcgtcgccacggtggtttttgtgactctgctggtgtactggctgctgacgcgtctgatcgccttcgttaagaaagggatcactacctggggcgacaagcaccccaccaccaaccggatgcgttttatcctgacggatatgcttaaccgcaccagccgcgtcctgctttttgtcgtggcgctgttattcagcctgcgtttcgtcgacttaccggatcatctctttggtaccgtgagccacgcctggttcctggtcttcgctatccaggtcgcgctgtggatggatcagggggtggtgtcgtggcttcgtcacgtcatgctggcgccgggaagccataaaaacccggtgacgctggtgatcacggggcttatcctccgtgccatagtctggtcagtgatgctgctgtctattcttgctaacgcgggcgtcaacatcactgctctggttgccagccttggggtagggggtattgcaatcgccctcgcggtgcaaacgatcctgagcgacgtgtttgcatcgctttccatcggttttgataagccgttcgaaattggcgattttgtggtgtttaacgatgtcgccgggacggtagagcacattggcctgaaaaccacccgtatccgcagcctgagcggggagcagattgtctgcgggaacgccattctgctgcaacagacgctgcataactacaaacggatgcaaacgcgccggatcgtctttaccttcggggttgccagcgacacggcgccggacaaactgcgttcagtgggtgatatggtcaaacagatcattaccgacgtcggggaaacgaagtttgaccgcgcccatttcctgggcttcgatcgcgatcgcctgaccttcgaggtggtccatatcgttaatacggcggactacaacaagtacatggatattcagcaggagatcaatatccgtattctggaggggctgaaccagcaggagatcaagctggcgctgccgagcatggttctgcacgcgccctggatgaatgccggcgacgaggcaccgacgcagcggttgagcgaagcgtaa

SEQ ID NO: 117811 - DNA, 1389 bp, Enterobacter cloacae
atgtctggaggattagttacagccgcatacattgttgctgcaatcctgtttattttcagtctggcggggctttccaaacacgaaacgtctcagcagggaaataactttggtatcgccgggatggcgattgcgctgattgccaccatctttgggccggacaccggcaacgtggcgtggatcctggtggcgatgatcatcggcggcgcgattggtattcgtctggcgaaacgcgttgaaatgaccgagatgccggagctggttgccattctgcacagcttcgtgggtctggcggcggtgctggtgggcttcaacagctacctgtaccacgaaccgggcctggagccgattctggtgaacatccacctgaccgaagtgttcctcggcatcttcatcggtgcggtgaccttcaccgggtcgattgtggcgttcggcaagctgcgcgggaagatctcttccaaaccgctgatgctgcctaaccgccacaagctgaacctggcggcgctggtcgtttcctttgtgctgctggtggtcttcgtgcgtaccgaaagcgtaggcttgcaggtgctggcgttactggtgatgaccatcatcgcgctggccttcggctggcatctggtggcgtctatcggcggagcagatatgccggtggtggtttccatgctgaactcctactccggttgggcggcggcggcggcaggctttatgctgagcaacgacctgctgattgtcaccggtgcgctggtcggttcttccggtgcgatcctgtcttacatcatgtgtaaggcgatgaaccgttcgtttatcagcgtcattgcgggtggcttcggttctgacggctcatcaaccggttctgatgaggaagtgggtgaacaccgtgaaatcagcgcggaagagaccgcagagatgctgaaaaactcgcattccgtcatcatcaccccaggctatggcatggcggtggcgcaggcgcagtatccggtggcggaaatcaccgagaaactccgcgcgcgcggcatcaaggttcgctttggtattcacccggtggcggggcgtctgccaggccacatgaacgtgctgctggcggaagcgaaggtgccttacgacatcgtgctggaaatggacgagatcaacgatgatttcgccgacaccgacaccgtgctggtgattggcgccaacgacaccgttaacccggcggcacaggacgacccgcgtagtccgattgcgggtatgcctgttctcgaagtgtggaaggcgctgaacgtcattgtcttcaaacgctctatgaacaccggctatgctggcgtgcagaacccgctgttctttaaagataacacccacatgctgtttggcgacgccaaggccagcgtggatgcgatcctgaaagcgctgtaa

SEQ ID NO: 117812 - DNA, 1530 bp, Enterobacter cloacae
atgcgtattggggtaccaaaagaacggttagccaatgaaacccgcgtagcggcaacaccaaaaacggtggagcaactgcttaaactgggttttaccgtcgcgattgaaagcggcgcgggcaaactggcgagtttcgatgacgaggcctttactcaggctggcgcggacgtagtggacggtgctgaggtctggcaatcacccatcattctgaaggtcaacgcaccggaagagagtgaaattgaactgctgaacgcgggcactacgcttgtgagctttgtctggccagcccaaaacccggagctgatggagaagctggcagcacgcggtgtcaccgtgatggcgatggactccgtgccgcgtatttcgcgcgcgcagtctctggatgcgctgagctccatggcgaacattgccggctatcgcgccattgtcgaagctgcgcatgagtttggtcgcttctttacaggtcagattacggcggcaggtaaagtaccacccgcgaaggtgatggtgattggtgccggtgtggcaggtcttgccgctatcggggccgcaaacagcctgggcgctattgttcgcgcgtttgatacccggccggaagtgaaggagcaggtgcagagtatgggcgccgaattccttgagctggacttcaaggaagaagcgggcagcggtgatggttacgcgaaggtcatgtctgaagcctttattaaggcggaaatggcgctctttgcggcgcaggcaaaagaggtggacatcattgtcaccaccgcgcttattccgggtaaaccggcgccgaagctgatcacccgtgagatggtggattccatgcagccgggcagcgttattgtcgatctggcggcgcaaaacggcggtaactgtgagtataccgtgccaaaccaggtcacgacgaccgcgaacggcgtgaaggtgatcggttataccgacctgccagggcgtctgccaacccagtcctctcagctgtacggcacgaacctcgttaacctgctgaagctgctctgcaaagagaaagacggcaacattaccgttgattttgatgatgtggtggtgcgtggcgttaccgtggtgcgtgaaggggaaatcacctggcctgcaccgccgattcaggtttccgctcaacctcaggctgcgccgaaagcggcgccagagcccgcggagccagcaaaacctgcgtcgccgtggcgcaaatacgccatcatggcgctggttattatcctgtttggctggctggcggatgtcgcgccaaaagagttccttggccacttcaccgtcttcgcgctctcctgcgtggtgggttactacgtcgtgtggaacgtttctcatgcgctgcataccccgctgatgtcggtcaccaatgccatctccgggattatcgtggtcggggcattgctgcaaattggtcatggcggctggatcagcttcctgagcttcattgcggtgctgatcgccagtatcaatattttcggtggtttcaccgtgactcagcgcatgctgaaaatgtttcgtaaaggctaa

SEQ ID NO: 117813 - DNA, 945 bp, Enterobacter cloacae
atgaagcttaagaacacactcctggcgtccgcacttctttccgcgaccgccctgtctgcgaatgccgcgacagagttgacgccggagcaagcggcagcgttaaaaccttttgaccatacggtcattgtgggtcgctataactctattggcgatgccgtcgccgccgcatcaaaagccgccgataaaaacggcgctgcctcgttttacgttgttgaccagtccgatcagggcaacagcggcaaccagcgcgtgacgattgcgctgtacaaagagaatgccccaaaagcagatgaacagaaaaaccgcgtgattaacggcattgttgaactgccgaaagatcaggctgttcagctggaaccgtatgacaccgtgaccgttcagggcttctaccgcagccagcctgaagttaacgatgccatcaccaaagccgcgagagaaaaaggcgcttacgcgttctatatcgtgcgtcaggttgatgccaaccagggcggaaaccagcgcatcaccgccttcatctataagcaagatgcgaaaaaacgcgtagtacaaagcccggatgccattccagcggattcagatgcgggacgtgccgcgttagcgaaaggcggtgaagaagcgaagaaagtggaaattccgggcgttgcaacctcggcggcaccaagcgctgaagtgggtcgtttctttgaaacccaatccaccaaaggcggtcgttataccgttacgttaccagacggcacgaaaattgaagagctgaacaaagccactgccgcgcagatggttccgttcgacagcatcaagtttacgggcaactatggcaacatgacggaaatctcctatcaggtggcgaagcgtgctgcgaagaaaggcgcgaagtattaccacatcacccgccagtggcaggaacgtggtaacaacctgaccatcagcgccgatctgtacaagtaa

SEQ ID NO: 117814 - DNA, 1383 bp, Enterobacter cloacae
atggaaaagaaacttggcctgagtgctttaactgcacttgtattgagctcaatgctgggcgcgggcgtattcagtttgccgcagaacatggcggccgtcgccagcccggccgcattactgattggctggggcattaccggtttcgggattttgctgctggcgttcgccatgctgctgctgacccgtatccgaccggatctggacggcggaatattcacttacgcccgggaaggtttcggcgagctgatcggcttctgctccgcctggggttactggctgtgcgcggtgatcgccaacgtctcctatctggttatcgtcttctcggcgctcagcttctttaccgatacgcccgaactgcgcctgtttggcgacggcaatacctggcagtccatcgtcggcgcctcggtcctgctgtggatagttcactggctgattttgcgtggcgtccagaccgcagccagcattaacctggtggcgacgctggccaagctggtgccgcttggcctgttcgtcgtgctggccttcctcgccttccgtctcgatgtctttacgctcgatttcagcggcattgcgctgggcgtccccgtctgggaacaggtgaaaaataccatgctgatcaccctgtgggtgttcatcggcgttgaaggtgccgtcgtggtctctgcccgcgcgcgtaacaagcgcgatgtgggacgcgccacgctgttggccgtactggcggcgctgggcgtttatctgctggtgacgctgttgtcgctcggcgtggtggcccgccctgaactggcggaaatgcgtaacccgtccatggccgggctgatggtgaaaatgttgggcccctggggggacgtgattatcgcggcgggtctgattgtttccgtttgcggcgcctatctgagctggaccattatggcagcggaagtcccgttcctggccgccacgcacaaagctttcccgcgcctgtttgcccgtcagaacaaaaacagtgcaccatcggcctctctgtggctcaccaacatcagcgtgcaggtctgtctggtgctgatctggctcacaggatcggactataacacgctgctgaccattgcctccgagatgattctggtaccctatttcttagtgggcgcatatctgttaaaaattgcgacccgcccggcacactatgcggtaggcgtcggcgcctgtatttacggtctatggttgttgtatgcttccggaccgatgcatctgctgctgtccgtggtgctctacgcgccgggcctgctggtgtttatctacgctcgccgtacacatcagcttgataatgcccttaagcgccgcgaaatggcattgataggtttgctgttagtcgctgccgtaccggcaacgtggatgttaatgggatag

SEQ ID NO: 117815 - DNA, 723 bp, Enterobacter cloacae
atgggacacacgcagcaacgcccaatattgatcactggcgcaggccgtcgcattggcctcgccctcgcccatcactttctcaatcttcgccatccggttatcgtcagttaccgcacggaatatccctccattgaagggctacgaaatgccggagcagtctgcattcaggcggatttctccacagatgaaggtattctcgccttcgcggacaaagtgaagtcgaccacccacggactgcgggcggttattcacaacgccagtacctggcttcccgaaaaagcaggacattcactcagcgaaacgctcgcctgcatgatgcagatccacgttaatgcgccttatctgctcaaccatgccctacaggatttgctgcgcggacacggccatgccgcaggagacattatccatttcaccgattacgtggtggagcgaggaagcgacaaacacatcgcctatgcggccagcaaagccgcgctggataatatgacccgctctttcgcacgcaagctggcgcccgaggtaaaggtcaacgcgattgctccggcgatgattttatttaacgaaggcgatgatgccgagtatcgtcagcaggcgctcaacaagtcgttaatgaaaattgcgcccggcgagaaagaggtgatcgacctgatcgattatctgctgaccagctgttacgtcacgggccgaacgtttgccgtggacggtggccgccccctgcgctag

SEQ ID NO: 117816 - DNA, 336 bp, Enterobacter cloacae
atggggctggtgataaaagccgcgctaggtgcgctggtcgtgctgctgattggggtgctggctaaaacgaagaactactatattgccgggctgatcccgctgtttcccacctttgcgttaatcgcgcactatattgtggcctctgagcggggtattgaggcactgcgcgccaccattgtgttcgggatgtggtcgatcatcccatattttatctacctgctgtcgctgtggtacttcaccggttttatgcgtctgcccctggcgctgggcggggcggtggtctgctggagcctcagcgcctgggtgctcatcttcttctggagccgctttcactag

SEQ ID NO: 117817 - DNA, 753 bp, Enterobacter cloacae
gtgtatgttgacgtttttcgcgatgacagacgttgtatgaataagattgtttatgttgaagatgaacccgaggtggggcaattaatcgccgcttatctgggtaaacatgatatggaagtggttgtcgagcctcgtggcgatcgcgctgaagacgtcgtcaaccgcgaaaatccggatctggtgttgctggacatcatgctgcccgggaaagatggtatgacgctctgccgggatctgcgcgcgaaatgggacggcccgatcgtgctgctgacctctctcgacagcgatatgaatcatattctgtcgcttgagatgggcgcaaacgactacatcctgaaaaccacgccgccggcggttctgctagcccgtttacgcctccatctgcgtcagcgtgccagcgctgagcgtgaagcgcctgcgccctccttaacgccgcataaagcgatgcgtttcggcacactttctatcgacccggtcaaccgacaggttatgctttccggggagctgattgcgctctcaaccgcagattttgacctgctgtgggagctggcaacccatgccggacaaattatggaccgggatgcattactgaaaaatctgcgcggcgtaagttacgacggaatggatcgtagcgttgatgtggcgatttcacgactgcgtaaaaaactgttggataacgccacggaaccttaccgcatcaaaaccgtacgcaacaagggctatctgtttgcaccgcacgcctgggaaacctga

SEQ ID NO: 117818 - DNA, 372 bp, Enterobacter cloacae
atgtcatggagagtcattagctcggtaatttgtcctaacacgggaatcgtttattcaagcatcttgggactcaagttcttgaaactcatcatttggtatgaaagcgatgtctatttgtaccccggtgacaggatatatccgacaaaaaatggcgtcttcataaatggtgttttcaagcctatatcgatatacaacatatcaccttacaacgaaatgttgtggagtgaaattaaaaacaagatggcctgcccatacaatcgaaaccagcacgaggagatatgcacttacgcggtgcattgcaacgcgcggaaatgcccgcatgggtttgccaccaacccactgattgtcagcacaggtaaatccagacattag

SEQ ID NO: 117819 - DNA, 219 bp, Enterobacter cloacae
atgtcatcaaaaattttaggtctggttaagtggtttaaggaagataaaggctttggttttatctcccctgtagatggcagcaaagatgttttcgtgcatttctctgcccttcagggagagaacttcaaaacactttttgaaggtcagaaagtcgaatttatcatcgtaagcggcgttaaaggccctgctgctgcgaatgtaacgctttgcgataaataa

SEQ ID NO: 117820 - DNA, 228 bp, Enterobacter cloacae
atgaaaaaggtgatcattttttttaatgccaaccccagcaaagtcattatcgtgcttaagggcataacgtctgtacgccagacatatccggatggtgaagaaattaatcttcagatcatgactgcaagctttccgtcgttgacgggagatcataattctatctatgttgcttcagacagggaacttacctctcaggaaatatctgatgctgccaaacaatatttataa

SEQ ID NO: 117821 - DNA, 1299 bp, Enterobacter cloacae
atgaaaaagctgtttgtgcagttttatctcctgctgtttgtctgctttctggtgatgaccatgctggtcgggctggtctacaaattcaccgcagagcgcgcgggcaggcaatccctggacgatctgatgaaaagctcgctctatctgatgcgtagcgagctgcgagaaattcctcctcatgactgggcgcgcacgttaaaagagctggatctgaatctgtcgtttgatttgcgtatcgaacccatgaaggattttgacttagcgccgcctgcgatgcagcgtctgcgcgacggagacatcgtcgcactggacgagaaatataccttcattcagcgtattccgcgcagccattatgttctggccgtcgggccagtgccctatctctattacctgcaccagatgcgcctgctggatctcgctctgctgggctttattgccatttcgctcgctttacctgtgttcatctggatgcgaccgcactggcaggacatgctgaaactggaatccgccgcacagcgttttggggagggtcatttaactgaacgcatacatttcgacagcggttccagttttgaccggctcggtattgccttcaaccagatggccgataacatcaacgccctgattgccagcaagaagcagctgatcgatggtattgcgcatgaactgcgcactccgctggtacgcctgcgttatcgcctggaaatgagcgagaacctcaccggggcggaatcgcaggcgctcaatcgggatattggccagcttgaagcgctgattgaagagctgctgacctatgcccgcctcgatcggcctcagacggagttgcacctcagtacaccggatctccccgtctggctacagacgcatattaacgatgtgcagagcgttaaccctcagcgaaaactgctgacagccattacccccggcgcgtacggcgcactggacatgcgcctgatggaacgcgtgctggataatctgatgaacaacgccatgcgctacagcgaaacgacgctgcgcataggtttagatttgcagggaagccaggcgattctgtgtgtggaagacgatggccccggcattgagccggcggagcgtgaaaaagtttttgagccgtttgtgcgcctcgatcccagccgcgaccgggctaccggcggctgtggtctggggctggctattgtccgttctattgcccaggcgatgggcggttcggttcgctgcgaagcgagcgagctgggtggagcccggttcgtctttagctggccgatctatcacaatcttccccttcccgtacctgcctga

SEQ ID NO: 117822 - DNA, 930 bp, Enterobacter cloacae
atggcaacttacgatctcatcgaaaggcttaacaccacatttcgggaaatagagcaggcgttactgaccctcacggggcaacttcatgactgccgcctgctggccgcccgcgtcttttccctgcccgaggtggcgaaaggcgcggagcacgacccgctgaacaccattgaggtgacgcagcatattggcaaggcggcgctggaaatgacgttgcagcactttcgtcgccttttcatccagcagcagtccgaaaatcgcagcagtaaggccgccgttcgtctgcccggcgtcatctgcctgcaaacggatgccgcaacgcgtgaaggaattgaggcgcagattacgcatatcaatacgctgaaagccgcctttgagatgattgtaaccgttgagtccgggctggcgccggctgcccgttttgaatgggtgcatcgccagcttccggggctgatcaccctgaatgcttaccgcacgctgacggtactgcgccaccccgccacgctgcgcttcggctgggccaacaagcacatcattaaaaatttcacgcgcgatgagatcctggctcagctggagaaaagcctgaaatcgccgcgaacggtcgccccgtggtcgcgggaacagtggattgaacggctggagcaggagtaccacagcattgcctccctgccagctgatacccgtcttaaaataaagcgtccggtgaaggtacagcctatcgcccgcgtctggtacgccggacaacaaaagcaggtgcaatacgcctgcccgacgccgctgattgcgctctacgatgccgatcagggtgcggtggtgccggatatcggggaactgctggattacgatgctgaaaacgttcagcatcgctataaaccccaggcgcagccgctacagctgattattccgcggctgcacctgtatgtggcgcagtga

SEQ ID NO: 117823 - DNA, 1395 bp, Enterobacter cloacae
atgacaatgcatcgccgcgagaaagactccatgggcgccatcgacgtcccggccgacaagctatggggcgcacaaacccagcgttcgctggagcatttccgcatttcgacagagaaaatgcccgtctcgctaatccaggcgctggcgttgaccaaacgcgctgccgccaaagtcaatcaggatctgggcctgctggatgccgataaagccaccgccatcatcaatgccgccgacgaagtgctggcgggcaaacatcccgacgaattcccccttgccatctggcagaccggctcaggcacccagagcaacatgaacatgaacgaggtgctggcgaaccgcgcaagcgagcttcttggcggcgtgcgcggcatggagcgcaaggtccacccgaacgatgacgtgaacaaaagccagagttccaacgacgtgttcccgacggccatgcacgtggcggccgtcatcgcaatccgcgagcagcttatcccgcagctcaacgtgcttaaatctacgcttaacgagaaagcgcaggccttccgtgacatcgttaaaattggtcgtacgcaccttcaggacgccacgccgctgacgctcggccaggagatctccggctgggtggcaatgctggagcacaatcttaagcatatcgacaacagcctgccgcatctggcggagctggcgctcggcgggacggcggtgggcactggcttaaacacccatcccgagtacgcggtgcgcgtggccgaagagctggcgaagatcaccgggcagccgtttgttaccgctccgaataaattcgaagcgctggcgacctgtgatgcgctggtgcatacccatggcgcgctgaaagggctggcggcctcgctgatgaaaattgccaacgacgtgcgctggctggcctccggcccgcgctgcggcatcggcgaaatcagcattccggaaaacgagccgggcagctccattatgccgggtaaagtgaacccgacccagtgcgaagccatgaccatgctgtgctgtcaggtgatgggtaatgacgtggcggttaacatgggcggcgcgtcgggtaacttcgagcttaacgtctatcgtccgatggtgatccacaacgtactgcaatcgattcgtctgctggccgatggcatggagagctttaacgagcactgcgcggtgggcattgagcctaatcgcgagcgaatcagccagctgctgaatgagtctctgatgctggtaacggcgctgaacacccatattggttatgacaaagcggccgaaatcgctaaaaaagcgcacaaagaggggcttaccctgaaagcctctgcgctggcgctgggctacctgacggacgccgagtttgatgcctgggtccgcccggaagcgatggtgggcagcctcagataa

SEQ ID NO: 117824 - DNA, 1647 bp, Enterobacter cloacae
atgtcgaataaacccttccattatcaggatcctttccccctcagtcaggatcagaccgagtattacctgttaacccgcgattacgtttctgtctctgagtttgaagggcaggagatcctcaaagttgacccgcaggcgctgacgttgttggcgcagcaagccttccatgatgcttcctttatgctccgtccggcgcatcagcagcaggttgctgatatcctgagcgacccggaagccagtgagaacgataagtacgttgccctgcaattcctgcgtaactctgatatcgcggcgaaaggcattctgccgacctgccaggacaccggcacggcgattatcaccggtaaaaaaggccagcgcgtctggaccggcggcggtgacgaagcggcgctggcgcgcggcgtttacaatacctacaccgaagacaacctgcgctattcgcaaaacgcggcgctggatatgtacaaagaggtgaacaccggcaccaacctgcctgcgcagattgacctctacagcgtcgacggtgacgagtacaaattcctctgcatcgccaaaggcggcggttcagccaacaaaacctatctttaccaggaaaccaaagcgctgcttaccccgggcaagctgaagaattatctggtcgagaagatgcgcaccctcggcaccgcggcctgcccgccgtaccatatcgcgtttgtgattggcggtacgtctgccgaaagcaccctgaaaaccgttaagctggcctcaaccaaatactacgatggcctgccaacggaaggtaacgaacatggtcaggcgttccgggacgtgcagcttgagcaggaactgctggccgaagcgcagaatctgggcctgggcgcgcagtttggcggcaaatacttcgcgcatgacattcgcgtgatccgcctgccgcgccacggtgcttcctgtccggtgggcatgggcgtctcatgctcggcggatcgcaacatcaaggcgaagatcaaccgcgacggcatctggatcgagaagctggagaacaacccgggcaaatatattcctgaagaactgcgtaaagcgggcgagggggaagcggttcgcgtggacctgaatcgtccgatgaaagagatcctcgcgcagctttcgcagtatccggtttcaacgcgcctttccctgaacgggacgattatcgtgggccgcgacatcgcccatgcgaagctgaaagagcgcctggacaacggcgaagggctgccgcagtacattaaagatcacccgatctactacgcaggcccggcaaaaacgcctgatggatatgcttccggctcgttaggcccaaccacggcgggccgtatggactcctacgtcgaccagttgcaggccaacggcggcagcatgatcatgctggcgaaaggcaaccgcagccagcaggtgacggacgcgtgccataagcacggcggcttttacctcggcagtataggtggcccggcggcggtgctggcgcagggaagtatcaagagcctggagtgcgtggagtacccggaactgggtatggaagcgatctggaaaattgaagtggaagactttccggcgttcatcctcgtggatgacaaaggtaacgacttcttcaaacagatccagtcttcccagtgttcggcgtgtgtgaagtaa

SEQ ID NO: 117825 - DNA, 1194 bp, Enterobacter cloacae
atgaatcagggcttgataatgcaaaaactcatcaactcagtgcaaaactacgcctggggaagtaaaactgcgttaacggatctctacggtatcgccaacccggacaacctgccgatggcagagctgtggatgggcgcgcatccgaagagcagctcaaaaattgaagatgccagcggccaggttcgcagcctgcgtgacgtcatcgacgccgacaaagccgcactgctcggcgataaagtggcgaatcgttttggtgagctgccgtttctgttcaaggtattgtgcgccgaccagccgctctccattcaggttcacccgaacaaaaaagcctctgagctgggctttgccaaagaaaatgccgccggtattccgttagacgccgcagagcgtaactacaaagatcctaaccacaagccggaactggttttcgcccttacccctttcctggcgatgaatgccttccgcgagttttccgagatcatctccctgctgcaaccggtcgccggggctcacaacgcgatcgcccatttcctggaaaacccgaacgcagaagccttgagcgagctgtttgccagcctgctgaatatgcagggcgaggaaaaatcccacgcgctggcggtgctgaaagccgcgctgaacagccagcaaggtgagccatggaacaccattcgcgtaatttccacgttttatccggacgacagcggtctcttctctccgctgctgctgaacgtggtgaagctcaacccgggcgaagcgatgttcctgttcgctgaaaccccgcacgcctacctgaacggcgtggcgctggaggtgatggctaactccgataacgtactgcgcgcgggcctgacgccaaaatacatcgacatccctgagctggttgccaacgtgaagttcgtggcgaaacctgctgcggagctgcttacgcagccggtgaaaaacggcgcagagctggacttcccgattccggttgacgattttgccttctcgctgcacgacctcagcgcagacgaaaccgccattgcacaggagagcgcagcgatcctgttctgtgtagaaggcgaagcgacgttgcataaagatagcgagcgtctggtgcttaaaccgggtgaatccgcctttgtcgcggccaacgagtcgcctgtccaggtgagcggcaccggtcgcctggcgcgtgtttttaataagctttag

SEQ ID NO: 117826 - DNA, 1527 bp, Enterobacter cloacae
atgaaaaaatcggtcgtagcggtaggagtgattgttgctttaggcgtgatctggacgggtgcttcctggtataccgggaaacagctggaaagccgtctggcagagatgatgacgcaggcaaacagcgagattaagcgcagcgcgcctgaagcaggtctggagctgaggtaccagaactaccagcgtggcgtgtttaccagccatatgcaggtggtggtgaagccggttgcgggtaatcagaacgcctggctgaaaccgggccagagcgtggtgctggatgaagtggtcagccacggtccgttcccgctggcgcagttgaaaaagtttaacctgatcccctccatggcatccgccagaaccgtactggtgaataacgaggtgacgaagccgattttcgatatggcgaaaaatgagtcgccgtttgagatcaatacccgcatcagctatgccggtgatacgcattccgacatcgacctgaaagccctgaattacgaacaaggcactgacaaagtcgccttcagcggcggtaatttccagcttgatgccgatcgcgacggcaagaatgtctccctgaccggcgatgccgccagcggcctggtgaattcagtcaatgaatataaccagaaggttcagcttactttcaacaaccttaaagccagcggcaatagccgtatgaccgattttgatgagcgtatcggcgaccagaaactgagcctcgataagatcgccattgcgatcgaaggcaaagagatggcggtgctggaaggcatggatctggacggtaagtctgacgtctccaaagacggtaaaagcatcaacacccagctggattacagcctgaaaagcctgaaagtacagaatcaggatctgggtaccggtaagctgtctctgaaaatcggcaacattgacggccaggcgtggcatgaattcagtcagaaatacagtaaagagagccaggctctgctgaccgatgccgccctgcaacagaacccgcaggcgtaccagcagcaggcgatgacggtgctgtttaataacctgccgatcctgctgaagggcgagccggtgattaccgttgcgccactgagctggaaaaacggcaaaggcgaaaccaacttcaacctgtcgctgttcctgaaggatccggccgctgcgaccggcgaaccgcagaccctggcgcaggaagttgaccgcagcgtgaaatcgctcgacagcaagctgaccatcccgatggatatggcgaccgagttcatgacgcagattgcgaaacttgaagggtatggtgaagaagatgcagggaaactggcaaaccaacaggtgaaaggcctggcggcgatgggccagatgttccgcatcacgaaggtggaagacaacaccatttccaccagcctgcaatatgctaatggccaggtgacgctcaacggcgacaaaatgccgctggaagagtttgtcggtatgtttggtatgccgacgctgggcattccggcaccggctgaaccggcagcgccgccggcagtaccgcagcagtaa

SEQ ID NO: 117827 - DNA, 1029 bp, Enterobacter cloacae
atggctgtagcgaaaaagatcaccatcaacgatgtcgcgctggcggcgggggtttccgtcagcaccgtttcgctggtattgagcgggaaggggcgcatctctcctgcaacgggtcagcgcgtcaacgaggccgttgagcagttaggctttgtgcgtaatcgccaggcgtcggcgttgcgcggtgggcaaagcggggtgatagggctgatcgttcgcgacctcacgtcgccgttttatgcagaactgaccgccgggcttaccgagtcgcttgaagcgcaggggcgaatggttttcctgctccacggtgggcgcgaaccggagcagctgctctccaggctggatatgctgctgacgcaaggggtggatggggtgatcgtggccggcgcgtccggcgtgggcagtgaattgtgtgagcgcgcggcgcagaaaggcgtaccgctggtgtttgcctcgcgcgccagctatctcgacgaagccgatacccttcggccagataacatgcaggccgcgcaaatgctgaccgagcatcttattcatcgcggccatcagcgcatcgcctggctcggcggtaaaagctcttccctgacgcgtgccgagcgggtgggcggttactgctccacgctcatcaaatacggcctgccgtttcacagcgaatgggtggtggagtgtgaatccagccagaaaaaagccgcggaagccatcggcacgctgcttcgcaacagcccgacgatcagcgcggtgatttgctataacgacgtcattgcgatgggggcgtggttcggtttgatccgcgccggacgccagagcggtgagggcggggtagaaacgttcttcggccatcaggtggcgctgggggcgtttgcggatgtcggtgaaaatgcattagacgatctccccatcgtctgggcgacgacgccggctcgtgagatggggtacaccctggcagacaggatcatgcagcgcattgaaaatacggacgtgcaggccgggcatcagattgtggctgcgcggttagtgacggtgaagtaa

SEQ ID NO: 117828 - DNA, 369 bp, Enterobacter cloacae
atgacgacgaaagcagcacaaaaaatatcgctgtgggagtttttccagcaactgggtaaaacctttatgctgcccgtggcgcttctctctttttgcgggatcatgctggggatcggcagctcgttaagcagccacgacgtcattaccctgatccctttcctcggaaatccggtacttcaggcgatcttcatctggagactattaagtcttttaacgaagtggcttgatgttggattgaaatgcggtaacttctgctatgttgccgcgatacgatttgtcatgtgcaatgaactaacgtcgtttcgcggtaactttatgccccatccatgccccatcaaaccaccctgtcgtcttcgatcacgctgttga

SEQ ID NO: 117829 - DNA, 318 bp, Enterobacter cloacae
atgggatttccttcaccggcggctgatttcgtagcaccgcgtttatctccggaaattatctgcgggatcggcatggacagccgcatcctcgaaacctcgtctggctttgcggttatcgagccgtgcaccagactggtacagaatcaggttctgctaatcctcagcggcggacggactcagtttgccagagtcatgggcagggcgctgatttgtgttgatggtgaagcgatagagggggaggctgcggaagaggttgaggtgatggggcgggtgacgttcttcatcaacagcgtgatcgaagacgacagggtggtttga

SEQ ID NO: 117830 - DNA, 240 bp, Enterobacter cloacae
atgccccgaatttcagatattcaggccgcctttattgcggccatagagcttaacccaaagggataccgctacctgagaacagacagcttcatagaaaagttgcgtggttttaactggcacttcacccgagccgacgccaatgcatggatagagcgcaatcagccaggcttcgctgacaagacgacagacggtagcgacaacaggtactggatcctgcgtaacatggggagggtgcactga

SEQ ID NO: 117831 - DNA, 336 bp, Enterobacter cloacae
atgggcatgaactcggatgcggcgtggtgcggcattgatggcgggttcgatatccctaaagatcgcaatgggcaggccctaatctggctggactatgaggttaatgccgacggatctgtgctgataaaaacttatcaccgggaatacccgacagcaccgatatttgcgaggaactcacgggaaggtttagtggatggagacccggtcgacattccggccgatcagtatgttagcgttcgtgtagagatgccacaaaacagtatctggaatcagcgtggcgctatttctgacgctcctctagaactgacagagcagcctatggacattcagccttag

SEQ ID NO: 117832 - DNA, 546 bp, Enterobacter cloacae
gtgaaaacgttaattcttttctcaacgcgtgacggacaaacgcgtgagattgcttcatatctggcttctgaactcaaagagctgggcatttattctgatgtggtgaacctgaatcgcacagagcagattgcctggcaggattacgaccgcgtggtcattggcgcttcaattcgttacggccatttccatccggcgctggatcgctttgtgaaaaagcatacggcggagctcgctcaactgcctggcgcgttttactcggtcaacctggttgcccgtaaagcggagaagcgtacgccgcagaccaacagctatacgcgcaagtttttgctaagttcgccatggcagcccgatatctgttctgtctttgctggcgcgctgcgttacccgcgttaccgctggtatgaccgctttatgatccgcctgatcatgaaaatgacgggcggggaaacggatacgcgtaaagaagtggtttataccgactgggcccaggtcgccagttttgcccgtgaaattgcgcgtttaacggacgatgcgcgggataaataa

SEQ ID NO: 117833 - DNA, 1452 bp, Enterobacter cloacae
atgcattttcgtgccattacccgaatcgttggattgctggtcatacttttctccgggacaatgatcattcccggactggtggcgctcatctaccgggacggcgcggggcgtgcatttacgcaaaccttttttgtcgcgctgacgattggctccctgctgtggtggccaaaccgccgtgagaaaggtgaactgaaatcccgggaggggtttctgattgtggtcctgttctggacggtactgggaagcgtgggtgcgctgccgtttatcttctccgaacaaccgaatctcaccgtcacggatgcgttttttgaatcgttctccggattaacgaccaccggcgccaccacgcttgtggggctggattcgctcccgcatgcgattctcttttaccggcagatgctccagtggttcggcggtatggggatcatcgtcctggcggtggctatcctgcccattctgggcgtcggggggatgcagctttaccgggcggagatgcccggcccgctgaaagataacaagatgcgcccgcgtattgcggagacggcgaagaccctgtggcttatctatgtcctgctgacggtggcctgcgcgctggcgctgtggtttgccgggatgcctgcgtttgatgccatcgggcacagctttgcgactattgctatcggcgggttctccacccacgatgccagcgtcggctacttcgacagcccgacaatcaataccatcattgccatctttttgctgatctcaggctgtaactacggtctacacttctcgttgcttagcggaaggagcctgaaggtgtactggcgcgacccggaattccggatgtttattggcgtccagctgaccctggtggttatctgtaccctggtactgtggttccacgatgtttataactcggcggtcacgaccctgaaccaggccttcttccaggtggtatcgatggcgacaaccgctggtttcaccacggacagtattgcgcgttggccactgttcctgccggtgctgctgttgtgctctgcgtttatcggcggttgcgcggggtcaacgggcggcggtctgaaggtgatccgcattctgctgctgttcaagcaggggaaccgtgagctgaaacgtctggtccacccgaatgcggtttacagtattaagctggggaaccgcgcgttgccggagcgcatcctcgaagcggtgtggggattcttctccgcttatgcgctggtctttattgtcagtatgctggcgattatcgccacgggcgtggatgatttctctgccttcgcctctgtggtggcaacgttaaacaacctggggccggggctgggcgtcgtggcggataacttcgccagtatgaacccggtggcgaagtggatcttaatcgccaatatgctgtttgggcgtcttgaggtctttacgctgctggtgctgtttaccccaacattctggcgtgagtaa

SEQ ID NO: 117834 - DNA, 615 bp, Enterobacter cloacae
atggaaagctggctgataccggccgagccggtcacctttgttgaggaaatcaagaaaagccgctttatcacgctgctggcgcataccgacggcgtggaggcggcgaaggcgttcgtcgagtccgtccgcgcgcagcaccccgatgcccgccatcactgtgtggcgtgggtcgcagggccgccagacgactcacagcagctcgggttttctgacgacggtgaaccggcgggtacggccggaaaaccgatgctatcccagttgatgggcagcggcgtgggtgaaatcaccgccgttgttgtccgctactacgggggcattttgttaggcaccggagggctggttaaagcctacggaggtggtgtccagcaagcgcttaatctgctgataacaacccgcaaaacgccacttacggaatatactttgttatgcgattacgcccagctatcgggtatcgaagcactgcttaaacagtttaacggtgtcatcgcacacagtgattatcaggcaatggtgcaattacgcgtggcgcttcctcaggcggaactggctgctttttcagcaaaactcgctgattttagtcgcggttcattgcaattactgccgattgaagaataa

SEQ ID NO: 117835 - DNA, 1332 bp, Enterobacter cloacae
atggactcactggcttcgctttataaaaatcatatcgttaccctacaggaacgtacccgcgatgtactggcccgcttcaagctggatgccctgctgatccactccggcgagctgatgaatacttttcttgatgaccatgcttatcccttcaaggttaacccgcagtttaaagcctgggtgcctgtcacgcaggttccaaattgctggctgctggtggatggcgtgaacaagccgaaactgtggttctacctgccggtcgattactggcacaacgtggagccgctgccgacctcattctggaccgaagaaattgacgtgatagcgctgccaaaagcagacggcattggcagccagctgccagcggcgcgcggcaacatcggctacattggaccggttcctgagcgtgcgctgggtctggatattccggcagataaactcaacccgaaaggcgtgctggattatctacactactatcgcgcctacaagaccgactacgaactttactgcatgcgtgaagcgcaaaaaacggcggtgaatggccaccgtgcggcgcatgaagcgttccagtccggtatgagcgagttcgatattaatcaggcctacctgacggcgaccggccaccgcgataccgacgtgccgtacagcaacatcgtggcgctgaatgaacatgcctcggttctgcactacaccaaactggatcatcaggttccggctgagatgcgcagcttcctgctggacgcgggggctgagtacaatggttatgcggcagacctgacccgtacctgggcggcgaatgcggacaccgattttgcgcaattgatcaaagacgtgaacgacgaacagctggcgctgattggcaccatgaaggccggaaccagctacgtggattatcacatccagttccatcagcgcatcgctaaactgctgcgtaagcatcagattgtcaaagacatgagcgaagaggcgatggttgagaacgatctgaccgggccatttatgccgcacggtatcggtcacccgctgggtttgcaggttcatgacgtcgcgggctttatgcaggatgataccggtacgcacctggcggcgccgtctaaatatccttatctgcgctgcacccgcgttctggcgccgcgtatggtattgaccatcgagccgggcatctactttattgaatccctgctggcgccgtggcgcgaagggcaattcagcaagcacttcaactgggagaaaattgaagcgctgaagccgtatggcggcattcgtatcgaggataacgtggttattcacgagagcagcattgagaacatgacgcgagatctgaagctggcctga

SEQ ID NO: 117836 - DNA, 2190 bp, Enterobacter cloacae
atgctctacaaaggcgacaccctgtacgtagactggctggaagatggcattgccgaactggtgttcgatgcccccggctcagtgaacaagcttgataccgcgacggtggccagtcttggccaggcgctggatgtacttgaaaagcaatcagatttaaaggggctgctgctgcgctccaacaaagcggcctttatcgttggcgcggatatcaccgaattcctgtcgctgttcctggtgcccgaagaacagctgagccagtggctgcactttgccaacagcgtttttaatcgtctggaagatctgcctgtcccgaccctttccgccgttaacggctacgcgctgggcggtggctgcgagtgcgtgctggcgaccgactaccgtctggcgacgccggacctgcgcatcggcctgccggaaaccaagctgggcatcatgccgggctttggcggttccgtgcgtatgccgcgcatgctgggtgccgacagcgcgctggagatcattgccgcgggtaaagatgtcggcgcagaacaggcgcagaaaatcggcctggtggacggcgtggttaagcctgaaaaactgattgagggtgctatcgccattctgcgtcaggcgattaacggcgatctcgactggaaagccaaacgtcagccgaaactggagccgttgaagctctgcaaaattgaagccaccatgagcttcaccatcgccaaaggcatggtgatgcagacggcgggtaaacactacccggcgccgatcacggcggtgaaaaccattgaagcggcagcccgtctgggccgtgatgacgccctgaagctggaaaaccagagctttgtcccgctggcgcacaccaacgaagcccgcgcgctggttggtatcttccttaacgatcagttcgtgaagggcaaagccaaacaacttaccaaaaacgttgaaacgccaaaacacgcggcggtactcggcgcgggcattatgggtggcggcatcgcctaccagtctgcctggaaaggcgtgccggtggtgatgaaggacatcaacgagaaatccctgacgctgggcatgaccgaagcggccaagctgctgaataaacagcttgagcgcggcaaaattgacggtctgaagctggcaggcgtgatctccaccatccagccagtgctggaatacagcggtttcgaccgtgtggacgtggtggttgaagcggtcgtcgagaacccgaaagtgaaaaaagcggtactggccgaaaccgaagacaaggtgcgtccggaaaccgtgctggcctctaacacctccaccattcctatcagcgaactggcgagcgtgctgaagcgtccggaaaacttctgcgggatgcacttctttaacccggtgcatcgcatgccgctggttgaagtgatccgtggggaaaaaacctccgacgaaaccatcgccaaagtggtggcgtgggcgagcaagatgggcaaaacgccgatcgtggttaacgactgcccgggcttcttcgttaaccgcgtgctgttcccgtacttcgccggtttcagccagctgctgcgcgacggcgcagacttccgcaaaatcgacaaggtgatggaaaaacagttcggctggccgatgggcccggcgtatctgctggacgttgtcggcatcgacactgcccatcacgcgcaggcggtgatggcgacgggcttcccgcagcgcatgcagaaagactatcgcgacgccattgacgccctgttcgacgccaaccgctttggtcagaaaaacggtctgggcttctggcgctataaagaagacagcaaaggcaaaccgaaaaaagaagaagatccggcggtggatggcctgctggccgacgtcagtcagccgaaacgcgacttcaccgacgatgagatcatcgcccggatgatgatcccgatgatcaacgaagtggtgcgctgcctcgaagaaggcattatcgccagcccggcagaagcggatatggcgctggtatacggcctcggcttccctccgttccacggcggcgcgttccgctggctggatacgctcggcagcgcccgctatctcgatatggcacagcagtaccagcacctcggtccgctttatgaggtgccggaagggctgcgtaacaaagcgcgccataacgaaccctactatccagcagttgagccagcccgtccggttggcgcactgaaaacggcttaa

SEQ ID NO: 117837 - DNA, 1164 bp, Enterobacter cloacae
atggaaaaggttgtcattgttgatgcgattcgcaccccgatgggccgttcaaaaggcggcgcattccgtaacgtgcgggcggaagatctctccgcgcacctgatgcgtagcctgctggcgcgtaacccggcgctggacccagcagcgctggacgatatttactggggctgcgtgcagcagacgctggagcagggctttaacatcgcccgtaacgcgtccctgctggcggagatcccgcattcggttccggccgtcaccgtcaaccgtctttgcggttcgtcgatgcaggcgctgcacgacgcggcgcggatgatcatgaccggcgatgcgcaggcctgtctggtgggcggcgtggagcacatgggccacgtgccaatgagccacggggtcgatttccatccaggcatgagccgcaacgtggcgaaagccgccggtatgatgggtctgaccgccgagatgctctcccgtctgcacggcatcagccgtgagatgcaggatgcgtttgccgcgcgctcgcatgcccgcgcctgggccgccacgcagtctggtgcctttaagaatgagatcatcccaaccggcggtcacgacgcagacggcgtactgaagcagttcagctacgacgaagttatccgtcctgaaacaaccgttgaagcgctttctaccctgcgtccggcgtttgatccggtcaccggtacggtaacggcgggcacctcgtctgccctgtccgacggtgccgccgcgatgctggtgatgagcgagagccgcgcccgcgaattaggcctgacgccacgcgcccgcgtgcgttcgatggcagtcgtgggctgcgatccttccatcatgggctacggcccggttccggcatcaaaactggcgctgaaaaaagcggggctgagcgcaagtgatatcgatctctttgagatgaacgaagcgttcgccgcgcagatcctgccgtgcattaaagatctggggctgatggatcagatcgacgagaagattaacctcaacggcggcgcgatcgccctcggtcacccgctgggctgctccggggcgcgtatcagtaccacgctgattaacctgatggaacgcaaagatgcccagttcggactggcaacgatgtgtattggattgggtcagggtatcgcgacggtgtttgagagggtgtaa

SEQ ID NO: 117838 - DNA, 2070 bp, Enterobacter cloacae
atgtctgagaaaactttcctggtggaaatcggcactgaagagctgccaccaaaagccctgcgcagcctggctgaatctttcgctgcgaacgtcactgctgagctggataacgctggcctggcgcacggtaaaattgagtggtttgctgcgccgcgtcgtctggcgctgaaagtggcaaacctggcggcgtcccagccggatcgcgaagttgaaaaacgtggcccggccattgctcaggcgttcgacgcggaaggcaagccgagcaaagcggcagaaggctgggcgcgcggctgcggcatcaccgttgatcaggctgagcgtctgaccaccgacaaaggtgaatggctgctgtaccgtgcccatgtgaaaggcgaaagcgccgaagcgctgctgcctgacatgatcgcgacctcgctggcaaaattgccgattcctaagctgatgcgctggggcgcgtccgacgtacactttgtgcgtccggttcacaccgtgaccctgctgctgggcgataccgttatcccggcgaccattctgggcgtggcgtccgatcgcgtgatccgcggccatcgctttatgggcgagtcggagttcactatcgacaatgctgaccagtacccgcagatcctgctggagcgcggcaaggtcattgctgactacgaacagcgtaaagccaaaatcaaagcggacgcagaagacgcggcgcgcaaaattggcggtaatgccgatctgagcgacagcctgctggaagaggtgacttcgctggtcgaatggccggttgtactgaccgcgaaattcgaagagaaattcctggccgttccggcagaagcgctggtttacaccatgaagggtgaccagaagtacttcccggtttacgccaacgacggcaagctgctgccaaacttcatcttcgtggcgaacatcgaatcgaaagatccgagccagattatctccggtaacgagaaagtggtgcgtccgcgtctggcggatgccgagttcttcttcaataccgaccgtaaaaaacgtctggaagacaacctgccgcgtctgcaaaccgtactgttccagcagcagctgggtacgctacgcgacaagaccgaccgtatcgcggagctgtccggctggattgcccgtgaaattggcgccgacgttaaccacgctacccgtgcgggcctgctctccaagtgcgacctgatgaccaacatggtgttcgaatttaccgacacccagggcgtgatgggcatgcactacgcgcgtcacgatggcgaagcggaagacgtggcggtagccctgaacgagcagtatcagccgcgctttgccggtgacgatctgccgtctaacccggttgcctgcgccgtggcgattgccgataagatggacaccctggcgggtatcttcggtatcggtcagcatccgaaaggcgacaaagacccgttcgcgctgcgtcgtgctgcgctgggcgtgctgcgaatcatcgtagagaagaacctcaacctcgatctgcaaacgctgaccgaagaagcggtacgtctgtacggcgataagctgaccaacgtgaaggttgtggatgatgttatcgactttatgctcggtcgtttccgcgcgtggtatcaggacgaaggttactccgttgataccattcaggcggtgctggcgcgtcgtccgacccgtccggcagatttcgatgcgcgtatgaaagcggtatcccacttccgtacgctggaagcggcgtctgcgctggccgcggccaacaagcgtgtatccaacatcctcgcgaaatccgacgagacgctgaacgagcgcgtcaacgctgcaaccctgaaagagccggaagagatttctctggcgatgcaggttgtggtgctgcgcgacaagctggagccgtatttcgcggaaggtcgctaccaggaagcgctggtggagctggcggagctgcgtgacgtcatcgacgccttcttcgagaaggtgatggtgaacgtggaagataaagagctgcggattaaccgtctctcgatgcttgagaaactgcgtgagctgttcctgcgcgtggcggatatttcgctgctgcaataa

SEQ ID NO: 117839 - DNA, 912 bp, Enterobacter cloacae
atgcaaaagtttgataccaagaccttccagggcctgatcctgaccttacaggattactgggctcgtcagggctgcaccattgttcaacctttggacatggaagttggcgcaggcacctcacacccgatgaccagcctgcgcgcgttagggccagagccaatggcgaccgcctatgtgcagccatcccgtcgtccgaccgatggccgttacggcgaaaacccgaaccgtttgcagcactactatcagttccaggtggtgattaagccatcacccgacaacattcaggaactgtacctcgggtcactgaaagagctgggtatggatccaaccattcacgacattcgtttcgtggaagataactgggaaaacccaacgctgggtgcctggggtctgggttgggaagtgtggctgaacggcatggaagtgacccagttcacttacttccagcaggttggcggtctggaatgtaaaccgattaccggcgaaatcacctatggtctggaacgtctggccatgtacattcagggcgtagacagcgtttacgacctggtctggagcgacggcccgctgggtaaaaccacctacggcgacgtgttccatcagaacgaagtggagcaatccacctataacttcgaatacgcggacgtggacttcctgttcacctgcttcgagcagtacgagaaagaagcccagcagctgctggcgctggagactccgctgccgctgcctgcctacgagcgtattctgaaggctgcccacagcttcaacctgctggatgcccgcaaagcgatctccgtgactgaacgtcagcgctacattctgcgtattcgtaccctgaccaaagccgttgcagaagcttactacgcgtcccgtgaagcccttggcttcccgatgtgcaaccgaaacaaataa

SEQ ID NO: 117840 - DNA, 306 bp, Enterobacter cloacae
atgatgatgaagcgtggggtgtcactctttctgctgctcttattaacaggatgcagtgcttctgaggagatacctgtccaaaaagcgcagcaggggaaaatgagcccggagcgttccctgaatatggaacagctgtgcagggatcaggcggctcaccgctataattccgaagcacagaaaattcatataaacggcttcgagcgctttcagggcagctatgaactgaaaggctatacggcgcgtaaagagggctttgtctgctcttttgatgcagacggccagtttttacatctctcaatgcgttaa

SEQ ID NO: 117841 - DNA, 996 bp, Enterobacter cloacae
atgcagtcaaaaattaactggattgataacctgcggggaatagcctgtctgatggtggtgatgatccacacaacgacctggtatgtcacgaacgcgcacagtatcagccctgttaactgggatgtcgccaatattctgaactcggcctcccgcgtgagcgtcccgctgttctttatgatttccggttttctcttttttggcgagcgtagcgcgcagccaagacatttcatccgtattgtctcctgtctgctgttttacagcgccatttcgctgctctatatcatcctgttcacttcaattaacgctgaacgttccctgctcaatttgttgcaaaaaccggtgttctatcatctgtggtttttcttcgcgataatcgttatctatctggtgtcaccgttaattcaggtaaaaaacgtcagcggtaaaatgctgctggccttgatggtaataatcgggatcgtggccaacccgaataccgtttcacagaaaattgatggctttgaatggctgcccgttaacctttatatcaccggggatacgttttattacgtgctgtacggcatgctggggcgcgccattggcatgatggagacgcaaaagcgaggaataaactggctatgcgcggccgcgtttctcgtcggtgtgtttattatatctcgcgggacgctgcatgagctgcaatggcgcggcaactttgccgatacctggtatctctactgcgggccgatggtctttatctgcgcgatctctctgctgacgctggttaaaaacaccctgaatgcccgcccgcttccggtgctggggtttatctctcgccactcgctgggcatttacggttttcacgcgctggtgatccacgccctgcgcacccgcggcgttgagcttaaaagctggccggtgctggatattgtctggatatttaccgttacgctggttgtcagcctgctgctgtcaatgttgctgcaaagaatcgatacgcgcaggtttgtaagctaa

SEQ ID NO: 117842 - DNA, 1455 bp, Enterobacter cloacae
atgtatatcgggatcgatcttggcacgtcgggggtgaaagccatcctgttaagcgagcagggcgatgtattagccacgcacactgaaaagttgcaggtttcacgtccgtatccgctttggtcggaacaagatccggagcagtggtggcaggcgacggaccgtgcgatgaaagccttaggcgagcagcacagcctgcgcgacgtgaaggcactgggcattgccgggcaaatgcatggcgcaacgttgctggatagtcagcatcgcgttctgcgcccggctattctctggaacgatggccgctgtgcggaagagtgcgcgatccttgaggagcgtgtgcctgcgtcccgcgaaattacgggcaacctgatgatgcccggttttaccgcgccaaaactcctgtgggtgcagcgccatgagcctgagattttccgtcaggtggcgaaggttctgttgccgaaagactacctgcgttttcgcatgacaggggattttgccagcgacatgtctgacgccgcgggcacgatgtggctcgacgtggcgaaacgggactggagcgaggcgatgctggatgcctgccagctgacgcgcgaccatatgcctgcgctgtttgaaggcagtgaaatcacgggggctttacagccttctgttgctgaacgctggaacatgccagccgtacctgtcgtcgccggcggcggcgataatgcggcgggtgcggtcggcgtggggatggtcgaggcagggcaggccatgctctcactcggtacctccggcgtctattttgccgtcagtgacgggtatcgtagcaaccctggaagcgccgtacacagcttctgccacgcgttgccgggtaaatggcatttgatgtcggtgatgctgagcgcggcttcctgcctcgactgggcggcaaagctaaccggaatggcggacgtcccggcgcttatcacagcggcacagcaggcagatgataatgccggtgcggtttggtttttaccgtacctttccggcgagcggacgccgcataacaacccggaagcgaaaggggtgttcttcggtcttacccatcagcacggcccggcagagcttgcgcgcgcggtgcttgaaggcgttggctatgctctggcggacggaatggatgtcgtgcatgactgtggactgacgccatccagcattacgttaattggcggcggtgcacgaagcagctactggcggcaaatgctttccgatatcagcgggttgcagctggactatcgtacgggaggcgatgtcggcccggcgctcggtgcggcacggctggcgcaaattgcgctgaacccggataaaccactgcaccagcttttgccccagctgccgcttgaacggcagcatcgtcctgatgcgaaaaatcatgctcgctatgctgaaagacgagacgtgttccgcaaaatctatcagcagcttttgccgctaatgtcataa

SEQ ID NO: 117843 - DNA, 1386 bp, Enterobacter cloacae
atgtctattcactattactccagaagcaagaccacgccgcataccctgattatggagctcaatatgcaagcttatttcgaccaactcgatcgcgttcgtttcgaaggcacgaaaacgaccaatcctttagcatttcgtcactacaacccggatgagctggtgctgggtaagcgcatggaagatcacttgcgctttgccgcctgctactggcacaccttctgctggaacggtgccgatatgttcggcgtgggctcttttgaccgtccatggcaacagccgggcgaggccattgagctggcgaagcgtaaagccgacgtcgcgttcgagttcttccataagctgaacgtgccgtactactgtttccacgatgtggacgtgtcgccggaaggggcatcgctgaaagagtatctgaacaatttcgcgcagatggtcgacgtactggctgaaaaacagcagcaaagcggcgtcaagctgctctggggtacggctaactgctttaccaatcctcgctatggcgcgggtgcggcaaccaacccggacccggaagtcttcagctgggcggcaacccaggtcgtgaccgcgatgaacgccacgcatcagctgggcggtgagaactatgtactctggggcggtcgtgaaggctatgaaacgctgctgaataccgacctgcgtcaggagcgtgagcagattggtcgctttatgcagatggttgtggaccacaaacacaaaatcggtttccgcggcacgctgctgattgagccaaaaccacaggagccaaccaagcatcagtatgattatgatgtcgccaccgtgtatggcttcctgaagcagtttggtctggaaaaagagatcaaagtgaatattgaggctaaccacgctaccctggcgggccactcgttccatcacgaaattgcctctgcgattgcactgggcatcttcggctctgtcgatgctaaccgtggtgatccacagctgggctgggataccgaccagttcccgaacagcgtggaagagaatgcgctggtgatgtacgagatcatcaaagcgggcggtttcaccaccggcggcctgaacttcgacgccaaagtgcgtcgccagagcaccgacaaatacgatctgttctacgggcatattggcgcgatggacaccatggcgctggcgctgaaagtagcggcccgtatgattgaagacggtgagctggataagcgcgtggcgaagcgctacagcggctggaacagtgagctgggccagcaaattttgaaaggtcagttatcgcttgcggagatcgcgaagtacgctgaacagcatcagcttgcgccgcagcatcagagtggccatcaggagctgctggaaaacctggtcaatcactacctgttcgataaataa

SEQ ID NO: 117844 - DNA, 993 bp, Enterobacter cloacae
atgaagataaagaacctgaccctaacgctctgcactactctcctgcttgcaagctttgtcggacacgccaaagaggtcaaaatcggcatggcgattgatgacttacgcctggagcgctggcaaaaagatcgcgatatctttgttaaaaaagcggaatctctcggcgcggaggtgttcgttcagtccgctaacggcaacgaagagacgcaaatgtcgcaaatcgagaatatgatcaaccgtggcgtcgatgtgctggtcattatcccgtataacggccaggtattaagcaacgtggtgaaagaagcgaaacaggaagggataaaagtcctggcttatgaccgcatgattaataatgccgatattgattattatatttcgttcgacaatgaaaaggtgggcgaattacaggctaaaagcctggtcgcaaaagtgcctcaggggaattatttcctgatgggcggctcgcccgtggataacaacgccaaactgttccgccagggacaaatgaaagtgctgaagccatatatcgacgagggcaaaattaaagtcgtcggcgaccagtgggctgacggttggttaccggaaaacgcgctgaaaattatggaaaacgcgttgaccgcaaataacaacaaaatcgatgcggtggtggcctctaacgatgccactgcgggtggcgccattcaggcgctgagcgcgcagggtctggccgggaaagtcgctatttccggccaggacgccgaccttgcgggtgtaaaacgcatcatcgcgggtacccagaccatgacggtgtataagcccattaccgagcttgccaatacggccgccgaaattgccgttgagctgggcaatggccagcaacctaaagcagacgcgacgttaaataacggcctgaaagacgtacctgctcgcctgcttacccctatcgaagtcaacaaagagaatattgacgccaccgtggtgaaagacggtttccataagaagagtgaactgtaa

SEQ ID NO: 117845 - DNA, 1542 bp, Enterobacter cloacae
atgtcttatttacttgaaatgaaaagcatcaccaaagccttcggggcggtgaaagcagtcgataacgtaagcctgcggctgaatcccggcgaagtgatgtcgctgtgcggcgaaaatggctcgggaaaatccacgctgatgaaagtgttgtgcgggatctacccgcacggcagctacgagggcgaaatcgtttttgccggtgaggtgctccaggccacgcacattcgcgataccgaacgtaaaggcatcgctatcattcaccaggagctggcgctggtgaagcaccttaccgtgctggaaaatatctttctcggtgccgaactctcacgccacggcgtactggattacgacaccatgacgctgcgctgcgaaaaactgctggctcaggtgagcctggctatctcaccggatacgcgcgtgggcgacttaggtttaggccagcagcagctggtcgagatcgccaaggcgctgaacaaacaggtgcgcctgctgatcctcgacgaaccaaccgcctcactcaccgaacaggaaaccgccgtactgctcaatatcatccgcgatctgcaaaaccacggtatcgcctgcatctatatttcgcacaagctcaatgaggtgaaagccatttccgacaccatctgcgtcatccgcgacgggcagcacatcggcacgcgtgaagcagaaggcatgagcgaggatgacatcatcaccatgatggtgggtcgcgaactcaccgcgctgtatcccaacgaaccgcacaccatcggcgaagagctcctgcgcgtggaaaacctgacggcgtggcatcccgttaaccgccatatcaagcgcgtggataacctctccttctcgctgcaccgcggcgaaattctcggcattgcgggtttagtgggtgcgggaagaaccgaggccgtgcagtgtctctttggcgtctggccggggcgctgggaaggcaaaatttatatcgacggtcagccggtaaaaatcgacaactgccagcaggctattgctaagggcattgccatggtgccagaagaccgcaaaaaagacggcatcgtgccggtaatggcggtgggaaaaaatatcacgctggcggcgctcagccagttttccggcgcgctgagcagcctggatgatgccgcagaacagcagtgtattctccagtcgcttgcccggcttaaggtgaaaacctcctcgccggagctggcgataggacgcctgagcggcggcaaccagcagaaagcgattctggcgcgctgcctgctgcttaatccgcgcattttaattctggacgaacccacccgcgggatcgatatcggcgcgaagtatgaaatctacaagctgatcaaccagcttgtgcagcaagggattgccgtcattgttatctcgtccgaattgcctgaagtgctggggctgagcgaccgcgtgctggtcatgcatgaagggaaactcaaagccaacctgaacaaccagaacctgacgcaagagcaggtgatggaagctgccttaaggagcgaacgccatgtcgaaaagcaacccgtctga

SEQ ID NO: 117846 - DNA, 1182 bp, Enterobacter cloacae
atgtcgaaaagcaacccgtctgatatcaaagtcgctgttccgacgcccggtgcgttcgcaggacttaaatcgctgaatctgcaagtttttgtaatgattgccgccattatcgtgatcatgttgttctttacctggatgaccgatggctcctatttaagcgcacgtaacgtctctaacttgctgcgtcagaccgccatcaccgggatcctggcggtggggatggtctttgtgattatctcagcggaaattgacctgtcggtagggtcgatgatgggtctgctcggcggcgtggcggcaatttttgacgtctggctaggctggccgctgccgctgacgattgcggtcacgctggtgctaggtctgctgctgggggcgtggaatggctggtgggtggcctaccgtaaagtcccgtcgtttatcgtcaccttagcggggatgctggccttccgcggcattctgattgggatcaccaacggcaccaccgtctccccgaccagcgcctcgatgtcccagattggccaaagctacctctctgatggcgtcggttttacgatcggcgtggttgggctgatggcgtttgtcgcgtggcaatggcgaggacgcatgcgtcgccaggcgctggggctggcctcgcctgcctcaacctcggttgtcggccgtcaggcgcttactgcggtgattgtgctgggcgccatctggctgttaaacgattatcgcggcgtcccaacgcccgttctgctgctggcgctgttgctgttaggtggaatgtttatggccacacgtaccgcattcggtcgccgtatttatgccatcggcggcaatctggaagccgcgcgtttatctggtatcaacgtagaacgcaccaaactcgccgtctttgccatcaacggcctgatggtggccatcgcggggctgatcctcagttcgcgactgggggcgggctccccgtctgcgggtaatattgccgagctggacgccatcgccgcctgcgtgattggcgggaccagcctcgccgggggcattggcagcgtggcgggggcggtgatgggcgcatttattatggcttcgctggataacgggatgagtatgatggacgtgccgatgttttggcagtatatcgtcaagggtgccattcttttgctggcagtctggatggactctgccaccaagcggcgcgcctga

SEQ ID NO: 117847 - DNA, 1179 bp, Enterobacter cloacae
atgtttgaaaagcgtcaccgcattacgttgttattcaatgccaacaaagcctatgaccggcaggtggttgaaggggttggcgaatatttgcaggcgtcgcaatccgaatgggatattttcatcgaagaagattttcgtacccgtctggagaacatcaaagactggctgggagacggggtcatcgctgactttgacgaccccgtgattgaacagttgctgagtggcgtcgacgtgcctatcgtgggcgttggcggctcttaccatacaccggaacattacccccccgttcactatatcgccacggataaccatgctctggtcgagaccgccttcctccatttaaaggagaaaggcgtacatcgttttgcgttttacggattgcccgccaccagcggaaagcgctgggcgatggagcgtgaatatgccttctgccagctggttgcccaggagaagtatcgcggcgtcgtttatcaggggctggaaaccgcgccagaaaactggcagcacgcacaaaatcgcctggctgactggctgcaaactctgccaccccagacagggattatcgccgtgacggacgcccgcgcccgccacgtattacaggtgtgtgaacatttgcatattccggtgcctgaaaagctgtgcgtgattggtattgataacgaagagcttacgcgctatctgtcgcgcgtggcgctctcatccgtggctcagggtacccgtcagatgggctatcaggccgcaaagctgctgcacagactgttagccaacgaatccctgccgctccagcgtctgctggttccgcccgttcgcgtggtcgagcgtcgctcaactgactaccgctccttaaacgatccggccgtgattcaggcgatgcactacattcgcaatcatgcctgcaaagggattaaggtcgatcaggtgctcgattcggtcggcatttcacgttcgaatctggagaagcggttcaaagaggaagtcggtgagacgattcacgccgtgatccatgcggaaaagctggagaaagcgcgcagtctgctgatctccacctcgctgtcgatcaacgagatttcacagatgtgcggctatccgtcgcttcagtatttctattcggtgttcagaaaagagtatgacaccacgccgaaggagtaccgggaacggtacagtgaagtcctgctctag

SEQ ID NO: 117848 - DNA, 825 bp, Enterobacter cloacae
atgatatcgactcccattcgacgatatggggccgcgatactcatgttactcaccatggcattttcaggtgaggtgcttgcaaagacgcacgcggatacaacgagtaagaaagcccacgtaataaagacgacaagcagtaaggttagcagtaaacaagagtattctcgcaatagtgcaaagagtagttcacttcctgatttgcgaaaatacccttccgggacaccaaggaaaaaagcgtttctccggacggtaatgccttacattaaaagtcaaaatgccgcgattactgcggatcgtaactggctgatctccaaacagtacgatagccgctggtcgccgtctgagcgcactcgcctgaaagacatcgccaaacgctataaagtgaagtggagcgggaacacgcgtcgtgtgccgtggaacactctgttagagcgtgtggacattattccaggcagtatggtcgcgacaatggccgccgccgaaagcggttggggcacctcgaagctggcacgcaacaacaacaatctgtttggcatgaaatgcgcaaaaggtcgttgtactaatgcacccggcaaggtgaagggctattcacagtttgaatcggtgaaagattccgtgaatgcctatgtggtgaacctgaacacccacccggcctactcctcgttccgtaagtcacgcgctcagctgcgtaaggcggatcaggaagtaacggctacggcgatgatccacaagctgaaaggttattccactcagggacagcgttataacaattacctgttctccatgtaccaggataaccagcgtctgattgccgcacatatgtaa

SEQ ID NO: 117849 - DNA, 2031 bp, Enterobacter cloacae
atgaaacgcactgcattagctgttctgatgttacccgcattcgcgcatgccgactggtcatcgccgggatttaacgcgtttagcgctgaaggtaccggcgtctttaccagccaggcaacgcttgcgaagggtacccgcccgctgacgttgagtcttgataacgcgtgctggcagccgacaggtgccattaaactcaacgagatgctgtcgctcaaaccctgcgaagggaccccaccgcagtggcggttattccgtgacggcgtttatcagatgcgtattgatacgcgctcgggaacgccgacgctgatgttgacggtacaaagtgcggcgccacagcctgtcgcaaacgttacccgccagtgcccgaagtgggacggcaaaccgctcacgatcgatgtcgttaacacctttccggaaggcacggtggtgcgtgatttttacagcaaacagaccgcgaccgttcaaaacggcaaagtaattcttcagccagccgccaacagcaatggcctgctgctgcttgagcgcgccgagacggacaaacccgcgccattcagctggcaaaacgccaccgtctatttcgtgctgaccgatcgcttcgtaaatggcgaccccaccaacgacaacagctatggccgccataaagacggtatgcaggagattggtactttccacggcggcgatctgaaagggcttaccagcaaactggattaccttcagcaactgggcgtgaatgcgctctggataagctcaccactggagcaaatccacggctgggttggcggcggcaccaaaggggatttcccccactacgcctatcacggctattacactcaggactggacgaaactcgacgccaacatgggcagcgaagatgatttacgccagcttgtcgacgacgcgcacaggcgcggtatccgcgtcctgtttgacattgtcatgaaccacgcgggttatgcgacgcttgcagatatgcaggagtatcagtttggcgcgctctatttgcagggcgatgagctgaaaaaaaccctcggcgagcgctggactgactggaagccaggcgcgggtcaaagctggcacagcttcaacgattacatcaacttcagtgacaaagccgcatgggaaaaatggtggggtaaaaaatggatccgtaccgatatcggtgattatgacaacccgggctttgacgatctgaccatgtcgctagcctttctgccggatctgaaaacggaatctaagatcccgtcaggtttgccgaacttttatcaacacaagcccgacaccaacgcgaaagtgatgacgaatttcacgccgcgagattacctgacccactggctcagccagtgggtacgtgactacggcatcgacggcttccgggtcgataccgctaagcacgttgagcctgaagcctggcagcaactgaaaaaccaggccagccaggcgctggccgcgtggaaagccgccaacccggacaaaaaactcgacaatgcgccattctggatgaccggtgaatcctggggccacggcgtgatgcagagcgattattaccgccacggtttcgatgcgatgatcaactttgactatcaggagcaggcggcgaaagcggtggactgtctggccgatatggatttgacctggcagcaaatggcagaaaagctgcaaagttttaatgtgctgagctatctctcctcccatgatacgcgtctgttccgtgaagggggccagcgcgccgctgagttactgctgctggcaccgggaagcgtccagatctattacggcgatgaatcagagcgtccattcggcccgacgggctccgatccgctacagggaacccgttcggatatgaactggcaggacgtcacgggtaaacaggcgttaactgtcgcccactggcagcttctggggcagttccgtgcccgtcatccggcggtgggtgaaggcaagcaaacaacgctgtcaatgaaagagggctacggctttgtgcgcgagcacaagggcgataaggtgatggtggtgtgggcgggtaatcaatag

SEQ ID NO: 117850 - DNA, 1254 bp, Enterobacter cloacae
atgacgttttcactattcggcgacaaatttacccgccattcaggcattacccgcctgatggaggacctcaacgacgggctgcgcaccccaggcgctatcatgcttggcggcggaaacccggctcaaattccggagatgaacacctacttccagacgctgctggcagagatgctggaaaacggtaaagcaaccgatgcgctatgtaattacgacggccctcagggtaaaacagaactactgacgcttctggcggcaatgctgcgggaagcgctgggttgggatatcgaaccacagaatattgcactgacaaatggcagtcagagcgcgtttttctacttattcaatctgttcgccggacgccgcgccgacggcaccacgaaaaaagtgctgttcccgctggcaccggagtatatcggctatgccgatgccggcctcgaagaagacctgtttgtttccgcacgtccgaatatcgagttgctgccagagggccagttcaaatatcacgtcgattttgaacatctgcatatcggtgaagagacgggcatgatctgcgtatcacgtcccaccaacccgacgggcaacgtgatcaccgacgacgagctgatgaagctggatgcgctggcgaatcagcacggcatcccgctggtgatcgataacgcctatggcgtaccgttcccggggatcatcttcagcgaagcgcgtccgctatggaacccgaacatcatcctctgcatgagcctctccaagctgggcctgccgggcagccgttgcggcattatcattgctaacgagaaaatcatcaccgccattaccaatatgaacggcattatcagcctttcccctggcggcatcggcccggcgatgatgtgcgagatgatcaggcgtaacgacctgctgcgcctgtcgaatgaggtgattaagccgttttactctcagcgcgttcaggaaactatcgccatccttcgccgctacttacccgaagaacgctgcctgatccataaaccggaaggggcaattttcctgtggctgtggttcaaggacctgcccattacgacagagctgctttatcagcgtctgaaaaaacgtggcgtgctgatggtgccaggggattacttcttcccggggctggataagccgtggccgcacacgcaccagtgcatgcgcatgaactacgtcccggacccggaaaaaatcgaagcgggtgtgaaaattctcgccgaagagattgagaacgcctggcgcgaggccggttaa

SEQ ID NO: 117851 - DNA, 456 bp, Enterobacter cloacae
atgaaccgatttattctgacggatccagaaaaatgtatcgggtgccgcacctgtgaggtggcgtgcatgatgtcgcatcaaagcagcgccacgccagaagcgtttacgtcacggatccgcgtggttaaggggggaaccttcactacggcggtgggctgccaccagtgtgaagatgcgccctgcgcgaatgtctgcccgacgggggccattcaccgcgctgcgggagcctggctcgttgagcaggctcgctgtatcggctgcaaaagctgtatggtggcgtgcccgttcggggcaatgcaggttcgggtcgtggaagatcgcgttcaggcgctgaaatgtgatttgtgcgcgcatcgcgagggcggtcccgcctgcgtcgaagcctgtcccacccacgcgctgcgctgcatagaccccgccagattacgcgcggaacggctgcgtaatctggcctga

SEQ ID NO: 117852 - DNA, 819 bp, Enterobacter cloacae
atgagcataaaagagagcgaaatgacgcaagaaaaagagaggccagcaggtagccagagcttgtttcgcggcctgatgctgattgaaatcctcagtaactatccgaacgggtgtccgcttgcgcatttatcagaactggcggggctgaataaaagcaccgtgcaccggttattgcaggggttgcagtcgtgcgggtacgtgacgccggcgccggcggcagggagctatcgtctgaccaccaaatttatcgccgtcgggcaaaaggcgctttcatcgctcaatattattcacgtggcggcgccgcacctcgaggcgctgaacattgccaccggcgaaacggtcaacttctccagccgtgaagatgaccacgcgatcctgatttataagcttgagccgacaaccggtatgctgcgcacgcgcgcatatatcggccagcatatgccgctctattgttctgcgatgggcaaaatctatatggcgtttggccatcaggattacgtggcgagctactgggaaagccaccaggaacagatccaacctttgacccgcaacaccatcaccgaactgagcgcgatgtatgatgagctggcggaaattcgcgatcacagtatggcgatggataaagaagagaacgagctgggtgtgtcatgtatcgccgtgccggtctttgatattcacgggcgcgtgccctatgccatctccatttcgctgtcgacgtcgcgcatgaagcaggtgggtgagaaaaacttgctaaaaccgctgcgtgacacggcggaagctatctcgaaagaactggggtttaacgtgcgcgaggcgtaa

SEQ ID NO: 117853 - DNA, 999 bp, Enterobacter cloacae
atgaaagtgaccttcgaagagttgaaagcggcgttcaatcgggttctgctcgatcgcggtgtaaaagcggataccgcagacgcctgcgccgagatgttcgcccgcaccacggagtccggcgtttattcacacggcgtcaaccgcttcccgcgatttattcagcagcttgacgcaggcgacatcatccctgacgcccagccgaaacgcgtaacgacattaggcgccatcgaacagtgggatgcccagcgttccatcggcaacctgacggcgaagaagatgatggaccgtgctaccgagctggcgtccgatcacgggatcggcctggtggcgctgcgtaacgctaaccactggatgcgcggcggcagctacggctggcaggcggcggagaagggctatatcggcatctgctggactaactctattgccgtgatgcccgcgtggggatcaaaagaatgctgcatcggcacaaacccgctgatcgtcgctatcccgtcgaatccaatcaccatggtcgatatgtcgatgtcgatgttctcctacggcatgctggaggtaaatcgcctggccggacgcgaattaccggtagacggcggctttgacgatgaaggcaatctgaccagagagccgggcgtgattgagaaaaaccgtcgcattctgcccatgggctactggaaaggttccggcttatcgattgtgctcgacatgatcgccaccctgctctctgacggcgcgtccgtcgcggaagtgacccaggacaacagcgacgaatacggcgtatcgcagatctttatcgccatcgaagtggatcgcctgatcgacggtccaacccgcgatgccaaactacagcgcatcatggacttcatcaccaccgcagaacgcgctgatgaaaatgtcgccgtccgtctgccaggccatgagttcacacgcctgctggaggagaatcgccgcaacggcatcacggttgacgacagcgtgtgggcgaaaatccagtctctgtaa

SEQ ID NO: 117854 - DNA, 468 bp, Enterobacter cloacae
atgatattcggacatattgcacagccaaatccatgtcgcctgccgctggcgattgaaaaggcgcttaattttctgcgtaccacggatttcaccaccctggcgccgggcgtgatcgaaattgaaggccgcaacatttttgcccaggttctcgacctcaccacacaggaacagcacgagaaccgccctgaagtccatcgccgctatctggatatccagtttctggcctggggtgaagaaaaaatcggtatcgctattgataccgggaataacaaaatcagcgaatcattgctggagcaacgggatattattttttatcacgacagcgaacatgagtcatttatcgaaatgatacctggcagttacgccatatttttcccgcaggatgttcaccgtcctgcctgtattaaaaacaagggatccgcaattcgtaaaattgtggtgaaagtggccatcagcgaattagattaa

SEQ ID NO: 117855 - DNA, 927 bp, Enterobacter cloacae
atgaccaacaccggttttattattggtgcgtacccctgtgcaccctcatttcaccagaaaggggagcaggaagaatacgccttctggcgggaactttccgacacgccaaatattcgcgggctggaacaaccttgccttgaaaatctccatccgtttggtgatgaatggctgtttcgtcatacgccgggcgactggcagatcgttgtcacagccgttatggaaaccatgcgccgccgcggcagcaacggcgcgtttggcctggcgtccgcggacgaagaacagcgtaaagcgtgcattgaatattaccgccatctgcatcaaaagattgatgccgttaacacccgctttcccgggaaagtgatcgctctggaaatgcaggccgcaccgcaggcgggtaatgattctgtcgagcaagcgacagaagcattctcccgctcggtacgggaaatcgcgagctgggactggggctgcgatctggtgctggaacactgtgatgcgatgaatggcccggcgccgcgtaaagggttcttgcccttagagcaggtgctggaggtagtgaaagagaccgatatcagcgtctgtatcaactgggcacgttcggccatcgaaggtcgcaacaccgcccttccgctggaacatgttcaggcggcactcgctgccgggaagctgggggcgctgatgttttcgggcacgacccctcacggtgagtatggagaatggcaggatctgcacgcgccgttttcttcgttctgcgccgacagtctcatgtccactgaacatgtaaaaacgctgtttactgcggcgagcgccgcaacattgaaattctccggtattaaattactggaaataaatgctaatgctgacgtcagccatcgcatcgctattttgcgcgacggcattagcgctatgaataaagcgtcacaataa

SEQ ID NO: 117856 - DNA, 1320 bp, Enterobacter cloacae
atgaatatttcttctaatgctctacacgcggacattccgcgccagcgctggctaaggatcattccccctattcttatcgcctgcattatttcctatatggaccgcgtaaatatagcttttgcgatgcccggcggtatggatgaagagctgggcatttccgccacgatggcgggcctggcgggggggatcttttttatcggctatttgttcctgcaagttcccggcggcaaaattgccgtgcacggcagcggtaagaagtttatcggctggtcgctggttgcctgggcggtgatctcggttctgaccgggcttgtgaccaaccagtatcagctgctggtactgcgcttcttactcggcgtggcggaaggtgggatgctgcccgttgtgctcacgatgatcagtaactggttcccggatgccgagcgcggccgcgccaacgcgattgtgatcatgttcgtgcccatcgccgggatcatcaccgccccgctgtcgggctggattattaccgctctcgactggcgctggctgttcattattgaaggtctgatgtccgttgttgtgctggtgctgtgggcgttcaccgtctacgaccgaccgcaggaagcacgctggatctctgaggccgagaaaaactacctggtacaaacgctggcggcagagcagcaggccattgcgggtaaagaggtgaaaaacgcctcgctcagcgcggtgctgtctgacaaaaccatgtggcagctgatcgccctcaacttcttctaccagaccggcatttacggttacaccctctggctgcccaccattctgaaggagctgacacacaccagcatcggccaggtgggaatgctcgccattctgccttacatcggcgccattgctggcatgttcctgttctctacgctctctgaccgcaccggcaagcgcaagctgtttgtctccctgccattgattggctttgcgctctgcatgttcctctccgtggcgctgaaagagcacacctggctggcctatgccgcactggtgggctgtggcttcttcctgcaatccgcagcgggcgtgttctggaccatcccggcgcgtctgttcagcgctgagatagcgggtggcgctcgcggcgtgatcaatgccctgggcaacctcggcgggttctgcggtccttatgcggtaggcgtactgatcaccctgtacagcaaagacgcaggcgtttactgcctggcagtttcgctggcgctggcatcgctgctggccctgctgttaccggcgaaatgcgatgccggagcagagcccaaccccacggtgactccacataaacgtgcggcctga

SEQ ID NO: 117857 - DNA, 1506 bp, Enterobacter cloacae
atgagtgaaaaagagcccttctggctgggtatcgattgtggcggtacttatctgaaagccggtttatacaacagccagggcaaagaagtctgtattgaacgccgctcagtggccacgctcagcccacgcgccggctacgccgagcgggatatgcaccagctctggcagcactgccacaaaaccgtcgccctgctgctcaaaaattcaggcgctgacggcggtcagatcaaaggcgttggcatttcagcccagggcaaggggctgtttctgctcaataaacaggatcgccccctgggtaacgccatactctcctccgatcgccgtgcgctggagatcgtacaacgctggcagcaggacggtatacccgaaaagctctatccgcatactcgccagacgctgtggacggggcatccggcctcactcctgcgctgggttaaagagaacgagcctcagcggtatcagcaaattggcagcgtgatgatggcgcacgattacctgcgctggtgtctgaccggggtcaaaggctgcgaagagagcaacatctcggaatccaatctctacaacatgaataccgggcagtacgatccgcagctcacgcgctggctcggcatcagcgacattgacggtgccctgccgcctattatcggttcagcagaaatttgcggggaaatcaccgctcaggcagccgcactgaccggtctcacggcgggtactcccgtcgttggtggactgtttgatgtggtttccaccgcgatctgcgccgggctgcatgacgaacatacgctgaatgccgtaatggggacctgggccgtaaccagtgggattgcccacggcatccgcgacaacgagcctttcccctacgtctatggccgctacgtccatccgcagcagttcatcgttcatgaagccagccccacgtcgtccggcaacctggaatggctgacggcccaatggggcgatatgtcattcgatgagattaaccacgccgtggccagcctgccaaaagctgaaagcgatgtgttcttcctgcctttcctctacggcagcaacgccgggctggagatgaccagcggcttctatggcttgcaggcgctgcatacccgcgcgcacctcctccaggcggtttatgaaggggtggtattcagccacatgacccacctcaaccgtatgctcgaacgctttccccacgtgcaggccttgcgtgtgacgggcggcccaacccattcggacgtgtggatgcagatgctcgcagacgtcagcggcctggcgattgaactcccgcaggtggaagagaccggctgttccggtgcggcgctggccgcgctcgtcggtacaggcctttatcccgatttttacgccgctcagcgcgccctcaggcatgacatccggatgattgaacctgacatgcgtgcccatgccgcctaccagcgcaaatatcaccgttaccagctactgatttcagcattacagggctatcacgcccgtgttaaggagtacgacctatga

SEQ ID NO: 117858 - DNA, 654 bp, Enterobacter cloacae
atgagccgaccattattgcagctggcgctcgaccacacctcgcttcaggccgcgcagcgcgatgtcgcgacgctttccgatcacgtcgacatcgtcgaagccggcaccattctatgcctgaccgaagggctaaacgccgttcgcgccctgcgtgcgcagtgtccggataaaattatcgtggcggactggaaagtcgccgatgccggagaaacgctggctgagcaggcgtttggcgcaggcgcaaactggatgaccatcatctgtgccgccccgctggccaccgttgaacgtggccacgaggtcgcactgcgcggcggcggcgagatccagatggagctgtttggcaactggacgctggacgacgcacgcgcgtggcatcgcatcggggtgaagcaggcgatttaccaccgcgggcgcgacgcacaggccagcggccagcagtggggtgaggcggatctcagcaaaatgaaggcgctgtccgatatcggtttgcagctttctataactggcggtatcacccccgctgacctgtcgctgtttaagcagatcaacgtcaaagccttcattgccgggcgcgcgctggcaggcgccgataatccgccgcaggtggcacaggcattccattcgcaaatccgcgacatctggggagagtaa

SEQ ID NO: 117859 - DNA, 861 bp, Enterobacter cloacae
atgcgtcagcatccgttaggcatttacgaaaaagcgctgccaaaagatctctcctggccggagcgcctggttctggcaaaaagctgcggcttcgattttgtggagatgtcggtggatgagaccgacgagcgtttatcgcgccttgaatggagtaccacgcagcgcgcctctcttgtggaagcgatgctggagaccggcgtggccatcccgtcgatgtgcttgtctgcccatcgtcgcttcccgtttggcagccgcgatgaaatcgtgcgcgaacgcgcccgcgagatcatgaccaaagccatccggctggcccgtgatttgggtattcgcaccatccagcttgcgggttatgacgtgtactacgaggaacacgatgagggcacgcaacagcgctttgccgaagggctggcgtgggccgtagagcaggctgccgccgcgcaggtaatgctggcggtagagatcatggacactgcgtttatgaactccatcagcaagtggaaaaagtgggacgacatgctcgcctcgccgtggttcagcgtttacccggacgtcggcaacctgagcgcgtggggcaacgacgtcaccgccgagctgacgctgggcattgaccgcatcgccgctatccacctgaaagatacccggcccgttaccgagcaaagccccggacagttccgcgatgtgccgtttggcgagggctgcgtcgatttcgttggcgtgtttaacacgctgaatcaacttaattatcgcggcgcatttctgattgaaatgtggaccgagaaagccaaagagccggtgctggagatcatccaggcgcgccgctggattgaagcccgaatgcaggaaggaggcatgacatgttag

SEQ ID NO: 117860 - DNA, 696 bp, Enterobacter cloacae
atgttagaacaactcaaagccgaggtgctggcggcaaatctcgccctgcccgcccaccagctggtgacgttcacctggggcaacgtcagcgcggttgaccgtgccagcggcatgatggtgatcaaaccatccggcgtggagtacgacgtgatgaccgcagaagatatggtggtggtaaatatcgccacgggtaaagtggtcgaggggagtaaaaagccctcctccgacaccccgacccatctcgcgctgtatcgtcgttacccggaaattggcggcattgtgcatacccattcccgccacgccaccatctggtcgcaggcggggcaggatttacccgcgtggggcacgacgcacgcggactatttctacggtgcgatcccctgcacgcggctgatgaccccggctgaaatcgcgggtgaatatgaataccagacgggggaagtcattatcaaaaccttcgaggagcgcgacataagcccgatgcaggtcccggcggtgctggttcattctcacggcccgtttgcctggggcaaagacgctgccgatgcggtacacaatgccgtggtgctggaagagtgcgcctatatggggcttttctcgcgccagcttgcacctcagcttccggttatgcagcaggaattgctggataagcattacctgcgcaagcatggcgcaaatgcctattacggccagtga

SEQ ID NO: 117861 - DNA, 819 bp, Enterobacter cloacae
atgcttgaattatccatagcacttccgattagagttcaaaatggcgggttatttatctcccggggcgtgggccgtcatcccgcacgaaaattatcttcgtgggagataatttttgtcgaaaaagggacattaacgatccaggaggaaaatacgctgtttgaggtaaacgctggcgagagtttattactttggccgaagcgacggcatgtcggcgtggaagattttccgggcgatctcaaattttactggctgcattttgaggtggatgaacgcctgccggtgttgccaggtgcgacgccgctgtcgattgagcaacactgtagcgtgcgggatccgcaatatgttattgcgttattccgtcagtttttaagcgagcaggaaaaattacaccgtagccaggcgctggagataattttgctgttaattttgcagcagatatcgctctcgccgggatatgaagataaagcggatgatgcgggcgcggcaatggcgtggaaggccaagcagcttatccgcacgcactttcatttgcccctgtccacttcgcagctggcaaaagagctgcactgcaacgcggattacctggggcgagtatttcgccggacgtttcatttaaccctgacggaggcaattcaccgccagcgcgtcagggccgctgaaaaactgctgctgaacgatgcggcctcattaactgaagtggccgcccggtgcggttttaatgacgtgggttatttccggcaaatattctcaaaacataccgggttaacgcccgccgtctggaaacggcggtactgtaaagagcatattaattccggatga

SEQ ID NO: 117862 - DNA, 1401 bp, Enterobacter cloacae
atgacttccacaccgattacagacgcagaagttgcaaaacaggcagccgatgaccggctgtcagtccgcgagaaaattggctacggcctgggcgacgcgggcggcacggtaattacctgcctgatcatgaactttctgacctttttctataccgatgtatttggcctgacgcctgcgctggtgggcacgctgtttattgcccttcgggtatttgacgcgatttccgatccggtgatgggcgtgattgccgaccgcacgcagagccgctgggggcgttttcgtccctggcagctgtgggtcgcgcttcccatcgggatcgtcggcgtactgaccttcaccgtcccggacgccagcatgggcgtgaaaatcgcctgggcgttcggcacctatctgttgctttcagtgggctataccgccatcaacgtgccatattgcgcgctgatcaacaccatgaccacccgccacaacgaggttatatcctgccagtcctggcgcttcgtactgtgcggcgtggcgggctttctggtctccgttggcctgccgtggctggtgtcagagctgggacagggcaatgccgcccggggttatcagctgggcgtcggcgtgctgtgcgccatcgccgtggtgatgttcctgtgctgcttcttctgggtgcgcgagcgcgtcccgcttgcgctgatgggtaaattcaccctgcgcgagcacctggcgggcctgcggaaaaacgatcagctgctgctgatgctggtgatgtcgtttctgctgatcaacgttttcaacattcgcggcggcgggtacatgtacttcatcacctacgtgcttcagggcagcacggcgtacacttcgctgtttttcaccatggtgacctttgccgccattctgggcgcggtgatcgtcagtccgctgtcgcggcggatcgataccgtcaaactctactactacaccaacctggtactcgctgcgcttgcggtgggtatgtggttcctgccgggtggtccggcgcaccagacgctctggctgatcgtaattttaagtaacggcgtgatcctgggcttcaccctgccgctgcacttctcgctgatggcctttgccgatgactacggcgaatggaaaaccggcgtgcgctcatcggggatgaacttcgccttcaatctgtttttcatcaagctcgcgtgggcatccagcgccgggatcatcagcctggtgtttattgccgtggcctatcagccaggcgcgggtaaccagacgcccgcctcattgcagggcatcaccgccatggagacgctgctccctgcccttttccacctgctgctggcggtcgctatccgctggtgcaggcttaacaatcccgtgatgtcgcgcattgccaccgatttgcgccagcgtcatgtacagtcctga

SEQ ID NO: 117863 - DNA, 1950 bp, Enterobacter cloacae
atgaccataatggaagccgacctgcatcagctgaaaatcaacgacccgtttcttggtcagtaccaacggctggtccgcgatgtggtgatcccctaccagtgggaggcgcttaacgatcgcgtggcggaggccgaacccagccacgcgatcgccaacttccgcatcgccgctggtctggaacagggggagttctacgggatggtctttcaggacagcgacgtggcgaaatggctcgaagccgtggcgtggtcgctgtgccagaagccggatgctgaactggaaaaaaccgccgacgaggtgatcactctggtcgcagcggcgcagtgcgaagatggctatctcaatacctatttcacggtgaaagccccggccgagcgctggaccaatctggccgaatgccacgaactgtactgcgccgggcatatgattgaagcgggtgtggcgtatttccagggaaccggaaagcgccgcctgctggacgtggtgtgcaggctggcggatcatatcgacagcgtgtttggcccaggcgaaaaccagctgcacggttaccccggccacccggaaatcgagctggcgctgatgcggctgtacgacgtcacgcaggagcaacgctatctcgatctggtgaaatactttattgaggaacgcggcgcgcagcctcacttctacgatatcgaatacgagaagcgcggcagaacgtcatactggaacacctatggcccggcgtggatggtcaaggacaaagcctacagccaggcgcatctgccccttgcggaacaacaaacggccatcggccatgccgtgcgttttgtctatctgatggcgggcatggcacatctggcgcgcctgagcagcgacgaggggaaacgtcaggattgcctgcggctgtggaacaacatggcacagcgccagctgtacatcaccggcgggattggctcccaaagcagcggcgaggcgttcagcagcgattacgatctgcccaacgatacggtctacgccgaaagctgcgcctccatcggcctgatgatgtttgcccgccggatgctggaaatggaggcggacggccactacgccgacgtgatggagcgcgcgctgtacaacacggtgctgggcggcatggcgctggacggtaagcatttcttttatgtgaatccgctggaagtgcacccgaaaaccctggcctttaaccatatctatgaccacgtcaaaccggtgcgccagcgctggttcggctgcgcctgttgcccgccgaatattgcgcgcgtgctgacctcgctggggcactacatttataccgttcgcccggacgcgctgttgatcaacctgtacgtggggaacgacgtcgccattccggttggggataacatcctccagctgcggattagcgggaactatccgtggcatgagcaggtgaaaatcgagattacctcaccagttccggtgactcacacgctggccctgaggctgccggactggtgtgcggaaccggctgtttcgctcaatggtcaggccattacaggcgaggtctcccgtggatacttatacctcaaccgaagctggcaggaaggcgacacgctgacgctgacgttaccgatgccggtccaccgcgtgtacggcaacccgcaggtgcgccagcaggcggggaaagtcgcattgcagcgtggaccgctggtttactgcctggaagaagccgataacggcgcaaatctgcataacctttctttgccccaggacagcgcgtttcgggtatttgaaggcaaaggcattttcgcgcacaagatgctgatacaggcggaagggatcgggtgtcaggcgaaggacactgatgccctgtggcagtacgaccactcgccggtagaacgtcagccccggacgctgacctttattccgtggttcagctgggcaaaccggggagaaggggaaatgcggatatgggtggatgaaagctga

SEQ ID NO: 117864 - DNA, 1539 bp, Enterobacter cloacae
atgacaaacaatcctccctcatcgcgtatccagccaggcgagtatggttttcctcttaagctgaagccccgctatgacaacttcatcggcggcgactgggtggcgcccgtcgacggtgagtactattccaacctgacgcccgttaccggccagccgctgtgtgaaattgccagttcgggcaagcgggatatcgatttagcgctggatgcggcgcataaggcgaaagataagtggggacaaacgtccgttcaggacagagcggccattttgttcaaaatcgccgatcggatggagcagaatctggagctgctggcgaccgcggaaacgtgggacaacggcaagccgatccgggaaaccatggcggcggacgtgccgctggcgattgaccatttccgctattttgcgtcctgcattcgtgcccaggaggggggaataagtgaagttgacaaagataccgtggcgtatcacttccacgagccgctcggcgtggtggggcaaattattccgtggaacttcccgctgctgatggcgagctggaaaatggcgcccgcgctggcggcgggtaactgcgttgtgctgaaacctgcacgcttaacgccgctttcggtactgctgctgatggaggtgattggcgacctgttgccgccgggggtcattaacgtggtcaacggggccgggggagagatcggcgaatatctggctacttcaaagcgtattgctaaagtggcgtttaccggctcaacggaagtgggtcagcagatcatgcagtacgccacccagaacatcattccggtcaccctggagctgggcgggaaatcgccgaacatcttctttgccgacgtgatggatgaagaggacgccttcttcgacaaagctctggaagggtttgccctgttcgcgttcaaccagggtgaagtctgcacctgtccgagccgcgcgctggtgcaggaatccatttatgagcgctttatggagcgggcgatccggcgcgtggagtcgattcgcagcggtaatccgctggataacgtcacccagatgggagcgcaggtatcgcatggccagctggaaaccatcctcaactatattgatatcggcaaaaaagagggggccgatgtgttgaccggcggtcgtcgtaaggtgctgggcggcgatttgcaggagggttactaccttgagccgaccatcctgttcggtaagaacaacatgcgcgttttccaggaggaaatttttggaccggtgctggccgtcaccacgtttaaaaccatggacgaggcgctggagctcgccaacgacacgcagtatggcctgggggcgggcgtctggagtcgtaacggtaatctggcctataaaatgggccgcggcattcaggccggacgcgtatggacaaactgctatcacgcctatccggctcatgcggcgtttggcggctacaaacagtcgggcatcgggcgtgaaacccataagatgatgctggagcattaccagcaaacgaaatgtctgttagtcagctactccgataaaccgctggggctgttttaa

SEQ ID NO: 117865 - DNA, 885 bp, Enterobacter cloacae
atgcagctatttatcggctttgacgtgggcggaacccacatcaaacacggcgtgatcaacgaaaacggcgaagaactgacatccgatgaatatgatacgcctgacgatgaaagcaccttcaaacagaagtggaaagcggtggtggataagtaccgccaggagcatgagatcgtcggcatcggcgtgagttttccgggccacatcaatcaccataccggcgaagcggccaaggccggggcgctggattaccttgacggtgaaaacctgtgcgagcttttcgcacagctgaccgatctccccgtaacaaccgaaaatgacgccaactgcgcggcgctgggcgaacgctggcagggcgccggtaaggactatgagcatttcgtctgcatcaccatcggcaccggcatcggcggcggtatcgtcatggagggcgatctctaccgtgggtcgcactaccgggcgggtgagtttggcgtgctgcccgttggcaacaacggcgagccgatgcacgaagtggcgtccgccagcggcctgatgaaagcctgccgccgcgcgctggccgtgtcggaagatgagatgcctgacggtgaggagctgtttagacgcatggacagcgacgtgcatctgcgtgaggccatagaagagtgggcgcatttcctctcgcggggcatctacagcgtgatctccatgtttgatccgcaggcggtgctgattggcggcggcattagcgagcaggagaaaatctatctcctgctggataaatacctacagcgattcgaggagtgggaagcgctccgggtgcccatccttccctgcgagctgggtaaccaggcgggaaggctgggtgcggtctggctggctaagcagaagcaggcgcgcagcgcttaa

SEQ ID NO: 117866 - DNA, 1839 bp, Enterobacter cloacae
atgattattgccaccgccggtcatgttgaccacggcaaaaccacgttattgcaggccattacgggcgtgaatgccgatcgcctgccggaagagaaaaagcgcggcatgaccattgacctgggttacgcctactggccgcagcccgacggtcgcgtgctgggctttatcgacgtgcccggccacgagaagtttctttccaatatgctcgcgggcgtgggcgggatcgatcacgccctgctggtggtcgcgtgcgatgacggggtgatggcgcaaacgcgcgagcatctggcgatcctccagctgacgggaaacccgcagttgaccgtcgccctcaccaaagcggaccgtgtggatgaggcgcgtatcgacgaggtgcgtgaagaggtgctggcggcgctgagtgattacggttttaaggatgccgcactgtttgtcaccgtggcgacagaaggccgcggtatcgacgctcttcgcgaccatttgcagcagatcccgtctcgtgaacatgccagccatcaccgcttccgtctggcgatagacagggcgtttaccgtgaaaggggctgggctggtggtgaccggcaccgcgctgagcggcgaagtgaacgtgggcgataccctgtggctgacgggcgtgaacaaaccgatgcgcgtgcgcgggcttcacgcgcaaaaccagccggtggaacaggcccatgccgggcagcgtatcgccctgaatattgccggtgatgccgaaaaagaccagcttaaccgcggcgactggctgctggccgacgcgccgccggagccttctgaacggatcatcgtttcactccagacccacacgccgctgacccagtggcagccgctgcatatccaccacgcggccagccacatcaccggacgcgtgtcgctgctggaaaacgatctcgccgaactggtgttcgactccccgctctggctggcggataacgaccgcctggttctgcgcgatatttcggcgcgggaaacgctggcgggcgcgcgcgtggtcatgctggatccgccccgtcgcggcaagcgtaagcccgagtatttacagtggctggccgcactggcccaggcccgcgatgataagtctgcgttagatatccaccttgagcgtggtgcggtggatctggcggcgttcgcctgggcgcgccagctcagcagcgaaggattgcgtcttctgacgcaggagccaggttttattcaggccggcaacagcctgctgaacgcgccggtggcggcgcgctggcagcgcaaagtgctgagcacgctggcgacctaccatgaacagcatcaggatgagcccggcccgggccgtgaacgtctgcggcgcatggcgttgcccatggaagacgacgcgctggtgctgttgctgattgaaaacatgcgtgaaagcggcgtgattgcaagtcatcacggctggctgcacctgccggagcacaaggccggttttaccgctgagcaggacgcggtctggcaaaaagtggcggcgctgtttggcgatgaaccgtggtgggtgcgcgatctggcgcgtgaaacccataccgatgagcagctgatgcgtcaggtactgcgccatgcggcgcagcaggggatgattgtggcgatcgtgaaagatcgttattaccgcaacgatcggatcgtggcatttgcgaacctgatccgggagctggatcaggcgcgcggatcaacctgcgccgcagacttccgcgatcggctgaacgtaggacgcaaactggcgattcagatcctggagtatttcaaccgcatcgggtttacgcgtcgtcgtggcaatgaccatgtgctacgcgacgcgcagttatttccctaa

SEQ ID NO: 117867 - DNA, 1386 bp, Enterobacter cloacae
atgactactcatcattccctctacagccagatccccgctaccgatcgtctgcttcgtgacccgcgcatcactgcggtgctggagcagtttggccatactgcaacggtcgacatgctacgccagcttcaggacgatgcgcgtcgccatattcaggctgagaacgcgctacccggctggtgcgtggcgtgggagcaggaagttgaacgcaggctgagcaagcacgggcaaagcgcgttgcgcccggttattaacctgacaggcacggttctgcacaccaatctgggccgggcacagcaggccgaagaggcaacagaggccgtcacccgagccatgcgctcgccggtgacgctggagtacgatctggacggcgccgggcgtgggcatcgcgatcgcgcactggcggatcttctctgccagatcaccggcgcggaagatgcctgcattgtgaataacaacgcggcggcggtgctgctaatgctggcggccaccgcgagcggaaaagaggttgtcgtctctcgcggcgagctggtggagatcggcggggcgtttcgtattccggacgtcatgcgccaggcgggctgcacgctgcatgaagtgggcacaaccaaccgtacccatgcaaaagattatcgcgcggcggtgaatgaaaacaccgccctgctgatgaaagtgcataccagcaattaccacattgagggtttcaccaaaacggtggaagaggccgaactggccgccattgggcgcgagctaaacgtgccggtgattgccgatctcggcagcgggtcgctggtggatatgcgccagtacggtctgccgaaagagcccatggtgcaggaaatggttgccgcgggcgtaagcctggtcagtttctccggtgataaattgctgggcgggccgcaggcggggattatcgtcggcaggcgcgagctgattgcgcagctacagcagcacccactgaagcgcgccctgcgtgccgataaaatgacgctggccgcgctggaagccacgctgcggctctatctccacccggagaaactggctgaccgcctgcccacgttgcgtttgctgagccgtgatgcggcctccattcgcgcgcaggcggaagcgctactgccgcaggttgctcctcattaccctgagtttgacgttcgtatcgagccttgcctgtcgcaaattggcagcggctcgctgccggtggacaggttaccgagcgaagcgctgacgttcaccccgcgcgacggacgcggaagccagcttgaggcgctgtcggcgcgctggcgcgcattaccgacgccggtgattggccggatcggtgacgggcgcatgtggctggatttacgctgtctggaagatgaagtgcggtttctggagatgatgttgaaatga

SEQ ID NO: 117868 - DNA, 609 bp, Enterobacter cloacae
atgaaactcatcggcagttataccagtcctttcgtgcgtaagatttcgattctcctgctggagaaagggattgaatttgaattcgtaaatgaacagccctacaacgcagagaacggcgttgcgcagtacaacccgctggggaaagtcccggcgctggtaacggacgagggcgactactggtttgattccccgatcattgcggagtacatcgagctgcttggcgttgcgccagccatgctgccggcggacccaaaagcagcgctggcgatgaagcaaattgaagccctggcggatggcattatggatgcggcattaacgtccgtacgcgagcaggcaaggcccgccgcccagcagtcagaaaatgagctgctacgccagcgcgaaaaaatcagccgcagcctggatatgtgcgaacagctgatccgcgacgggaaaattcagagcgatagcctgaatctggcgacgatcgccatcgcctgcgccattggctacctcaatttccgccgcgtctcgccgggctggtgcgtggatcgtccgctgctggtcaaactggcggagacgctcttccagcgcgaaagttttgcccggactgaaccgccaaaggcttga

SEQ ID NO: 117869 - DNA, 1908 bp, Enterobacter cloacae
atgtcatccgatttcaagatcaaagtgcaaagctttggtcgtttcctcagcaacatggtgatgccaaatatcggcgcgtttatcgcgtggggtattatcaccgcattatttattccgacagggtggttgcctaacgaaacgctggcgaaacttgttggcccaatgattacctatctcctgccgctgctcatcggttataccggtggtcgtctggtgggcggtgaccgtggtggtgtcgtgggtgccatcacaaccatgggtgttatcgtcggtgcggatatgccgatgttcctcggtgcgatgatcgccggtcctctgggcggctgggcaatcaagaaattcgacgtctgggttgatggcaagatcaaatccggcttcgaaatgctggtgaacaacttctctgcgggcatcatcgggatgatcctcgccattctggcgttcctcggcattggcccggcggttgaagtgctgtccaagctgctggcggcgggcgttaacttcatggtggcgcacgacatgctgccgctggcgtctatctttgttgaaccagcgaaaatcctgttcctgaacaacgccatcaaccacggtatcttctcaccgctgggtattcagcagtcacacgatctcggcaagtccatcttcttcctgattgaagcgaacccgggtccaggtatgggcgttctgctggcgtacatgttctttggtcgcggtagcgcgaaacagtctgctggcggcgcggcgatcattcacttcctgggcggtattcacgaaatttacttcccgtatgtgctgatgaacccacgtctgatgctggccgttatccttggcggtatgaccggcgtgttcaccctgagcgtactgggcggtggtctggtgtctcctgcttctccaggctctatcctggcggtgctggcgatgaccccgaaaggcgcctacttcgcgaacatcgcggcgatctgtgcggccatggcggtctccttcgtggcctccgctatcctgctgaaaaccagcaaggtgaaagaagacgacgatatcgaagcggcaacccgtcgtatgcatgacatgaaagccgaatccaaaggcgcaacgccgctggcggcgggtgatgtctctaacgacctgagccacgtgcgtaaaatcatcgtggcctgtgatgccggtatgggctccagcgcaatgggtgcgggcgtactgcggaagaaagtgcaggatgcgggtctgaccaacatctccgtcaccaacagcgcgattaacagcctgccgccggacgttgacctggtgatcacgcaccgcgatctgaccgaacgcgctatgcgtcaggtaccgcaggcgcagcacatttccctgaccaacttcctcgacagcggcctgtacgccagcctgaccgaacgcctggtggcggcgcagcgccatgaagataacgaagtgaaagtgcgtaccagcctgcaagacagcttcgacgagagcaacgcgcatctgttcaaactgggcgctgaaaacatcttccttggccgcacggcgaccaataaagaagaggccattcgcttcgccggtgagcagctggtgaaaggcggctacgttcagcctgagtacgttgaggcgatgctggaacgcgaaaagctgaccccaacctacctgggtgaatccatcgcggttccacacggtacggtggaagccaaagaccgcgtgctgaaaaccggcgtggtgttctgtcagtatcctgatggtgtgcgcttcggtgaagaagaggacgacatcgcccgtctggtgattggtatcgccgctcgcaacaacgagcatatccaggtgattaccagcctgaccaacgcgctggatgacgaaacggttattgagcgtctggccaacaccaccagcgttgaagaagttctggccctgctgaacaagtaa

SEQ ID NO: 117870 - DNA, 1149 bp, Enterobacter cloacae
atgaaagcattacattttggcgcaggtaatatcggtcgtggctttatcggtaaactgctggcagacgcgggcattaccctgacattcgccgatgtgaatcaggtggttctggatgccctgaatgcccgtcatagctatcaggttcacgtggtgggtgaaaacgaacaggttgaaacggtctctggcgtcaacgcggtaagcagcattggcgacgacgtgattgacctcatcgcgagcgttgatctggtcaccaccgccgtgggtccggtggtgcttgagcgtatcgccccggcggttgcgaaaggcctggcgaagcgtaaagcacagggcgttgaaacaccgctgaacatcatcgcctgtgaaaacatggtgcgcggcaccacgcagctgaaaggccacgttcttgcgaccgtcgcagacgaagataaagcctgggttgaagcgcacgtaggttttgtggattccgccgtggatcgcatcgttccgccttcagcatccgccaccaacgatccgctggaagtgaccgtggaaaccttcagcgagtggatcgttgataaaacccagtttaagggtgcgctgccgaccattccgggaatggaattaaccgataacctgatggcatttgtcgaacgtaaactcttcacgctgaacaccgggcatgctataaccgcgtacctcggaaaattggccggtcatcagacgattcgtgacgcgatcctcgatgagaacatccgtgcggtggtcaaaggggcaatggaagagagcggcgcggtgctgatcaaacgctacggttttgatgctgataaacacgcggcatacatccagaaaatcctcggtcgttttgaaaacccgtatctgaaagatgacgttgagcgcgtgggtcgtcagccgctgcgtaaactaagcgcgggcgaccgcctgattaaaccgctgctgggcacgctggaatacggcctgccgcacgctaacctggtgaagggcatcgctgccgccatgcactaccgcagcgagcaggacccgcaggcgattgagctggctcagctgattgatgacaaaggcgcgcaggctgcgctggcgcagatctccggtctggatgccaacagtgacgtagttgcggaggcggtcagcgcatacaacgcaaccaaatga

SEQ ID NO: 117871 - DNA, 591 bp, Enterobacter cloacae
atgatgcagagtccggcgcaggttagcctgcgcccgaataacagattgtcagatatgcaggcaataatggaacaaacccaggcctttgaaaatcgtgtgcttgagcgtctgaatgctggcaaaaccgtacggagtttcctgattgccgccgtcgagctgttaaccgaggcggtgaacattctggtgcttcaggtgtttcgcaaagacgactacgcggtaaagtatgctgtagaaccgttactggacggagacggaccgctgggcgatttatcggtacggctgaagctgatttacggtcttggcgtgctgaaccgccaggagtatgaagacgccgagctgttaatggcgctgcgcgaagagctcaatcatgacggtaatgagtacacctttaccgatgatgagatactggggcccttcggcgaactgcactgcgtatccgcgctccctcccgcacctcagtttgataacagcgaccctgatctgtacgcgatgcaaaagctgcgttatcaacaggttgtgcgctccaccatggtgctttccctgactgagctgatttctagaatcagcttaaaaaaagcgtttcagaagtaa

SEQ ID NO: 117872 - DNA, 363 bp, Enterobacter cloacae
atgaaagaagtcgaaaagaacgaaattaaacgcctgagcgaccgtctggatctgatccgccatcagatggctggcctctccctggtcgattccgccgagaaatatgccgagctggaaaaagagtccgtgaagctggaggcggaaattgaacgcctgcgcgaagtgaaaggccagaagctgagtaaagaagcgcagaagctgatgaacatgccgcatcgccgcgcgatcaccaaaaaagagcaggccgacatgggcaagctgaagaaaagcgtccgtggcctggtagtggtgcacccgatgactgagcttggtcgcgaaatgggcctgaaagagatgacgggtttttgtaagaccgcgttctga

SEQ ID NO: 117873 - DNA, 1095 bp, Enterobacter cloacae
atgcgtcgttttattcactggtttttctatctgagccttctttcgctttttggcatgctgagttttcatgcccatgctcagacctcatcttgccgcaccacgcgcgatcagtgggtcgttcaggtgccctacgccatagggtatgcgcccggcacggcggactggacgccgatatctgcgccgatacaatctaccggggcggatttctacagctgtgatggcgggaatgatgcctggcgtagtatcggctttgtcgacatggataaccctgtcggcaccgtggttggtgaagacggtgcgtcacgtcacgtctataaaactcagatcgacggcatcggctatgcgctggggttccgggaacagcagtactgcggcgccgatgcggttcgctatattgacggcacaagtcaggtgaatggcaatgagtccaggcgcatttgcgacgcatcgcaaaaccccgcctttgccagcgcctcaatgtataaaatgcagttctgggtggtgttttacaaaattccaacgaccagcgccatgcctgacgataacgccaattcccaggagcaaaatgtcggatcgctgatattgcaggcgggagaaaatcaagccagcgccaccaacgtggcgacaccggtacagatccatctcgccagcttcaccgtcaggcgtaccagctgttcagtgggctctcgcagcattcttgttcccatggggagcgtgagccagcgtgaatttcatggcataggctcccgcgccggaggcggacgcttcagcattccggtgacctgcgaaaataacacggcggtgaagatgggtttctttggcgataccacgccgggcaacgatcgggcgctggcattgacgaagcaggaggatagcgccagcggtgtcgggatcgaactgctttacggtgacaataccggttcggttcaggggcaggtggtaccgtggaacaccccacaggtgtcagcatttgggcaagtgggggataaccagacgcaaaccttctggtttgatgcgcattaccttcagacggaagagaacgtgacggcgggaaaagcggatgcgatggcgacgtttaacctgatttacaactga

SEQ ID NO: 117874 - DNA, 2481 bp, Enterobacter cloacae
atgtcttttcgcctgtttcgttacgcgccgctttcggtgttgctgcttagcttcagccgcgcggggatggccgaggattactttgatcccgccgcgctggagctttcctctaccgaacagaaaacggcggatctgcactatttctctgaaaagggcgggcagatgccaggcacctggctcgtgacgctggagattaacggacgcgaggagcggcatcaggagatcaccttcgtcaatgagaaaggcagcctgcaacccgttttaagcgtatcgctgctggaagcgcttggggtgaatgtcagggccattcctgcattctcacggttgcgggagggagaaacgttcacgcacctcgcggatttcattccggcagcgcgaacctcctatgatttcaaccagcagcgtctctttctcagcctgccgcaggcggcgatgaaacaccgcagccgtggctacgtgccgcagtcgcagtgggacgatggtatcccggcggcctttactgattacagtctgtcgggcggccaggcacatcatcagcgtggcgtcacgacatccagctatctgagcctgcgtaacggtatcaatctgggggcgtggcggttgcgcaacacctccgcctggagccacagcgacgcgggcggcgaccattttcagtcgcaaagtagctggctgacccgggatattcgccgtcttaacagccagctacggatcggcgatgcctggaccgcaggcgacgtcttcgatagcgtggcgtttcgcggggtacagcttacatcaagcgaaagcatgttgcccgacagccagcgcggcttcgcaccaaccatccgcggcgtcgcacacagcttcgctaaagtctccgtttcgcaaaatggctatgtgatctatgaaacctgggtggctgccgggccatttatcattaacgatctgttccccggcgcacaaagtggcgatctacaggtgacggtcacggaaagtgacggctcaacgcgcgtctttacccaaccctattctgcggtgccgtttatgagacgcctgggcagcctgaaatacagcctcaacgccggacgatttcactccggctccggcgatgcgcgttcacctgagtttgttgaaggcgctttcttctacggtctgctctccaggatgacggtgtatggcggctttcgtacggcgagcaactatcaggccggtgcaattggcgtaggcagagggtttggcgcatttggctcgctgggcattgacgatacgctggcaaaaagccgtttacccaatggcaaaagcgcgatggggcaggcgtggcgcattcagtatcagaaagatttcagcgctaccggcaccgccttcaacctggcgagttatcgctatgcctcgcgcaattactatgaatttagtgaactgaatcagtctgacagccaacagctgcaactcaataatcgccgtagccgctcgcaggtcaccttctcacagacgctgggtcagttcggcagcctcagcgtctcggcatggatgcaggattactggcatacgtccgggcaggataaaaccatccacattggctggtacaccagctggcgaggcatttcctggggcgcggggtatgactacaccgactcagcgcttgagcagcatcccgatcgtaccgtgtcgtttaacgtcaatgttccgcttggtcactggttaccggacagctcggtcagttacttcatcaaccacaacaatcgtgggatgaccactcagcaggtgtcactcaacggcagtgcgctggcgaatcgcaaccttaattacagcgttcagcagagtaaggccagcgagggacaagccgacagtaccagcctggcgctgcaatacaacggtggctacggcaacgtcagcctcggttatgaccacagccgaagcggtagcaacgcgagcctcggactcgccggaggcgttatcgccacgcagtatggcgtcacgcttagccagccgctgggcgataccgtcgccctgctacgcgtgcccggcgcggcgaacgttgagccggagggctacaacgggatccataccgacagccgcggctatgcggtcatgccaacgctctcggcgtatcgcaaaaataccgtcagccttgatacggcgacgctgggtgagaacgtcgacgttgagcagagcggtctgacgctcattcccaccagcggcgcggtggtgctggccaattacaaaacccacattggttatcgcgttctgttttccctgcgctaccacggcgaaccgttgccgtttggcgcgcaggctgaagtggtggagcagaaccgccattctgcaaaccgaagcatggtcgctgacggcggtcaggcctacctgagcggggtaccagagcgcggcaccctgcgcgtcagctggtatcaggacggggagcagcagcaatgccagacacctttcagactggggaaagctcatatggcccccggtatcgccacgctatccgttgagtgccattag

SEQ ID NO: 117875 - DNA, 675 bp, Enterobacter cloacae
atgatgaaacgtttatcgtatattatgctcactgcattaatggttagttctgcgtcagtttccgctggcgttgtaatggggggaacacggatcgtatacccacaacacagcaaggaggtggcattttctgtttctaatatggaaagtgcggttccctatcttattcagtcgtgggttgaaggtgatgggcaggataaaaataacgctgcgccatttattgtcacaccacctctgttcagacttgatccggagcagaccaacacgctgcgtattcaatataccggcgctccgctgcccacagatcgtgaatctgtattctggctcgatattaaagcgattgcgccaaagccaaaagagagcagcaacgaattacaagttaacgttaaatcgaaatttaaaattttctaccgcccggacaatctgaaaggggacgctgccactgcctggcagaaaataacgttttcgcggacgggaaaagggcttaaggccgccaacccgacgccatactacgtctctttttatcgactgtccgttggcgggcataaaattgagcagccgggcatgatcggtccaggggaaatccgcgaatggcctgtgtccgcctccgggggcgtaagctggtcggctattaatgattttggtgccatcaccgccacccacacccagcctctttaa

SEQ ID NO: 117876 - DNA, 591 bp, Enterobacter cloacae
gtgttccaaatgaaaatcaaaaatgtggcgctggcgattgccgcggcggggctgctgttatcttctcaatcagtactggcaagcagtgattctggtgttaatgcttccctggatacaggcgctggctcgcagagcacaggcggcgtgatcaactttaccgggaaaatcacccttatttcctgtgatattacccctgcgtcaaaaagcaaaacggtagacctcggcgcgtgggcgaaaagctacttcgacgatcacagcgaaacgacgccgcgtgagttcaaaatcaacgtagagaactgcccggagacggttgaatcggttgcggtactgtttgacggaaccaaagatacggtgaatgacacactgctacaggttacgccaggcgaaggtatggcgacgggcgtcggcgtgaagctttataacagcgatcgcagcaccgcgattaaaccgggtacggtatctgaaacaaccgcaccggatgctgaaggcaatgctgaattaacgttttatgcctctctcgacaaagacggttcggaaattaacgcgggcgacgtcaatgccgtttccaacttcctgatggtttataactga

SEQ ID NO: 117877 - DNA, 1656 bp, Enterobacter cloacae
atgagcctctggcaacaaaactacgatccggccgggaatatctggctgtcgagcctgatcgcatcgctaccgatcctgttcttcttctttgcgctaattaagctcaagctgaagggctaccttgccgcaacgtacaccgttgccatcgccctgctggtggcgctgttcttctataaaatgccggtcgatcgcgcgctggcctccgtggtgtatggtttcttctacggcctgtggccgattgcgtggatcatcatcgccgccgtctttgtctacaaaatctcggtcaaaaccgggcagttcgacattattcgctcgtcgattctctctattacaccggaccagcgtttacagatgctgattgtcggtttctccttcggggcgttccttgaaggggcggcaggatttggcgcgccggtggcgatcaccgccgctctgctggtcgggctgggctttaacccgctgtatgccgctggcctgtgcctgattgtgaacaccgccccggtggcgtttggcgcgatgggcattccgattctggtggcgggccaggtgaccgggctggacagcttcgagatcggccagatggtgggtcgccagctgccgttcctgaccattatcgtgctgttctggatcatggcgattatggacggctggcgcggcgtgaaggagacctggcctgcggtgatggtagcgggcggttcgttcgccattgcccagtatctcagctccaacttcctcggcccggaactgccggacatcatctcttccctggtgtcgctggtctgcctgacgctgttcctgaaacgctggcagccggtacgtatcttccgctttgctgacatgggcgcatcgcacgtggatcagacgctggcgcgcaccggctataccgccggacagattgtgcgcgcatggtcaccgttcctgttcctgaccgccaccgtgacgctgtggagcattccgccttttaaagccctgttcgccccgggcggcgcgctgtacgacatggtgattaatatctccgtgccgttcctcgacaaaatggtcgcccgtatgccgccggtggtgcacgacgccacgccatatgcggcagtgtttaagttcgactggttctcagccaccggcacggccatcctgtttgccgctatcctttccgtagtgtggctgcgcatgaagcctgccgccgcggtgcagacctttgcggcgacgattaaagagctgatgctgccgatttactccatcggcatggtgctggcgttcgcgtttatttcgaactactccggcctgtcgtcgacgctggcgttagcgctggcgcataccggccacgcgtttaccttcttctcgccgttcctcggctggctgggggtgttcctgactggttcagatacgtcatctaacgccctgtttgccgccctacaggccacggctgcgcagcagattggcgtctcggacgtgctgctggtcgccgcgaacaccaccggcggcgtgaccgggaagatgatctcgccgcagtccatcgccattgcctgtgccgcggtggggctggtaggcaaagagtcggatctgttccgctttaccgttaaacacagcctgatatttacctgcatggtgggcgtgatcaccacattgcaggcctatgtcttaacctggatgattccatga

SEQ ID NO: 117878 - DNA, 774 bp, Enterobacter cloacae
atgatagtgatgcccagacgcctgtccgacgagattgccactcgcgtacgggcgctgatagaagaacaacagctggaagcgggcatgagattgcccgccgagcgtcagcttgccgctcagcttggcgtgtcgcgcaactcactgcgcgaggcgctggcgacgctggttagtgaaggggtgctgctgagccgtcgcggcggcggcaccttcgtgcgctggcagcatgacgactggtccgaacaaaacatcgtgcagccgctgaagacgctgatggaaaacgacccggactacagcttcgacatcctcgaagcgcgtcacgccatcgaaaccagtacagcgtggcacgcggcgatgcgggcaaccgacgccgacaaagagaagctcaaagcctgttttgaggccacgcaaagcagcgacccggacatcgcctcccaggcggacgtgcggttccatctggcgattgccgaggcctcgcacaacgtggtgctgctgcaaaccatgcgcgggttcttcgacctgctgcaatcctccgtgaagcagagccgccagcgcatgtatctggtcccgccggtgtttgctcagctgaccgaacagcacgaggcggtgctcaacgccattctggccggtgatgccgaggccgcgcgcaaggcgatgatggcgcatctcggcttcgtgcataccaccattaaacgattcgatgaagatcaggccagacaggcgcgtattacccgtctgcctggcgagagtgatatttccagggagaacaaagcatga

SEQ ID NO: 117879 - DNA, 1188 bp, Enterobacter cloacae
atgattatttcagcagccagtgattatcgcgccgcggcgcagcgcattttgcccccgttcctgttccactacattgacggcggggcgtatgccgaatacaccctgcgccgcaacgtggaagacctgtcggaggtggccctgcgccagcgcgtgctgaagaatatgtctgacctgagccttgagacgaagctgtttaacgaaacgctctccatgccggtagcgctcgcacctgtcggtttatgcggcatgtatgcccgtcgcggtgaagtgcaggccgccgccgccgcagatgccaaaggcattccgtttaccctttccaccgtgtccgtctgcccgattgaagaagtcgccccaactatcaagcgcccgatgtggttccagctgtacgtcctgcgcgatcgcggttttatgcgcaacgcactggagcgcgccaaagcggcgggctgctcaacgctggtctttaccgtcgacatgccgacccccggcgcgcgctaccgcgacgcccactccggcatgagcggccctaacgcggccctgcgccgttactggcaggcggtgacgcacccgcagtgggcgtgggatgtgggcgtgaacggccgtccgcacgatctgggcaatatttcggcctacctgggtaaaccgaccgggctggaggattacatcggctggctggcgaacaatttcgatccgtcgatctcatggaaagacctggagtggatccgcgaattctgggacggcccgatggtgatcaaagggatcctcgacccggaagatgcccgcgacgcggtacgttttggcgccgatgggatcgtggtctctaaccatggtggccgccagcttgacggggtgctctcctccgcccgcgccctgccggccattgccgatgcggtgaaaggcgatattgcgatcctggccgacagcggcatccgtaacgggctggacgtggtgcgcatgatcgccctgggcgcggacagcgtgctgctgggccgtgcttacctgtacgcgctggccaccagcggccaggcgggcgtggcgaatctgctgaacctgatcgagaaagagatgaaggtggcgatgacgctgaccggtgcgaaaacaatcggtgaaatcagcaaagactctctggtgcaggagctcagtaagctgcctgcggcgctggcccctctttctcagggaaacgcggcctga

SEQ ID NO: 117880 - DNA, 1341 bp, Enterobacter cloacae
atggcgtattcaggtaaggtggatattcagcaggtgatcgatgaaagtcctttttcagggtttcactggcttcttattgtgctgggctttctggtgctggcgattgatgggtttgataccgcagcgatgggttacattgcgcctacgctgtcgacagagtggggaatacataaacaggatctggggccggtgctgagtgcggcgctgctggggctgtcgctgggagccctgattgcaggtccggtatcggaccggatgggacgcaagcgcgtactggtcttttcatgcctgttcttcggcctggcgagcctgggcacggcctgggcgcaaagtctgaataccctgacgctgtggcgctttctgacgggcctgggcctcggcgctgccatgcctaacgccatcacgctgatctccgagtttgccccccagcgctgccgcgccatggtaattaacaccatgtactgcggctttccgctgggtgcggcgggcggcggggcgatctcgtcctggcttatccctcaccacggctggcgaagcgtgctgttgaccggcgcgattgcgccgctgattttaacggtgctgctggcgctgctgttgccggagtcggtgaagtttctggtgcagcgcgggaaagacgtcgcccaggttcgccgcatcgccagccggttcgcccgcagcacgctggatagcgtcacgggctttttcctcgcggaggagaaagtcgcgtcgaaaaaaggcagcgtgtcgcagctgttttccatgccctggctgcccggcaccctgatgctgtgggtcacctattttatggggctggtgatttattacgtcctgctgagctggatgccaacgctgatgcaggggatgggatatgcgctgacggaatccgcctggcttacctcgctgttcaccttcggcggcaccgctggcattttgctcgcgggctggatgatggatcgctgggaagcgcacaaggtggtcgcgtgtggtttcgtgctgacgatgggcctgattcttttactcggcattgagcataaccatatcgccctgtttggcgggttaattttcctgatggggatcgcgatgaacggcgcgcagtcgggcatgcagaccctggccgccaccttttaccctaccgagtgccgagcgacgggtatcgcctggatgcaggggatcggccgcttcggcggcgtggcgggcaccatgaccagcgcccagcttctttccatgcagtggcaggcggacagtattttaatgatcctcagcgtacctgctctcgtggctgcggcggcaaccgtctacaaaatgctgtatagccgcgcgcaggagccgggcgtcgcctag

SEQ ID NO: 117881 - DNA, 474 bp, Enterobacter cloacae
atgcttaacatcgtcttattcgaaccagaaattccgccgaacaccggcaatattatccgcctgtgcgccaacaccggttttcgtctgcacattattgagccgatgggctttacgtgggacgacaaacgtctgcgccgcgcggggctggactaccatgagtttaccgccgtcgttcgtcatcacgattacgccgcgtttctgggatccgaaaaaccacagcgcatgttcgccctgaccaccaaaggtacgccagcgcacagcgccgtaagctatcaggacggggattatctgatgtttggtccggaaacccgcggcctgccggccaccattctggatgccctgcccgctgagcagaaaattcgtattccgatgatgccggacagccgcagcatgaacctgtcgaatgcggtgtcggtggtggtgtatgaggcgtggcgccagctgggttatcccggcgcgatattgcgtagctaa

SEQ ID NO: 117882 - DNA, 1476 bp, Enterobacter cloacae
atggctaactactttaatacactgaacttgcgccagcagctggcgcagctgggcaaatgccgcttcatggcgcgcgatgaatttgctgatggcgcgagctaccttcagggtaaaaaagtggtcattgtcggctgtggcgcacagggtctgaaccagggcctgaacatgcgtgactccgggctggatatctcctacgccctgcgtaaagaagcgattgccgaaaagcgtgcttcctggcgtaaagcgaccgaaaacggcttcaaagtgggcacctacgaagagctgatcccgcaggcggatctggtggttaacctgacgccggacaagcagcactctgacgttgtgcgttccgtacagccgctgatgaaagacggcgccgcgctgggttactcccacggcttcaacatcgttgaagtgggcgagcagatccgtaaagacatcaccgtggtgatggtggcaccgaagtgcccgggcaccgaagtgcgcgaagagtacaaacgtggcttcggcgtaccgacgctgatcgccgttcacccggaaaacgatccgaaaggcgaaggcatggcgattgccaaagcctgggctgcggccactggcggccatcgtgcgggcgtgctggaatcttccttcgttgcggaagtgaaatctgacctgatgggcgagcagaccatcctgtgcggcatgctccaggccggctctctgctgtgcttcgacaagctggtggaagaaggcaccgatccggcatacgcggaaaaactgattcagttcggctgggaaaccatcaccgaagcgctgaagcagggcggcattacgctgatgatggaccgactgtccaacccggcaaaactgcgcgcgttcgcactctctgaacagctgaaaaccatcatggcgccgctgttccagaaacatatggacgacattatctccggcgagttctcttccggcatgatggcggactgggcgaatgacgataagaaactgctgacctggcgcgaagagaccggtaaaaccgcgttcgaaaccgcaccacagtatgacggcaagatcaccgagcaggagtacttcgataaaggcgtcctgatgatcgcgatggtgaaagcgggcgttgagctggcgttcgaaaccatggtggattcgggcatcattgaagaatctgcgtactacgaatcgctgcacgagctgccgctgatcgcaaacaccatcgcccgtaaacgtctgtatgagatgaacgtggtgatctccgatactgccgagtacggtaactacctgttctcttacgcctgcgtaccgctgctgaaagagttcatgaccaccctgcaagcgggcgatctgggccaggcgattgcggaaggagcggttgataacgcgcagctgcgtgacgtcaacgaagcgattcgcagccacgaaatcgagaaagtgggccagaaactgcgtggctacatgaccgatatgaaacgtatcgcggtagcaggctaa

SEQ ID NO: 117883 - DNA, 891 bp, Enterobacter cloacae
gtggatttacgcgatctgaaaatgttcctgcacctggcggaaagccgtcactttggccgtagcgcccgggcgatgcacgtcagcccctccacgctgtcgcgccagatccagcgccttgaggaagacctcggccagccgctgttcgtgcgcgataaccgcaccgtcaccctcacggaagcaggtgaagagctgcgcatctttgctcagcagacgttattacagtatcagcagctgcggcacaccatcgaccagcaagggccgtcgctttccggcgagctgcatattttctgttccgtgactgctgcctacagccatcttccccccattctcgaccgcttccgcgcggaacatccgtcggttgaaattaagctcaccaccggcgatgccgccgacgcgatggaaaaagtggtgacgggcgaagcggatctggcgattgccggaaaacctgaaacgctgccgggggcggtggcgttctcgatgctggagaatttggcggtagtgctgattgccccggcgctgccctgcccggtgcgcaaccaggtttcggtggagaaaccggactggtccacggtgccgtttatcatggccgatcaggggccggtgcgccgccgcattgagctgtggttccgccgccagaagatcagcaacccgtcgatttacgccacggtcggcggccatgaggcgatggtatcgatggtggcgctcggctgcggcgtagcgctgctaccggaagtggtgctggaaaacagcccggagccggtgcgcaatcgcgtgatgattttagaacgcagcgacgagaaaacgccgttcgagctaggcgtgtgcgcacaaaaaaagcggctgcatgagccgcttattgatgcgttctggacgatattgccgaaccactaa

SEQ ID NO: 117884 - DNA, 1548 bp, Enterobacter cloacae
atgatggccgagtcacaacccttatccgccgccccggagggggcggaatacctgagagcggtactacgcgcgccggtctatgaagcggtgcaggtcacgcccctgcaaaaaatggacaaaatctcttcgcgtctcgacaacgtcattctggtgaagcgtgaagacaggcagccggtgcacagcttcaagctgcgcggcgcctacgcgatgatggccgggctgacggacgagcagaaagcgcgcggggtgattaccgcctcggcgggcaatcacgcgcagggcgtggcgttctcctcggcgcgtctggggctgaaggcgctgatcgtgatgccggtcgccaccgcagatatcaaggtcgacgcggtgcgcgggttcggcggagaagtgctgcttcacggcgctaactttgacgaagccaaagccaaagcgattgagctggcgcagcagcagggcttcacctgggtgccgccgttcgatcacccgatggtgattgccgggcagggtacgctggcgctggaactgttgcagcaggacgcccatctcgaccgcgttttcgtcccggtgggcggcggcggcttagccgcaggtgtggcggtgctgatcaaacagctgatgccgcagatcaaagtgattgcggttgaagcggaagactctgcctgcctgaaggcggcgctggacgccggacatccggtagatctgccgcgcgtcgggctgttcgccgagggcgtggcggtgaagcgcattggcgacgaaacgttccgcctgtgccaggagtatctcgacgatatcgtcaccgtcgacagcgacgctatctgcgcggcgatgaaagatctcttcgaggatgtgcgtgcggtggcggaaccatccggcgcgctggcgcttgcgggaatgaaaaaatacatcgcccagcacaatattcgcggcgagcgtctggcgcacgtgctttccggtgccaacgtgaacttccacggtctgcgctacgtttccgagcgctgtgagctgggtgagcagcgtgaagcgctgctggcggtgaccattccggaagagaagggcagcttcctgaagttctgtcagctgctgggcggtcgttcggtaacggagttcaactaccgctttgccgatgccaaagatgcgtgcatttttgtcggcgtgcgtctgagccgtggcgtggaggagcgcaaagagatcctcagcctgctgcatgacggcggttacagcgtggtcgatctctccgacgacgagatggcgaagctgcacgtgcgttacatggtcggcggccgtccatccaagccgctgaaggaacgcctgttcagcttcgagttcccggaatcgccgggcgcgctgctcaagttcctgcacacgttgggcacgcactggaacatctctctgttccactaccgcagccacggcaccgactatggccgcgtactggcggcgttcgagctgggcgagcacgagccggatttcgaaacgcgcctgaacgagctgggctatgagtgccatgacgaaacccacaacccggcgttccgtttcttcctggcgggttag

SEQ ID NO: 117885 - DNA, 1851 bp, Enterobacter cloacae
atgcctaagtatcgttcagccaccaccacccacggccgtaatatggcgggtgcccgcgcactgtggcgcgccaccggaatgaccgacgccgatttcggcaagccaattatcgccgtggtgaactccttcacccagtttgtaccgggccacgtgcacctgcgcgatctcggcaagctggttgccgagcaaatcgaagcctccggcggcgtggcgaaagagttcaacaccattgcggtggatgacggtatcgcaatgggccacgggggaatgctctattcactgccgtcgcgcgagctgatcgccgactcggtggagtacatggttaatgcccactgcgccgatgcgatggtctgtatctccaactgcgacaaaatcaccccggggatgctgatggcttccctgcgcctgaacatcccggtgatcttcgtctccggtggcccaatggaagcggggaaaaccaagctctccgacaaaatcatcaagctcgacctggtcgatgcgatgatccagggagcggacccgaaagtctctgacgagcagagcgaccaggtggaacgctccgcgtgcccgacctgcggctcctgttccgggatgttcaccgccaactccatgaactgcctgaccgaagcgctgggcctgtctcagccgggcaacggctcgctgctggcgacccacgccgaccgtaagcagctgttccttaacgcgggcaagcgcatcgttgagctgaccaaacgctactacgagcaggacgacgccaacgcgctgccgcgtaacatcgccagcaaagcggcgttcgaaaacgccatgacgctggatatcgccatgggcggttccaccaacaccgttctgcacctgctggccgccgcgcaggaagctgaaatcgacttcaccatgagcgacatcgacaagctctcccgcaaagtgccgcagctgtgtaaagtcgcgccgagtacccagaagtaccacatggaagatgtccaccgtgcgggtggcgtgattggtattctcggcgagctggatcgcgccgggctgctgaaccgcgacgtgaaaaacgtgctcggcctgacgctgccggagtcgctggagcagtacgacgtgatgctgaccaaagacgacgcggtgaaaaacatgtatcgcgccggtccggcgggcatccgtaccacccaggcgttctcgcaggattgccgctgggacacgctggatgacgatcgcgccgaaggctgcattcgctcgctggaacatgcctacagcaaagacggcggtctggccgtgctgtacggtaacttcgcggaaaatggctgcattgtgaaaaccgcaggcgtggacgacagcatcctgaaatttaccggcccggcaaaagtgtatgaaagccaggacgaagcggtagacgctatcctcggcggcaaagtggtggaaggcgacgtggtggtcattcgctacgaagggccgaaaggcggtccgggcatgcaggagatgctctacccgaccaccttcctgaaatcgatgggcctcggcaaagcctgcgcgctgatcaccgatggtcgtttctctggcggcacgtcaggcctctccattggccacgtctcgccagaagcggcaagcggcggcaatatcgcgatcatcgaagatggcgacctgatcgaaatcgacattccgaaccgcggcattcagctgaagctgagtgaccaggagattgcggcccgtcgtgaggcgcaggaagcccgcggcgacaaagcctggacgccgaaagatcgtcagcgtgaagtctccttcgccctgcgcgcttacgcgagtcttgccaccagtgcagataaaggcgcggtgcgcgataaatctaaactggggggctaa

SEQ ID NO: 117886 - DNA, 930 bp, Enterobacter cloacae
atgacgacaaaaaaagctgattacatttggttcaatggtgagatggttcgctgggaagacgcgaaagttcacgtgatgtcccacgcgctgcactacggcacctccgtgtttgaagggatccgttgctacgactctcacaaagggccagtggtgttccgccatcgcgaacacatgcagcgtctgcatgactcagccaaaatttatcgtttcccggtctcccaaagcgttgatgagctgatggaagcctgccgcgaggtgattcgccagaacaaactgaccagcgcctatattcgtccgctggtcttcgtgggtgatgtcggcatgggcgtcaacccgcccgctggctataacaccgatgtgatcattgccgcgttcccgtggggcgcctacctgggcgcggaagcgctggatcaggggatcgacgcaatggtttcttcctggaaccgcgtggcgccaaacactatcccgactgcggctaaagcgggcggtaactacctttcctcactgctggtcggcagcgaagcgcgccgtcacggctatcaggaaggtatcgcgctggatgtgaatggctacatctccgaaggcgcgggtgaaaacctgtttgaagtgaaagacggcattctgttcaccccgccattcacttcgtccgcgctgccgggcatcacccgcgacgccatcatcaagctggcaaaagatctgggtatcgaagtgcgcgagcaggtactgtcccgcgaatccctgtacctggctgacgaagtgttcatgtccggtaccgcggctgaaattacgccggtgcgtagcgtcgatggcattcaggtgggcgaaggccgctgtggctcggtcaccaaacgcattcagcaagccttcttcggcctgttcaccggcgaaacagaagacaaatacggctggttggatcaggttaatcactaa

SEQ ID NO: 117887 - DNA, 264 bp, Enterobacter cloacae
atgatgcaacatcaggtcgccgtgcaggctcgcttcaacccggaaactttagaacgcgtattgcgcgtggttcgccaccgtggctttcagatttgctctatgaatatggaaacggccaccgacgcgcagaacatcagtatcgaattaaccgttgccagcccgcggccggtcgacttactgtttagtcagttatcaaaactggtagacgttgcccatgttgccatctgccagagcacaaccacatcacaacaaatccgcgcttaa

SEQ ID NO: 117888 - DNA, 1647 bp, Enterobacter cloacae
atgaatggggcacaatgggtagtacatgcgttgcgcgcgcagggagtcgaaaccgtattcggttatccgggtggcgcaattatgccgatttacgatgcactgtatgacggcggcgtggaacacctgttgtgccgacacgagcagggcgcagcgatggccgccatcggttatgcccgtgcgaccggtaaaaccggcgtctgtatggccacctccggtccgggcgcaacgaacctgatcaccggcctggctgacgcgctgctcgattccgtacccgtggtggcgatcaccggccaggtggcctctccgttcatcggcaccgatgccttccaggaagtggatgtgctcggtttatcgctggcctgcaccaaacacagcttcctcgttcagtctctcgaagagctgccgcgggtgatggccgaagcgttcgaggttgccagctctggccgtcctggcccggttctggttgatatcccgaaagatatccaggttgcactcggcgatctggagccgcatttctctaccgtggaaagcgataatgcgttcccgcatgcagaggtggaagaggcgcgtcagatgatggcgcaggccaaacaaccgatgctgtacgtaggcggcggcgtgggcatggcgcaggctgttccggcgcttcgcgcgttcattgcgaccacgcaaatgcccgccacctgcacgctgaaaggtctcggtgcggtagaggcggattacccgtactacctcggcatgctggggatgcatggtaccaaagcggcaaacctggcggtgcaggaatgcgacttgcttatcgccgtcggcgcccgttttgacgaccgcgttaccggcaagctgaataccttcgcgccgaacgccaaagtgatccatatggacatcgacccggcggagatgaacaaactgcgtcaggcgcatgtcgcgttgcagggcgatcttaacgcgctgttaccggcgctggagcagccgctggatatcaacccatggcgtcagcacaccgctgatatgcgtactgaacacgcgtggcgttacgatcacccaggcgacgccatctatgcgccgctgctgttgaaacagctgtcagaccgtaaacccgcagacagcgtggtaacgacggatgtcggccagcatcagatgtggtcagcccagcacatgacctacacccgcccggagaactttatcacctcgagcggcttaggcacgatgggcttcggtctgccagcagccgttggcgcgcaggttgcccgcccgaacgataccgttatctgtatctccggtgacggctccttcatgatgaacgtccaggagctcggcaccgtgaagcgtaagcagttaccgctgaagatcgtcttgctcgataaccagcgtttaggcatggttcgccagtggcagcagctgttcttccaggagcgttacagcgaaacgaccctgaccgataaccccgatttcctcaccctggccagcgccttcggcattcctggccagcacatcacccgtaaagaccaggttgaagcggcactcgacaccatgctgtcaagcgaagggccatacctgcttcatgtctcaatcgacgagcttgagaacgtctggccgttggtaccgcccggtgccagtaactcacaaatgctggagaaattatcatga

SEQ ID NO: 117889 - DNA, 1521 bp, Enterobacter cloacae
atgtcactgtcagttgtttatacacgcgcggccatcggcgtgaaggcaccgcttatttctgtagaggttcatttaagtaatggactgcccggactgacgctggtcggcttaccagaaacgaccgttaaagaagcgagggatcgcgtgcgcagcgcaattattaatagcggttatgcttttccggcgaagaagatcaccattaaccttgcgcccgccgatttgccaaaggagggagggcgatatgatttacctattgctatagcgcttctcgcggcttctgaacagctcaatacgccagggctaagctcgtgtgagttcgtgggtgaattagcgcttacaggcgcgttaagaggcgttcccggagcaatctcgggtgcgcttgaagccatacgcgcgggaagacaaatcattgtggccaatgaaaatgcctctgaagtaagccttatcgccgaaaaggggtgtcttgtcgcaggacatttgcaagaggtttgcgcctggctggaaggccgacacgagcttgccgagccgcaggagaatgacgaggtggcgccagcttcgcccgaagatctcagcgatattatgggtcaggaacagggtaagcgggcgttagagataacggccgcgggtgggcataacctgttactgataggtccgccaggcacggggaaaacgatgctggcgagcagattgagcggcctgttgccacccctcaataatcatgaagcactggaaagcgccgcgatatttagcctggtcagttctacgtcgctgcataaacagtggcgccgccgtcctttccgctctccacaccacagtgcgtctcttaccgcgatggtgggcgggggttcgatccccggaccgggtgaaatctcactggcgcacaacggcattttgtttctggatgaattgccagagtttgaacgccgcgtgctggatgcattgcgggagccgattgaatccggcgaaatccatttgtctcgtactcgggccaaaataagctaccctgcgcagtttcagctagtcgcggcgatgaaccctagccctacgggtcattatcagggcaatcataaccgctgtacgccggagcagacgctgcgctatctgagtaagctgtctggccccttcctcgaccgttttgatttatctctcgagatccccctgcccccgcccggtctgctgaggcaaaccggtattaggggcgaaagctcagcaactgtgcgtgaacgggttattgcggcgcaggcgcggcagtatgctcgtcagaacaggctgaatgcccggctggataacagcgggatccgacagttttgttctctcaacgctgaagatgcaggctggctggaagagacactgacgcggtttgggctatccattcgcgcgtggcagcgtttgttgaaagtagcgcgcacggtcgccgacgtggagggctgccccggaatagagaggcggcatttgcaggaggcattaagttatcgtgcgatcgatcggctgctgttgcatctgcaaaaaaagctggcataa

SEQ ID NO: 117890 - DNA, 339 bp, Enterobacter cloacae
atggcggaaagctttacgacgactaatcgttttttcgacaataaacattacccgcgcgggttctctcgtcacggcgatttcactatcaaagaagctcaacttcttgagcgccatggttatgcctttaacgagctggatctgggtaaacgtgaaccggcaaccgaagatgaaaaacagtttgtctctgtttgccgtggtgagcgtgagccgcagtctgatgcagaacgtgtatggatcaagtatatggctcgcattaagcgtcctaagcgtttccatacgctgtctggcggtaagccgcagatggaaggtgcagaagactacaccgagtctgacgattaa

SEQ ID NO: 117891 - DNA, 822 bp, Enterobacter cloacae
gtggatacggaattgctaaaaactttcctcgaagtgagcagaacgcgacactttgggcgagcagctgaagccctctacctgacgcagtcagcagtcagttttcgtattcgacagctggaaaatcaactgggtgtgaacctttttacccgccatcgcaacaatattcgtttaactccggctggtgaaaagttgttgccttatgcagaaaccctgatgaatacctggcaggcagcgcgaaaggaggttgcgcacacctcccggcataatgaattctcgatcggtgccagcgcatcgctatgggaatgcatgctcagccaatggcttatgcggctatatcgcacacacaaccatctgcaatttgaggcgaggattgcgcaacgtcagtcgctggttaagcaactccacgagcggcagcttgatctgctgatcaccacagaagcccccaagatggacgaatttagcagccagattgttggacaatttagcctggcgctctatgcatcggagcctgcaatgatgaaggccgacctgaattatttacgcctggaatgggggcctgattttcagcaacacgagacggggttaattgccagcgatgatatcccgcagctcacgacaagctcagcggagatcgcatgccagcatcttcccgcattgaaaggctgtacctggttacctgttcgctgggcggataataatcctacactccatgttgtcaccgattcgacaacgctctccagaccgctgtatgccatttggctgcaaaacagcgataagcagtcgcagataaaagatctgttaaaaaccaacatactggattaa

SEQ ID NO: 117892 - DNA, 153 bp, Enterobacter cloacae
atgacgccattaaaaactacgttaggcatcgtctttattatttgcctgacgatagtgatctttacctttattactcgcgataagctctgcgagttttcaataaagagtgaacatcaggaggtggcggcgaaattagcctgtaacgcaggctaa

SEQ ID NO: 117893 - DNA, 675 bp, Enterobacter cloacae
atgaaaaccctttttctgatgttgttatttttaaccgcatttgcccatgccgatgagataggcagccagtataaaaagcaggctgaagcgggcgatgcgcgcgcgcagtattatcttgccgatacctggttcagttccggcgacagcgcgcaggcggcgctgtgggcggaaaaagcggcaaaaggcggtgatgtcgacgccatggcgctgctgtcgcaaatccacttttcgcagggcgactatgctcaggccaaagccctggcccagcaggcaaacattgcgggcagcaaacgcggcgcgatcatgctggcgcgggtgctggtgaacacgcaggcgggcaaaaccgactacccgcaggccatcgcactgctgcaatcggcgaccgaagacatcgatagcgactcggcggtagacgcgcaacagctgctggggctgatctatgccaacggcgttgaagtccctcaggatgacgtgcaggccgcgtcgtggttcaagcggagttcggctctgtcccggacgggctatgcggagtactgggcaggaatgctgttcaggcagggtgagaaaggctttatcacaccgaataagcagaaagcgctttactggttaaacctgagctgtaccgaagggtttgataccgggtgtgaagagtttgatgcgttgagcggggagtaa

SEQ ID NO: 117894 - DNA, 1314 bp, Enterobacter cloacae
atgaaaaatttgaaagtcagcctggcctggcagatcctgctggcccttgtgctgggcatcttgctgggcagttacctccattatcatagcgacagccgcgagtggctgattgcgaaccttctctcccctgcgggcgatatctttattcatctgatcaagatgattgttgtgccgattgtgatctcgacgctggtggtcggtatcgcgggtgtcggtgatgcgaaacagttaggccgcatcggcgttaaaactattctctatttcgaagtgatcaccacggttgccatcgttcttggcatcaccctggcgaatgtgttccagcctggtgccgggatcgatatgtcgcagctggcgacggtggatatttcgaaataccaaagcacaaccgccgatgtgcagagccattcgcatggactgatggggactattctctcgctggtgccgaccaacattatcgcgtccatggcgaagggcgagatgctgccgatcatcttcttctcggtactctttggtctggggctttcttccctgcccgcgacgcaccgtgaaccgctggtcaccgtgttccgatctgtctccgaaaccatgttcaaagtcacccacatggtgatgcgctatgcgccggtcggggtattcgcgctgattgcggtgaccgtagcgaacttcggctttgcctccctgtggccgctggcgaagctggtgattctggtgcacttcgcgattctgttcttcgcgctggtagtgctgggcattgtggcgcgcctgtgcgggctcagcatctggatcctgatccgcatcctgaaggatgagctgattctggcctactccacggcaagctccgagagcgtactgccgcgtatcattgagaagatggaggcctacggtgcgccggcgtccattaccagcttcgtggtgccaacgggttactcctttaacctggatggttcgacgctgtatcagagtattgcggcaatctttatcgcgcagctgtacggcattgacctgtcgctgtggcaggagatcgtgctggttctgacgctgatggtgacttcaaaaggcatcgcaggcgtcccgggcgtctccttcgtggtgctgctggcgacgctgggcagcgtcggtattccgctggaaggcctggcgtttattgccggtgtggaccgtatcctagacatggcgcgtactgcgctgaacgtggtgggtaatgcgctggcggtgctggtaatctccaagtgggaacacaagttcgaccgtaaaaaagcgctagcgtatgaacgcgaggtgctgggtcgttttgataaaacggctgaccagtaa

SEQ ID NO: 117895 - DNA, 1959 bp, Enterobacter cloacae
atgagccaaatacacaaacacgacattcccgcaaacattgcggaccgttgcctgataagcccggagcaataccaggagaaataccagcagtccgtttccagccctgacgcgttctggggtgagcagggccacatcctcgactggatcaaaccttatcagaaggtaaagaacacctctttcgcgccgggcaacgtctccattaaatggtatgaagacggcacgctgaacctggcggcgaactgcctggaccgccatcttgctgaacgcggcaacgaaacggccatcatctgggaaggcgacgatgcctctcagagtaaacacatctcgtataaagaacttcatcgcgacgtgtgccgctttgccaacgtgctgctggcccagggcattaaaaaaggcgatgtggtggcgatctatatgccaatggtgccggaagccgccgtggctatgctggcctgcgcgcgcatcggtgcgatccactccgttatcttcggcggtttctcgccggaggcggttgccgggcgtattgtcgactcaaattcgaagctggtgatcaccgctgacgagggcgtgcgcgccgggcgcggtattccgctgaagaaaaacgttgatgaagcgctgaaaaacccgaacgtgaaatccatcagtaacgtcattgtcttcaaacgcacgggcggcaaaatcgactggcacgaggggcgcgacctgtggtggagcgatctgattgaaaacgccagcgaccagcatcagcctgaagagatgaacgcggaagatccgctgtttatcctgtatacctccggctccaccggtaagccgaaaggcgtgctgcataccaccggcggctatctggtttacgcggccaccacctttaaatacgttttcgactaccatccgggcgacatctactggtgtaccgccgacgtgggctgggtgaccggtcatagctacctgctgtacggcccgctggcctgcggcgcaacgacgctgatgtttgaaggcgtaccgaactggccgaccccggcgcgtatgtgccaggtggttgataagcatcaggtcaacattctctacaccgcgccaacggcgatccgcgcgctgatggcagaaggagataaagctatcgaagggaccgaccgctcttccctgcgtatcctcggctccgtgggcgagccgatcaaccccgaagcctgggagtggtactggaagaagatcggcaacgagaagtgcccggtgatggatacctggtggcagaccgaaaccggcggcttcatgatcaccccgatgccgggcgccacacagctgaaagccggttcggccacccgtccgttcttcggcgtgcagcctgcgctggtggataacgaaggcaatccgcaggaaggcgctaccgagggcaacctggtgatcgtcgattcctggcctggccaggcgcgtaccctgttcggcgaccatgagcgcttcgagcagacctacttctcgaccttcaaaaacatgtacttcagcggcgacggcgcgcgccgggatgaagacggttattactggatcaccggacgcgtggacgacgtgctgaacgtctccggccaccgtctgggcacggcggagattgagtctgcgctggtgtcgcatccgaaaattgccgaagcggcggttgtcggcattcctcacaacatcaaaggccaggcgatctacgcctacgtcaccctgaaccacggcgaagagccgtcgccagagctgtataccgaggtgcgcaactgggtgcgtaaagagatcggcccgcttgccacgccggacgtgctgcactggaccgactcgctgccgaaaacccgttccggcaagattatgcgccgtatcctgcgcaaaatcgcggcgggcgacaccagtaacctcggtgatacctcaacgctggccgatcctggcgtggtggacaaactgctcgaagagaagcaggccatcgcaatgccttcctag

SEQ ID NO: 117896 - DNA, 315 bp, Enterobacter cloacae
atgaataacgatatttgtcagcagatagagaatagtgcgcactacagggagctcgtcgaaaaacggcaacggtttgccttcatcctttccatcatcatgctgattatctacgtcggctttattctgctgatcgcctttgcgccgcactggctgggcaccccgctgcatgagggtaccagcgtcacgcgcggtattccgattgggattggcgtgatcatcatttcgtttgtgctcacgggtgtgtacgtctggcgtgcgaacggtgaattcgatcgtcttaacagagaagttctgcgcgaggtaaaagcatcatga

SEQ ID NO: 117897 - DNA, 1650 bp, Enterobacter cloacae
atgaagcgagtcctgacggcgctagccgccacacttccctttgctgcccatgcggcagatgcccttaccggcgaggttcagcgccagccaaccaactggcaggcgattatcatgttcctgattttcgtggtgctgacgctgtacatcacctactgggcgtcgaaacgcgtacgctcccgtaacgattactacaccgcgggcggcaacattaccggcttccagaacgggctagcgatcgcgggggactttatgtccgccgcctcgttccttgggatctccgcgctggtgtatacctcagggtatgacggcctgatctactccctcgggttcctggtgggctggccaatcattctgttcctgattgccgagcgcctgcgtaacctggggcgctatacctttgctgacgtcgcctcctatcgcctgaagcaggggccgattcgtaccctctccgcctgcggttcgctggtggtggtggcactctatctgatcgcccagatggtcggcgcgggcaaactgatcgagctgctgttcggcctgaactaccacgtcgcggtggtgctggtcggcgtgctgatggtgatgtacgtcctgttcggcggcatgctggccaccacctgggtacagatcatcaaagcggtactactgctgttcggcgccagctttatggcctttatggtgatgaagcacgtcggattcagcttcaataatctgtttaccgaagcgatggcggtccacccgaaaggggaagcgatcatgagcccgggcgggctggtgaaagatccgatatccgcgctctcgctcggtctcggcctgatgttcggtaccgctggcctgccgcatatcctgatgcgtttcttcacggtgtcagatgcgcgtgaagcgcgtaaaagcgtgttctacgccaccgggtttatgggctacttctacattctgacctttatcatcggcttcggcgcaatcatgctggtgggggcaaacccggcgtttaaagacgcggcgggcgcgcttatcggcggtaacaacatggcggcggtgcatctggccgacgcggtgggcggcaacctgttcctcggctttatctctgccgtggcctttgccaccatcctcgcggtggttgcagggctgacgctggccggcgcgtcggcggtttcgcatgacctctacgccaacgtcttccgcaaaggcgcaagcgagcgcgatgagctgaaagtctccaaaatcaccgtgctggtgctgggcgtcgtcgccatcctgctggggattttgttcgagaaacagaacatcgcctttatggtcgggctggccttctcgattgcggcaagctgtaacttcccgatcattctgctctccatgtactggtcaaaactgaccacccgtggggcgatgattggcggctggctgggcctgctgacggcggtgattctgatgatcctcggcccgaccatctgggtgcagatcctcggtcacgaaagcgctatcttcccgtatgaatacccggcgctgttctccattgccgtggcgtttatcgggatctggatcttctctgccaccgataattcaccggagggtaacctggagcgtgaaaaattccgcgcccagtttatccgctcgcaaaccggcctgggcgttgagcagggccgcgcgcactaa

SEQ ID NO: 117898 - DNA, 690 bp, Enterobacter cloacae
atgactaactttcagataagcgtgctgtgcctgattgcgacagtcgtcatctactttgccaacaagcgcctgtatcgccgctttcgcgcgctgccgctgatgccgctggtctttacgccgatactgctggtgctgatgctggtcttcggccatatctcctggcagaactacattggcgaatcccactggctgctgtggctgctcggcccggcgaccatcgccttcgccgtacccgtttatgacaacctcgccattatcagacgccactggatgtcgctcagcgcgggtgtcgtcaccgcgacggtggtggcggtgtgcagttcggtctggctggcgcggttgtttaccctgtcggatgaaatccagcgcagcctggcggtgcgttcggtgaccacgccgtttgcgctggcagccgccaaaccgctcggtggccagccggatctggtggcgctgtttgtggtggtgacgggcgtcttcggcatggcagtgggggatgtgctgtttctgcggctttccattcgcgaagggatggcgaaaggcgcggggtttggcgcggcgtcgcacggggcggggacggcacgttcgtatgagctgggacagcaggagggcgtggtcgcgagcctggtgatgatgctttcgggcgtcacgatggtgctgattgcgccgctggtggcgtgggtgatgttttaa

SEQ ID NO: 117899 - DNA, 411 bp, Enterobacter cloacae
atggccgtggcgttaagccgtgttacgcctgccgttgtgcaacgactccaggtaccggttcaggtactgctctacgcgggactgtttgttttcgcggaatatcttgtcgactggctgcatctgcctttacccgccaacctggtggggatggtgctgatgctgacgctgatcctctgtcgcgcgttgccccttagctgggtgcgggccggcgcacgctggctgctggcggagatgctgttgttctttgtgccggctgtggtggcggtggtgaattatgcccagttgctgatggtcgacggctggcgcatctttgcggttatcgccctgagcacgatgatggtgctgggcgccaccgcctgggtggtggataaagtgtatcgctttgaaatcagcaggcagaagcatgactaa

SEQ ID NO: 117900 - DNA, 888 bp, Enterobacter cloacae
atggacataagaacgctgcgctattttgtcgaggtggttcgccagcaaagttttacccgcgcagcggagaagttattcgtaacccagccgaccatcagcaagatgctgaaaaatctcgaagatgagctgaactgtaccctgctgatccgcgacgggcgcaagctactgctgaccgataccggacgcgtggtgttcgagcgcgggctggcaattctggcggagttccgccagctggaggccgagcttggggacatcaaccatctgacaaaagggctgctgcggctcggtattccgccgatggtcggcatgatgatggccgggccgataagcctgtttcgccagcgctatcccggcgttgagctaaaaatttctgaatttggcggcctgaccgtgcagcaggcggtgatgaacggtgaactggacgtggccatgacggcccttcccgtggaggaggaaagcggcctggcgacgctgcctctgttcagccacccgctgtgcgtgctggtgccgcgctccggcgactggctgaagattgagtcagtaaaacccgagctgctcggcgaacacccgctgctgatttacaacgaagatttcgccttaagccgccagctgatggcgctgtttaaccagcacaacgtaaagccgcgcattgcggtgcgcagcggtcagtgggattttctggcggcgatggtacaggcgggcgtggggattgccattctgccgcagccgatctgcgagcggctggataaaaatacgctgcgctggatcccgctggagagcgacctgcactggcagctggggatgatctggcgtgaaggggtctatctgtcgcacagcgcgcaggcgtggttgcaatgctgtgaggggttttgggtaccctcaccctaa

SEQ ID NO: 117901 - DNA, 1647 bp, Enterobacter cloacae
atggaaattttcttcacaatactcatcatgacccttgtggtctcattatccggggtggttacacgcgtactgcccttccaggtccccctgcctttaatgcaaatagctatcggtgcgctgctggcgtggccgacgttcggtctgcacgtggagttcgatccggaactgttcctcgtgctgtttatcccgccgctgctgtttgccgatggctggaaaacgccgacgcgcgaatttctggagcacgggcgagagatcttcggcctggcgctggcgctggtggtggtcaccgtggtcgggattggtttcctgatctactgggccgtaccggggatcccgctcatacccgcctttgcgctggccgccgtgctgtcgcctaccgacgccgtggcgctgtccggcattgtgggcgaagggcgcattccaaagaaaatcatgggcattttgcagggcgaggcgctgatgaacgacgcctctggcctggtcgccctgaagtttgccgtggcggttgccatgggcaccatggtctttaccgtcggcggtgcgaccctggaattcttcaaggtggcgattggcggtatcctcgcgggctttgtggtgagctggctgtacggacgctcgctgcgcttcctcagccgctggggtggcgacgaacccgctacgcagatcgtcctgctgttcctgctgccgtttgcctcttacctgattgccgaacacatcggcgtgtcgggtattctggcggcggtagccgcggggatgaccatcacccgctccggcgttatgcgccgcgcgccgctggcgatgcgcctgcgtgcgaacagtacctgggccatgctcgagtttgtgtttaacggcatggtgttcctgctgttgggtctgcaactgccgggcattatggaatcctcgctgattgcagccgaagcggatccaaacgttgaagtctggatgctgtttaccgatatcgtgctcatctaccttgcgctgatgctggtgcgtttcggctggctgtggacgatgaagaaattcagcgttcgcttcctgaccaaaaagccgatggagttcggctcgtggaccacgcgcgagctgctgattgcctctttcgcgggcgtgcgcggggcgatcacccttgctggtgtgctctccattcctctgctgctgccgacgggtgacgtcttcccggcgcgctacgagctggtgttcctggcggcgggcgtgatcctcttctccctgtttgtcggcgtgattatgctgccgattctgctgcaacatattgacgcaggggactcctcgcaacagcacaaagaagagcggattgcccgtgcggcgacggcggaagtggcgattgtcgccatcgagaagatggaggagcgtctggccgccgatgccgaagagaacattgataaccagctgctgaaggaagtcagttcacgcgtgatcggtaatttgcgtcgccgtgctgacggacgtaacgacgtggaaagttcgttgcaggaagagaacctcgaacgccgtttccgcctggcggcgctgcgctccgagcgtgccgagctgtatcacctgcgcgcgacgcggcagatcagcaacgagacgctgcaaaagctgctgcacgatctggatctgctggaagcgttgttgatagagaatcagtag

SEQ ID NO: 117902 - DNA, 1350 bp, Enterobacter cloacae
atgtctacgccatctgcgcgtaccggcggttcacttgacgccatgtttaaaatttctgctcgcggcagcaccgtgcgccaggaagttgttgccggtctgaccacgtttctggcgatggtgtactccgtcatcgtggtgccaggcatgctcggcaaagcgggcttcccgccagcggcggtcttcgttgccacctgcctggttgcgggtgtgggttcgattgtgatgggcctgtgggcgaacctgccgctggcgatcgggtgcgccatctccctgaccgcgtttaccgccttcagcctggtgctgggccagcatatcagcgtcccggtagcgctcggcgccgtgttcctgatgggcgtgctgttcaccgtaatttcagcaaccggcattcgtagctggattttgcgcaacctgccgcagggcgtggcgcacggcaccggcatcggtattggcctgttcctgctgctgatcgctgccaacggcgtgggtctggtcatcaagaacccgctggacggcctgccggttgcgctgggtaacttcgcgagcttcccggtgatcatgtcgctggtgggtctggcggtgatcattggcctggaaaaactgaaagtgccgggcggcattctgctgaccattatcggcgtgtccatcgtcggcctgatcttcgacccgaccgttcatttctccgggattttcgccatgccgtcgctgagtgatgacaaaggcaactccctgattggcagcctggatattgtgggcgcgctgaacccggtgatcctgccaagcgtgctggcgctggtaatgaccgcggtgtttgatgccacgggcaccatccgcgcggtggccggtcaggctaacctgctggataaagacggacagattattgacggcggcaaagcgctgaccaccgactccctgagcagcgttttctctggcctggtaggtgcggcgcctgcggcggtgtacattgagtccgcagcgggtacggcggcaggcggtaaaaccggcctgacggccatcaccgttggcgtgctgttcctgctgatcctgttcctctctccgctctcttatctggtgccggcttacgcgaccgcacctgcgctgatgtacgtcggcctgctgatgctgagcaacgtggcgaaaatcgacttcgcggattttgttgatgctatgtccggcctgatcactgcggtattcatcgtgctgacctgtaacatcgtgaccggcattatgatcggcttcgcctcgctggtgattgggcgtctggtctccggtgagtggcgtaagctgaacatcggtaccgtggtcatcgccgttgcgctggtggcgttctacgcgggcggctgggccatctga

SEQ ID NO: 117903 - DNA, 672 bp, Enterobacter cloacae
atgctaacggtccaccaccttaatcagtctcgttcacatcgcgtcctctgggcgctggaagagctgggtctgacgtatgagattgtgcgctaccagcgcgagaaatccatgcttgcaccggattcgctcaaaaaagtgcatccgctggggaaatccccggtactggaagataacggactggtgctggccgaatcaggcgcgattctggaatatcttcaggaaacgtacgattcggcgtcacgattcaaaccgttagatcccgcccataaagtgcagtatcgcttctggctgcattacgccgaagggtctttgatgccgctcctgttaatgaagctggtgtttaacagcctcggcaaaccacccgtcccgtttggcctgcgcacgctgggtaaggcgctggggcagggggtgcaaaaagcgtatctcaaccgccagctggaaacgcatgcgcgctttattaacgatcatcttgccgaaaacagctggtttgccggcgacacgctgaccatggctgatatccagatgagttttcccctcttcgccctgctggcgagaggcggcatcgacaatctcgaccacatagcggcgtggaaacagagagtggaggcacgtccgggctggcagacaacgcttgcgaaaggcggcccgctgacaatccccggcgagggatga

SEQ ID NO: 117904 - DNA, 459 bp, Enterobacter cloacae
atggaaaagagattaccgcgcatcaaagcgctgttaacccccggtgaagtggctaagcgaagcggtgcggcggtgtcggcgctccacttctatgaaagcaaagggttaataaaaagtatccgtaacgccggaaaccagcggcgctatacccgcgatgtgctccgctacgtggcgatcatcaaaattgcgcaacgtatcggcattcctctggccaccatcggtgacgcgttcggcgtattgccggaagggcactcgctgagcgcgaaggagtggaagcagctgtcgtcccagtggcgagaagagctggatcgtcgtattcacacgctggtggccctgcgcgatgagctggacggctgcattggttgcgggtgtttatcacgcagcgattgtccgctacgtaacccgggtgacaggctgggcgagcagggaacgggggcgcggttgctggaggaggattga

SEQ ID NO: 117905 - DNA, 327 bp, Enterobacter cloacae
atgtcgcatcagcaaattattcagacacttattgaatggattgatgaacatatcgaccagccgttgaacattgatgtggtcgctaagaagtcgggctattcgaaatggtatttacagagaatgttccgcaccgtaatgcatcaaacgctgggtgattacattcgccagcgcaggctcctgctggcggcgcaggcgttacgctcaacgcagcggcccatttttgatatcgcaatggatctgggctatgtgtcgcagcagaccttttcccgcgtcttccgccgcgagtttgaccgtacgccgagcgactaccgccatcagctcaattaa

SEQ ID NO: 117906 - DNA, 1566 bp, Enterobacter cloacae
atgaatcgtagcgcgctgcgcaacatgctcaaagtggtcgggattatcatggtagttatgctgccggtgatgcttgcgctatggtttgcccagcttagagccgtgtcggaaatcagcgcccagctgcgcacgtttgctgaacttgctttaaacaaaactgaacgggttattcaacaggttgatctggcccgggaagacgcggaaaaatatcagggaaaagtgtgtacgccggagcatcgtcaatatatgttgaacgtttcccgcggtcgtctttttgttgccgatttaatttatgctgaaggccagtcgtttctctgctcgaccctttttacgccggatcatccttacaccattcccgctgccaattacacacgtaaacccgacgttgctatctattattttcgcgatacgccattttttgatggttataaaatgatatatatgcagcgcggaaattatgtcgcagtggtcaacccgctttcgtacagtgaggtgatgtcagacgatcgttccctgtcgtggggggtgtatgacaccgtcagcaatgcattcttttctgtaagccagaaagccaatatttctttattgcattcgatgcttcgacatcaggaaacgacttttcagaaaggtgaccgtttttatacgatcgtgaaatccgggcagcggccgattgcggccatcgtttcaacctccagcgcccgtttttataaaacgctttatcatcaggccaccctgacgctaccgctggggataatttgcagcattattattctgctggtgtggtcgcgtacacaccgtgaattcaattcgcctggccgacttctgcaccgggcgctgaataaacgccagctgtgcgtccattatcagcccattattgatattaaaaataaccagtgcgtgggggcagaggcgttgttgcgctggcctggattcaacggtcaggttatgagcccggcggaatttattcccctggcagaaaaagaggggatgattgagcgcattacggattacgtcgtggaggaggtgttcagcgatctgggccattttcttgccgctcatcccggtctgtatgtctcgattaacctgtcggcgtcggattttcactcttcgcgtcttatcgccctgatctccgacaaagcccgcttttactcggttcgcgcgcagcaaatcaaaattgaggtgacggagcgggggtttattgacgtgccaaaaaccacgccggtcattcaggcgtttcgccaggcggggtatgaagtggcgattgatgatttcggaaccggctactctaacctgcataacctctattcgctgaacgtcgatatcctgaaaatcgacaaatcctttatcgataccttaaccaccaacagcaccagccacctgattgccgagcacatcattgagatggcgcaaagcctgcggctgaaaaccattgcggaaggggtcgagacgggggagcaggtgagctggttgctgaagcgtggcgtgcagtattgtcagggatggcacttcgcgaaagcgatgccgccccaggcatttatggcctggcagcagcaacccttgcgttaa

SEQ ID NO: 117907 - DNA, 1419 bp, Enterobacter cloacae
atgacctgcgaaaagataatgaaagaaaaaagacgcgagattattaacgacagcatgcaggcgctgcatgccctggcgaagctgatgccgcaactcaacgcgcagtgttcgccggttgaaatgctggaaattatcaacagcgcactgggggcaaatctctcatgggtcagtgtcgaatccgcagacgggccgcgcgtggtttgtgccggcgacgtgacgtgtcacgcctttaacgtggcggattttcttgccagcaccctgttgcagcggcatcaccgcgcctggcgggtgatctactggaaagagcatattggccgggcggtattttcccctcagcacccaggctatgcgcggctgcaaagcggcgtgctgtgtaaattctcagcgcatggcagacagtgcagtggttatttctttttggcttttaatgaaaaactgacctcgttgccgatattgaaaaatatcgtggtggtattggttgagaagctaaaagattattttgatgacatcatcgtgcgggaaaaaacggcgcaggaaatgcagcgcgtcgtcacgcaatataaaaccttatttgagcgtgctccggtattaatgaacgcctttgacaggcataaccggtgtgtattgtggaatgccgaatgcgaaaaagtctttggctggagtatgactgaaatcggcgagcatcccgatccgctggccctgttttacccggatcctgaggagcgacagcgcgtgcaggagtcggttcgtttcgcaccacttaaggatatgtacgaatggcacccggtgcgtaaagacgggacacagttaaccattctctggtcaaacatccttttgccggataactccattctcaacattggcctggatatcaccgaacgtaaaaaagcagaacagcagctgaccgtcaaagccaccacggacgatctgacgggctgtctgaatcgctcgacaatcttacagcgtctcaaaatagcgctggcagccagttcgccgcaggatgtcagtagccacttctgtctcctgatgttcgatctcgatcatttcaagcagatcaacgatcggtggggacatcaggttggcgatgcggcattgatccacttttgcgaccgtattcgcgaggtgagcccggccgggtcggcgctgggacgggtggggggcgaagagtttgttcttctgctggcgcacacggatggtatggccgctacgttgctctcttcccggctgcgtgccgcgctgatctcaaaaccgctgcgtgtgggcgataaaacgctggtactctctttcagcgccggggtggttgaagtctgtcaggggcaacgggatacttctgccatactgatgcgtgccgataaggcattatatgacgccaagcgtacgggaagaggaaaaacggtcctggcgtctgattatttataa

SEQ ID NO: 117908 - DNA, 282 bp, Enterobacter cloacae
atggcaaccattaccaccagcatggtgctcctgcgctggccgttgttgagcgcggttttgatgttcctggccagcacgttaaacattcagtttcgaaagtccgactacgcaggtcttgctgtgattagcaccctgttagggttgggcgccgcatgctggttcgcgacaggtttgcttggcattacgctggtagacattgccgccgtctgggaaaacattaaagtggtgatggttgaagccatgagccacactccgccagactggccgatggtgattacctga

SEQ ID NO: 117909 - DNA, 531 bp, Enterobacter cloacae
atggccagcagaggcgtaaacaaggtgattctcgtcggtaatctgggccaggacccggaagtacgctacatgccgagtggtggcgcagttgccaacattacgctggctacttccgaatcctggcgtgataaagcgaccggagaaatgaaagagcagaccgaatggcaccgcgttgtgctgtttggcaaactggccgaagtggccggtgagtatctgcgtaaaggttctcaggtctatatcgaaggccagctgcgtacccgcaaatggaccgaccaatccggcgctgagaagtacaccacggaagtggtggtgaatgtgggcggcaccatgcaaatgctgggtggccgtcagggcggtggcgcaccggcaggtggcggtcagaatcagcagcagggtggttggggtcagcctcagcagcctcagggcggcaaccagttcagcggcggcgcgcagtcccgtccgcagcagcagtctgctccggcaccgtctaacgaaccgccaatggatttcgacgacgatatcccgttctga

SEQ ID NO: 117910 - DNA, 2823 bp, Enterobacter cloacae
atggataagatcgaagttcggggcgcccgcacccataatctcaaaaatattaacctcataatccctcgcgacaaactcatcgtcgtgaccgggctttcggggtctggcaaatcctcactggctttcgacactttgtatgccgaaggacagcgtcgttacgttgaatcgctctcggcgtacgcgcgtcagttcctgtcgctgatggaaaaaccggatgtcgaccacattgaagggttgtcccctgctatctccattgagcagaaatccacatcgcataacccgcgctccacggtcggtaccattaccgaaatccatgactacctgcgtctgctgtatgcgcgcgtgggcgagccgcgctgcccggaccacgacgtcccgctggcggcccagaccgtcagccagatggtggataacgtactgtcgcagccggaaggcaaacgcctgatgctgctggcgccgatcattaaagagcgtaagggcgagcacaccaaaacgctggagaacctggcaagccagggctatatccgcgcccgtatcgacggcgaagtgtgtgacctgtccgatccgccaaagctggagctgcaaaagaaacacaccatcgaagtggtgattgaccgctttaaggtacgtgaagatctggcaacgcgtctggcggagtcctttgaaacggcgctggaactctctggcggcacggccgtggtctccgatatggacgacccgaaagcggaagagctgctcttctccgccaactttgcctgcccgatttgcggctacagcatgcgcgagctggaaccgcgcctgttctcgttcaacaacccggcgggcgcgtgcccgacctgtgacggcctgggcgttcagcagtatttcgacccggaccgtgtgatccaaaacccggaactgtcgctggcgggtggcgctattcgcggctgggataagcgtaatttttactacttccagatgctgaaatcgctggctgagcactataagttcgacgttgaagccccgtgggccagcctgagcgcgaacgtacataaagtgatcctgttcggttccggcaaagagaatattgagttcaagtacatgaacgatcgcggtgacacttccgtgcgtcgccacccgttcgaaggggtgttgcataacatggagcgccgctacaaagagaccgaatccagcgcggtgcgtgaggagctggcgaagttcatcagcaaccgctcctgcgccacctgcgagggtacacgtctgcgtcgcgaagcgcgtcacgtgtttgtcgaaaacacggcactgccgaccatctcagacatgagcatcggccacgcgatggacttcttcaacaacctgaagctctccggtcagcgcgcgaaaatcgctgaaaaagtgctgaaagagatcggcgatcgcctcaagttcctcgtgaacgtcggtctgaactacctgacgctttcccgctcggctgaaacgctgtccggcggtgaagcccagcgtatccgcctggcgagccagattggcgcgggcttagtcggcgtgatgtacgtgctggatgagccgtctatcggcctgcaccagcgcgacaacgaacgcctgctcggcacgctggttcacctgcgtaacctcggcaacacggtaatcgtggtcgagcacgacgaagatgcgatccgcgccgcggaccacgtgatcgacatcggcccgggcgcaggcgtacacggcggccaggtggtcgcggaagggacgctgaaagacatcatggcggtgcctgaatcgctgaccggccagtacatgagcggcaagcgcaaaattgaagtgccgaaacagcgcgtggcggcgaacccggaaaaagtgctgaagctgaccggcgcgcgcggcaacaacctgaaggacgtgaccctgacactgcctgtcgggctgtttacctgcatcaccggcgtgtccggttccggtaaatcgacgctgatcaacgatacgctgttcccgattgcgcagacggcgctgaacggcgcgacgctggccgagcctgcgccgtaccgcgacattcaggggctggagcatttcgacaaggttatcgacatcgatcagagcccgattggccgtacgccgcgttccaacccggcgacctataccggcgtctttacgcccgtacgtgaactctttgccggcgtgccggaagcgcgttcacgcggctatacgccaggccgtttcagctttaacgtgcgcggcggccgctgtgaagcgtgccagggcgacggcgtaatcaaggttgagatgcacttcctgccggatatctacgtgccgtgcgaccagtgcaaaggtaagcgttataaccgtgaaacgctggagattaagtacaaaggcaagaccatccacgaagtgctggatatgaccatcgaagaggcgcgcgagttctttgacgccgtccctgcgctggcgcgtaagctgcaaaccctgatggatgtgggtctgacctatattcgtctggggcagtcagcgacaacgctgtccggcggtgaagcgcagcgcgtgaagctggcgcgtgagctgtccaaacgcggtaccggtcagacgctgtatattctggatgagccgaccaccggcctgcactttgcggatatccagcagctgctggacgtgctgcaccagctgcgcgatcagggcaacaccatcgtggtgattgagcacaacctggacgtgattaaaaccgctgactggattgtcgatctcggcccggaaggcggcagcggcggcggtgaaatcctcgtctccggtacgccagagaccgttgcagagtgcgaagcctcgcacaccgcgcgcttcctcaaaccgttgctgtaa

SEQ ID NO: 117911 - DNA, 354 bp, Enterobacter cloacae
atgacaatttcggagatacttcagtactgcatgagcaagccgggtgcggaacaaagcgttcacagcgactggaaagccacgcagatcaaagtgggtgatgtgctgttcgcgatggtgaaagaggtggatgcgcggcctgcggcatcactgaaaaccagtccggaactggccgacttactgcgccagcagcacgatgatgtcaggccaagtaagcatctgaataaagcgcactggagtacggtgtttctcgacggctcgctgccagattcgcaaatttactacctggtggatgcgtcgtatatacaggcggttgaactgctgccggaaacgatccgacagcagctctccgtgtga

SEQ ID NO: 117912 - DNA, 417 bp, Enterobacter cloacae
atgtggtatcaacagaccctgaccttaagcgcaaaaccacgcggatttcaccttgtgacggacgaagtcatcgggcaaatccgcgacctgtcgcgcgtcaaaacgggtttgctgcatctgctgcttcagcacacgtctgcttctctcacgctcaatgaaaattgcgatcccaccgtccggtccgacatggagcaccattttctgaagagcgtcccggataacgccccgtatgagcatgattacgagggggcggacgatatgccttcgcacatcaaatcctctttgctgggcgtctcgctgatgctgccggtccacaacggacggctacagctgggaacgtggcaggggatctggctgggagaacatcgcattcacggtggttcgcgtaaaattatcgcaacgctacaaggggaataa

SEQ ID NO: 117913 - DNA, 714 bp, Enterobacter cloacae
atgcgcaagatcacactggcgctcagcgccgcctgcttattgttctcgcttaatagcgccgttgttgcacgggcttctgcacccacgccgctttacaccggcactaccgccgccattcttgccgaacaggcccccattcactgggtttcagtggcacaaatcgaaaatagcctgacgggtcgcccgccgatagccgtgggcttcgatattgacgataccgttctcttctccagccccggtttctggcgcggcaaaaaaacgtactccccggacagcgaagcctatctgaaaaacccggaattctgggaaaagatgaacaacggctgggatgagttcagtatcccgaaagaggttgcccgcgcgctgatcgccatgcacgtaaagcgcggcgacagcatttacttcgtgaccggacgtagccagaccaaaaccgaaaccgtctcgaaaacgctacaggatgatttcctgatcccggcggccagcatgaacccggtcatttttgccggggaccaggaagggcaaaacaccaaaacccagtggctggaaaagaaaaatatcaaagtgttctacggggattcagataacgacatcaccgcggcgcaagacgtgggagccagaggcatcagggtgttacgcgcctcgaactccacctaccgaccgctgccgatggccggaaaatttggtgaagaggtgatcgttaactctgaatactga

SEQ ID NO: 117914 - DNA, 1194 bp, Enterobacter cloacae
gtgtttcagaaagtagacgcctacgccggcgaccctatcctctccttgatggagcgtttcaaagaagatcctcgcagcgacaaagtgaacctcagcattggtctttactacaacgaagacggcatcattcctcagttgaaagccgttgccgaagctgaagcgcgtctgaacgcaaccccgcacggtgcttcgctttatctgccgatggaaggattaaacacctaccgcaacactatcgcgccgttgctgtttggtgcggaccacgcggtgctcgcgcaaaagcgcgtggcgactatccagacgctgggtggctcgggtgcgctgaaggtaggcgcagatttcctgaaaaagtacttcccggattccggcgtgtgggtcagcgacccgacgtgggaaaaccacgttgcgatcttcgagggcgcgggctttaaggtggcgacctatccgtggttcgacagcgaaaccaacggcgtgcgcgttgatgcgctgctggaaaaactgaacaccctgccggagcgcagtatcgtattgctgcatccgtgctgccataacccgaccggtgcggacctcaccaatgcccagtgggatgcggtgatcgagatactgaaggcgcgtaacctgatcccgttcctcgacatcgcctatcagggctttggcgcgggcatggaggaagacgcctacgccattcgcgcgattgccagcgcggggcttcccgctctggtcagcaactcgttctcaaaaatcttctccctgtacggcgagcgcgttggcggcctgtccgtggtgtgtgaagacgccgaagccgcgggacgcgtactcggtcagctgaaagcgacggtccgccggatctactccagcccgccgaactttggtgcgcaggtggtggcgacagttctcggtgacgaaacgctgaaagcgtcctggcttgcggaagtggaagcgatgcgtaagcgcatcctgtcgatgcgtcaggagctggttaacgtcctgaaagaggccgtgcctgggcataactttgattatcttctcaagcaacgcgggatgttcagctacaccggactgagcgcagcgcaggtcgatcgcctgcgcgaagagttcggtgtctacctgatcgccagcggccgtatgtgcgtggcgggtctgaatgccagcaacgtccagcgcgtggcgcaggcgtttgcatccgtaatgtaa

SEQ ID NO: 117915 - DNA, 1080 bp, Enterobacter cloacae
atgcaagcggcaactgttgttattaaccgccgcgctctgcgacacaacctgcaacgtctgcgagaactggcgcccgccagtcagctcgttgcagtcgtgaaagcgaacgcttacggacacggtcttcttgagaccgcgcgaacgctccccgatgccgacgcttttggcgtcgcccgtctcgaagaagctctccgcctgcgcgcaggtggaattacgcaaccgattctgctcctggaaggcttttttgaagcctcggacctgccgaccattgccgatcagcacctgcacacggcggtgcataacgaagaacagctggccgcgctggaaacggctgaactgagcgagccggtcaccgtctggatgaagctcgacacgggcatgcaccgtctgggcgtgcggccggaaagcgcggaggcgttttatcagcgtctgagtcagtgcaaaaatgtgcgtcagccagtgaatatcgtcagccactttgcccgcgccgatgagcctgaatgcggcgcaacggaacagcagcttgatatcttcaacaccttctgcgaaggcaaaccggggatgcgctccattgcggcgtccggcgggatcctgctatggccgcagtcgcacttcgactgggcgcgtccgggcatcattctttatggcgtttcgccgctggagaacaaaccctgggggccggactttggctttaagccggttatgtcgctggtttcaaagctgattgccgtgcgtgagcataaagcgggagagccggtgggttacggcggcacctggaccagcgagcacgacacgcgtcttggcgtggtggcgatgggctacggcgacggctatccccgcgccgcgccaactgggacgccggtgctggtcaatggacgcgaagtcaagattgtcggtcgcgtggcgatggacatgatttgtgttgatcttgggcccgacgcgcaggataaagcgggggacgatgcggtgatgtggggtgaaggcctgccggtagagcgtattgctgaaataacaaaagtgagtgcttacgaacttatcacgcgccttacttcaagggtcgcaatgaaatacgtcgactaa

SEQ ID NO: 117916 - DNA, 1413 bp, Enterobacter cloacae
atggcaggaaacaaacccttcaacaaacagactgaacctcgtgagcgtgattatcaggtcgccgggttaaaagtcccgccgcactcgattgaagcggaacagtcggtgttgggcggtttaatgctggataacgaacgctgggacgacgtcgccgagcgtgttgtcgcggaagacttctatacccgcccgcaccgccatatttttacggaaatggcgcgtttgcaggagtcgggcagccctatcgacctgattacgctcgcagaatcgctggagcgtctgggacagctcgacagcgtcggcggatttgcctatctggcagaactgtcaaaaaacacgccaagtgccgcgaacatcagcgcttacgctgatatcgttcgtgaacgtgccgttgtccgcgagatgatctcggtggcgaatgagatcgccgaggccggtttcgatccccaggggcgcaccagcgaagatctgctcgacctggcggaatcccgcgtctttaaaatcgccgaaagccgtgcgaacaaagacgaaggcccgaaaaatatcgccgatgtgctcgacgccacggttgcgcgtattgagcagcttttccagcagccgcacgatggcgtgacgggggtgaacaccggttatgacgatctcaacaagaaaacggcaggtcttcagccatcggatttgattatcgtcgcggcgcgtccgtcgatgggtaaaacgacatttgcgatgaacctcgtcgaaaacgcggcgatgttgcaggataagccggtgcttatcttcagtcttgagatgccctctgaacagatcatgatgcgttctctggcgtccctgtcgcgtgtggatcagacccgcatccgtaccggtcagctggacgatgaggactgggcgcggatctccggtaccatggggattttgctggaaaaacggaacatctatatcgatgactcctccggcctgacgccgacggaagtacgttcccgcgcgcgccgtatcgcccgtgaacacggtggcatcggcctcatcatgatcgactaccttcagctgatgcgcgttccgtcgctttccgacaaccgtacgctggagattgccgagatttcccgctcgctcaaggcgttagccaaagagctgcacgtgccggtggtggcgctatcgcagcttaaccgctctctggaacaacgtgcagacaagcgcccggtcaactccgacctgcgtgaatccggctccatcgagcaggatgccgacttaatcatgttcatctaccgtgatgaggtttatcacgagaacagcgatctgaaagggatcgccgaaattattattggtaagcaacgtaacggccccatcggtacggtacgtctgacctttaacggccagtggtcgcgtttcgacaactatgccggtcctcaatatgatgatgagtaa

SEQ ID NO: 117917 - DNA, 984 bp, Enterobacter cloacae
atggcaacacgtattgaatttcacaagcatggtggccctgacgtactcaaagcggtggaatttacccccgctgcgcctggcgagaacgaaatccaggtggaaaacaaagcgatcggcattaactacatcgatacctatattcgcggcggcctctatccgcctccgtcgatgccgagcggactgggcaccgaggcggccggtatcgtcagcaaagtgggcagcgcggttaagcacattaaggaaggcgatcgcgtggtgtacgcgcagtcggcgctgggcgcttacagctccatccataacgttccggccgagaaagcggcgcttctgccaaatgcgatcggcttcgagcaggctgccgcctcattcctgaaagggctgacggtctattatctgctgcgcaaaacctacgaaattaagcctgacgagcaattcctttttcacgcagccgcaggtggcgtggggctgattgcctgccagtgggcgaaagccctgggcgcgaagctgatcggcaccacaggcagcgcgcaaaaagcgcagcgcgcgctggacgcgggcgcatggcaggtgatcaactaccgggaagagagcatcgttgagcggctgaaagagatcactggcggcaaaaaggtccgcgtggtgtatgactcggtggggaaagacacctgggaatcttcgctggactgcctgcaacgtcgcgggctgatggtgagcttcggtaacgcctccggggcagtcaccggcgtcaacctgggcattctgaatcagaaagggtcactgtacgtcactcgcccttccctgcaaggttacatcaccaaccgggaagaacttgaggaagccagcaacgagctgttctcgctgatcgccagtggggtaattaaagtggatgtggcagaggcgcagaaatatccgctgaccgatgcgcagcgcgcgcatgaggtgctggagagccgggcaacgcagggatcaagtctgttaattccctga

SEQ ID NO: 117918 - DNA, 243 bp, Enterobacter cloacae
atgctggaactactttttgtgattggcttctttatcatgcttatggtcacgggcgtatcgctgctcggtatcctggccgcgctcgtcgtggccacggtggtgatgtttgttggcggtttatttgccctgacgattaaactcttgccgtggttacttctggcgattgcggtggtatgggcgatacgggcgattaaatcaccaaaactgcccacttatcagcgtaataaccgcttccgttactaa

SEQ ID NO: 117919 - DNA, 996 bp, Enterobacter cloacae
atgtcgtcagaactccagaccgctttccatgcacaccgtttctccattgcgccaatgctcgactggacggacagacactgccgctatttcctgcgccagctctcccgccatacgctgctgtacaccgaaatggtcactaccggcgcaattattcacggcaagggcgattatctggcgtacagcgaagaggagcatccggttgcgctgcaactgggtggcagcgatccggctgcgctggcgcagtgcgcgaagctggctgaagaacgcggctatgacgagattaacctcaacgtcggttgcccgtccgaccgtgtgcaaaacggtatgttcggcgcgtgtctgatgggtaatgcacatctggtggcggactgtatcaaagcgatgcgcgacgtcgtctctatcccggtcacggtcaaaacccgtatcggcatagacgaccaggacagctacgagtttctgtgtgatttcatcaacaccgtatcagggaagggtgaatgcgagatgtttatcatccacgcccgtaaagcctggctctctggcctcagcccgaaagaaaaccgcgagatcccgccgctggactacccgcgcgtgtaccagctaaaacgcgacttcccgcacctgaccatgtcgatcaacggcggtattacgtcgctggacgaggccaaagcgcatctcgaacatatggatggcgtgatggtcggacgcgaggcgtatcagaatccgggcattctggcgacggttgaccgggaaatctttggcgttgacggtgctgacaccgatcccgtggcagtagtgcgcgccatgtatccgtatattgagcgcgagctgagtcatagtacgtatctgggccatattacccgccatatgcttggcctgttccagggcattcctggcgcgcgccagtggcgtcgttatctcagcgagaacgcgcataaggccggtgcggatattgaggtcctggaacacgcgctgcgtctggttgcggataaacgttaa

SEQ ID NO: 117920 - DNA, 1311 bp, Enterobacter cloacae
gtgaaaaaacattttaaattttcgatggttagcatcgctgtctccttttttatggcaaatcaggcgggagcagccaatacctggacggaagcgcgtagcgacgcaatgggcggaacgggtgtcgcggcagggagctatggcagcggggcgttaatcaaccccgcgttactggcaaaatctaagccagaggatgatgtgacggtcattttgccgtccgttggcgtgcaggtgaccgatgaagacaatcttcaggacgagattgataccattaacgacaaaatcaatcattacaaggatgtggttgatagtctgacccccattgaagttatcaccaatccattaggttcgatcaatcagttccagggcgcagcgaaagatctcgctgatgaactggactacctgaaaggcaagaccgcacacgccaccgcaggggcggggattgccgtcagtatccctaacgatattctttccgtggcctttatggcaaaaggctatgcccatggccgggtcagctcttcaatcgatcagcaggacattgattatctgcgcggtatacaacgaagcgatgcggtggctgccggtgtggcgctggatgccgcgctaaacggtaccgatcagatcaccaaaaaccttaactctacggcgtctggtcgggcggcgattgtgtccgactacggtattgcggtggcccgtcagttcgatcttggcggcgttccggtttccgttggcgtcacgccgaagctgcaaaaaacctggctctataactacaccacttcaatctacgattacgacagtaataagtggaacgacagccgctaccgtaccgacgacactggcttcaacgtcgatgccggtattgctgctgatttcggtgaaaactggacggtcggcgtgagcgggcaaaacctgatgtcgcgcgatatcgataccaaagatatccgcatccgcaacgggcgtacgggagaggtggtgagttataaagacacttatcagatccgtccgctggtcactgccggggccgcctggcacaacgatctggtcacgctgaccgcagacggcgatctgaccgaaaccaagggctttaaaagcgaagacacctcccagtacgttggcgttggtgccgaagtcacgccgctgagctggctggcagtacgcgccggttatcgtgcggatatgaaagggaacgacagcaacgtctttaccggcggtgtcggtttcgcgccgttcaactccgtccacgttgacctgatggggctttatggcgaagacgagacatggggtgcaggggcacagttgagcatgacgttctaa

SEQ ID NO: 117921 - DNA, 489 bp, Enterobacter cloacae
atgaaaagacctgactgtattcggcactggcgggacgtggaaggcgctgatgacgcaacgtatcctgacagtaacgaacgtttttctgttggcgcgccgctggcccgcaggctgggtctcggccgcattggtattcaccatgaacggctgccacccggacgccgtacgtcttatccgcatgcggaaagcgacgaagaggagtttgtttacgttctggagggttaccctgaggcctggatcaatggctatttatggaagctcgaacccggagacagcgtgggatttccagccgggacgggcgtgtgtcacacctttatcaacaataccgatgaagaggtgcgcttactggtggtgggtgaggccaataaaaaacataaccgcatctactatccgctcaatccggtgtatgccgcgacgcgcgaagaccgctgggtcgaccatccgcctcagttttttgggccgcacgatggaaaacctgggcgaaaataa

SEQ ID NO: 117922 - DNA, 513 bp, Enterobacter cloacae
atggacaagtccacaaaagagctgttagcgcaagctgaaaagctgtgcgcgcaacgcaatgtgcgcctgaccccgcagcgccttgaggtactgcgtctgatgagcctgcaacagggcgccatcagcgcctacgatctgctcgatctgctgcgtgaaagcgagccgcaggcaaaaccgccgaccgtttatcgggcgctggattttctgctggagcaagggtttgtgcataaagtggaatcaacaaacagctatgtgctgtgccatctttttgaccagccaactcacacgtccgccatgtttatctgcgatcgctgtggtgtggtgaaggaagagtgtgcggaaggtgtggaagatattatgcatacgctggcagccagaatgggctttgcgctgcgccataacgtgattgaagcccacggcttatgttctgcctgcgtggaggtggagtcatgccgccatcaggatgcctgtcagcacgatcactctatcctggtgaagaaaaagccgcgttaa

SEQ ID NO: 117923 - DNA, 210 bp, Enterobacter cloacae
atgaataaagacgaaatcggcggcaactggaagcaattcaaaggtaaagcgaaagaacagtggggtaagctgacagatgacgatatgaccgtcattgaaggtaagcgcgatcagctggtaggtaaaatccaggagcgctacggttacgaaaaagatcaggcggaaaatgaagtcaaagactgggaaacccgtaacgactaccgctggtaa

SEQ ID NO: 117924 - DNA, 1338 bp, Enterobacter cloacae
atggcattgctaacttctgccgataaggcgttgtggcgtcttgcgctaccgatgattttttccaatattaccgttcctctgctggggctggtggatacggcggttatcgggcatctcgattcgccgaattatcttggcggcgtcgcgatcggcgcaacggcgaccagcttcctctttatgctgctgctttttctgcgcatgagtacgacaggcctgacggcccaggcgtatggtgcaaaagatcccctgcgtctggcgcgtgcgctggttcagccgctcattctggcattcggtgccggcgcgttaatcgttctgttgcgtacgccgctgattgatcttgcgctccatattgtaggcggcagcgatgccgtactggaacaggcccggcggttcctcgaaattcgctggctcagcgcgcccgcttcactggcaaacctggtcctgctgggctggctgctgggcgtgcagtacgcccgcgcgccggtgatcctactggtggtgggcaacctgcttaacattgtgctcgatctctggctggtgatggggctgcacatgaacgtccggggcgcggcgctggctacggcgattgccgagtacggtacgctgctgatcggtttggggatggtctggcgcgtgctggcgatgcgcggtatcaccctggatctgctgaaatcggcctggcgcggcaacattcgtaagctgctggcgcttaatcgcgacatcatgctccgttcgcttctgctgcaactctgctttggtgcattaaccgtttttggtgcgcgtcttgggcctgagatcgttgccgtcaacgcagtgcttatgacattactgacctttaccgcttacgcgctggatggttttgcttacgccgtggaggcgcattcagggcaggcctatggcgcgcgtgaaagcggccagttacgcgaagtctggcgtgctgcctgtcgtcaggcgggcctggtggcgctggtctttgctctggtatacgcctgttttggtgggcatattgtcgcgttactcacctcgttgcccgcgctacgtgagctggccgatcgctacatcctctggcaggtagtattaccggtggtgggcgtgtggtgctatttgctggacggcatgtttattggtgcgacgcgaggggcggagatgcgcaacagcatggccgtcgcggcggcggggttcggcctgacgctgctaaccctgccgtatctcggcaatcatggtctgtggctggcgctggcggtgtttctctcactgcgtggcctttcgctggccgttatctggcatcgtcactggcgaaacaatacctggtttccagccccgcacgatatatcgtaa

SEQ ID NO: 117925 - DNA, 609 bp, Enterobacter cloacae
atgaaagcgttaacgaccaggcagcaagaggtgtttgatctcattcgggatcatatcggccagacgggtatgccacccacgcgtgcagaaattgcgcagcgtctgggcttccgttctcctaatgctgccgaagagcaccttaaagcgctggcgcgtaagggcgtgattgagattgtttccggcgcctcacgcggcattcgtctgcttgtggaagaagagagcggtattccgctggtgggccgcgttgccgcaggtgaacctctgctggcgcagcagcacatcgaagggcactatcaggttgacccaggcatgttcaagccgagcgccgatttcctgctgcgcgttagcggaatgtccatgaaagatatcggtattctggatggcgatctgctggcggtacacaaaacgcaggatgtgcgtaacgggcaagtcgtggtggcgcgcattgatgatgaagtgacggttaagcgcctgaaaaaacaaggcaataccgtgcagcttctgcctgaaaataatgaattctccccgattgtggtggatctccgcgagcagagcttctctattgaagggctggcggtcggcgttatccgcaacggtgaatggctgtaa

SEQ ID NO: 117926 - DNA, 309 bp, Enterobacter cloacae
atgcgaccaaagcagcgtgacccaggtgatcgccgcagtgataatcgccagcagtacggcagcggaacccatgtctttcgcccggccagacagttcatggaattccgacccgattcgatcaactacggcctcaatagcgctattcagaatttccactatcatcaccagaaggacagatccgatgagcagtacgcgggtgatagcatcaacatcaaggaagcaggcgatgacaacggcaacgattgcggcaaccgcttcctggcggaaagcggcttcattaacccatgccgcgcggaaacctttccatga

SEQ ID NO: 117927 - DNA, 2421 bp, Enterobacter cloacae
atgtccggctggccacgaatttactacaaattacttaatttaccattaagcgtcctggtaaaaagtaagtctatcccagcagaacctgcgctggaattagggctcgatacgtcgcgccctattatgtacgttttgccttataactcgaaggcagacctgctgacgcttcgcgctcaatgtctggcgcacgatttacctgacccgcttgaaccgctggaagtcgacggtacgctgctgccgcgctacgtgttcatccatggcgggccgcgcgtgttcacctattacacgccgaaagaagagtccattaagctgttccatgattacctcgatctgcaccgcagcaaccccgatctggacgtgcagatggtgccggtgtcggtgatgtttggccgtcgtccggggcgcgaaaaaggggaagagaacccgccgctgcgtatgctcaacggcattcagaagttcttcgccgtctcctggctaggacgcgacagctttgtccgcttctcaccttccgtttcactgcgccgcatggcggatgaacacggcactgacaaaatcattgcgcaaaagctggcgcgcgttgcgcgtatgcactttgcacgtcagcgtctggcggccgttggaccacgtctcccggcacgtcaggatttgttcaacaagctgctggcttccaaagcgattgcccgtgccgtagaagacgaagcgcgcagcaagaaaatttcgcacgagaaagctcagcagaacgcgatagcgctgatggaagagatcgccgcgaatttctcctacgagatgattcgcctctctgaccgtatccttggcttcacgtggaaccgcctctatcaggggattaacgtccacaacgccgagcgcgtacgtcagttagcgcacgacggccacgagattgtctatgtgccctgccaccgcagccacatggactacctgttgctctcttacgtgctctatcaccaggggctggtgccgccgcatattgctgccggtatcaacctgaacttctggccagcaggcccgattttccgccgtctgggtgcgttctttattcgtcgtacctttaagggtaacaagctttactccaccgtcttcagggagtatctgggcgagctgttcagccgcggttattccgtggagtactttgttgaaggcggtcgctcgcgtaccggtcgtctgctcgatccgaagaccggcacgctgtcgatgaccattcaggccatgctgcgtggcggtacgcgtcctatcacgctggtgcctatttacatcggttatgaacacgtgatggaagtgggcacctacgcgaaagagctgcgcggtgcgaccaaagagaaagagagtctgccgcagatgctgcgtgggctgagtaaactgcgcaacctcggccagggctacgtgaactttggcgagcccctgccgttgatgacatatctgaaccatcatgttccggagtggcgcgagtctatcgatcctatcgaagcggtacgtccggcctggctgacgccaacggtcaacggcattgcatccgagctgatggtacgcatcaacaatgctggtgcggcaaacgccatgaacctgtgttgtactgcgcttctggcctcccgccagcgttcactgacccgtgagcagctgaccgagcagattgactgctacctggatatcatgcgcaacgtgccgtattccgttgattcgaccgtgccgtctgccaccgccagcgagctgatcgatcacgcgttgcagatgaacaagttcgaagtcgagaaagatacgattggtgacatcatcattctgccgcgcgagcaggccgtgctgatgacctactaccgcaataacatcacgcacatgctgatgctgccgtcgctgatggcggccattattacccagcaccgccgtatttcgcgtcaggagctgctgcgccatattcaggccatctacccaatgctgaaagcggagctgttcctgcgctggagtaaggatgaactggcggcagagctcgataaaatgacggcagagatgcatcgtcaggggctgattaccatcgttgatgatgaactgcatatcaatccgtcacgttcccgtaccttgcagctcctggcttccggtgcgcgtgagacgttgcagcgctacgccattaccttctggttgctgagtgcaaatccgtccatcaaccgcggtacgctggaaaaagagagccggacgctggctcagcgcctttccgttctgcatggcattaacgccccggaattcttcgacaaagcggtattcagctccctggtgctgacgctgcgcgacgaagggtacattagcgatacgggcgatgccgagccggaagagacgatgaaggtttaccagatgctggcagagctgattaccgcggatgtgcgtttgacgattgagagttcgacgcagggcgagtga

SEQ ID NO: 117928 - DNA, 867 bp, Enterobacter cloacae
atggagtggagtctgacgcagaataagctgctggcctatcaccgcctgatgcgtactgataaacccattggcgcgctgctgctgctgtggccgaccttatgggcgctgtgggttgccacgccgggcgtgccgccgctgtggatcctggcggtgtttgtggcgggcgtctggctgatgcgcgctgcgggctgtgtggttaacgactatgctgaccggaaatttgatggacatgttaagcgcaccgcgaatcgtcctctgccgagcggtcaggtgaccgggaaagaggcgcgcattctgttcgtggtgctggtgctgctctcattcatgctggtgttaacccttaacaccatgaccattctgctgtccgttgctgctctggcgctggcctgggtttacccgttcatgaagcgatacacccatctgccgcaggtggtattgggtgcggcatttggctggtcgattcccatggcgtttgccgcggtcagcgagtccgttccgctcagctgctggctgatgttcctggcgaatattctctgggccgttgcgtacgatacccaatacgcgatggtcgatcgcgatgacgatctcaagattggcatcaaatcgacggcgatcctgtttggtcgtcacgacaaacttatcatcggcatattgcaggtggcggtgctggcgctgatggtggcgattggtcgcctgaacggcctgaactgggagttttactggtccgtactggtggcggggctgctgtttgcgtatcagcagaagctgatcgcgaaacgcgagcgtgaagcctgctttaaagcgtttctgaataataactacgtcgggctggtgctgtttctgggcctggcgatgagttactggtga

SEQ ID NO: 117929 - DNA, 498 bp, Enterobacter cloacae
atgtcacaccccgcgctaacgcagctgcgtgcgctaagctatttcgaccaaatacccgcgcttgacccggagcaactggactggctgttgctggaagattccatgacaaaacgttttgagcaacagggtaaaacggtcacggtgacgatgattcaggaagggtttgtctcgcctgcggagattgccagcgagctgccgctgctgccgcaagaagaacgctactggctgcgtgaaattttactgtgtgcagatggcgagccgtggcttgccgggcggacggtggttcctgagtctacactttccgggccggagctggcattgcaacgcctcggcaaaacgcccctggggcgctatctgttcacctcgtctgaactgacccgtgattttattgaaattggttgcgatgccgatttgtgggggcgccgttcccgccttcgtttgagtggcaagccgttaatactgacggaactctttttgccagcatcgccgttgtactaa

SEQ ID NO: 117930 - DNA, 1401 bp, Enterobacter cloacae
gtgatcccggtgatttttattcctggggtgatggggtcaaacttaaagagtggggataaaaaagtctggcagttcagcttgtcatcgcttaaaaaatggccacttgctggcccccaaaaaagaaagcaactgcttgatccgacgaccaccgtcgtcgatgactctggggaaattttaaacgacggtgcggatgggaaaaaattcccgtcccgtcacgcccgcggatggggaagtgcgttttacatgagctacggtgaggcgcttgaccggctgcaatacctgctcagcgacgacgagatcctgatggataattactttcgggagacacagttgcaaacggcacgtcagcgttttatcggcgtcagaatcggtaacgagcctcaggagcaggtgctgagcgaagaagaagtggctcacgggcacaagttcttattcccgctgcacgtttttggttacaactggctgcaatcgaatgcggactctgcggcgttgctgggcgaatatatccgtaaggtgctgagtgcgtatcacggacgcctggcagtcaacaaggtcgtcctgatcacccattcgatgggcggactggtcgcccgccattactcggaaaatatgggcggacaagactcaatcctgggtatcgtacacggcgtcatgccggatctcggctcaccggcagcttatcaccgcatgaagatcggtgagcgtggcattactggaatgattatcggggaaagtgctgaaaagctgatgccggtgctggcacagtctcccggtccgttacagcttctgccgggtatggcttatggtccgggatggctgaaaatcaacagtaaagagactcaactttccctcccggtggccgatccgtatgaggaaatttatctcaacaaaacagcgtggtggcggctatgtgagcaggatttgctgctggatgatactagggtcgaatggaataaatatgagaaaacaataagtaatatcgttaaaaaatttattgagaagttaaacggcaaataccacccccagacctggctattttacggagccagcaaaagcaacccgtcagatggattcctgacatgggaagagcggatccccctgagcgttaaggaagcgcagaggagcagggaaaatgcagctaacccttttgaactgtccccgttaaggtcccatcaactaatttcatccgcaagccccggcgatgggaccgtgccgatcacctccgtctgcaccagctcttcacgtattcagggcgtcctggcgacagatgtcgatcatgaaggagcttatgctgtcgatcctgtcgatctctcccgctcggtatacagcgatctctccgacgcactggtgttcacggttcgctcggtggtgaagattgtgcagcaggttcccgccccatga

SEQ ID NO: 117931 - DNA, 1134 bp, Enterobacter cloacae
atgaaaaaagacacatcccccctgattgttacgctgacgctcctgctgctggcggcaggatattacatccataactatgtgacatttgtgcatgcgcccccggcgttaacggacaaggaaaaacgtatggttaatactctttttgccaccaccaaatcccagtgcgtggggcgctatgtgtttgaggttccggcctcattcgaaaacaccctgactgaccgggcacagattaatgagatccgcatcagcagcaagcgactctaccgcccggcatttgagcagcgtatccggttgcgggaacagaaactgaaaaacagcgctaccgtggaccctgttgatcagccatttcttaagcagatatacaagctgagtgataatgcggtcatttttgaccgtaatgaaaatgagagtgtggcgggatttgggcgcattctggaaggtcatctctacgttgacggagtagcgtttatcctcatgcaggggattaccgattattctgatccgcgcttcgctaaagagcgagcgttttatctgcgcaaggaagcgggaagacctgactggatggcgaatgataaaccccagaaactggcggaattacaggacctcatgtcccgactgagcggacggcataatgaggatattccttccgtgcccggcacctgtattccgcaagggtttatccgcgacggaaacggcaagcctaaggaagatattacctttgtttacccctatagttcggtgttttctttttcagtctggagcaataacgcccttaaggaaagcacaaccatgctggagcgcagcggggaaattcagtcttatatcaatagtatagacggaagtacgctgcgaaaaggagaagcacgcattgccggttttaatgccagtgaatggctaatcaccgccccgccagataaatcatccgaaaatccgtcaaaacaactaatgtttaccgccgtagccaatgaaaccaacgctgattttgcacaccccagccttgatctgacattaagcaatgaaatcttacctgaaggaagtgatgtctcatccccacctgattacagcgacgctgaactagtggaaatctgggatcgcatcattctttctttccgcgtcagggataatgcgttctga

SEQ ID NO: 117932 - DNA, 939 bp, Enterobacter cloacae
atgaaaatgaagaaaagtctcgtcgcgctgtgcctctctgcggggctgttggcctgtgcgcctgcggtcacctttgcagatgtgaattttgttcctcaaaatactagcgctgcgccagctattccggctgcggcactacagcaactggtgtggacgccagttgatcaatcgaaaacacaaactacccagctttcagcggggggccagtcactgaacgtgccgggtatcagcggtccggtcgcggctttcagcgtgccggcgaatatcggcgagctgaccctgacattgaccagtgaagtcaataaacagaccagcgtcttcgcgcctaacgtgctgatcctcgatcagaacatgacgccatccgcgttcttcccaagcgactatttcagctatcaggagcctggcgtcatgagtgccgatcggctggaaggcgttatgcgcctgacgccagccctgggtcagcagaagatttatgtcctggtgttcacgactgaaaaagatctgcaacagacaacgaagcttgttgacccggcaaaagcctatgcgaaaggcacggggaactctgtcccggatattccggacccgcttgcccgtcataccaccgatggtctgatcaagctgaaagtctccaccaacagcgcctccagcgtactcgtaggcccgctgtttggctcatctggcccgggtccggtaacggtgggtaatactgccgcgcctgtgtacgccgcgccagccgcagcaccggccgcagccccggccccggcgaaaaaagccgagcccgtgcttaacgatactgaaacttactttaacaacgccatcaagcaggcggttaaaaacggcgatgtcgataaagcgctgaaactgcttgatgaagccgagcgtttaggttcaaccactgcccgttccacctttatcagcagtgtaaaaggcaaggggtaa

SEQ ID NO: 117933 - DNA, 1308 bp, Enterobacter cloacae
atgattactctgcgcaaagtccctctggctgtcgccattgcggcaggcatcctgtctgcccaggcgggcgccgtagactttaaaggttatgctcgttccggcattggctggaccggaagtggcggtgaacaacaatgtttccaggcaacaggcgcacaaagtaaataccgtctcggtaacgaatgtgaaacctacgccgaactgaaactgggccaggaagtgtggaaagaaggcgacaagagcttctatttcgacaccaacgtagcgtactccgtttctcaacagaatgactgggaatccaccagcccggccttccgtgaagctaacgtgcagggtaaaaacctgattgaatggctgccaggctctaccatctgggccggtaaacgcttctatcagcgtcatgacgtacacatgatcgacttctactactgggatatctctggtcctggtgccggtattgaaaacatcgatctgggctttggtaaactctctctggcagcgacccgttcttctgagtccggcggttctgcaaccttcgccgatcgtgatgcgaacggcgaccgtatttatgacaacgtggtaccaaacgatgtcttcgatgtgcgtttagccggtctggaaaccaacccgggcggtacgctggagctgggcgttgactacggtcataccaacattcctgacgactactacctgcaacctggcgcctctaaagatggctggctgttcaccgctgaacacacccagagcatgatgaaaggcttcaacaagttcgtactgcaatacggtacggattccatgacctctaacggtaaaggtattccacagggcggcagcatcgataacgacggctctatgtggcgcgtgctggatcacggtgcaatcaccctggcagaccgttgggacctgatgtacgtcggtatgtaccagaacatcgatcgtgacaacaacaacggtaccgagtggtggaccgtgggtgttcgtccaatgttcaaatggacgccgatcatgagcaccttgctggaagtgggctacgacaacgtcaaatctcagaaaactgacgacaaaaacagccagtacaaaatcaccctggcacagcaatggcaggcaggcgacagcatctggtcccgtccggctatccgcgtcttcgcaacctacgcgaagtgggatgagaaatggggctatgcaaacaacgactcaggtgcaggttacacctctggcgtagcgtatagcgacacctccgcgaaaaccttcagccgtggcgacaacgatgagtggaccttcggcgcccagatggaaatctggtggtaa

SEQ ID NO: 117934 - DNA, 1110 bp, Enterobacter cloacae
atggcgagcgtacagctgcgtaatgtaacgaaagcctggggcgacgtagtggtgtcaaaagacatcaatctggacatccacgaaggtgagtttgtggtgttcgtgggtccatcaggctgtggtaaatcgactctgctgcgtatgattgccggtcttgaaaccatcaccagtggcgatttatttattggtgatacccgaatgaacgacatcccgccagccgaacgcggcgtgggcatggtgttccagtcttatgccctttatccgcatctttccgttgccgagaacatgtcctttggcctgaagctggccggcgcgaaaaaagagaccattaaccagcgcgtcacccaggtggcggaagtgctccagctggcacatctgctggagcgtaaaccgaaggcgctctccggtggtcagcgtcagcgtgtggcgatcggccgtacgctggtggccgagccgcgcgtgttcctgctcgatgaaccgctttctaacctggatgccgccctgcgcgtccagatgcgtatcgaaatctcccgtctgcacaaacgccttggacgcacgatgatttacgtcacccacgatcaggtcgaagcgatgacgctggccgacaaaatcgtggtgctggacgccggtcgcgtggcgcaggtgggcaaaccgctggagctgtatcactacccggcagaccgctttgttgcgggcttcattggctcgccaaagatgaacttcctgcccgtaaaagtgaccgcgacggcaatcgaacaggtacaggtggagctgccaaaccgtcagcaagtctggctgccggtcgacagcgctaacgtacaggtgggggccaacatgtccctcggtatccgccctgagcatttactgccgagccacatcgctgatgtgacgctggaaggtgaagttcaggtcgtcgaacagcttggtcacgaaacacagattcatatccagatccccgccatccgtcagaacctggtctaccgccagaatgacgtggtgttggtagaagagggtgccacattcgctatcggtttgccgccagagcgttgccatctgttccgtgaggatggcactgcatgtcgtcggttgcacaaagagccaggcgtttaa

SEQ ID NO: 117935 - DNA, 1191 bp, Enterobacter cloacae
atgaagatcaagactggcgcacgcgttttcgcattgtccgccctcgcagcaatgatgatttccgcaccggctctcgccaaaattgaagaaggtaagctggttatctggattaacggcgacaagggctataacggtctggccgaagtgggcaaaaaattcgagaaagacaccggtatcaaagtcaccgtagaacacccggacaaactggaagagaagttcccgcaggttgcggcaactggcgatggtccggacattatcttctgggcgcatgaccgtttcgggggctacgcgcagtctggcctgctggcagaagttacgccagacaaagccttccaggacaaactgttcccgttcacctgggacgccgttcgctataacggcaagctgatcgcttacccaatcgcggttgaagcgctgtctctgatttacaacaaagacctggcgccaaacccgccgaagacctgggaagagatccctgctctggataaagagctgaaggcgaaaggtaaatccgccctgatgttcaacctgcaagagccgtacttcacctggccgctgattgctgccgacggcggttacgcgttcaagtttgaaaacggcaaatatgacgtgaaagacgtgggcgtggacaacgcaggtgcgaaagcgggtctgaccttcctggttgacctcatcaagaacaaacacatgaatgcggataccgactactccatcgcggaagcggcgttcaacaaaggcgaaaccgcgatgaccatcaatggtccgtgggcctggaccaacatcgacaagagcaaaatcaactacggcgtgaccctgctgccaaccttcaacggcaagccatctaaaccgttcgtgggcgtgctgagcgcgggcatcaacgccgccagcccgaacaaagagctggcgaaagagttcctcgaaaactacctgctgaccgatcagggtctggatgaagtgaacaaggacaagccgctgggcgccgttgcgctgaaatccttccaggatcagctggcgaaagatccgcgtattgcggccaccatggataacgcccagaaaggcgaaatcatgccgaacatcccacagatggctgcgttctggtacgccacccgtaccgcggtcatcaacgctgcaagcggtcgccagagtgtcgatgccgcactgaaagatgctcagggccgtattactaagtaa

SEQ ID NO: 117936 - DNA, 1545 bp, Enterobacter cloacae
atggatgtcattaaaaagaaacactggtggcaaagcgacgcactgaagtggtcagtgataggtctgctgtgtctgctggtgggttaccttgttgttttaatgtacgtgcaaggggaatacctgtttgccatcatgacgctgattttaagctcggttggcctgtatattttcgccaaccgtaaagcgtacgcctggcgctatgtctacccgggcgttgccgggatggggctgtttgtcctctttccgctgatctgcaccatcgcgattgcctttaccaactacagcagcaccaaccagctcgcgcaggagcgtgccacccaggtgcttctggatcgttcttaccaggcgggtaaaacctttaacttcggcctgtatcccacgggtgacgagtggaagttagcgctcactgacggtgagagcggcaaaacctatctttccgacgcgttcaaatttggcggcgagcagaagctggccttaaaagaggctgcggccctgccggaaggtgaacgtgcgaacctgcgtatcattacccagaatcgtcaggcgctgacccagctcaccgccgtgctgccagacgaaagcaaagtgaccatgagctcgctgcgccagttctccggcacgcagccgctttatactctggcggatgacggcacgctgaccaacaaccagagcggcgtgaagtaccgtccgaacaacgatatcggtttctttcagtcggtgaatgccgacggcagctggggcgacgacaaactcagcccgggctataccgtcaccatcggctgggacaacttcacccgcgtatttaccgacgaaggcatccagaaaccgttcttcgccatcttcgtctggacggtggtcttctcggtgctgaccgtgatcctgaccgtggccgtgggcatggtgctggcctgcctcgtgcagtgggagtccctgaaaggcaaagcgatttaccgcgtgctgctgattctgccctacgccgtgccgtcgtttatctcgattctgattttcaaagggctatttaaccagagcttcggtgaaatcaacatgatgctgagcgcgctgttcggtatcaaaccggcctggttcagcgacccaaccaccgcccgctcgatgattatcatcgtgaacacctggctcggttatccgtacatgatgatcctgtgcatggggctgctgaaggctatcccggacgatctgtacgaagcctcggcgatggacggcgcgggtccgttccagaacttcttcaaaattaccctgccgctgctcattaagccgctgacgccgctgatgatcgccagcttcgcctttaactttaacaacttcgtgctgattcagctgttgaccaacggtggcccggaccgtctcggtacgactacgccggcaggctataccgacctgctcgtgagctacacctaccgtatcgccttcgagggcggcggcggccagaacttcggcctggcggcggcgattgccaccctgatcttcctgctggttggcgccctggcgattgtaaacctgaaagccacacgtatgaaatttgactaa

SEQ ID NO: 117937 - DNA, 891 bp, Enterobacter cloacae
atggcaatggtacaacccaaatctcagaaactgcgcctcctcgcgacgcacttaggcctgctgattttcatcgcggcgatcatgttcccgctgctgatggttatcgccatctccctgcgttcggggaacttcgccaccgggagcctgatcccggacgaaatctcctgggagcactggaagctcgcgctgggcttcagcgtggagcacgcggatggccgcgtcacgccgccgccgttcccggtgctgctgtggctatggaactcggtgaaggtggcgaccatcaccgcgatcggcatcgtgacgctctccacgacctgcgcttacgccttcgcccgcatgcgcttcccaggcaaagcgacgctgctgaaagggatgctgattttccagatgttcccggccgtgctgtcactggtggcgttgtatgccctgtttgaccgtctgggccagtacgtgccgttcatcggcctgaacactcacggcggcgtgatcttcgcctatcttggcggcatcgccctgcatgtgtggactatcaagggctatttcgaaaccatcgacggctcgctggaagaagcggcagcgctggatggcgcaaccccgtggcaggcgttccgtctggtgctgttgccgctgtcggtgccgattctggcggtggtatttatcctgtcgtttatcgccgccatcaccgaagtcccggtcgcctcactgttactgcgcgacgtgaacagctacacccttgccgtcggtatgcagcagtacctcaacccgcaaaactacctgtggggcgactttgccgcggcggccgtcctctctgccatcccgattaccgtggtgttcctgctggcccagcgctggctggtcaacggcctgacggcgggcggtgtgaaaggttaa

SEQ ID NO: 117938 - DNA, 411 bp, Enterobacter cloacae
atgacatccctgacgcgtccgcgcgttgagtttatctcaacgatactccagaccgtgctgaacctcggtctgctgagccttggcctgatcctggtcgtttttctgggtaaggagacggtgcatctggcggatgtgctgttcgcccctgagcaaaccagcaaatacgcgctggtggaaggcctggtggtctactttctctactttgaatttatcgccctgattgtgaagtactttcagtccggctttcacttcccgctgcgctattttgtctacattggcatcaccgccattgtgcggctgatcatcgtcgatcataaatccccgctcgacgtgctgatctactcggcggcgatcctgctgctggtgatcaccctctggctgtgcaactcgaagcggctgaaacgcgaataa

SEQ ID NO: 117939 - DNA, 2097 bp, Enterobacter cloacae
atgaaaaaaacctatctctacagcatgcttgcactgtgcgtgagttccgcctgtcatgcagaaacgtatccggcacccatcggcccgtcgcagtccgattttggcggcgtgggcttactgcaaaccccaaccgcgcgtatggcccgcgagggggaaatcagccttaactatcgcgataacgatcagtaccgttactactctgcgtccgtgcagctgttcccctggctggagaccacgctgcgctacaccgacgtgcgtacaaaacagtacagcagcgtggatgccttctccggcgaccagacttataaagacaaagctttcgacgtgaagctgcgcctgtgggaagagagctactggatgccgcaggtctccgttggtgcgaaggatatcggcgggaccggcctgtttgacgcggaatacatcgtggccagcaaagcctggggaccgtttgatttctcactcggtctgggatggggctatctcggcaccagcggcaacgtcaaaaatccgttctgtacctacagcgataaatactgctaccgcgataacagctaccagaaagcgggctccatcaacggggaccagatgttccacggcccggcctcgctgtttggtggcgtggagtatcaaacaccgtggcagccgttacgtctgaagctggagtacgaaggaaacgactactcgcaggacttcgccgggaaaattgagcaaaagagcaagtttaacgtcggcgccatttaccgcgtcaccgactgggccgacgttaacctcagctatgagcgcggtaataccctgatgtttggctttaccctgcgcactaactttaacgacatgcggccgcactacaatgacaacccgcggccaaaatatcagccggagccgcaggatgcgatcattcagcactccgtggtagcgaaccagctgacgctgctgaaatataacgcgggcctggcggatccaaagatccagaccaaaggcgatacgctgtacgtcatcggcgagcaggtaaaataccgcgactcccgcgaagggatcgagcgcgccaaccggatcgtcatgaacgatctgccggaggggatccgcacgatccgcgtgacggagaaccgcctcaacctgccgcaggtcacaaccgaaaccgatgttgccagccttaagcgtcatcttgaaggcgaaccgctgggacatgaaaccgagctggtacaaaaacgcgttgagccggtggtgccagagagcaccgagcagggctggtatatcgataaatcccgcttcgatttccatatcgatccggtgctgaaccagtccgtgggtgggccggaaaacttctacatgtatcagctgggggcgatggcgacggcggatctgtgggtgaccgaccacctgttgaccaccggtagtctgttcggcaacattgctaacaactacgacaaatttaactacaccaacccgccgaacgattcaaaactgccgcgcgtgcgtacccgcgttcgcgaatatgtgcagaacgatatctacgtgaataacctccaggccaactacttccagtacttcggcaacggcttctacggccaggtttacggtggctatctggaaaccatgttcggcggcgccggggcagaagtgctttatcgtcctgtcgacagcaactgggcgtttggggttgatgccaactacgtgaaacagcgtgactggcgcagcgcgcaggacatgatgaagttcaccgactacagcgtcaaaaccggccacctgaccgcctactggacgccgtcgttcgcgcaggacgtgctggtgaaagccagcgtcggccagtatctggcgggtgataagggcggtacgctggatatctccaaacacttcgacagcggcgtggtggtgggcggctatgccaccatcaccaacgtttcgccagacgagtacggggaaggggacttcaccaaaggggtgtacgtgtcgattccgctggatctgttctcatcaggcccaacccgcagccgtgcggcagtgggctggacgccgctgacgcgcgacggcggtcagcagcttggacgtaaattccagctgtatgatatgaccagcgataagaacattaacttccgctga

SEQ ID NO: 117940 - DNA, 738 bp, Enterobacter cloacae
atgaaaatgttcatccacattgcgcttctcgccagcctgacctcgccgctggcgtggtctgcgggaacggtacaggtctacaccccggacagcgaaaaacctaaaaccttaaccaatgccgggcatctgctcgatctggtggggcagccgaggctggcgaaaagctggtggaccggggcggtgatcagcgagcgtcaggcgacgatcgtagcggaacaaaaacatcaggcgctgctcgcccgactgagcgggctggcacaacaggaagataccgacgatgccgcggccattactagcctgcgtcaacagcttcaggcggttaaggtgacggggcgccagaaggtgaatctggatccggatgaggtgcgcgttgcggaaaacggcaatccgtcgctggaaggggactataccctgtggcttccggctcagccttccaccgtcaccgtgatggggcttctcagcagccctggcaaaaagccgtttacgccgggccgggacgtggcgagctatctcgacgagcaaagtctgctcagcggagcggataacagctatgcctgggtggtctatccggacgggcatacgcagaaagcgccggtggcttactggaataaacgccatatcgaacctatgccaggcagcatcatttttgtcggttttgccgaccatttctggacgaaagcgtatgacgggcttaatgccgatatccttcgctccctgatacagcggataccggaataa

SEQ ID NO: 117941 - DNA, 639 bp, Enterobacter cloacae
gtgaagcgacctgcaatcatcctgatttgcctgctgttgcaggcgtgctcagctaccaccaaagggctgggccactcactgtgggacagcatgttcggcacgccgggcgtgcatctgaccgatgacgaacttcagaacatgccgtatgccagccagtacatgcagctaaacgatggtccgcaactgtttgtggtgctcgctttcgatgaaaacgggcagcagaaatgggtgacgcaggatcaggccaccatcgtgacacagcattcccgcatcgtgaaaacgttgctcggcggcgacaacctgcttgaggtgaacaacctggctgaagatccgctcatcaagccgaatcagatcgtcgatggcgcaagctggacgcgcacgatgggctggaccgagcataaacaggtgcgctacgccacggcccgctccaccttccgctgggacggtacggacagtgtcaaagtgggcagcgacgaaacgcaggtgcgcgtgctggatgaagaagtgacaaccgatcaggccacctggcataaccgcttctgggtggacgaagaggggcaaatccgccactccttacagtatctcggtgccggtttcttcccggtgaaggccaccctgatcaaggcggcgaaatcatga

SEQ ID NO: 117942 - DNA, 243 bp, Enterobacter cloacae
atgaagaaagtactgtatggcatttttgccatatctacgcttgcggcgacgtctgtctatgcagctccggtccaggtcggggaagcagcagggtcggcagcgacgtctgcgtctgcggggagttctaccgcagccagcaccagcgccgtaagttcagccgtgggtgtcgcgctggcggcaaccggtggcggtgatggctccaataccggaaccacgaccactacgacgaccagcacccagtaa

SEQ ID NO: 117943 - DNA, 1650 bp, Enterobacter cloacae
atgaaaaacatcaacccaacgcagaccgctgcatggcaggcactacagaaacattttgatgaaatgaaagacgtcactatcgcggatctgttcgcgaaagatgccgatcgtttcagcaagttttccgccaccttcgatgacctgatgctggtggatttctccaagaaccgtatcaccgaagagacgctggcgaagctgcaagatctggcgaaagagactgagctggcagatgccatcaaatacatgttctccggtgagaaaatcaaccgcaccgaagaccgtgccgtcctgcacgtggccctgcgtaaccgtagcaatacgccaattatcgtagacggcaaagatgtgatgccggaagtgaacgcggtgctggaaaagatgaaaaccttctctgaagcgatcatctcaggtagctggaaaggctacaccggcaaagcgatcaccgacgtcgtaaacatcggtatcggcggctctgacctcggcccgttcatggtgaccgaggcgctgcgcccgtacaaaaaccacctcaacatgcacttcgtgtccaacgtcgatgggactcacatcgctgaagtgctgaaaaaggtgaacccggaaaccacgctgttcctggtggcgtctaaaaccttcaccactcaggaaaccatgaccaacgcccacagcgcgcgcgactggttcctgaaaaccgcgggcgacgaaaagcacgtggcgaaacactttgcggcgctgtccaccaacggtaaagcggtgggtgagttcggtattgataccgcgaacatgtttgagttctgggactgggtgggcggccgctactcactgtggtctgcgatcggtctgtccatcatcctgtccgtgggcttcgacaacttcgttgaactgctctccggcgcgcacgcgatggacaaacacttctccaccaccgcgcctgagaaaaacctgccggtgctgctggcgctgatcgggatctggtacaacaacttcttcggcgctgaaaccgaagcgattctgccgtacgaccagtacatgcaccgctttgcggcctacttccagcagggcaacatggaatccaacggcaagtacgttgaccgtaacggcaacgcggtggattaccagactggcccaatcatctggggcgagccgggcaccaacggccagcacgcgttctaccagctgatccaccagggtaccaaaatggtaccgtgcgatttcatcgccccggcgattacgcacaacccactgtccgaccaccatccgaagctgctgtctaacttcttcgcccagaccgaagcgctggcgttcggtaaatcccgcgaggtggttgagcaggaataccgtgaccagggtaaagatccggctacgctggagcacgttgtgccgtttaaagtattcgaaggcaaccgtccaactaactccattctgctgcgcgaaatcacgccgttcagcctgggtgcgctgattgccctctacgagcacaaaatcttcactcagggcgctattctgaacatcttcacctttgaccagtggggcgttgagctgggcaaacagctggcaaaccgcattctgccagagctgggtgacgataaagcgatcgacagccacgacagctccactaatggtctgattaaccgttataaagcctggcgtgcgtaa

SEQ ID NO: 117944 - DNA, 1350 bp, Enterobacter cloacae
atgacgagttttgtggtcgccaagtttggcggcaccagtgtggcagactacgatgccatgaaccgcagcgccgatgtggtgctggccgatccgaatacccgcctggtggtgctttccgcctcagccggcgtgacgaacctgctggtttccctgtctgaaggactggaagcgaccgagcgtttcgtgaagctggatgcactgcgcaaaattcagttcgacattctcgagcgtctgcaaaacccgaacgtcattcgtgaggaagtggaacgcctgctggaaaatatcaccaccctggcagaagccgcgtcgctggccacctccagcgcactgaccgatgaactggtcagccacggcgaactgatgtccacactgctgttcgttgagatcatgcgcgagcgcaatattcaggcgcagtggttcgacgtgcgtaaagtgatgcgcaccagcgaccgctttggccgcgccgagccggacgtggaagccctggctgagctgactaaccagcagcttgccccgcgcctggatgaaggcatagtgatcacccagggctttatcggcagcgaagccaaagggcgcacaaccacgctgggccgtggcggcagcgactacaccgccgccctgctgggtgaagccctgcacgccacccgcgtggatatctggacggacgtgccgggtatctacaccaccgacccacgcgtggtctctgcggcaaaacgtattgacgtgatcgcctttgaagaagcggctgaaatggcgactttcggcgcgaaagtgctgcacccggccacgctgctgcccgccgtgcgcagcgacattccggtcttcgttggctccagtaaagatccaaaggcgggcgggacgctggtctgcaagaaaaccgagaacccaccgctgttccgcgcgctggccctgcgtcgtaagcagacgctggttaccctgcacagccataatatgctgcactcccgtggatttctggcggaagtgtttggcatcctggcgcgccacaatatctccgtggacctgatcaccacgtcagaagtcagcatcgcgctgacgctcgacaccaccggctccacctctaccggcgacaccctgctgacgcagtcgctgctgattgagctttccgagttgtgccgcgtggaggtggaagaagatctggcgctggttgccatcatcggtaataagctgtcgcgcgcgtgcggcgtgggcaaagaggtgttcggcgtgctcgacccgttcaatatccgcatgatttgctacggcgcgtccagctacaacctctgcttcctggtaccagccgaccaggcggagcaggtggtgcagaaacttcatcagaatttgtttgaataa

SEQ ID NO: 117945 - DNA, 945 bp, Enterobacter cloacae
atgttatccgccatcacgcggctgttcccgttatgggcgctgctgctctccgtactcgcgtattacactcccaccacgttcacgggcattggtccgtgggtcaccacgctgctgatgctgattatgttcggcatgggcgtgcatctgaaaattgatgatttcaaacgcgtgctgtctcgcccggcgccggttgccgcagggattttcctgcactacctggtgatgccgctcgcggcctggctgctggcgatggcctttaagatgccgcccgacctttccgccgggatggtgctggtggggagcgtagccagcggtacggcatctaacgtcatgatctatctggcgaaaggcgacgtggcgctctccgtcaccatctcgtcggtttccacgctggtgggcgtgattgccacgccgctgttaacccgcctgtatgtggacgcgcatatccaggtggacgtgatgggcatgctgctcagcatcctgcaaatcgtggtgatcccgattgcgctggggctggtgatccaccatctcttcccgcgggtggtgaaagcggttgagccgtatctgcccgcgttttcgatggtctgcattctggccattatcagcgccgtggtagccggttccgcatcgcacatcgcttcggtgggctttgtggtgatcgtcgcggttgtgctgcataacactattggtctgctgggcggttactggggcggaaagctgtttggctttgacgaatccacctgccgcacgctggcgatcgaagtggggatgcagaactccggcctggcggcggcgctgggtaaaatttacttctcaccgctggcagcgctaccgggggcgctgttctccgtctggcacaacctgtccggttcgctgttagcaggatactggtccggtaagccgattgatgaccaaccgaaaaaagatgcggtgaaacagggttaa

SEQ ID NO: 117946 - DNA, 273 bp, Enterobacter cloacae
atggctacaccacgtttgacccagaaagacatgaccgaagccgagcagcgcgaactgaaaacgcttctcgaccgcgcccgcatcgcgcatggccgcacgctgacgaacgccgaaaccaatcaggttaaaaaagagtacatcgataaactgatggcgcaacgtgatgccgcggcgaaaaaagcccgcaagctgaaaaaagagcaggcttataaacccgatgcagaggcgactttttcctggtccgccagcacatcaacccgtggaaggcgctaa

SEQ ID NO: 117947 - DNA, 873 bp, Enterobacter cloacae
atgctgccaactcaatcaacccgattaaacaaatacattagcgagagcgggatctgctcacgtcgcgaggctgaccgttacattgaacagggtaacgtgtttcttaacggcaaacgcgccaccattggcgatcaggtagtgcctggcgatgtggtgaaagtgaatggtcaggtcatcgaaccgcgtgatgccgaagacctggtgtttatcgcgttgaacaagccggttgggattgtcagcactacggaagatggcgagcgggacaacattgttgatttcgtgaaccacagcagccgtatcttcccgattggtcgcctggataaggactctcaggggttaattttcctgactaatcacggcgatctggtgaacaaaattctgcgtgccggtaacgaccatgagaaagagtacattgttacggtgaacaagccggtcacggacgagttcatccggggaatgggcgcaggcgtgccgattctgggcaccgtgacgaagaagtgtaaagtcagaaaagaggcgccgtttgcgtttcgtatcacgctggtgcagggcctgaatcgccagatccgccgcatgtgcgagtacttcggttatgaagtgacgaagctggaacgcacgcgcatcatgaacgtcagcctgtctgggatcccgctgggcgagtggcgtgacttaacggatgacgagctgatcgagctgttcaaacttatcgagaactcctcgtccgaagcgaagccgaaagctaaagccaaaccgaaaacgcaggcgattaagcgtccggtggtgaaggcaccgcaggcggaagagaaagggcggggcaagccgggcaacggaaaacgctttacccagccggggcgcaaaaagaaagggcgctga

SEQ ID NO: 117948 - DNA, 318 bp, Enterobacter cloacae
atggagcaatattttgcttatgcgaatgaaggtaatgggaaaaaagcatatccatggcttattaatatgcagcaccctgttgctaatgtgatgaaacatgtactggttgctcccgccgttgaattaagccagttgggcggcattcgtccgcctgcgaaagtgtgccctgtcgttgaaatcgcgggtaagtcctgcgttgtcatgatgcatatgctgtcaggcatctcttcaaaagagttaggtgaacgcgttgccgatcttactaacagcagtgcttcattgcgggatgcactcgattttctgatcagcggttactag

SEQ ID NO: 117949 - DNA, 294 bp, Enterobacter cloacae
atgctcgtttattacgctacacttcgccaattcatgcgcattccaatgggggttatcatgcgcactactaatggcattaaaaaatcagtcaatgtttcgttagcaccagaaattcttgaagaagcgcgacgtcttaagctcaatctctctgctgtactcacggccgctctacaggagcagtttcgtgcgcatcagcgcgcagagtggttagcagaaaataaagcgtctatagaggccattaaccagtgggttgatgaaaacggctcctttagtgactttcagaggtcattctga

SEQ ID NO: 117950 - DNA, 1632 bp, Enterobacter cloacae
gtgttgacgttgttacacctgctctccgcagtcgcactgctggtatggggcacccatatcgttcgtaccggcgtgatgcgtgtgtttggcgcacgtttacgtaccgttctcagcggcagcgttgagaagaagccgctcgccttctgcgcgggtattggcgtcacggcgctggtgcaaagcagcaacgccaccaccatgctcgtcacctcgttcgtggcgcaggatctggtggcgctcgccccggcgctggtgattgtccttggcgccgacgtcggtaccgcgctgatggcgcgtatcctgacattcgatctctcctggctgtcgccactactgatttttatcggcgtcatttttttcctcggccgtaagcaaagccgtgccgggcagcttggccgcgtcggtattggcctcgggctgatcctgctggcactggagctgattgtgcaggctgtcacgccgatcacccaggccaacggtgtgcaggtcatcttcgcctcgttaaccggcgatattatgctggatgcgctgatcggcgcggtattcgccatcgtcagctactccagcctggcagcggtcctgctgacggcgaccttaaccgccgcaggggtaatttccttcccggtggcgctgtgcctggtgatcggtgccaacctcggctctggcctgctggcgatgctcaacaacagcgccgccaacgctgccgcccgccgggtggcgctggggagtttactgtttaagctggtgggtagcctgatcattctgccgtttgtgcacccgctggcgaacctgatggataatctctctctgccgaaagcggagctggtgatctacttccacgtcttctacaacctggtgcgctgtctggcgatggtgccgtttgccgcgccgatggcccgcttctgcgagcggcttattcgtgatgaaccggagctggacgcgcgccttaaaccgaagcatctggacacctcggtgctggatactcctgcgctggcaatcgccaatgccgcccgcgaaacgctgcgcatgggcgacgcgatggaaaccatgctggaagggctgcaaaaggtgatgcacggcgagccgcgcgaagaaaaagagctgcgcaggctggcggacgatatcaacgtgctgtataccgccatcaagctctatctggcgcggatcccccaggacgagctggcggaagaggagtcgcgccgctgggcggaaatcatcgagatgtcgcttaacctggagcaggcttcggatattgtcgagcgtatgggcagtgaaatcgcagacaaatccctggccgcacgccgggcgttttctgttgaagggctgaaagagctggaagcgctgcacgaacagctggtcagcaacctgaagctggcgatgtcggtcttcttctccagcgacgtgccgagcgcgcgccgcctgcgccgcaataagcatcgtttccgcatccttaatcgccgctactcacacgcccacgttgagcgtctgcaccagcagaacgtgcagagtatcgagaccagctccctgcacctggggctgctgggggatatgaagcgtctcaactcgttgttctgtgcggtggcgtacagcgtgatggagcagccggatgaagacgatgagcgggatgagtattaa

SEQ ID NO: 117951 - DNA, 3684 bp, Enterobacter cloacae
gtgagcagcaaagtagagcaactgcgtgcgcagttaaatgaacgaattctggtgctggacggcggcatgggcaccatgatccagggctatcgtctgagtgaagacgatttccgcggcgagcgctttgccgactggccttgtgacctgaaagggaacaatgacctgctggtgttaagcaaaccgtctgttatcagggatatccacaacgcttacttcgaagcgggtgcggatattgttgaaaccaacaccttcaactcgacaaccatcgccatggcggattaccagatggaatccctgtcggcggagatcaactttgaagcggcgaagctggcgcgcgcctgcgccgacgaatggacggcccgtacgccggacaagccgcgctacgtagccggggtgctgggcccaaccaaccgcaccgcgtcgatttctccggacgtcaacgacccggcgtttcggaacatcacctttgaccagctggtggccgcgtatcgtgagtccactaaagcgctggtggaaggcggctccgacctgatcctgattgaaaccgtattcgacaccctcaacgctaaagccgcgatttacgcggtgaaagaggagttcgaggcgctgggcgtcgacctgccgatcatgatttccggcaccatcaccgacgcctcggggcgcacactttccggccagacaaccgaagcgttttataactccctgcgccacgccgaagcgctctcctttggcctcaactgtgcgctggggccggacgagctgcgccagtacgtgcaggagctttcgcgcatcgcagagtgctacgtcaccgcccacccgaacgccggtctgccgaacgcgtttggtgagtacgatctggatgccgacaccatggcggcgcaaatccgcgaatgggccgaatctggtttcctcaacatcgtcggcggctgctgcggcaccacgccggagcatatcgccgccatgagccgcgccgtcgccgggcttccaccgcgcaagctacccgagcttccggtagcctgtcgtctgtccggcctggagccgttgaccatcggcgacgacagcctgtttgtgaacgtgggtgaacgtactaacgttaccggttctgcgaagttcaagcgcctgatcaaagaagagaagtacagcgaagcgctggacgttgctcgccagcaggtagaaagcggggcgcagatcatcgatatcaacatggatgaggggatgctcgatgccgaagcggcaatggtgcgtttcctcaacctgattgccggtgagccggatatcgcccgcgtgccgatcatgattgactcctccaagtgggaggtcatcgaaaaagggctgaagtgcattcagggcaaaggcatcgttaactccatctcgatgaaagagggcgtcgatacctttatccaccacgcgaagctggtccgtcgctacggagccgccgtggtggtgatggccttcgatgaagtgggccaggccgatacccgcgaacgcaaaattgagatttgccgccgcgcgtacaaaattttgaccgaagaggtgggtttcccgccggaagacatcatcttcgacccgaacatcttcgccgtcgcgaccggcatcgaagagcacaacaactacgctcaggacttcatcggcgcgtgtgaagacattaaacgcgagctaccgcatgcgctgatctccggcggcgtgtcgaacgtgtcgttctcgttccgcggcaacgacccggtgcgtgaggcgatccacgccgtgttcctttactacgccatccgcaacgggatggacatggggatcgtcaacgctggccagctggcaatttacgacgatctgccagccgagctgcgcgacgccgtagaagacgtgatcctcaatcgtcgtgacgacgccaccgaacgcatgctggatctggcggaaaaataccgcggcagtaaatctgacgaatcagccaacgttcaacaggccgaatggcgctcctgggatgtgaataagcgtctggaatactcgctggtaaaaggcattaccgagtttatcgagcaggataccgaggaagcgcgtcagcaggccgcccgtccgattgaagtgatcgaagggccgctgatggacggcatgaacgtggtcggcgatctgttcggcgagggcaaaatgttcctgccgcaggtggtgaaatccgcccgcgtcatgaagcaggcggtggcgtatctggaaccctttatcgaagccagcaaagagaagggctccagtaacggtaaaatggtcatcgccaccgtgaagggcgacgtacacgacatcggcaaaaacatcgttggcgtggtgttgcagtgtaataactacgaaattatcgatcttggcgtgatggtcccggcggataaaatcctcaggaccgcgcgcgaagtgaatgcggatctgattggtctttccgggctgattacgccttcgcttgacgaaatggtcaacgtggcaaaagagatggagcgccagggctttaccattccactgctgattggcggggcaaccacctcgaaagcccacacggcggtgaaaatcgagcagaactacagtgggccgacggtgtatgttcaaaacgcctcgcgcactgtgggcgtggtctccgcgctgctgtccgacacccagcgcgatgactttgtcgcccgcacccgcaaagagtatgaaaccgtccgcattcagcatggacgtaagaaaccgcgcacgccgccggtttcgcttcaggcggcgcgcgataacgatctggcgttcgactggtccagctatacgccgccggtcgcacaccgtctgggcgtgcaggacgtgacggccagcatcgaaacgctgcgtaactacatcgactggacgccgttcttcatgacctggtcgctggcgggcaaatatccgcgcattcttgaagatgaggtggtgggcgaagaggcgaagcgcctgtttaaagatgctaacgacatgctcgacaggctgagcgcagagaaagccctcaacccgcgcggcgtggtggggctgttcccggcgaaccgcgtgggcgacgacgtggaaatctaccgcgatgaaacccgcacccacgtgctggccgtgagccaccacctgcgccagcaaaccgagaaagtgggctttgccaactactgcctggcggatttcgtcgcaccgaaactctccggtaaagccgactatatcggcgcctttgccgtaaccggtggtctggaagaagacgcgctggcggatgcgtacgacgcgcagcacgatgattacaacaaaatcatggtgaaagcgatcgccgaccgtctggcggaagccttcgctgaatatctgcatgaacgcgtacgtaaggtgcactggggctacgcggcgaatgagaatctcagcaacgaggagctgatccgcgaaaattaccagggcattcgtccggcgccggggtatccggcctgcccggaacacacagaaaagggcactatctggaagttgctggacgtcgaagcgcatactggcatgaagctcaccgagtcgttcgccatgtggccgggcgcgtccgtttccggctggtatttcagccacccggacagcaagtacttcgccgtggcacagcttcagcgcgatcagattgaggattacgccctgcgtaaaggcatgagcgtgtcagaggtggaacgctggctggcgccgaatttgggctacgacgcagactaa

SEQ ID NO: 117952 - DNA, 828 bp, Enterobacter cloacae
atggttacgaccgttcccgctaaacgcggcagaaaacctgctgcaaccaccgctgcacaaccaggcggacaggttcaatccctgacgcgcggcctgaagctgctggaatggatagccgaatcgcatggtagcgtggccctgacggagctggcgcagcaggctggcctgccgaactccaccacgcaccgtctgctgaccaccatgcagcagctgggcttcgtgcgtcaggtgggcgagctgggacactgggcggtgggggcgcatgcgtttattgtcggcagcagcttcctgcaaagccgcaacctgctggcgattgtccacccgattctgcgcaagctgatggaggagtccggcgagacggtaaacctggccgtgctggatcagagcgatcaccaggcgattatcatcgaccaggtgcagtgtacgcagctgatgcgcatgtccgcaccgattggcggcaagctgccgatgcacgcctctggcgcagggaaagcgtttctctcgcagctgagcgaagagcaggtaacggggctgctgcaccgtaaagggctgcacgcctatactcacgccacgctggtgtcgccggtgcatctgaaagaagatctggctttaacccgcaagcgcggctattcgtttgatgatgaggagcatgcgctgggcctgcgctgcctggcatcctgtatttttgacgagcaccgcgagccgtttgccgccatctccatctccgggccgatttcacgtatgaccgacgaccgcgtcaccgagctgggcgcgatggtgattaaggccgcgaaagaggtgacgctggcgtatggtgggattcgttaa

SEQ ID NO: 117953 - DNA, 1752 bp, Enterobacter cloacae
atgtcgcgtggtctggaattactgattgcccaaactattttgcagggcttcgatgcccagtatggccgctttctggaagtcacctccggcgcgcaacagcgttttgagcacgccgactggcatgcggttcagcaggccatgaagcagcgtatccatctttatgatcaccacgtaggtctggtggtggagcaactgcgctgtatcaccgacggtaaaagcccggatgcggaatttttactgcgcgtgaaagagcattacacccatctgttacccgactacccgcgcttcgagattgcggagagctttttcaactccgtctattgccggttatttgaccatcgctcattatctcctgagcggttatttatcttcagctcccagccggagcgccgcttccgtaccattccgcgtccgctggcgaaagatttctttcccgatcgcggctgggaaaagctcctgcaccgcgtcttaacggatttgccgctgcgcctgccgtgggagaataaaccccgggatatcggctatatccacgcatatctcagtgaaaccttcggcgaggcggtgctcagccgcagccatttgcaggttgccaacgagcttttctaccggaataaggccgcctggctggtgggcaaactggttacgccgacagctatcgtgccgtttctgctacccattcaccgtaccgacgacggggaactgtttgtcgatacctgcctgactaccagcgctgaggccagtatcgtatttggcttcgcccgttcctatttcatggtctatgccccactgcctgccgccttggtggagtggctgcgcgagatcctgccgggcaaaaccaccgccgagctgtatatggcgattggctgtcagaagcatgccaaaacggaaagttatcgggaatacctgcgttatgtcaccacggctgatgagcagtttatcgaagcgccggggatccgcggcatggtgatgctggttttcacactgccgggcttcgaccgcgtgtttaaggtgattaaggataaatttgccccgcagaaagagatgaccgccgctcacgtccgcgcctgctatcagctggttaaagagcacgatcgcgtcgggcgaatggccgatacccaggagtttgaaaactttgtgctggataagcagcagatcgatccggcgctgatgtcgctgctaatgcaggaagcgccgacgaaaattaccgatcttggcgataagattgcgattagccatctctacatcgaacgccggatggtgccgctaaatatctggctggagcaatccgaaggccaggctttacgagacgccattgaagagtacggcaatgcgattcgccagctcgccgccgccaatattttccccggcgacatgctgtttaaaaacttcggcgtcacccgtcacgggcgggtggtgttctacgattacgatgaaatttgctacatgaccgaggtgaacttccgcgatatcccgccgccgcgctacccggaagatgaactgtccagcgagccgtggtacagcgtatcgccgggcgatgtgtttccggaggagtttcgccactggctttgtgccgacccgcgcatcgggccgctattcgaagagatgcatgccgatctgttccgcgccagctactggcgcgggctgcaaacgcggatcaaaaatgggcacgtggaagatgtctacgcttaccgccgcaagcagcggttttgcatccgcttttctccctctccctgtgggagagggccggggtga

SEQ ID NO: 117954 - DNA, 1305 bp, Enterobacter cloacae
atgaaaacccgtacccaacagatcgaagagttacaaaaagagtggacccaaccgcgctgggaaggcattcgccgtccgtacagcgcagaggaagtggtgaagttacgcggctcggttaacccggaatgtacgctggcgcagaacggcgcggcgaaaatgtgggatctgctgcatggggggtctaaaaaaggctatatcaacagcctcggcgcgctgaccggcggtcaggcattgcagcaggcgaaggccggcattgaggctatctatctttccggctggcaggtcgcggcggatgctaaccttgcctccagcatgtatccggatcaatctctttatccggcgaactcggtgccgtcagtggtggatcggatcaacaataccttccgccgtgcggatcagatccagtgggccgcgggtatcgaaccccacgatccgcgttttatcgactatttcctgccgatcgtcgccgatgcggaagccggtttcggcggcgtgctgaacgcctttgagctgatgaaatccatgattgaggccggtgcagcggccgttcactttgaagatcagctggcgtcggtgaagaagtgcgggcatatgggcgggaaagtgctggtgccaacccaggaagcgatccagaagctggttgccgcgcgtctggctgctgacgtgctcggcgtgccgacgctggtgattgcccgtaccgatgctgacgcggcggacctgatcacctctgactgcgacccgtatgacagcgaattcattaccggcgaacgtaccagcgaagggttctatcgcacacatgccggtattgaacaggcgatcagccgcggcctggcgtatgccccttacgccgacctggtctggtgtgaaacctccacgccggatctggcgctggcgaagcgctttgccgatgcgattcatgcgaagtatccgggcaagctgctggcctataactgttcgccgtccttcaactggcaaaagaatctggacgatacgaccatcgccagcttccagcagcaattgtcagatatgggctacaagtaccagttcatcaccctggcgggtatccacagcatgtggttcaacatgttcgacctggcgcacgcctacgcgcagggcgaaggcatgaagcactacgttgagaaggtacagcagccagaatttgcggcgggcaaagagggatataccttcgtttcgcaccagcaggaagtggggaccggctacttcgataatgtgaccacgattattcagggcgggacctcctccgtcacggcattaacgggctcaacggaagaagcacagttctaa

SEQ ID NO: 117955 - DNA, 1602 bp, Enterobacter cloacae
atgactcaacaggcaacaacggtcgatgaactgacctttacccagccgaatggtgaacaagaacagcaagttttgacggcagaagcggtagagtttctgactgaactggtgactcgctttacgccacagcgtaataaactgctggcggcgcgcattcatcaacagcaggagatcgataacggcaagttgccagggtttatttcggaaaccgcttccattcgtcatggtgaatggaaaattcgcggaatccctgaagatttacaggatcgtcgcgtagagatcaccggtccggtagagcgcaaaatggtgatcaacgccatgaatgccaacgtcaaagtatttatggcggacttcgaagattccctcgcgccggactggcagaaagttatcgacgggcagatcaacctgcgcgacgccgtcaacggcaccatcagctataccaacgaagccggtaaaatttaccagctcaaaccgaatccggcggtgctgatctgccgcgtacgcggtctgcatttgccagaaaaacacgtcacctggcgcggagaagcgattccgggcagcctgttcgactttgcgctgtacttctttcacaactataaaaacctgctggcgaaaggcagcggcccctatttctatctgccgaaaacccagtcctggcaggaagcggcgtggtggagtgaagtcttcagctacgcagaagaccgctttggcctgccgcgcggcaccattaaggccacgctgctgattgaaaccctgcctgccgtattccagatgcatgagatcctccatgcgctgcgtgaccatattgtgggcctgaactgcggccgttgggattacatcttcagctacatcaaaaccctgaaaaaccatgccgaccgggtattgccggatcgtcaggttgtcaccatggataaaccgttcctcagcgcctactcgcgcctgctgattaagacctgccacaaacgcggcgcctttgcgatgggcggtatggcggcgtttatcccgagcaaagatgcagagcgtaacaatcaggtgctcaacaaggtgaaagccgataaagagctggaagcccgtaatggccacgacgggacgtggattgcccatcctggtctggccgatacggcgatggaagtctttaaccgcgtactcggcgacaacaaaaaccagctgtttgtcacccgtgaagacgatgcgccaatcgcagaagaacagttgctggcgccgtgtgcgggcgaacgcacggaagaggggatgcgcgccaacattcgcgtcgccgtgcagtacatcgaggcatggatctcaggcaacggctgcgtgcctatctacggcctgatggaagatgccgccacggcggaaatttcacgtacctccatctggcagtggatccatcatcaaaaaacgctcagcaacggcaaaccggtaaccaaagccctgttccgtcagatgctggccgaagagatgcgggtcatccaggacgaactgggcgagcaccgcttcagcagtgggcgttttgacgatgccgcacgtctgatggagcaaatcaccacctctgatgacttaatcgacttcctgaccctgccgggctaccgcttcctggcgtaa

SEQ ID NO: 117956 - DNA, 930 bp, Enterobacter cloacae
atgccgattcgggtgcaggacgagctaccagccgtcaatttcttgcgtgaagagaatgtcttcgtaatgacaacttcgcgtgcttctggtcaggaaattcgcccgctgaaggtgctgatccttaatctgatgccaaagaagatcgaaacggagaaccagttcctgcgtttgctctccaactctccgcttcaggttgatatccagctgctgcgcattgacgcgcgtgagtcacgcaacacgcctgctgagcatctgaataacttctactgtaattttgaagatattcgcgatgagaatttcgatggactgatcgtcaccggcgcaccgctgggtctggtggaatttaatgacgttgcctactggccacagatcaggcaggtgctggagtgggcaaaagatcacgtcacgtccaccttgtttgtctgttgggcggtacaggccgcgctgaatatcctctatggcattcccaagcaaacccgcagcgacaaactttctggcgtatacgaacaccacattcttcacccgcatgcgctgctgacgcgtggtttcgatgacactttcctggccccgcattctcgctacgccgattttccggcacagctgatccgcgattacaccgacctggaaatcctggccgaaacggaagacggcgatgcctacctgttcgccagtaaagacaaacgcatcgcgttcgttaccggccatcctgagtacgatccgcataccctcgcctcagagtattttcgtgacgttgaagcgggtctgaatccggatgtcccgtacaactatttcccgaaaaatgatccgcaaaacacgcctcgggcaacctggcgtagccacggaaatttgctgtttaccaactggctcaactattacgtctaccagattacaccgtacgatctgcgccacatgaatccgacgctggagtaa

SEQ ID NO: 117957 - DNA, 630 bp, Enterobacter cloacae
atgttagatgggggggactggttacctggcggaataacacttattggccgctggtcgataatggctccggtatcaatacgtgcatacttatccggatcgtgcatagcaccagaaatagaaaacgttccgtcattattatccatgacgctgataacacgatattgctgcgcatacagctcatcagattcgactatccacaccgattccactgccggggtttcgctgtatgccgtggttacggtgactgcccgaccgttaacgctctgtatcgttctactctgcgatgcacctgacggcaggttaaccataaggcgactaccaggagcagctgccgaatcacgatcgagagtgataacgcgaccgttaacggcgctgatgcggcctcccataacctttccggataacagctcatcggcaaccgctatgatatggccaggctgtggaatcctgccatccaggccaacgctgaacgatacgatgcgatccttgttattggtcagaataccccagcgccccttgcggtttgcctctgactggcgggtgcagccgatggctgtaatttcgagctggtttgttccaaagcgagccacaagctcctgctcaaatacaggctccatcgcgtctgcgtag

SEQ ID NO: 117958 - DNA, 591 bp, Enterobacter cloacae
atgcaggaagtaatgagccgtatcgagcttggtgcagagctgggaaaaacgtttggtaaagttcactaccgcctgatttctcgtgtgagtgaggcgggagttgcactggcaaagaccataccggggtttgagcagtttatgatttccagccagcgccgtgggctcacttattcagtgtttaaaggtaaaaaaaatatcggtgtggatgaccttggctttccggttaccggcgatgttatccgcattgttccggtgattatcgggagtaaaaaagccggtgtattacagaccattttaggtgcggttctggttgctgtaggggcagtgcttaatttcacaccctgggccgctgcatctccattcttctacaaatttggtgctgcggtcatgctgggcggcgttgtccagatgctttcccctcaaccagggggcctggccagcaaacaaagctcagataaccgggcctcatacgcgttcggtggcgtcacaaacaccgcagcgcagggctatccggtaccgcttctttacggtcgccgacgaattggcggcgcgattatttctgccggaatttacgtcgaagatcagcagtaa

SEQ ID NO: 117959 - DNA, 348 bp, Enterobacter cloacae
atgacgatagagacattttcctggagcgttaaggtctccagccagcccactgagggaagtaaagacacgatcagaaaggtccagttcggggacgggtacgcccaggtgagcggatcagggctgaatgatgagattcgcacctatgagtattccttttcgggagatccaaataccgcgaatgaaattcatgcctttcttcgccgacacaaggtgaagtcgtttattttcactccgcctttcggcgatatggcgctgtggagagttgaagccaatagcctcaaaaaggtggttaaaaacgtaaaagtgataaccgtaaccgcaacgtttgaacaggcattcgcaccatga

SEQ ID NO: 117960 - DNA, 2517 bp, Enterobacter cloacae
atggcccagacgtcagtcggtgatctggtcgttaaccttgacgttaactcgacgaagttcagcgaacagctcaactacgtcaaaaaagaattaaaacagacaggaaacacggcgaacgacgaagcgttacgtatccagcagtccttcagccgtcaggagatcgccgcacgtaaagcgggtatctcagtcggccagtataccgcagcgatgcgtatgcttccggcgcagtttaccgatgtggccacgcagctggcaggtgggcagaatccctggctgattctgcttcagcagggtggtcaggttaaggactcctttggcgggatcataccgacattccgtgcgctactggggactatttcaccggtgatggtgggtatcggtgctttgtctgttgcaacaggggctctgttctatacctggtaccagggttcttccacactgtctgatttcaacaaaacgctggtgctgtccgggaacacagccggactgactgccgaccgcatgctcgtgctgtcgcgaaacggtcaggctgcggggctgacgttcaaccagacaagtgaagctctgacggagcttattaatgctggcgtacgtatcggctcgcgctttgatgaaatgatccaggctgtggcgcgttttactgatgcctccggcgtgccggtggataaggttgctgccgcctacggtaagctcgtaacagaccctacatcgggcctgatctcgatggcccagcagtttcacaacgttaccgcagaacagattgcgcatgtggcgcagttacagcgtgccggtgatgaggctggcgcactgcaagcggctaacgaggccgcgactgccggattcaacgatcagaccaaagccatccgtgacaatatggggacgattgaatcttcagcggactccctgaagcgcgccttcaagtcgatgtgggatgcagctctggatattggtcgacctgacaccgcgcaggagatggtggcaaaagccgaagccgcgttcaaaaaagccgatgaaatctggaacctgcgtaaaggtgaccgatatgtcaatgatgaggcccgcgcccgattctggaatgaccgcgaaacggcaagactggcgctggatatggcgcagcagcaggcgggtattgctaaagcgaacgaggagaatgcctctcgtgaagcagctgcggaatcagaccgtcagaaatatgccgcgcaggcgcaggcaaactatgccaaaactcagacagccctggaaaaatacacggcgcgtcaaaatgagcttaacaaggcgctgaaagagggcagaattcttcaggctgactacaacatcaacatggctgtagcgaaaaaagagtatgaagatacccttaaaaagccgaagaaaacccctgctgtcagaaccccttccggtacccgcgcgaccgacaacgccagtgcccagactatggcgctggaagcacaactgcgcacccttcaggagcacaagggtataaatgacaccatcagtcagcagcgccaggagctctggcgtcagcagtcgcgttttgcagttctggaagaggctgccaaaacaaggactctttcagcagaagagaaatccctgctggccagcaagagtgaagtgctttcccgggcagaactgaatgcgaagctcggtgatcagattgtggcgcaggagcggcttaaccggctacaggacacatcacagaagtacgtgactcaaatcggggagaaaactcgcgccctggcggaaagtgctggcatgagtagtcgtgcagcacagcgacgcaatgaagaggcccagcttcttcagggatggaaaaatggtggtggatctgaaaaagatgccggttatcagaaagagctacaggcactgcatgcgtattacgcagagcaggataagcagcgagacgactggcagtccggggcaaaatccgcatgggcagattatgttgattctgcttctgatgcttatggccagatgaagtcgtttgccagcagtacgtttgatggcatcgggcagaatatggctgacatgctgacacgcggaaaggctgactgggctgactttacccgctccacactctctatgctgacgcagattctgatgaagcaggcgatggtcggcctggtggattcagccacgacggcactggggtttgcaggtggaggttataccggttcaggcgggaaatatgagccagctggcgttgttcaccgtggggaatttgttttcaccaaagaggcaaccagccggatcggtgtcggcaatctctacaaaatgatgaagggttatgccagtggcggctatgtgggtggaggttcatctgctggcgtcggtgcgccgttcggtgtcagtgtttatgctccggtgacggtcgagaatgcctccggtgacgcacagcagcaaaacgacggtaacagactgggtaaggcataccagcaggtgattaacaaatctgttaacgagggcattgctaaggctatccagcccggtgggcttatctggaatgcgaacaatcgcaggtaa

SEQ ID NO: 117961 - DNA, 321 bp, Enterobacter cloacae
atgaaactggcgcgtgagttcggtcgcccggactggcgtgccatgcttgctggcatgtcctcaacggagtacggcgactggaaaatcttctaccaggacaattattttcatgatgcgcagctggatgcccatttctccggtttgctctacaccatctcgactctgttttttgccgatccggaattatccccggacagtttcagcatcctttcccctgcattggaagtcatcgacattgatgatccggatgacgatacgctgatggcgaaggctgaaggtatttcaggaggcgtgcgctatggcccagacgtcagtcggtga

SEQ ID NO: 117962 - DNA, 423 bp, Enterobacter cloacae
atgtttctaaagagcgaactgctggaaagtaacggtagcagtgtcacattgttccagctgtcggcgttgcaacgtattgaacacctcgaatacctgaaacaactggaagcggttgaagagggcgattttcaggcggccattaccctcactgtgaagagtggagcgtatctcgtcgcaatgtcactctggcacggtcacccactgaaaggttcactgggagaaaacgcggcggcggaagtggccaaaattcaggatgaagtcatgcagtcatggccgactgaactcatcgctgaagccgaatataaagtaaaaatcctgtccggcatgattgcgcctgtaactgatgagcaggcagagccgggagaagagcgtaaagagcacgcagaacctgttactgcggaaaagccctcgccagtgagctga

SEQ ID NO: 117963 - DNA, 738 bp, Enterobacter cloacae
atggccacaccaaatccgctggcaccaacaaaaggtgctggtactactctctgggtttacaccggaaccggagacccctacgccaatccgctttcagacgttggctggttgcggctggcaaaaattaaagaccttcagcccggagaactgaccgcagagtcagaggatgacacttacatcgatgatgagaatgccgattggacatcaacgatgcaggggcagaaatcagcaggtgaaaccaacctgacgctcgcgtggatgccgggagattccggccagcaggacctggtgaactggttcgatgagggcaccgtgaggggatataaaattaaatacccaaatggtgttgtcgacgtttttaagggctgggtgagcagcctcggcaaaaccattacttccaaagaggtcatgacccgcacggccaaaatcaccaacaacggcaaaccatcactggcagaggacagtggtaccgcgccgattgctgtcacggggatcagcctggataaatccacggcggctgtagcggtcgcggccacgacgcaactggcggtttctgtccttccggccagtgcgtcagataaatccttccgtgtagccagctcagatccgtcaaaagcaacggtcaccgtcagcggcaataccctgactgtcaccggcgtggcggcaggcaccgttgaaatcatcgtcatgagcaatgacggtaactttgtggcgatctgcaaagtcactgtttcctga

SEQ ID NO: 117964 - DNA, 399 bp, Enterobacter cloacae
atgaaacacagcgatatccgcaaggtaataattgacgcgcttgaaggcgcgattggtactggcgctatttattttgatggtagaccagcagtgcttgaagagggggattttccggctatagccgtttacctgacagacgcggaatacacagcggaagagctggatgccgattgctggcaggccattctgcatatcgaagtctttcttgaggcacaggtgcctgactctgagctggatgattggatggagacgcgagtatatccggtactcgcagaggttccggggcttgaatcccttattaccacaatggttcagcagggttatgactatcagcgtgatgatgatatggcgctgtggagttctgccgacctgaaatattccattacttacgaaatgtga

SEQ ID NO: 117965 - DNA, 555 bp, Enterobacter cloacae
atgtcaataaaagggcttgagcaggccatagaaaaccttaacagcatcagcaaaacggctgtcccgcgtgcgtcggcgcaggccgttaaccgcgttgcaaaccgggccgtcagtcgcagcgtggcagtcgtatcaaaagacacccgtgtaccgagaaaactggtgaagcagcgcgccagggtgaagcgcgcgacggttaataaaccacgcgcgcttatccgtgtaaaccgaggaaatttaccagccataaaactcggtaccgcaagtgtgcgcctttcacgcaggaaacgggacaagaaaggggcaaacagcgttctgcgtatcgggcctttccgtttccctggcggttttatccagcaacttaaaaacggtcgctggcatgtcatgagacgaacgtcaaaaccccgttatcccattgaagtggtcagtatcccgctggcagctccgttaaccacagcgtttaaagaagaactgccgaagctcatggaatcagatatgtccaaagagctccgtgcctctctcaccaaccaactcaggttaatactgacacgatga

SEQ ID NO: 117966 - DNA, 354 bp, Enterobacter cloacae
atgtctgatttcgataacctctttgatgaggccatgtcgcgtgcggacggcgctattctcggggtgatgggtacagaggcaaaggtaatatcaggtgctttatcaggaacgaccctggtcggcgttttcgatgatccagaaaacattggttatgccggtgcgggagtacgtgtcgaaggtaccagcccgacgctgtttgtgaatacggctgcggttagccagttggagcgtatggatgccctgacaattaacggacggtcattctgggttgatcgtattggtccggatgattgcggctcctgtcacatctggctgggtaatggttcaccgcctgcttccacgcgtcggcgctaa

SEQ ID NO: 117967 - DNA, 399 bp, Enterobacter cloacae
atgacagagaaagaaaagctgatcgctcggctgagtgaacttggtactcagcttaaccgtgacgtaagcaccagcggaacgattcaggaacttacgatgcgtattgctgaactcgaagaggagctggatggcgacactgattcggttgacggtgaaaacggagaacaaaattcttccgacagcgccgacagtgattttgctgatacggagaaaacaaaatcggtagtgaccataaccgatgaccgggtatcagttgaaacgttggccacactgcatgttgacgcgctgcatgccacgcggaacgaaacgatatccatcgttgagcccggtgtgattatccgcgtatctgaacaggatgccgacgagctgatcgagaaggggctggctcgcgaagtctga

SEQ ID NO: 117968 - DNA, 1026 bp, Enterobacter cloacae
atgtccgtttacactactgcccagctgctggcggtcaacgagaagaaattcaaatttgatccgctcttcctgcgcatctttttccgcgaaacttatcccttcagtacagagaaggtctacctgtcgcaaattcctgggctggtcaatatggcgctgtacgtctcgccgattgtctccggcaaagtgatccgctcccgtggtggcagcacatctgaatttacgccgggttatgtgaagccaaaacatgaagttaacccactgatgactcttcgccgcctgccggatgaagacccgcaaaatctcgctgaccctgtctatcgccgtcgccgcatcattctccagaacatgaaggatgaagagcttgcgattgcccaggttgaagagaaacaggcagtagcggcggtgctcagcggaaaatacaccatgaccggggaagcgtttgatcctgttgaagtggatatgggacgcagcgctggtaacaacattgtccaggccggtgcggctgcgtggtcctcccgcgacaaagaaacgtatgacccgaccgatgacattgaaacctacgcgctcaacgccagcggtgtggtcaacatcattgtgttcgatccgaagggctgggcgctgttccgttccttcaaggcagtgaaggagaagctggatacgcgtcgtggctctaactctgagctggaaaccgccgtgaaagaccttggtacggctgtttcatacaagggtatgtatggcgatgtggccatcgtggtgtactccggccagtacgtcgaaaacgatgtcaaaaagaactatatgccggacctgacgatggtgctggggaatacccaagcccgcggcctgcgtacctatggttgcattcttgatgctgatgcccagcgcgaaggtatcaatgcctcggcacgctacccgaagaactgggtgcagtcgggcgatccggcgcgtgaattcaccatgattcagtcagccccgctgatgctgctgccggaccctgacgcattcgtgtccgtcaagctggcataa

SEQ ID NO: 117969 - DNA, 333 bp, Enterobacter cloacae
atggcaactaccgaagttttcactcattaccagccgctcggtaacagtgacccggcgcataccgcgtatggtcctggtgaattgacggcatccacgccagcaatgacacccctcatgctggatgctacttctggcaagctgaccgtctgggacggcgctcacgctggcgcggcaacgggcattctggctgtaacagcagatcagaacagcacagagctgacatatcacaagtccggttctttccgtcttgaagatgtcctctggccatccgctgtcaccgacgacaatattaagcgtaacgcgttcgccggaaccgccatcagcatcatttaa

SEQ ID NO: 117970 - DNA, 1344 bp, Enterobacter cloacae
atgacgcccgagctgcgtaatcttccacatatcgccagcatggcctttaatgagccgttgctacttgaacccgcctacgcgcgggttttcttttgcgcgctggcagggcagttgggaattacccgtctgaccgattccgttactggtgtcacgctgggtgctgaacagatagcagagcccctggcgctgtttggcgatgatgatgatatgggaccccggccatcacgtagctatcaggtggcaaatggaatcgcggtgttgccggtttctggcacgctggtcagtaaaaccagatctcttcagccctattctggcatgacgggctacaacggaattattgctcgcctgcaacaggctatcagtgaccccggcgttgacggcattctgctggatatggacacgcctggcggaatggtgtcgggggctttcgactgtgccgatatcattgcccggatgcgcgatattaaacccatctgggctctggcgaatgatatgaactgtagtgctggccagctcattgccagtgctgcatcgcgcaggatggtcacacagacagccagaacgggctccatcggcgtaatgatggctcatagcaactatggcgcagcgctcaaaactaacggcgttgaggtcacgttgatttacagcggtgatcacaaggtcgacggcaacccttacggaaaattacctgaagacgttcgcgctgattttcagacgcgtatcgatgccactcgtcagatgtttgccgaaaaagtttccgcttataccggtatgtccgtgcaggccgtactggacactgaagcggcagtattctccggccaggaatccgtagataacggactggccgatgagcttgttaacaataccgatgcgctcggcgtgatgcgtgaagcactcgacagacgcaaaaaaataaccactggaggaattatgccatcaccttctgcatccgcagccaccaataagacagctgaacaggcaacaactcagactactgcaccggctgaacaggtcaccaccattgacacgacaaccgctgccgcagctacccatgaagatgtcagtgctcagatttcggcagccgtgtccgcagagaacggtcgcatcatgggaatccttaattgcgaagaggcgaaagggcgagagtcgcaggctcgcgcactggccgaaacgccgggtatgacggttgaaagtgcgcagcgcattctggccgccgcaccacaaagcgcccaggcgcgcaccgacacggcactggatcgtctcatggaaacagcaccaggcgcactctcagcaggcagcgcatcctctgatgctgcggacgatttgttaaacacccccgtttaa

SEQ ID NO: 117971 - DNA, 1590 bp, Enterobacter cloacae
atgacaataccttctttagttggtccggacggaaaaacgtctctgcgagaatatgctgggtaccatgccggaggcggcggtttcggtgggcaattgaacgcctggaatcctcagagtgaaagtgctgatgctgcacttctgcctaatttctcccgtggaaatgcccgtgctgacgatctggttagaaataatggctatgcggctaacgctgtgcagcttcaccaggatcacatcgtcggttcatttttcagactgagttactgccctagctggcgttatctcggcattaaagaagaggaaagccgcgcgtttgccagagaggtggaggccgcctggtatgaatatgcggaggatgatttttgcggagtcgatgccgagcgcaagcggacgtttacgatgatgatccgcgaaggagttgcaacgcatgcatttaacggtgagctgtgcgtgcagcctacttgggatagtgattcaacgcgtcttttccgcacgcagtttaaaatggtcagtccgaaacgtatcagtaatcccaataatactggtgattccaggaactgtcgggcaggtgtaaaaattaatgatagcggcgcagcgctgggatattacgtcagtgatgacggttatcccggctggatggcgcaaaactggacctatatcccacgtgaattgccgggaggaaggccttcatttatccatgtgttcgaacccctggaagatgggcaaactcgcggggctaatgcgttttacagcgtgatggagcagatgaaaatgctcgacaccctacaaaatacgcagctccagagcgcgatagtaaaggcgatgtatgcagccaccatcgaaagtgagttggataccgatacggcaatggactttatcctcggtgccgatagtaagcagcaaaataagctgactggctggcttggcgaagtggcatcttattactctgctgcgccggttcgcctcggtggatcgagagttcctcatctcttgccgggtgattccctgaaccttcagtcagcacaggataccgataacggctattcaacgttcgaacaatccctgctgcgttatattgcagcagggctgggtgtgtcatatgagcagctttctcgaaactactcccagatgagctactcgaccgcacgcgccagcgcgaacgagtcctgggccttctttatggggcgtcgtaagttcgtagcggctcgtatggcctgtcagatgttcgtgtgctggctggaagaggcaattgcccgcagggttgtcacgctaccttctaatgcgagatttagcttccaggaagcgagaacagcctggggtaacgccaactggattggttcggggcgcatggctattgatgggctgaaggaggtacaggaggccgtcatgctgattgaagctggtctcagcacttatgagaaggagtgtgccaaacgcggagacgactatcaggaaatattctctcagcaggtacgtgagactatggagcgccgtcaagcggggctcaaacctcctgcatgggcggcagctgcatttgatgcagggctgaaaaaaacaaatgaggaggagaaagatgacgcccgagctgcgtaa

SEQ ID NO: 117972 - DNA, 207 bp, Enterobacter cloacae
atggcaacacagactgaactggatgccgcgcgcgcagcattacatgacctgatgatgggtaaacgggtggcaacggtacagaaagatggccgaagggtggaatttacagctacttcagtcagcgatctgaaaaagtacattgccgaccttgaatctcaggtaggaaacacatcacgacgccgggggccagcaaggttttacgtatga

SEQ ID NO: 117973 - DNA, 1842 bp, Enterobacter cloacae
atgacagctgtcgaatggtccgatgcgcattattaccttccgaaggaatctgcttatcaggaagggcgctgggaaacactgccatttcagcgcgcgatcatgaatgcgatgggcagcgactatattcgcattgttaacgtaattaagtcggcgcgagtaggctattcgaaaatgctcctcggcgtcattgcttatttcatcgaacataaacagcgtaacgagttgctgtggctaccgactgacggcgacgcagataatttcatgaagtctcacgttgagccgacgattcgtgatgttccctcattgctgtctctcgccccctggtacgggaaaaaacacagggacaacaccctgtccatgaagcgttttacgaacggacgcggtttttggtgcctgggtggtaaatctgcaaagaactatcgcgaaaaatctgtcgatgttgttggttacgatgagctggctgcgtttgacgcagacattgagaaagaagggtctccgactttcctgggggataagcgtattgagggttctgtttggcccaaatccatacgcggctcaacaccaaaattgcgtggaacgtgccagatagagcgtgcagcaaaagagtccgggcattttatgcgttttcatgttgcatgcccgcattgtggtgaggagcagtacctcaaatttggcgatcgggatacgcctttcggcttcaaatgggagccggagcaggctgagacggtctactacctttgtgaacataatgcctgtgtcattaagcagcatgaactggacttttccaacgctcgttacatttgcgaactgacaggaatatggactcgcgacggacttcgttggttctcatcttccaatacagaaatagacccacctgaaagcgtaaccttccacatctggacagcttatagcccgtttaccacctgggtacagattgtgaaagactggttcaaaacgcaaggtgatacgggtaaacgtaagacattcgttaacaccaccttgggtgagacgtgggaagcgaaaattggcgatcgccctgatgcggatgttttagctgagcgcatagagcactttgatgcagccgtacctgagcgagtggcatatctgacggcgggtatagattcccagctcgaccgctacgaaatgcgtgtatgggggtggggaccgggtgaggaaagttggcttatcgacaggcaaatcatcatgggacgtcacgatgatgagtcaacgcttgcgcgtgtggatgaggcgattaacaagacatatacacgcctaaacggtgtagaaatgtctatttcccgtatttgctgggatatcggtggtattgatcccaccatcgtctacaaccgctcaaaaaaacacggtttgtttcgtgtgatcccgataaagggtgcttcggtttatggaaaaccagtggcgaacatgccacgtaagcgcaacaaaaacggtgtttatctgactgaagtgggtactgataccgcgaaagagcagatttataaccgcttcacgctgattgttgaaggtgacgagcctctggccggtgccgttcacttccctaataaccccgatatttacgatctttcagaggcgcagcagttaaccgctgaagaactggtcgagaagtgggtcgatggtaaaagaaaaatcatatgggacagcaaaaaaaggcgaaatgaggctctggattgcttcgtttacgcactggcggcgcttcgtatcagcatatcacgctggcagcttaaccttgattcgcttcttgccagcctgctggaagaagaaggctcccgtaacaataacaagaccctggcggattacgcgcgggctttatctggagaggaataa

SEQ ID NO: 117974 - DNA, 507 bp, Enterobacter cloacae
atggccgtgctattgaataaatctgatatggcttcctcgctgggaatatctgtccaggcctttgataaatggggcgtccagcctgtagagaagagagggagagaagtcttctttgacgttcgctcagtcgttgataaccgcatcgaacaccagagccgaaaactacaaccatcgccaggcgaggacgatgatagcgtcaatattgattatgaacgttggcgtttaactcgtgcgaatgcggatgcggcggaactggcaaatgagaaaaagcgtcgcgaggtcgtagagactgcgttttgtaccttcgtgttatccagaatagccgctgaaatatccagtattctggatggcatcccactctcgatgcagcgccgtttccctgaactggaaaatcggcatatcgagttcctgaaaggggacgtaataaaggcgatgaataaggctgcggcgctggatgaacggattccggggttgttgaatgattatatcgaccagtcaggtagctaa

SEQ ID NO: 117975 - DNA, 312 bp, Enterobacter cloacae
atgaaagtttatatcgctgggccaatgactggccgtgaaaactttaaccgtaacgctttcaataaagaagcggagcgtctgacgcgtcatggccataccgttcttaacccggccagcctgccggatggcctggagcagcgcgagttcatggatatctgtttcgcgatgctccgctgtgctgacgcaatcctgatgctgccaggctggcagacatcatctggcgccactgcggaataccattacgcatacaagatggagctaccggtttactcgacgcttcattacccaccagtggccgaagctgcaagctaa

SEQ ID NO: 117976 - DNA, 204 bp, Enterobacter cloacae
atggcgaaaatcaaactgacactcgaacagattaaggctctggccaaattcgcagaagaagaaggccagcctgaatacacaatctgtcatggccaaatcccaggcttcgataactttcctgattacgatggattgattgcgtattcggggtcagaagagcacagcgttctggctctggaagataaagggcagggcgatatctga

SEQ ID NO: 117977 - DNA, 255 bp, Enterobacter cloacae
atgctcaagaacaagcagctgctgcgcgcgctgtttctgcccgtttgtctggcactgttagccagttgcagcaacaggcaagaaaactcgctacccgcctggacgccgcaaagcacaccgcagatcttgccgctgccgtcagaggcaaaacagccggagccaacgccgcaatgctcgccgacatgctcggaagtcttgcagcagaagctaaatattatgctgaacgatctgacgaaagctaccgagcaggaatga

SEQ ID NO: 117978 - DNA, 537 bp, Enterobacter cloacae
atggctaacagggcgaaattaagcgcagcggtactgagtttaattcttgctggagcgtcagccccgcaaattctcgaccagttcctgaatgagaaagagggtaacagcctcacggcgtacaaagatggcggtggcatctggacgatttgtcgtggtgctacgaaggttgatggtaagccggtgcggcaaggtatgaaattgacgcaggccaaatgcaaccaggtgaacgctatcgaacgcaataaggcgctggcgtgggttgaccgcaatattaaggtgccgctgaccgaacctcagaaagcggggatcgcatctttctgcccatacaacattggccccggcaaatgtttcccgtcgactttctataagcgtctcaatgctggagatcgcaaaggggcatgcgaggcgatccgatggtggataaaagatggaggccgcgactgccgactgacaaagggccagaagaatggctgctatgggcaggttgagcgacgcgaccaggagagtgcgcttacctgctgggagatagaccggtga

SEQ ID NO: 117979 - DNA, 306 bp, Enterobacter cloacae
atgagaatgaacgatcactcagggaacatcttcacgcaattatttgcgtggcttggaaccatagcggcagcgctgggttttaccacccaggacatgatttacatgtttttcggggctgtggggcttctaatttcccttgcatcattcatcaacggacgaattgatgcacgtcgccgtcgcaaagaagatgagaagcgaacggcaatgatacaggcttacctggaagaagttagtgataagcctattgaagatcgcccggcagcggtgagcgtagttgctgatgtactcgctaaggcaggcgaataa

SEQ ID NO: 117980 - DNA, 1089 bp, Enterobacter cloacae
atgttaaaaactacacaaatcaacggcgcgcagctcgtttgcgcagattctctgcaattcattaaaaccatccccgataattccgtaaatctgatcgcgactgacccgccctattttggggtgaagtcgaacgactgggataaccagtgggaaagcgatgcggaatttttgggctggcttgatgagttcctggcggagttctggcgaatactggccccaaatggcagcctgtatatgtttaccggttcgcggcttgcgtcaaaaatagaactgcttacccgcgaccgtttcaatgttctgaaccacatcacctgggctaaacctagcggtgtatggcggcggcaaaataaagagagcctgcgtgcatttttcccggcaaccgagcgcatcatatttgctgaacattacggcgcgtctggctatgcaaaaggccagtcggggtatgcaagtaaatgtgcagcgttgaggaaagacgtattttctccgttgattggggcatttgcgtcagcccgccagcagttgggtatttcagcagcagacattaacgctgcgacaggtaaaaagatgtgttcgcactggttttcagcatcgcaatggcagctgccggggcttgatgatttcaacaagctacacggtttgttccagcagcgtgctgaagtcctcggtgttcaatgccctccgccgtttgatgtgggctataacgaacatgaaaaacagtataacgacctaaaagcacagtacgatgcggtaaaagcgcaatatgacgatctgaaagctcagtatgaagggctacgccgtccgttctctgtaacagcagatgttccctatacggatgtatgggtatacccaccggttcagtattacccagggaaacacccatgcgaaaagccagccgaaatgatggaacatatcatcaggagcagctcgcgccccggagatgtggttgctgacttcttcatgggctcaggcagtacgattaaggaagctctgaagctgggccgtaaagcgataggtgttgaaattgaagaagagcggtacctgcaaacagtagaagaagtaaaagaattagtagaaaaagaagatagctga

SEQ ID NO: 117981 - DNA, 228 bp, Enterobacter cloacae
atgaacgcgaaagaaatacgccggaacatgaccgaggaagcgttaagtattgagtccgtaatgcgtgggcatccacgcataagcctggcagagctgagtaatgcctgccggataagcgaggcaacagcagagtttatcgttgagcagatggtttgttttggggtcgcacagcgcggcgctttcggacgatactcactcacgaacgagtatagaaaaggaatcttctga

SEQ ID NO: 117982 - DNA, 222 bp, Enterobacter cloacae
atgaattatcaaggcaacgaaaaaatgcgcaaagacgcggcagatatttccaacgaactctatgagttgtggcaaaaagttaaacgttttgaacgtgaatacagctttaacagcaaggacctgacagagcgccttgcaggccgtcttgtcggcacgatggaacctaaactggcggaactgaataaatttatggccgatgtcgattatcagttcgaagactaa

SEQ ID NO: 117983 - DNA, 312 bp, Enterobacter cloacae
atgtttaacgtgataacccacccggcagcgctggatgagctacaagaactacctgatgagcttcgcggtcgtatgacccggcttatcgagagactggaaagcgaaggaaacaagctgaaaatgcctcacagccgtgttattggcggagggctattcgaattaagggtaggggacaagaacatcgcgagaacgttgtacgcttacgctgttggcaacgaaatctacctactacacgcatttgttaagaagacgcaaaaaacacccgcgaaagcgattgatattgccagatcgcgtctgaaggagatgaactga

SEQ ID NO: 117984 - DNA, 288 bp, Enterobacter cloacae
atgaaagtaaaaggcatcccgtttaaccaggttaaagagaagctgctcgacaccccggaggccatccgggggtatgaggaagccgacaaggagttggcgatggtagaaatgctatacgaaatgagggagaaggctggcctgacgaagtctgcgctggccgaacgtatgggattgcaaccatcagcaattagccgcctggaaagcaacccactcggtgccagcatgaagacactatctcgatacgctaaggcttgcggcgcaagcattgatatacatgctgtgtactga

SEQ ID NO: 117985 - DNA, 222 bp, Enterobacter cloacae
atggataaaaaagcgttactgctcgaacgacttcgccagagaagcgaaagcagtctggccagcggaggagacggttttatttttccctcaatgctggcgttcgatatcggtctgaatacaaggacaattcgggaaattctgaataatgctgtcagggatggaaccctggaaaaaatggagcgtggtgttggccgttcgcataagtaccggacaattcagtag

SEQ ID NO: 117986 - DNA, 327 bp, Enterobacter cloacae
atggcactaacaccagcagaacggcaaagaatccgccgtgagaagctgaaaaagcaagggactaccaggcgggactgggttctggaaccagaggaactgcgcatgctcggtgagatttgcacgcagcgccgtcctggccgagagccgtattcagaaaatgaagtaattggtctgctgatccgcaaaaactacaaagagctgcaaaagaaactttccggctcgtgtacgcggtgtgggcaggaacttccggtatctgagtgtctgttcgatggcgagggtacgtgccagctgaccactctcagattgaagctggccattaaagcgtaa

SEQ ID NO: 117987 - DNA, 432 bp, Enterobacter cloacae
atgagcattgacactaaagaatggctcctgaaaacaatcgcggagcttgaagaagagcgagatgcaactcccggtgcaataaacgaagatgcaaccatggcacttgctgctatgaaacgggctctggcatcactgacggctgagccagattattacgtggtagtaacgagtattggcgtttggcagtcattctgcaaaaccaaggcagaggcagagtttatcgtctcgaaaccgttcaacccaggctattcgatacttgagatatacaccgccccaccagcagcggaattaaccgtgcgtgaactaactatgtgggtcaagcggttagcccactccctgagaaacgccaaatcaggcagcaagttacccgatgatgctatggcctgtttgagcgcaaagggactgattggcgttgaggatgctttgcgatga

SEQ ID NO: 117988 - DNA, 243 bp, Enterobacter cloacae
atgcggctgaaaatgtacaccccaaatggccatgagattatcgaatcttccgaagtcgctcagttttatccggatgcggccagcggcaaccagctaaccaaaattgagacactctcaaccacaggagagagaaagtcggtgctggtaaaacactcattccaccaggttacgtgcgcactggccacggtatggagaatcgacgagcaaaaggccgagcaacaacttacaggagccatccaatga

SEQ ID NO: 117989 - DNA, 924 bp, Enterobacter cloacae
atggttaacatgcaaaaaaacattctggcgatgattatacataaatggctgaagagcgattatgtagtcatcgatacggaaacgacaggacttggcgaatatgctgagattatcgaaattgcgatcattaatatgcgcggtgaagtcctgctggatacattggtgaagccaacccaaccgatcccccctgaagtaaccgaaataaaccatatcaccaacgaaatggtcgctgatgcaccagcgtggtgtgatgtgttccctatggtattggcgatcatcactcaccacaaatggctggcctggaactctggcttcgatgctcgcatgctggaacagacgtgtttctttacagaggttttccccgaaaagcacccctattacgccgcagccgtaacatcccgcattcataccagccatattgacgccaaagccgtttacagccagtggtatggtgagttcgacgagaagcgtcaggctttcaagggtcaaagtctggctactgcggctgcgcgacacggcgtgtcggtagtgggagcacaccgcgctctggccgactgcaaaatggttctggccgtactgcaaaaagtctgcactcccgttcctcagattgaaagctctgtcgagaaagacctgccaccctgcccgttctgctatggccctccttcactgttcacctattactttgacggggttgagcgtaagccgctttacaggccggtgaattacggcgatgacgggctgtatgcaggctcttttgtcttttgccatgagtgtggcgcccagggcgaagaaatcgagggttacgcctgcgacgattcacacgttgagcagctcgaagcggcagcccggagtgtctggtccgatagaaacgagcgccaccatgacctgtatgtctccagtcaggagaacaagtcatgcggctga

SEQ ID NO: 117990 - DNA, 735 bp, Enterobacter cloacae
gtggaactaaatagcattcgggcctgcgtgtccacggctctgtcagatattcactatctccagcgcggcatccttgaggttcagctggagcagctgcgtctcgccagctctgaccgtttcactgacaaaccgacgagaacgatctgcataggtgactcggagtcttacgaattgtcggttccagccgagcccattcgttatcacgttggcaaatcgttcaaacagtcctcaatgctgctaactgaattagatttcatgactgccagctggcggcgtgccattgagcagttaaacagtgaagaaactgcatggctgcattattgctatggatgcaaaccaaattataaaaatgatgtgattatttgccagtggttgtggctggatttttcaattgctcattccaggtcaggctttaagaaaatgaaagcccccacaaaaaaaatcatgcaaaagttaacttactacggaatacaggaagttaaatctgaaattctgcgtgatgaacaatgggatgagcaagaccgtgacgaacatataagttttttactgggtatatctgtggatagctggcgtaaggattataaaaaacgctggttattaatgaaatcacgatgcatgcatcttaacgataccgcgttattaaatgcggcggagaagcgcagtgaaatcatcgaaagccatcgggcaagatgtgccaacctgcctgtgtcagcaggttatgtacaggaaacctga

SEQ ID NO: 117991 - DNA, 609 bp, Enterobacter cloacae
atgattaacagtatgaaaacacgaggcgaacgactgaaagcacgccgtttagagctgaaactgacgctgaagcaagtggcagaagctgtaggaatctctcttccgggcgtccaaaacttagaacgtggcgacgtaatgccgtcgctggagatcgggctatcgctggcaaaatgcctgcgtaagcccgtgcaatggatactgtatggcactgaatctgatccagaccgcgttcctgttattggtacgacagagaccggaccggatagagactggcagcctggagaacctgccaacacagagcgattcctgccgttcgtgagtcaacggaacaccgtttacgcactgacggtcgggaaccagattcagcatcactaccagccaggagacgttatcctggtcgattcctcgcttacgcttgtgcctggggaggatgtgctggtttgtgataataacggcgagatcacaattcaacgattagcccgttatgacgagcagcattactaccttgatagtgctaactctcaacgggttatccatgataaaagtgatcttcaatttgtgcaccaagtagtcggtacgatcaaatcgttcatggttgagggtagatga

SEQ ID NO: 117992 - DNA, 4005 bp, Enterobacter cloacae
atgaccttacaagaattctacgcggagcgctttggcagcgatccgttttcactgcttgaagcggcacgtgatgaactaagcgaactggcgcaaatggccggtatcaactggcacgcctgcgctgacaacatccagctgaatcctcgtggcggcaaagaacgctacaccacatacaataatgctttcccggtagctctggaaaagggcctcaagggccgcgtcgaaatttactcccgacttgagcaaaacaaagacggtatcagttacccctttgtcaacttcgtccataagggtagcgatgccggttcatggagcggtttttctttcctgttttcagagtatcgtcgcgagcagcagcgtaaccgtgcgaccgtggtcgctcagccggaagaagaacgcgtacgcatggagcgccaggctgaagcacgccgccgacgcgtcgaactacaacgcattaatgatttaaaaaacaaccagatggagcaggagcgactgctcggctggttggctttccatcgcgcatgggaacatgcgccagctgaagatggctcctggccttatgcggtcaaaaagggaattcgtgacgtatttagtgcttgcgatgtacgtcgcgtgaccagtcacgacagtgcgaaatggagccgtgggccaacgacttatatggctattcctctgtcccacctggacggacgaaaagacggacggattgttggctggcaacgtatcgatcaccagggcggaaaattccagaccagcgccatcacgaacggcgatttcgtcgggacgtgtttcgttattggcgacctgaaaggggcgcagaatgtagccgtaacagaaggcttcgcaacaggcgcttctgtctggctggctaccaggaaggacccgaaaaaacgctttgacgctgtggttgtggcaatatcagccaacaacatgatccacgttgtcgagcagctggttaacgtctatcccgcagcaaaaatcacctgcgcgctggataacgaccgcaaatcgtcggctgaaggaaaaggcaataccggtctgcgcaccggctttgagattctgtcaaagttccacggcataaagtgtgtttaccctacatttgaagatgatccccagctggagtgcagcgacttcaacgacctgcataaattacgcggcctccgcgaaacctcgcgccagctgtttgccaaatcaaaccgccttaacgccagcacagacctgctcacactgacgctgaacaagctgaaaacccttaagcgggataaccgccgcacattcgccaaagagctgctgaacgcggtcgatattggcatgctgacatgcccggtaccgaacagcccatccgatctgttcaacatgttctgcatcgttctgcgggacatggggcttgagaacgtctaccgcgccaccgtcaaagaccatattgcccgtcgcctgaacagaaaatgccgcacggcacaggcccctcgttcattcagcgatcgcattaccgacccaaacaaacgaccacagcacatcacctataagcggttcgaaacatcggtcatgaccgaagatgttctgaagtacgtgcaggagctacaggggatcgtaattgtccgtgctggcatgggttctggtaaatcgacaggcctgcttcgcccgttgatgcataacgcagaacgcggcgtttctgtagcacacagggtgagcctcatcggtgggttatgggaaatgatgacagaagggaaaggcgctaaggccgacattctgcattaccaggaccctggctatcaggaaatggcgccatacgccagcaagctgaccatctgcataaactccatcgtgaagggctgctggcaaccactgatgcgccagcacgactatttcggttttgacgaggccacacaggggctccgtgccgtgctttcaggccgcgcaatggaaaacccggtcgcggtgttcaatacgctgattgacgcgctggccagaacagaattacacccgatcatggtggatgctgatgccaacgatctgctggttgacctggcagaactggcaatgaagcgccgcgaagagctggggataccagcatggctgcaaatccacgttatcgaattgccggtcgacgttcgcaaccgcgaaactggtgaacctatccgcgtcttctacaccgaaaaggatcgcatcatgtccgaggtgatgaaggccgtagagctcggtgaaaaaatcatgctggccaccgacagttccacgttcgccgaggacgttaccgccaccctgcgcctgaattacccgcacaagaagttcctgtgcgtaaaccagaaaagcaaaccagagccagaggtggaagagttcaccaacaaaccgaagaagatggtgaagaagtacgatggcctgatttacagcccatcaatctcatccggcgtgtccatcgagcagaaacacttcgatcgccacttcggcatgttctgcggtgaagtggtccccagcgacgctatccagatgctgcgccgcgaccgtaccgcgaaagaatttatcatcggcttcgataaggttcgcgccaaacgtgaaaccgatcctcaaaaaatagaacgcgcttacgtccaggcacttctggccactgccggtatgaacggcgagctgacggacgttgtctttgacggcgacacaatttccatgggtgtggccaacaccgatttcaccaggatgaaaatcaaggcatcagccatcgaagcgacggcgcgcaacgattacgccagcaacatgatctgcattatgcacagcgacggctataaagtttcgccgctggccggagacccgcaggcgaatgaagtcgggaaggagctgcgtaaggaagcgcgggaaatcgtctgggaacaaacgctggatcttcacctgaacatcgatacgccggacgaatcagaacgcgaagcgattctgaaaaaacgagcgctaaccctggaggaacaggcgaagcttgtccgctgggacatcgagcacgagctgaagctcccggtcgacgaaggtaccctgaaattctacttcgacggcgctcgagataaagtccgccgctatgaaactatgctgctcgacgaggttacagcgcgtcgctacgaccgcgaggagtcggcgatcaactttacctactcattcagacaagccgggcagtgggaatactttgtcgtcacggcaatgacccgcgaacaggccgatgaagcattccaggctaaacaccctggcatcgtcgattacaaagtcaaaagcctgcctgtagtcgaggtggccatgcgcggcttctatggcctcaaatcgacagcgctgcgccagtactttatcgactgcggcatcgacccggagacaatgacaggcgaggccacccaggagcgcctcaaacgcgccagggataacctcatgaccgccgaacgccgggacatgttgaacaacgttttgcgcatcggtggctttatgacgccgaaaggtaagccgaaggtgccggaagccctgtttaaaaacatctgtgattcactcggtctgaagaccgacaagcgacgcgccagagatggggataagcggcctactatccgcttcgttgaccagcagtcggcagaatttatgatggacatcctcgctaaacgccaagaagacggcatgagcctacagacgcgtaaaaccgagaagaccgccaacgaagtggatcacgatttggatctcaatatatatatggatcataaatcgcgatccacaaacgagcaggattccgacgcccctcattcagtaataactgaggcgctggccacactgccggttccggttcctgaggcctgggcgctgaccgcgctgtccggcgacgagctggcaacgatggctacgtggtcgccagccagcatcgcgatgacctttgcctcactgtacctcacagagttcatggagcgcctctccagctacgagctgcgaagcttgcgtgaatacatcaccggaatgactacgggcggctacggcgcacaggaggcgttctatggctga

SEQ ID NO: 117993 - DNA, 201 bp, Enterobacter cloacae
atggctgatttactgctaacgctgctggccataggtgccttatcggttctttggcactggtatcggtcgattaaggcgctgaagcgttgccagcaagatacccaggtccgccgcattaaggctcgtggcgcagcctttgcgagcaactaccgcgtgtggaagtgggtttaccgggaaattctggatataggggagcgctaa

SEQ ID NO: 117994 - DNA, 387 bp, Enterobacter cloacae
gtgagtgatattaacgtaacgaagctaactgactacgatctgaaagagcttcagcgagatattgcgcgagaaattgaacgccgtgccagtggccctacgcgcatcgtttatgtggtgacagagtggggagagcatcgggcctttgttgattttcgctgcgcggcgatctgcttttctgatattgccaaaggcgtaatggaggatgcggcaactgaagaaggtaagaaaatttatgatctgaacaaaggcacactgctttacggtatccagccagttgaaatggcgctcggtgatttcgaggcgaaggtcgctcagaaatacttcgacgatatttgctatgaaaatcggttgtctgaactcttcccgggaacggaggaagcatcatga

SEQ ID NO: 117995 - DNA, 351 bp, Enterobacter cloacae
atgatttatcgcaggggatgggtgcctgttttgtggaggaatgagctggaaaagcggctcaaagaagaagggttcgaaaactggaagcagataagtaactttctttgtggtgaagaggattgctactcggaagcagcaaagacgccaggacaatacgcttaccaggtcgtcgacaataccgaatggatggaacgtcgtgatgcgacgttctggcagcgcctgaaccgtttgtggttcgttccgctgtacctgctgaccattccgttccagtggctcattcgtggccgtatggggtttgagacaacatctaaggtggctgcggtcatcaataagattaccggactccaataa

SEQ ID NO: 117996 - DNA, 165 bp, Enterobacter cloacae
atgttcaaattcaagtttgcagctgttgtccgcacggacaaaaaatcccatatccaccacctctccactattgcatcatccgagcgagaagctcgccgccagttcgccagccgttttgtcctcgttctgtcagcccgtatcccagtcagcgaggtgatcgcatga

SEQ ID NO: 117997 - DNA, 231 bp, Enterobacter cloacae
atgaaccagatagagctgaacgcccaaggcctgctggagtcgcttgaggagcgcctgacgcaagtggaagcgctggtatcatctgcccaccgtactatctccagctatgaggcttcactgtatttgcaggaggccgccgaactccttcagctggcgcgtgagcttacgcaagaggctcgcggttgctccttgtccttatctgagcagctgaaatcagaggaggataaatga

SEQ ID NO: 117998 - DNA, 795 bp, Enterobacter cloacae
atgaacgcactttctgtcttctcatttcaggaaaaccacccggtccgggtggttcttattaagggtgagccgtggttcgtggcgttggatatctgcgctgcattgaatattgcaaacccttctgacgcattgcgcaagctggatcatgatgaaaaattgaccctcggtttaaccgaggcacaaaaacttgatcgcatggccagggaagtaaatgttgtatcggaatctggtctctataccctcatcctccgctgccgtgacgcggtgaagcaaggaaccactgcctggcggttccgaaaatgggtgacgaacgaggtgctgccagctatccggaagaacggggagtatgcttttgtggaaccagtgcctaagagcactggtgaacctctggactggaggcaaaaagaagaactgcgggggctgataaacgatatagcccaaagcttccagtaccgtaatgcatgggttagtggggtctggatggccttgcgccgcgcatgcaggaacccatcaccgaacccaatcactgtggatgatctcccggcaatcatcgccgagctgcgccggatattaactgccgcagaaacggccctgggtaacatgcgagtttacgaacgggagctgctgcgcgatgtagttcgtggtggtcgccggagtatgtcgtgcggggagttgccgatcaccgatattgatacggaactggagaaggtgctgccagcacattttgagctggccatcgagaagctggagacgctttccacaaaacttacctcgtcagcaattatcgaaaaatag

SEQ ID NO: 117999 - DNA, 1896 bp, Enterobacter cloacae
atgagcaaggtaaaaattggcgagttgatcaatgcgcttgtgaatgaggtagaagcaattgatgcctcggaccgcccacaaggcgataaaacgaagagaattaaagccgccgccgcacggtacaagaacgcgttatttaatgataaaagaaaattccgtgggaaaggtctgcaaaaaagaataaccgcaaatacttttaacgcttatatgagcagggcaagaaaacgctttgatgataagttgcatcatagctttgataaaaatattcataaattatctgaaaagtatccgctctatagtgaagaattatcttcatggttgtctatgcctacggctaatattcgacagaatatgtcagcactacaatctaaattaaaatcaataatgcctcttgccgaagagttatcaaatataaaattaggtgttaaaggcagtgatgcaaaattaacaaagctaacaaagaaatatccagattggagtttcgctattagtgatttatgcagtgatgattggagggaaagacgcgactacctttataagttgttccaacaaggctcttcattgttagaagagctgcatcagctcaaggtcaaccacgaggttctgtaccatcttcagcttagccctgcggagcgtacatctatacaacagcgatgggccgatgttctgcgcgagaagaagcgcagtgttgtagttattgactacccaaaatacatgcagtcaatttatgatattttgaatagtcctgcgactttatttagtttaaacactcgttctggaatggctcccttggcctttgctctggctgcggtatcggggcgacgaatgattgagataatgtttcagggtgaatttaccgtttcaggaaaatataccgttaatttctcagggcaagccaaaaaacgtactgaagataaaaacgtaaccagaaagatttatactttatgcgaagctaaattattcgttgagctattaactgaattacgttcttgctctgctgcatctgacttcgatgaagttattcagggatatggtaaggatgatacaaggtccgagaatggtaggataaacgctattttagccaaggcatttaatccttgggttaaaacattctttggcgatgagcgccgtgtttataaagatagccgcgctatttacgcccgtatcgcgtatgagatgttctttcgcgtcgatccacggtggaaaaacgtggacgaggacgttttcttcatggagattctcggacacgacgacgagaacacccagctgcactataagcaattcaagctggccaacttctccagaacctggcgaccggatgttggggacgaaaactcccggctggtggccctccagaaactggacgacgaaatgccgggctttgccagaggtgacgccggtgtccgtctccatgaaaccgtcaagcagctggtggagcaggacccatctgtaaaaataaccaacagcactctccgggcctacaaatttagcccgacgatgattagccggtacctggaatttgccgctgatgcattggggcagttcgttggtgagaatggccagtggcaactgaagcttgaggcgcctgcaatcgtcctgcctgatgaagatggcgttgatgccatcgacgaaccggatgatgaacctcaggacgacgagctggacgacgatgaaattgaggtagatgaggatggtgccgaagagcataccgaagaaaaagagccagaaaaaaatcagcaggctgctttaaaaccagtcttcaaacctgcaaaaaacaacggagacggaacgtaccagatagagtttgagtacgatgggaagcactatgcttggtccggcccagccgatagccctatggcagctatgcgatctgcatgggaaacctaccacagctaa

SEQ ID NO: 118000 - DNA, 1896 bp, Enterobacter cloacae; identical to SEQ ID NO: 117999

SEQ ID NO: 118001 - DNA, 795 bp, Enterobacter cloacae; identical to SEQ ID NO: 117998

SEQ ID NO: 118002 - DNA, 231 bp, Enterobacter cloacae; identical to SEQ ID NO: 117997

SEQ ID NO: 118003 - DNA, 165 bp, Enterobacter cloacae; identical to SEQ ID NO: 117996

SEQ ID NO: 118004 - DNA, 351 bp, Enterobacter cloacae; identical to SEQ ID NO: 117995

SEQ ID NO: 118005 - DNA, 387 bp, Enterobacter cloacae; identical to SEQ ID NO: 117994

SEQ ID NO: 118006 - DNA, 201 bp, Enterobacter cloacae; identical to SEQ ID NO: 117993

SEQ ID NO: 118007 - DNA, 4005 bp, Enterobacter cloacae; identical to SEQ ID NO: 117992

SEQ ID NO: 118008 - DNA, 609 bp, Enterobacter cloacae; identical to SEQ ID NO: 117991

SEQ ID NO: 118009 - DNA, 735 bp, Enterobacter cloacae; identical to SEQ ID NO: 117990

SEQ ID NO: 118010 - DNA, 924 bp, Enterobacter cloacae; identical to SEQ ID NO: 117989

SEQ ID NO: 118011 - DNA, 243 bp, Enterobacter cloacae; identical to SEQ ID NO: 117988

SEQ ID NO: 118012 - DNA, 432 bp, Enterobacter cloacae; identical to SEQ ID NO: 117987

SEQ ID NO: 118013 - DNA, 327 bp, Enterobacter cloacae; identical to SEQ ID NO: 117986

SEQ ID NO: 118014 - DNA, 222 bp, Enterobacter cloacae; identical to SEQ ID NO: 117985

SEQ ID NO: 118015 - DNA, 312 bp, Enterobacter cloacae; identical to SEQ ID NO: 117983

SEQ ID NO: 118016 - DNA, 222 bp, Enterobacter cloacae; identical to SEQ ID NO: 117982

SEQ ID NO: 118017 - DNA, 228 bp, Enterobacter cloacae; identical to SEQ ID NO: 117981

SEQ ID NO: 118018 - DNA, 1089 bp, Enterobacter cloacae; identical to SEQ ID NO: 117980

SEQ ID NO: 118019 - DNA, 306 bp, Enterobacter cloacae; identical to SEQ ID NO: 117979

SEQ ID NO: 118020 - DNA, 537 bp, Enterobacter cloacae; identical to SEQ ID NO: 117978

SEQ ID NO: 118021 - DNA, 255 bp, Enterobacter cloacae; identical to SEQ ID NO: 117977

SEQ ID NO: 118022 - DNA, 204 bp, Enterobacter cloacae; identical to SEQ ID NO: 117976

SEQ ID NO: 118023 - DNA, 312 bp, Enterobacter cloacae; identical to SEQ ID NO: 117975

SEQ ID NO: 118024 - DNA, 507 bp, Enterobacter cloacae; identical to SEQ ID NO: 117974

SEQ ID NO: 118025 - DNA, 207 bp, Enterobacter cloacae; identical to SEQ ID NO: 117972

SEQ ID NO: 118026 - DNA, 1590 bp, Enterobacter cloacae; identical to SEQ ID NO: 117971

SEQ ID NO: 118027 - DNA, 1344 bp, Enterobacter cloacae; identical to SEQ ID NO: 117970

SEQ ID NO: 118028 - DNA, 333 bp, Enterobacter cloacae; identical to SEQ ID NO: 117969

SEQ ID NO: 118029 - DNA, 1026 bp, Enterobacter cloacae; identical to SEQ ID NO: 117968

SEQ ID NO: 118030 - DNA, 399 bp, Enterobacter cloacae; identical to SEQ ID NO: 117967

SEQ ID NO: 118031 - DNA, 354 bp, Enterobacter cloacae; identical to SEQ ID NO: 117966

SEQ ID NO: 118032 - DNA, 555 bp, Enterobacter cloacae; identical to SEQ ID NO: 117965

SEQ ID NO: 118033 - DNA, 399 bp, Enterobacter cloacae; identical to SEQ ID NO: 117964

SEQ ID NO: 118034 - DNA, 738 bp, Enterobacter cloacae; identical to SEQ ID NO: 117963

SEQ ID NO: 118035 - DNA, 423 bp, Enterobacter cloacae; identical to SEQ ID NO: 117962

SEQ ID NO: 118036 - DNA, 321 bp, Enterobacter cloacae; identical to SEQ ID NO: 117961

SEQ ID NO: 118037 - DNA, 2517 bp, Enterobacter cloacae; identical to SEQ ID NO: 117960

SEQ ID NO: 118038 - DNA, 348 bp, Enterobacter cloacae; identical to SEQ ID NO: 117959

SEQ ID NO: 118039 - DNA, 591 bp, Enterobacter cloacae; identical to SEQ ID NO: 117958

SEQ ID NO: 118040 - DNA, 630 bp, Enterobacter cloacae; identical to SEQ ID NO: 117957

SEQ ID NO: 118041 - DNA, 201 bp, Enterobacter cloacae
atgaccaataaattcatagtttctaccgttgattgtatcaatgaatttgcaagtgacgttccgcagagtgtttccttacggatagatacaatgcttgaacagcgtatccgcaaattggcggcatacgtgaaagaaaacgatcttcatttaactgagttttacttctatgaggctttgttgaataaatcgaacttttgctga

SEQ ID NO: 118042 - DNA, 792 bp, Enterobacter cloacae
gtggcagataattatactcaggcgtcgtttattattccctgcactcaggagcaggcaaaaatggcacaagaagcaatcacattcgttaccgaagcagaaattgcagaaggtgagcgtttgcttgataagccactgacagattgttctctgactgagaagctgatcctcagtattatcgagaaccaccctgagtatgacccttctgagccgagctttgggcaaccatcctgcccagactgcaattatgaactgttgttcgcaacagaagttaccagcagtgggctggcagtttttcatggagagaccattgatcttgaccatgcaatttgcctcacaactgccgtgctgtcggtattcgacctctcggaaatggtaacaattactgctgcatttacatgcagtaaaagccggacagatgaatttgggggtatgactattctggtcacaaaggatacccactattaccaggatggctgtcagttttctcgtctcatgaatgaggctcacaaagccggtatccagtatgctctgtgtaaagtgacgcattaccacggtgagagcagctatgtggcaagctatgtcctgagctgcgacgtagcggattcagcccaggaggtcgttaacaaacgactgaaggcatgtgccggaaaagagccagaagacggaatctatattctgtgtgaagaagacaacactagtctttcggtcgaactcgttacagaactgtctccgcttgattacgacaagctgagcaagcttctcccttcccttgacaccctttgcggcgcttaa

SEQ ID NO: 118043 - DNA, 258 bp, Enterobacter cloacae; identical to SEQ ID NO: 26624

SEQ ID NO: 118044 - DNA, 327 bp, Enterobacter cloacae
atgcattctcaggatcctatcacgaaattaacccagacgttgcaacgcgacgatggttctcaggttcgtattgtagcgcagcggggatatggaagtgggcttacagcctcgcttgatgtgtacgttctccgtcgtgattcctctgaaagcaactggtcactgtgcggaaaagatcctcacccagagtggagaaagatgtcagtagatgagtatcagaaatttggacgctctgaaatgctgcgttatgccacaccaggtgaaattctcagggtggcatccgctattggccagccaatgagcttcctcgatggcaaccctgcgttttag

SEQ ID NO: 118045 - DNA, 321 bp, Enterobacter cloacae
atgaagtcagatacagaaatggtttctcctatcgagttgcacattggcgatcatgtccagcggcatggtgctttatttgaggttatgcatattgttgaatccgaatgcgatattcccggcggcatccgggtagcagcatgcatttcacgggttatcggtgacgttacgggcaatattcctcgtggttggctggaaacaccgaagcgtatggctgagcgaggagttaagtgggcgacgagtctgcctgaggggctttactttaacatccaggggaacgcacatgcgaaagtaagccgggttattcgtaatgtgactaattga

SEQ ID NO: 118046 - DNA, 1251 bp, Enterobacter cloacae
atgagcacgatttctacggatttaattgcacggatctacgcagcctccgaattgccgttgagcaacgacgagctttatcgcgaagtgcagcgtgaaactggcatgtcggatgccgaattgcacgaactgaaagaatttgggtcagataaaaccagaaccagcggcgtcaaacacaaagtacgctggtttcagcagactcttcggcaggccggagtcatcgaacgcgttccagaaaaacggggcgtctggagatactcctctaagacgaaaacaaacctacacgagtcatgggaaaagctctgtgttgtcggtttctcaacttctcttggggcatcggtttttggaaacgcctatgccttcttcagcaatatcacagagcaaattcatctttgcctgacctcgccgccttacctccttcgaaattcaagagactacgggcatggcggggggcgtggcgagcaggtttatattgactggcttctgcgtatcctcgaaccgatcgtgaaacagcttgtacccggcgcaagtgtggcattgaatatcactcaagatagctttaataggggcaggccttcacgttctctgtatctggagcgtctgacactggcattatgtgacaagctggggcttgagctcatggacaggcttcagtgggtgaatcgcagtaagcccccatcgccaacgcactgggcatgtaagcaacgagtgcagctctgctcatcgtatgagcctgtgctgtggtttaccaatgatgcgagtaaggttcgttcaaacaacttacgtgtactgcaaccgcattcagagcagcatcttaaattgcaggcagcaggcggtgaaaatcgcacgaccttttatggtgatggggcgtaccagcttaaaagcggatcctttggaaataaaacagaaggaacgatccccaaaaatactttgttttacggcaatagctgcgctgatacgagattttgccattccattgcccgcgagctaggttttccgctgcatggtgcaacgtctcctaccaggcttgcagcgtttctgattgagtttttgacagagccgggagatcttgttgtagatcccttcgctggcctgcataaagttcccatcgcagccgagcgacttggcagacgttggctggcgacggacaaaatcatggaatggctggcgatttcccgaaacctttttacggccgcaccgggatataagagtaaccccatgctggacgagctcgccgaactgtatcgggcttaa

SEQ ID NO: 118047 - DNA, 609 bp, Enterobacter cloacae
atgaagagctgcttttctgatttacccgttaaagacggcacgtccggaacctggaaactggacacattcgaaattaccgcagataaggcgatgagcctcgcccttcgtgccgagtatacaggtaatacagacgagtttatcccgcccggtagatatcggcgtttgtccaacggctgggatgtggtgatgtccaataccccgatggagatcagaacctgccaggattttttagagcgagccaccgggcgcgtgctcattaatggtcttggtctggggatggtgcttcacgccattcttcaaaaagaagatgtaacccatgtaacagtaattgaaaaagaacaggacgttattaacctcgttgcggcctcgtttgcaaacgatcctcgcgttgaaattatccatgctgatgcaatgatgtattgcccaccagcaggcgtcacgtacaacgcatgctggcacgacatatggccagacttcgcaacagctaacctctcacagatggataagctggaaattaagtaccgggacatctgtgaatggcagggctcgtggggcagggaggagtgtgagcaaaagcacattgagtttcaaaatcttggggctgattga

SEQ ID NO: 118048 - DNA, 258 bp, Enterobacter cloacae
atgtctgaaaaacactttatcgttaaaatccagaaccgaaacggcgaccatgagaatagctatgttcggttactcgtcagcgattgtgagaaaaatgcttgccagacggcactcatttcagagtgccatggcgagcttgaacagctgagttttgaagacggtggggtttacgactacaacggcgaaaatcactacagtgtcaggagctgcgtggaggttgctccagaagacgttgcaactttgcaacgcttcctttaa

SEQ ID NO: 118049 - DNA, 429 bp, Enterobacter cloacae; identical to SEQ ID NO: 31755

SEQ ID NO: 118050 - DNA, 378 bp, Enterobacter cloacae
atgaaagcgttagacgtggtttcaactcaactcaactttattaatctgttggatcaggcaggatatgctctttcagaaattgttgtaaaacgcttcagtgctgcaccagcctttaacgaagggcactggttgttcattgcagagcaggataaccgctacattgaagtggtctgtattctctctttagcttcagaaagcggagagcagcatattgatgtttttattaatatgttcgaagacccgattgatgatgttatttcacgaaacattgaaaccaaaacctttgcgacgctttataaatacattgaacgtataccttttactccgggtgtaaagaaagaattcttgagcagtattgagaacatcaattttagttaa

SEQ ID NO: 118051 - DNA, 1146 bp, Enterobacter cloacae
atggacgcgatgttttatatccaggccagtactaaacaacaggcaagttacatatttagtaccctttccccgaagcctactgcgaactgccagcttacagatttgcagaatgagacggtcgtcccttccataagccctatttcgctttcacttaacccctggtcgatcaattcccagtcccgaacccgggaactgcgtatggccacgcatggtcttaacctgatctgtgcagtcacggatgagcatacccgtcagatagttgacttttgcgataaccttggacagcagcttaaggatccggacgacaaaagcgcctgggttaagctcattaattctgaatgcgctttgcttaattctccgcgtctctatcccgttctgcttgagccggatacaccggcacaatttgaaatctttgtgccagctccggaagatggagaacacgacacggtcatagccagcgttgttaaagaatgtttcggagatgaatgccggtacagagtaacggacaaagcttttgcaatgtcggaaaagccagtcatcaggctggaagctcatttcaatgacaaacgcgaaaaggttttagaactgaccttttcctgtttcaatctttcactctcagcgtccgtgcatgaaaaccagctacgtcagattttgttactttgcgaagactttggcgtaaggcttcagggtagagcaggggcatcctgccacgttaatatgcgcagtgcttaccgtcgtcttgctcatgttggcaccggctctcgcccaggtgatgacagtgatgtgcgggtctatacctcgttaaaagaagaaaaagatgttaagaggctgcttgataagtcaaccaggggaagtgagcttgtaccggcgaggcacgggcagcagtttaacggggtcttagtgaatgccacacccgcatcggccactactggtttcatttacctttcgcatgattttccggaaggccagtttatgatgacagccgaggtgttgcatgttggaattacaccaggcggtatttactacattgaaacactggacggttaccggtttatcgtgacagcgtttgagaagggattaatgaacggtttgagggagtttatagctgcaaatgaggaatattttaagtattaccgctggtcttag

SEQ ID NO: 118052 - DNA, 297 bp, Enterobacter cloacae; identical to SEQ ID NO: 105703

SEQ ID NO: 118053 - DNA, 471 bp, Enterobacter cloacae; identical to SEQ ID NO: 105702

SEQ ID NO: 118054 - DNA, 2391 bp, Enterobacter cloacae; identical to SEQ ID NO: 105701

SEQ ID NO: 118055 - DNA, 252 bp, Enterobacter cloacae; identical to SEQ ID NO: 31754

SEQ ID NO: 118056 - DNA, 189 bp, Enterobacter cloacae; identical to SEQ ID NO: 105699

SEQ ID NO: 118057 - DNA, 258 bp, Enterobacter cloacae; identical to SEQ ID NO: 105698

SEQ ID NO: 118058 - DNA, 432 bp, Enterobacter cloacae; identical to SEQ ID NO: 105697

SEQ ID NO: 118059 - DNA, 525 bp, Enterobacter cloacae; identical to SEQ ID NO: 105696

SEQ ID NO: 118060 - DNA, 765 bp, Enterobacter cloacae; identical to SEQ ID NO: 105695

SEQ ID NO: 118061 - DNA, 762 bp, Enterobacter cloacae; identical to SEQ ID NO: 105694

SEQ ID NO: 118062 - DNA, 264 bp, Enterobacter cloacae; identical to SEQ ID NO: 105693

SEQ ID NO: 118063 - DNA, 588 bp, Enterobacter cloacae; identical to SEQ ID NO: 105692

SEQ ID NO: 118064 - DNA, 2421 bp, Enterobacter cloacae; identical to SEQ ID NO: 105691

SEQ ID NO: 118065 - DNA, 657 bp, Enterobacter cloacae; identical to SEQ ID NO: 105690

SEQ ID NO: 118066 - DNA, 1089 bp, Enterobacter cloacae; identical to SEQ ID NO: 105689

SEQ ID NO: 118067 - DNA, 2457 bp, Enterobacter cloacae; identical to SEQ ID NO: 105688

SEQ ID NO: 118068 - DNA, 627 bp, Enterobacter cloacae; identical to SEQ ID NO: 105687

SEQ ID NO: 118069 - DNA, 282 bp, Enterobacter cloacae; identical to SEQ ID NO: 105686

SEQ ID NO: 118070 - DNA, 177 bp, Enterobacter cloacae; identical to SEQ ID NO: 105685

SEQ ID NO: 118071 - DNA, 1692 bp, Enterobacter cloacae; identical to SEQ ID NO: 105684

SEQ ID NO: 118072 - DNA, 1164 bp, Enterobacter cloacae; identical to SEQ ID NO: 31753

SEQ ID NO: 118073 - DNA, 774 bp, Enterobacter cloacae
atgcctttcatcagccatcactacccacacgatcatagttgccggtgggtagaaccctttataggcggtggtgccgtttttctgaacatgtttgcacaaaatgcattgcttgcagatagcaatccagacttgatcaacctatacaggactattcaaagacagaaaactaactttataaatcaggtccaaaacctagcggataaaacctttgtcgaaaaggactactatgagatgagggaccgtttcaacaaaacctgtatttctggtcaaccgcttcaaagagcggctttgttttactccctgaatcgcctgggctataacggtatgtgccgctataactcagaaagaatctattcagtgccctgggggaaacatacagaactgaagcttgacttcaataaaatagactacctttcatttcgtctttcaggtattgaactgatcaccgctggttttgaggagactctggccgcaaccggcgaaggagatcagatttattgtgatccgccatatgacaaaacaagcaaaactagttttgtcagttacgatggtaaaccgttcagccaaagcgaccacgtgctgttagcaaatatgctcgttgacgctcacagaaaaggcgctgctgttgcgatatcaaatagcctgacaccattcactttgggcctctatgaagagcgtggattcgtcatacacagactcagcgcttaccgatccgtaggaagtaagccaaatacacggaaaacggaaacagaaatactggccgtgctgaaatag

SEQ ID NO: 118074 - DNA, 852 bp, Enterobacter cloacae
atggagatggactttaaaatgcacaatgatctgggtctcggtttcatttgtaaaaatgcaagaacatcgtcaaagccaacgttaagaaaagttacttttccggtaagcgcatatgaaacgtctaagctttctttaaccggttttcaatgccccacagcctgccgatttcctttttttgtgctatgcatgataatccataaccatctttcgtctgcatgccctatcaaccaaaatgaatgttcaaatcatatatcgcaattttctatcgacattaaagtacaagattggcttagccgttcaagagtagcgtttattgatttccataatctaagaaatacagataaaaccacattaataacagtggaacatcttgaagctttacttactgttatgtcaactactcttgtcgcttacgctccatattcaaaaaagagacttaactttagctttctaaattcatttactttgtctaaaacttctcaaagttacacattaactttcccggtagttctcagtccgcttttagatgctcttggcggtttcattcaggaatgcataaccgaaaaattgttaaaacgacgaaattcgaatttcatggtttacgagtatcttaaacgttcaggccagagctctcataaagtggaggacattaataacgacttacagcttaaaactctaaatataagacttatgagcgtccttactgggctttctcagcaaggactcatttcatttatttgcgaaggaaagaggggcgaccggagaatagaagagcttcagtttataccttatgttcaacgaactcaccctgaggtattaacttttcaggaatggattagccccgttgattag

SEQ ID NO: 118075 - DNA, 717 bp, Enterobacter cloacae; identical to SEQ ID NO: 31752

SEQ ID NO: 118076 - DNA, 201 bp, Enterobacter cloacae; identical to SEQ ID NO: 31751

SEQ ID NO: 118077 - DNA, 1053 bp, Enterobacter cloacae; identical to SEQ ID NO: 31750

SEQ ID NO: 118078 - DNA, 876 bp, Enterobacter cloacae; identical to SEQ ID NO: 32315

SEQ ID NO: 118079 - DNA, 201 bp, Enterobacter cloacae; identical to SEQ ID NO: 31764

SEQ ID NO: 118080 - DNA, 354 bp, Enterobacter cloacae
atggaactttctttaaatattggccttagtgaaaagaaatctaacacggctgcactttttaaaacaaaaagcgcaaaagtgattttgtttgttctgctgaccgtgcttttttgcggtctggcatatgcgggttcagatgatggggcactgggagatatttggtcatacatgagtgaaagtatgactggagctccgggcaaaattctggcagccgcgatgttgatctcaagcgtatatttctctgtccttaagcctaacccgggcctggcactggtttcattattcatgatgctggtaatggccaacggcgagaaaattatcagcacctttatggatgctggcgtaccgctgtaa

SEQ ID NO: 118081 - DNA, 261 bp, Enterobacter cloacae; identical to SEQ ID NO: 31765

SEQ ID NO: 118082 - DNA, 789 bp, Enterobacter cloacae
atgaaaatgctaagtggcattaacatcccttttttcaaaaaatctaaaaaggatgaaaacggtgatcttgaacagtcatacgtaaagaaagatgaaagtgctaagggacgttttttggacattaaaaaacgatttagcccacaagctgaagcgtcaggtgctggaattacatacagcgccctgattaatcgtgatacaaaacttatccgcattaatactgtttcaatagccgtcattgggttattggttgcaaagattctttttttcactgacccagtgacgattgttacccctccaaacatgaatgaagagatcacggttgttggtaacaaagcatcggaatcttataaaacacaatgggctctcttttttagtacccttttagggaatattaatccaactaatatttcctttgtgacggcctatgtcctcgatgccctttcacctgaactacaggctaaaacgagtgagtctttacaggagcagataaatatcatgcaggctcgtggtgttgagcagacctttaagcctaatgatatttactttgatccaaaaaatgacatggtctatgtctggggtaccaaaacgactcgacttgtaaatgttccggacaaaactgaatcatcgaaatggacttatgaatgggttctcgggatgaaaaatggtcgcccaagaattgcatatgtaaatcaatattccggaacaccgaatattaaaaaaattacgataaacggcaaagagcaactggcaacgctggataatccgccaccgtctacaggtaacaagtga

SEQ ID NO: 118083 - DNA, 1272 bp, Enterobacter cloacae
atgattaaaaaaaagggcttaggcttcaacgcaattacagcattgatcatgctcacgacttcgaactgcgtaatcgctgaagaataccaattgccagcaacaattaataacccggttgtaatgccagttggtgctgacggatttcagaatggagctgcaaaagccattattccgggtcaagctggttctgaacagtcaggtgcacaaacaaaccttagtgaagccggtaatgcgcagggacaaaaacctacaactgatctccctaccgtgcaactttccccagccagcaatgcttcgcctgcggtaagcgctattactggagcattatcaaataatcctagtctccccggatttgacgcacagacccgatctggtgcaattgatagctatgggagaccaacaggtacctcttcccagcagaatgcaaccaatgcgaccgccacgtcaaaagccgatgaactttatgtcgaagctcgtaaccgatataaagaagttcagcgtgtaaatgtgccgcctggtgggaatgtggtactgccagtttcacgaggacttcaaaacagaatatcgaccagcttcaagaatgcttctgtcagtacttctacccctgctgaagaggcaagcatatttgttaatggtggcgatgtctttatttcaactaataccgataaaccaatcgggattatgttgtctgaagatcaggtacctgaatcgacctataacctgaccctggtaccgcttgatgttcccggtgcgatgatttcagttactacatctttaagcccatctatgcaagccaaacgtgaaacctcattggataagcaaaactatgaggaaatgttggcccgctcccagtcagaagaactggctccaacggatccaaaacaagacgatcataaacaaagaatcattgatttattgactcctgtggctcttggtgaggtcccttcaggattcagtttacaacaggaccgactttctcgtattcctgcgccagagcagtcaccatgtaactttaatatgtatgcaaagctcggtcagagactggttggctcacgtgaacttattgatgtaattcttgtgaaaaacgataaaccatacggtcaaatcgttgctgatcagcagtgtatggcagaaggcgttattgcaagtgctttatttgataaagcatacctgcaaccgggagaagaaacagagctttacatagtccgggataaattgttcaaggaacgcgaggcccgggttacaaccagaccaagtctaatcagaaaataa

SEQ ID NO: 118084 - DNA, 462 bp, Enterobacter cloacae
atgggaaaagttactttgcctgctctgcttggggccaccgtgattggttttgtcgtatttgctttaaccagcttttactacaggtcagaatatataccaaaaaggagtgtattaatcgttccggacgcacccattagtatcgaagatggcagtaacgcttttcccgttcagacagtaataatgaacgatccaactcttattgataaatttgtaggagagggcaatattaatgaggagaatgcttttgactatcacaaaagtaacgttttggaacctaattacaaacatgaaatatctagaacgagccagatagataaagctgaaatgaatcatccatctgttcgtgaaaactgggccagagcaggtgaaccctatatcgttcctcagatgtctgacagcgaacgaaatctaaaaattaaacgattccagaaacctacaagtggagctaatcatggacattaa

SEQ ID NO: 118085 - DNA, 1356 bp, Enterobacter cloacae
atggacattaaaaaggcctgggaaaataagaccgtcagactttctgttattggcgctctgctggtagtgattgtttatattattagccagtctattttttccacaccagttaagaaagaaaagaaaacacagaaaaaagacatgcagaccaatttgttgttagatgattcgcaaatgaacaaattgagtaatgaagaaagccagaaagtatataaagaaatggttaagcaaaaccgacttgaccaaaatgcggcgaaagaggaccgcgaaaaagcagaaaaagcccaacaggaaactaaagcccaagttgcaagtttaacttctcaacttcagcagctgtctcagcaaattaatgatatgcagacaaatcgaaacggcaatcgtaacttggatgctggtagttcgcgtaaaacgattaatgagcaggcaccggcagctccttatcagcttaatgctaatgcgccgattaatggcgtaaaccctaattacgcttctatcacacctacgcgtaatagcccaatgagaacaatcacacaaagttccattaagactaatggtaccgatggtgtcattcaggttatgcccgtgtctgaaaacagaatcaaggaaggcagagaggtcattgcaggagataaagcgccaactcggactgtacgaggtgatggtactgcgccagttgatagcaaagcgcggcatgctgcccgaaaagatgaaatgtttcttccggcaacatctattatcactggtgttctgattaccgggcttgaagcgcctacaagcctttcttccaaatcagaaccaatgccagtaacgatgcgtattaaaaaagatgtcatcatgcccaataatttcaccatggatttgcgtgactgtaaccttctgggttcagctgttggtgatctggcgtcacagcgtgcttacatacgtgccacttctatctcttgtgttaattcaaaagggaaagcttttgacgtaaaactggaagcatatgctgtaagtgaaaatgacggaaaaaatgggatccgaggcacgcttatcagccgaaatggtaacgcaattgcaggagctgcatttgccggtggactttcttcacttgccggtagcttaagtcccagtaaggtatcttcacttaacatcgaccctaattcacaggctcagtatcagtcccctaattttggtgcacttggggcattagccggggctggtgcagctcaaggtggtcttaatcgactcgtcgattactacaccgcaattgcagaacaacagtggccaatcgtagaaattagccctggccgagctattacatttgtcgttcagaccggaactacaattccaacgaatctgaccagtcgctga

SEQ ID NO: 118086 - DNA, 483 bp, Enterobacter cloacae; identical to SEQ ID NO: 105743

SEQ ID NO: 118087 - DNA, 858 bp, Enterobacter cloacae
gtgaaaaagttacttttccctttaatggcggctttcgccattatggcgaatacggtcacttatgcttcagagcaggtcctaactaatagtgatgctgctgcgttaatggcaaaggcaaaggaaggtggcgtttcacccagtcagatctcgggtgtgttatcaaaaatgaaaggatataaacctaaggatgccatatacattccttctggtgggctatacctctttcaggacgaacgttcgcagctaatggcagtaacgaccgatggccgatactcccttactgggggaagccttgttgatgtaattaaacgtaaacctgttctgactgtagaagaaatcaggaattcctattttattagtcttgatgaggcccccttccctctggaaactgtagcgtccattcctctgggaaattcaaagcttaaaagacaagcagccattttcataacacttgattgtgacggttgcatggaacttgttaagaaattctatgcagatcgggacaagtatcggatagatattgttttagttccctcacccggtgagccaaaagaagagcttagaaggctctggtgtagtaaagaaaaaggaaaaataaacaacctcgatattcttcgttggctaatgggaagcaaatccgacattgaaaaaagattgctctctcaaaaagaagcagaagaatgtccggcggaacctttggtagcgtcattgatgctcgcaggaatttataaattgcagggtgtaccttcagttgtcagacaggatggtttggctggtaatggcattccaaaagatttcgactactggttgaaccaaagcgttgaacctctcttaaaaaatccatttgagacaaattaa

SEQ ID NO: 118088 - DNA, 951 bp, Enterobacter cloacae
atgaacatcaaaagattggtactcagtgctctggttgtaggtacatcctcatatcttacggggtgctccatcggtagttccgaatccgaatgtccaggcattgaaaagggcgttatctgtaaaggtcctcgcgaagttatggagttaactaataatcgagatgatctgtctgcactggcgggggaagagtcggaatcgggaaaggagaaatcggctgtcaatgacagccgttatccaactgaaattagccctccaggggaagtcaaatatccacagtctactacccttaaaaatcagcctgtggcttattcaaaaaccgaaattaagccagttggtcagttacctgtcatgtacgataaaactttaaaaatgggtgcccctacttcatccattggaccacggcctatttctggtgtaccggttaattcaaacgtaaggatgactagcagttatagcactgcctcttcaactggtaaccctttcgttcatccggctgcggaagtcgttaaacaaacaagctatccggtttctgctggaaatgccccacgctacgttgcacctaattctgatatcagccctggtaaggatatgtactctctttacaatggccagcccgttaacccgactctcaaccctgggcagatccagcaataccgttcgcaaggttataaacaagctgtagtggctcctgaaccacttgctgttctgcaacaggggaaagtaatgagaattacttttgcaccttataccgatgataacgatgcgcttaatcttcccggctacgtttatgtcaacgtaaaaccgcaaacatggattgctggcaagaattcgacctcaaacccagctcgcatagttcctttagaagtacaggatgcggcccgggaaaatatgcagcagcaacaaaaagcaactaaagctgtctcttcgaacggcattgttagacaactgtaa

SEQ ID NO: 118089 - DNA, 2682 bp, Enterobacter cloacae; identical to SEQ ID NO: 105740

SEQ ID NO: 118090 - DNA, 1179 bp, Enterobacter cloacae
atggcttcatcaagagtatctgtttctgatgatagtgttgatggtgttgatagactgatctataaccactgtttgaataaaaaaaatctctctgatttttttgggaagtcacgagtaacgttcaataaaatactttcggacttagaagaaaaagaacttgttggtgcacctatttatcaaaacaaaaatcatctttacacccgctgggatgttcaaaaaataatggatgccctgggttatcccaagtaccgcgatcattactttagcagagctattgttactcagaatcataaaggcggtacagggaaaagcactacatctgtagctttagcagtagcagctgctttagatctacaactcaatgcacgtgtattaatgatcgaatgggacccacaaggttcgattggaagcagcatgattcaaagtgtctcagaagatgatgtcttccttacagcaattgatgcaatccttggaatttatgaagaaaattctgagtataaaaaatatttagattcaggattctctgaagaagaaatcatcactaatatgcctttttcaacgcatctgccaaacttggacgtaataacggcttttccgacagatgctcgttttaaagataaatactggcaatgttctagagaagaacgtacgtctttgttactacgtttcaaggaagttatcttaccggtactgaagcagaactatgatttgattattatagacactccacctgaagattcacctttgatctgggctgctgacgaagcggccgatgggattcttgtcgcagtgtcaccacgtgaatatgattacgcctctactacagacttcatgcttacaataagtgaaaggtttaaacaatcaccaagtaagggcgacaatttaaaatggttcaaagttcttgctgtcaatgtagatgacaaaagtccatatgaaagaatagttttggataaattaatcagaactgttcaggaccttttgatgtccgctaacataaaaaattctgaagcatttaaggcagctgcttccaaagggcgtacagtgcttgatatcaaaaaatcagaggaactttgttccgcaaagcagcttgatgtcgcagaagaatctgtattacaggtatatcagcaatttataaatgaaataaaaagtttttcagctaagcaaggagttaacgcatga

SEQ ID NO: 118091 - DNA, 1005 bp, Enterobacter cloacae
atgagcgatgagcaacatatcgggaatgataaatctcgatatttaaacgcaccaaagcggacagaagtcggtcaccgttcaggtcttgcgggtttgaaaacagcacctcgcataaaaaagttattcactcttcataagggccggagacttgaagcggaacatgtgattgttccagcccagagagtggagaaggagaccttagtccatccagcgaacccacgaaatcaagaagcccttacagattattctgttagagatattcttaagcagattgaagaaagaggggtcgataccgaagggatcgctgtaaaaagagatggggtttatttattaatagaaggaagtcgcagacgtttctgctgtataaaggcagaaaaggatctccccctgtgggttcttccggatgaactaaccgaagatgatataaattcaattatatccgcagcacaaacatctcgaaaattttcatatagagaagttgggtttcaatttatcaaaaaaatggaagaaaaaggattttctactaatgaagaactcgcagcatatcttgggattagtcatgtatcggtagccaaaagaatccaggcggcccgtattgacgaaacattaatctctttattcccggattatgaaggaatcccgaactcctattatagtcgcttgtctcgtttacagaaatatgtgcaaaaaaatctatttcctttagatgaagtaatagataatgttaaagaggaaacaaaagatttagacattggagatctccaggttgctcaaaaagttgtaatggaaaaaatcacacaatctgtggaaagtgtttgtgaaaaaacttattccacaaaatgggaaacaagtgatcttattacttttgataacaaagataagtatgcaagaatcagtaaaaacaatactggtagaaaaattcgctttgaattcaataggataaatgcgggttttattaaggaactagaggagttcataaaagaaaaattaaaagtatcagaataa

SEQ ID NO: 118092 - DNA, 522 bp, Enterobacter cloacae; identical to SEQ ID NO: 105772

SEQ ID NO: 118093 - DNA, 837 bp, Enterobacter cloacae; identical to SEQ ID NO: 31787

SEQ ID NO: 118094 - DNA, 948 bp, Enterobacter cloacae; identical to SEQ ID NO: 105770

SEQ ID NO: 118095 - DNA, 1038 bp, Enterobacter cloacae; identical to SEQ ID NO: 105769

SEQ ID NO: 118096 - DNA, 639 bp, Enterobacter cloacae; identical to SEQ ID NO: 31788

SEQ ID NO: 118097 - DNA, 453 bp, Enterobacter cloacae
atgctatctcgcaactcactaatacatggtttacgccgagaccagttaatcggagttctgactatttcagagtttccggtagttatggtagaaagccacttcattcagtctgaggttatgggaataaaacccgtaatttttaatattgatgagcttcttgtttctatatccccaatttcctctcttaagttcgattgggagtgggccccagttgatacaatactcattgaagttatcattccacctgtagagtcagaccttgtaagtgcagaaaatgacttcctccgtgattctggtattggccatatccagtgcgagcctggcggagcatcaatacgacgtacagttaccttcgttggtggaataaccgctgataacttactgtatcagttgaggcttatgtgcgtaagcgcgttaaaacttttaggagaggaactgggggatgaagtctaa

SEQ ID NO: 118098 - DNA, 426 bp, Enterobacter cloacae; identical to SEQ ID NO: 31762

SEQ ID NO: 118099 - DNA, 582 bp, Enterobacter cloacae; identical to SEQ ID NO: 105773

SEQ ID NO: 118100 - DNA, 4305 bp, Enterobacter cloacae
atgagaaaatcaggtttaggtttagccctgttgttttctttaattgctccgattaaagcggtctatgctgaagcgattatgatttcaggaaagctacaggctgatttgccagccgtatcctttgacccggggccgggcgactttgttgcatacgttaattctaacactatcactgcctcaggtgcaggcacagcctgtaatgtaacggttgatgatcgagcgacttcctctgttgataacctcgtttgtttttttgagtggttacccaataccttgggattaacttctaacggcttcactctttcaggcgttcccaacaccaccggtgatttaaaactaccttacaagatttcttacttctctggttctgaacggaaaaaagttgaaatagtaaaaggtgaatattcaatcaaaagtgtggcaccggtaaaaccaactatcaccggtcttaaatcatccctgaacggattagtctatgacggcttttctttcaaatcgtatttaaaggatgaagcgatcaaagatatcgctgtttctgttgaaccccgcaattatattcaatacatctcaataggttcaggctccgcctgtgaagtacctattggcggaacttcctgtaccattgaagttggaagcattaaggccagtgatacagatgaacttttgggttcacgtgatatcacaattacagcaaactctaagaataattatttcgcacctcctgaatccaaaaagcttgttgttaactgggattatcggcctcctgtagtagaccatacactttggaattttaccgatgaggctaaaacaatcaaagtaggtggccaggacatctataccggagccaaaaccgttgctgtggccgttaaggtaccccagcaagaaacagaaggtgaatggtggctcccaacagctatgtcgctcactatgactccggatggcgtgtttaagccgacgactaaagtgactttagatgatggcactgagattgatttcaaacagtcctgggcaacccctttacgtagaactttacagccggtaagtggacctcaaaaagtcggtgatgagtacctctatatctttgacttaacggatcttataaacgggtcctacgcagcgacttttacagtagaaaatacgagcaaaaactcttctacgtacactgagcctgaaagcaaactgatgctgtctgataacccaacgcttatggttctcaaagatgggcaggtattaactaaacgagcacccgtatacttcctgaacgagattatcgttgcagctttccaggggcaggctggggttgctgacataaaatcagtaacaatagacaacaaagtagtttcgttaacacctacaaattataaaggtatttactacctgccggttggagacgatttagcagttaattcggatcacgagattactgtggtggctgaaaacctttatggaaaaaacgtaaatttcagtaccgtgttcacttatcaacctactggattcactcttaagaatctggaaaaaaacgtaactctttactcgcgcgtacgtcagtatacggacctgcttagtcaaacagctggtgataaatgcactctgtttaccacagaggaaaatgcgaatgcttacctcgcctggtatggggaaaaatcagatgttacagcatgctaccctcagtggaacaatgtccctgatgggttggagttctattttaaaggacgtaccccgggtctaactggattctttaataaaacaggtgagaatctgctcgactatcaagtctatatgattaacgggaagggctctaaagcggtttccgcaaggaatcgccgtactctgaccacacaattaccatacaacccgatcatctcttacaaaaagaataaagtcatagcaggcatcaatccgaacactgctctggcttatacgaccgggggggaggccgctcgaatattagcgaaggtggtaccagctgacgttacgatgatcgtctctcaaaacggctctgaggctgtcaaaacgtcatttaaaaatcgttcctcaaacaacgatgcaacgacctttgtacaaagggtcaaggttgctgctgcaccattgtggacaaagaacgtctttgacatagctgtagaatactcaaaggatccagaattaagaactacagacaccctcaacgtatatacggtgcctgatttcaatattcgagcatcgatggaagtggatgacaaaaaaacagccacatctcttgaagtgcccttaaaggtaacagtggggcgttataacaactccacacgtaaaagtgcatttgaccgtaaaacaatgggagaatgggacgtcacgatatactctcaaaaaagtgtatacggcaaagatccagaaacaggccgttataaaactacatacgaaagaactgcgctgactgaagcattgccggtcaatgatgcgggcattgtcgaaaccaagattaaaattgaaaatatggatctgggtaatatgcgtctggttggtgtggctaaggtcagatcgccattctctgattttgaaatgaaacgtgagaccagtgctgtaggcattcgaatctataaaggtgaggaactggagggtaacctgtcgaaaagccttattatcggaaggatcccacttagtactctggtaagcttcaaatctgccagtacggctaactctgatgcactcgcccccaccgaatggcagcagtcctctgataatggtcaaacctggaccatgctttccgacatgaccggaaagagaagtgtaagtatcaaaaagacagaagtaggaaagtggctttatagggcaaaaatgactaataaattcacatccaagatttcctacacagatgccttaacggtagttacctacaagcagcctaagctcagtatagatgttacagacattcttcagggctcagatatacctgtaaccctgcttgataacgatgaacctataccagcaggcaccgctgaggttctctggtcagaggataaagtcaactgggtgcagggagatacaacttacactgtggcttcagctgataccctaccgtctacgatttatgcccggatgcgttaccttgattccgatgaactggcagaggagtcttcatggaaggaaacgtctgctcggttggcagccgcaaaacccaagcgcctttctgtctcggtaacgggggtttcaaaggtagaggttggtcaaaaagttactttggaaggtaagttcacgaaccctaacagtaagtaccagaatggtaataacgtagttgaagaatggaaaacaccggatggccagacatttaagggctcttcactgtctgttacccttactgagcaaatgttggataaacagggatatgctgcttttgaatacagtgcatggttagcggacaataaggagaatacggtttctacccgtagagtttctgtcaaatcgtgggtttataaatttcccgagatgaaaataagctccaaacttaaatacgacatggcaccgaccaccctacgcgttgcgttgagcggtattaaggatggagactatcctggtgttacttattcccgtgaatggatctacgacaaagagaatctggtaatcactaaagatgaaggtgacaccaaagaatttacaattgaaaatcctggcaaatatacattgatggttgttttcaaagataaccgaaacaatgaacagcgtatcgaaaatacctttgttgtcgatgaacaaacgccaatgaacgttgagatgacacccaagttctctaacaaatatatgagagctccactcgatgtaaccttaaggtcaaacatcaagctatctcattcggcggactcgatagatacggtcacatacaaggtgaacggtgaagtaatacccagcggcaaaaattattgggctcaactgatctcgggtttaaaagaaaagaaatacgagattacaattgatgttgttagtaaacttggacagagaggttcagcatctgttgagtttgatgtcgttaaaaacgcagtgcctaattgtacattgagctacacggaaaccaacctaagctggagctttaccaataaatgtgatgatactgatggaaaaatggttagatatgaatggttcatcaacggcgaattaaggaacgttttcggtagtacggctacactttctaaaaaccttaaccgtggtaagcaggacataaaagtaattgcttatgatgatagtggagactttgcaacacagcacgtgacagttttcggaccggctgaagaggcaagtaagtctgaaaacactgtatcaataccaagcagtgagtag

SEQ ID NO: 118101 - DNA, 513 bp, Enterobacter cloacae
atgagcgactacatacctaaaaagagagggctgcttatactggattggtatgtcccccttaatattttattgctgattctcgttatgtgtgtctttttcacccgttatacatttggatacggtttattgaatgggtgcctgcctgctgatttttatatgattgatcattcggataaaagtattaaaactggtgaactcatagcatttaacatgccgaaatcggtacgttttatcccagaaaatgaacgagtcataaaaattgttgccggtgtgggcggtgacaaacttaaagtaacaatggatggggtttataacggggacaaattttttgaagctaatgcacgtcgtatttcgaagaaatacaatattccgtccattttgattgaaaaagaattgataattcctgaaggcgaagttttcctaattgggcaaaccgatcactcatgggattcccgtttttggggaacagtaaagctgaattcagtaattgggaaaacatatgcgatcttttaa

SEQ ID NO: 118102 - DNA, 1512 bp, Enterobacter cloacae
atgcgatcttttaatgtaaataaaaaatatttaccaatacttcctggacttgcgttatgtgcagttttaagtaatacaaatgcaagcactgagtatcaacatgatgctgacctaatcgctcagcaagcaaaagggcttggggcacaggctaaaggtgcacagcagccagatggggctcttagccttgatgctacgctaaaatcaccagatgtgcagaagtacatagcgcaagctgaagcactccaaaaaaaccaggacctgagcaagcaaataaaccgtggttacgtccccggtatgaatgcggatagtgttcaagcagttatagaccatacccaggctatcagggcccaaagtaataactctgaagctgtcaacgatataattagaagacgtgatgaaattcaagaaaacgccagccttaatgaagcggctctgaaagctgtggaaaataagccggaagtcatgcgaggacaatctaaaaatatcgaaaaattgtttggttcctcgggcatcacagctgctgacttcgaaagaaaaatggatagcacacgtgaagaagcactatcaactgaaaatggaataacgatctttgcttcatttagcttgccggattatgtactggaagaccttctacgtacggcctcagagcataaagctcgtgtagttttcaatggtctaaagaaaggaactactcggctaccagagacacaggcagcaataaaccaaatgattgtcaaaggaaaatttgaatctcctttgattacaattgatcctgatagcttcagtcagtatcaagtaactcaagtaccgacaattatttctagggagcaagctcgttttgcaaaaatggtaggctccttcaacgttgagttttttcagcgagaacttgctaaaaaacccgatcaggatattttcccggttgctggtaccacttatcccgttgaagaaaagagcatcattaaagaactggaagaacgtgcacaaaaatatgactgggaaggtgcaaaaaaaagggccgtttctgacacatggaaaaatcaatggatggtcgacctccctcctgcccaggaacacaaagaatttttaattgaccctacagtgagggtcactcaggacgtaaaagataagcagggccgtgtaatagcttccgccggtgagttgattaatccactttcgagatttcctcaaaacctgacgatgataattttcgatccactcaatccgggccagctggtatgggctgagcagcagtatcgacaacgtctgggtagtggaaaagtaatgccaatgtttacccgtatccaaaaagataatggatgggatcacctaaatgatttacgtgaaaaatttaacggtaaggtgtttaaagttaacgaacagatcatctcacgctttcagattaaaaacacacctgcgcttataactactgaccaagataaattccggatcaccctgtttagcgaggcagaagtccgtggtatcggagccccaaatctttcagaggaaaaataa

SEQ ID NO: 118103 - DNA, 174 bp, Enterobacter cloacae
gtggtatcggagccccaaatctttcagaggaaaaataagatgaaactcggatttattataggcgctctctttgcaacatggctgacgctaaattatccggaccagatgagaagttattttaccaaagccgtcgactatatcgaaagtgttgcaacatttattacatccaagtga

SEQ ID NO: 118104 - DNA, 1059 bp, Enterobacter cloacae
atggtgaaaaaattcaaaaagttacttttagagttcattgtagcagttatgctttcgctttctataccgggtatggctatggcagcagatgctggagtccctggggctatgtgtcagtcagctggagtgtggcagggcttgattaagaatatctgttggagctgcatttttcccatgaggataatgggcataggggcagctccagaaggcgctgctccttcacgtccgggttgctactgcacagatcagaacggcgtaccggaaataggttggcaattgagcttctttcagccggtgaagattgtagaagttgtaaagagcccctggtgcagcccctttcttgaaggcacgatgcttcaaaaatcgcagtttgatattggtaaaagcaacacaaatcagccaatgacagcaactgaagccggattttacgatgttcatctttgggagttcccaatcatgacaatgctcaaattactgattattggcgagtgcactgctgaaccctatatagatgccagcctgacctatataagcgaagtggaccctatgtgggaaagtgatctgcttacactcgtcctgaatccagaggcagtagtttttgcaaacccaattgcctcaatggtgtgcgctgctgactgtgtagcagtaacagcaggaaaggataatctcgctgcatacttttgtgccggatgcgatggcaacctttatccattaaccggccacatttacgcaaatgatgacgctgtaaggacgagttcactgataacccagcgtcttctgactaaactacatcgccagggaatgctgatgcgaacgatgggagcagacgcaatgtgtgagaaaacgtgggaatactttacacctcgttcccagtatcggctttcaatgcttttcccaactcctgaggcgaaagggccggattgctgtcatcgtcttggtgattcggtacatgactggtcaacccttaaaggtgggcgcaaaaaaataggcaatgataattatgtctatatgttgtggcgttacaatgactgttgcgtcagatatataccaggcgcttga

SEQ ID NO: 118105 - DNA, 3189 bp, Enterobacter cloacae; identical to SEQ ID NO: 105749

SEQ ID NO: 118106 - DNA, 873 bp, Enterobacter cloacae; identical to SEQ ID NO: 105748

SEQ ID NO: 118107 - DNA, 1785 bp, Enterobacter cloacae; identical to SEQ ID NO: 105747

SEQ ID NO: 118108 - DNA, 873 bp, Enterobacter cloacae; identical to SEQ ID NO: 31763

SEQ ID NO: 118109 - DNA, 378 bp, Enterobacter cloacae; identical to SEQ ID NO: 105745

SEQ ID NO: 118110 - DNA, 978 bp, Enterobacter cloacae
atgaaacaaaaatttagggctactgcaataagtagtaatcaacttagttttttttctatattcgatatagatgaagatgaaataacgcaaatagttgattcacccaaagagcatttaaatgatgcatacacgtccggattaaactttaaatcagatgaaagtaacatttctgagataaattatgattctgaaaggcgtgaaaatcacctttatgaaaaatccaaattacttaaaaatcagattttgcatacaattaattttgcagcagaaacagattatctatattcggttgaagaatataacccagatttgggtggtctggtaatagaatggacccctgaggatgtgtatgttgtttttctatccgctatggaagagtctttggaaatcattaaagaactagtgttgaggagaaagttattcttcaaagatgacaatggtaatatcacagtgaatccacttttagaagctgaaacacggtggtatatgtcaaaatcatttgaatacacttgtttatctcatggacttgatgcatgtgaatttagagcggaattaaaatcatggctctattatcattcgcatcgttcgattagtgaaaacacgaaattagctgaatgcaggaatgatgatgaaatcattttgcatgattgcaatgacgatatgggctgggacatcttctttgatcaggattatttaatgtcagaaaaaaaactggctgttaaatggactgacagggaaattatggatgtttacataaaagcttttaaatccacattagagttgtttgacgagcttgtttcatgtgatctgttaactaaacgaaacgcttttggcaagttagaaataaatccaatattcgaaaatcattttgaatggatcatgtctgaagcttttgaaatagtgggaaatcatcttggttataatgtgcctcaaatcaggaaactgatggcaactatttgccaaatgaatctcaaataa

SEQ ID NO: 118111 - DNA, 1059 bp, Enterobacter cloacae
atgtctaatgccgctatgaagttaaatgaaacatcttctgatgcttatgaaaaattagaagctcttctttccccggatgttataaagttaaaacattatgtggataaaggtgagtatcttttagttctagcaaaggacctttttggtattccagaaatggatccaaagatggctgtgcctgttttcaaaactaaaacctcgtatcgagctccgctgaacaaagactacataccaaatccccgaatacttgaacaagtggttaaactgcttatcagtccggatatagatttaagtgtgtgtcttaaaggtgagtccggttctggcaagactgaaatggtaatgtacattagccacatgatgaattggccgctgacaattaagcagatcaacagcaatattcgagttgatgagcttgaaggtgagcgcagtcttaatggtggtaatacaggttttgtacacagcgatttggtaacgggatttcgtaatggtcacctcattcttctggatgaagtggacaaaatcgatcctgatacggcagcaaaacttcacatgcccattgaacgtaagccctggtcactcagtgctaatggtggtgaggttataactgctaatggctacacgcgatttattggtactgcaaacacaaacatgagtggaggcgctcgccggttcgtttcttctcaacgtcaagatgcagcttttataaagcggttcttgatagttgaaatggagaagcccgacaaagttgctttaaccaatgtgcttactaaacgatatagctctttgccttttcaggtcattgagaagttcgtaagagtagcgattgcagtaaatgactctggtacagaagacagtgtgatggatattcgtcaattagtagcttgggttggcacgtcgatgacgttaaaaacctttagtcttcttgacactttcaaaatagcttttgcttctgctttacctttacatgtggtcgatcttgttcttcaagctatagatctttctcttggcgaagacaaggataaatcgctggagtatttcacagcaaaaaagtcgagttag

SEQ ID NO: 118112 - DNA, 1128 bp, Enterobacter cloacae
atgactttaaatacttcaatgcttaacaaagtatctgcaaaacaaatctctgagaattttgcaaaatcatatccagatttactggaaggtgcagttataacaaaaattgaaataagtggctgtcaaggatcgcgtcgaaccgataaaatcgatttgtcttatgatggagatgatattacggatcaaaaaagcgtatctaaaagcgaagtacgttggattgacataaaagcccttagcttcaaaagtacgattaccagcagaatatcaaccctttgctcacgcttgtgcatccgctatagcaatatgtggattttaccagtttccagtatggaagagtttctggaaggggcccaagagattgaacgagagtttcaggcaggtattcaaaacgttgtagacaattatgagatgcatattgaggctgaaaaaaatagaagcccaagaatgtcttctttgattgatcagttgaaattaactaaagatgatttcataaaatcctttagatttaatattgctcactttattccttttacgcctattagcgttgaaggtgatgaaacccaggactactatcaggaacaattgataacagatctggcagaagaagcaatgagggtttatgaaaaaattagtaaaaataataatttgcgctcaagtactattgaccgactgaagcaaatgcaaaataagatcattagcttcatgtttatacataaagaggcggcagtacttgcagaagctataaaacacataatgaataatttacctaaaggtgccatttctgaacctcgcgacgttgcggtgttacagcagtggttttatttcatgagtgatgcttcaatgttaaagcgtattatttcaggagagcaaaaggttactgactggttggaatctattaccagatcatttaatcaaagctcacaaacagaaccgaacgcgctacagaacacaggtattgaagctattttagattcaacaaatgtgtttcaggttgaacctgtcgtagagaacgatataaaaaacagcacgttttcaaacactgattctgtagctgaacctgagaaatcagtttcgcaacaggaagacaatgctgaaaatggttttgatatcgagctcaaaggctggtaa

SEQ ID NO: 118113 - DNA, 2007 bp, Enterobacter cloacae; identical to SEQ ID NO: 31776

SEQ ID NO: 118114 - DNA, 222 bp, Enterobacter cloacae; identical to SEQ ID NO: 26755

SEQ ID NO: 118115 - DNA, 1233 bp, Enterobacter cloacae; identical to SEQ ID NO: 31775

SEQ ID NO: 118116 - DNA, 522 bp, Enterobacter cloacae
atgaattttcaaactaacgaagtttttaataaatttgctgctgttataaaatcgcgcatcgtcaatgaaccatcgtcatgctatttgctgcatgataatgagatagatataacgattttgaaacatggcatattagaaaatgacagaaacctgttgtacgtagttcgtccttcaggaacgtgtttgttgcgttgtgacaaatatttctatccgaaatattatcttcgttgccgtggagattataagtcattcatatatgtccatcttgatctacatagtggtgaagctaaagaaatcacatgggagcaagcagacgatatgctgtctagtccaggaaaacccccattaaaaggaaatcttggacgatttgagtatataaaagttgtggttgaggaccttcgtattcgaggttacgctgattatcttcctgcgtataatcttgatgaccttcgccgttttgccttacaggacgaccgcccatcccttgtcagatacattgacaatgtaatggcaacggtctga

SEQ ID NO: 118117 - DNA, 879 bp, Enterobacter cloacae; identical to SEQ ID NO: 31774

SEQ ID NO: 118118 - DNA, 936 bp, Enterobacter cloacae
atgaaaattatcgaaaaaatcattaatgcctttttggttgttcaacataaaaaaatacaggttaaaaacattacatttttagacaatgggcagggcatgttctctggtatgtcttttgatgctgatgtttcactggagtttatgtatgaatcagcaaaagcatatagttcttgtttctgtgatattccctttccaggttttgaagatgcaaatctggaggaaattacgaaatttcaattagatgctttgaagcaaagaaagaatcattctttcattgttaaccatttgaggtttcctatagttttaagggaagggtgcaaaatcgaaagaggagaagtctattcaatttcgaattgcacttataataaagaaagattgcagtatcttttttctcaggatatttacggtaagttgtataattccttagagaaagaattaagctcgtttttctcatttatcaatgttgaggtgcacgagttgttaaaagatgctgtatgctttgcattaaaaatcctgaataagatatctttggatacacctgaaagacttattaaagcttttaattatcgtgactggtattgtagttacgatgttgagctttttaggaaaggcttacctggtcatattctggaagagctcattgctccagatatcttactttcagaccttaacggttgtagaaaaatacttagaaatgcaaaacgatttctaaatggacatacaaaaaccaattgtgtttatattaaatatgaatggtggttggggcctgtggatacctcacactcagctaagttgatgtctgacaaagaaattaacaaccgaagtgacttgaagaatttttcaaaggtctttttcaaagagtgtttaagttctggtaagtcggaatatgaaaaccatcttagtgaaaaagaacatgcgcttcgctacaattattaa

SEQ ID NO: 118119 - DNA, 921 bp, Enterobacter cloacae
atgaatgcgatacaaaagttagttgaatctattcttgttaaaatgggttttgttggcgctgtagtggaaaatatatatttggattcaaaaccatttcggcatattcgatttgtggctgatattccagtaatatcttttctacctcatttggtgaaatatcttaagggcgcagaccatctttactgtggtaacgatgatttgcatcctcttttcatttatttttccgaagcggctacattaaaagcaggccctgtaaatctcgcgaactttcgttttgaagtttctatagcttcaactcatttacgactggtctcagagcagcctgatttgcttatcaaaggatttaaccgggataatctagaatacgtttattaccgctcagatttggcctctaaggatcttatactaggccttgttgaacacggttctcctttcataaaacatctacatggacttatacaaaagcgaattttaaacgagttctctctgattttttctgttcttgaaaagattttagaaagcgcgaagccacaaattcttgcttgcttccatagtgttgattatgaaatgaacgtaaaaataatagccgaagctatacctgaaactgtatctaatcagatagtcacatctgattatatagttaattctatatcagatgcggacaagtttataaatcatgttcgtcgctatttagcaggcagggtaatgaagaggcggatatacgctgaattagatgtttgtgaagaaacatcaaatatttcactagtgaacttaggatgctttacgtctcctctgctcgttacggaatatcaaatgtttaagccacactcttcagggttatatcgaaaagctataaacaactccttaaaacagttcaaaccagaaatgcatgtaccttctgaagaactcttttataattaa

SEQ ID NO: 118120 - DNA, 939 bp, Enterobacter cloacae
atgtttaaagaatctgaccacgtggaatttgttagtgcctttctttatcaaaatttaggccttaatgttcccgctgacgatataaccgttcaattatctgatacttcgttcgacaaagtaacctttgattacgatgtagatatcgataatttaaattgtatgttggatctctacatatctgaactaataaagcacaacgcatcttactccgattctattcttttgaaacaaaaaataatttattttcttggagtatttaagaatttcggattttttacgtttgatattcgcggatatagtaatactttaagcccagttaaagttattgatattgtttcaatgattattaatgactgtgaagagttatctaaagctaattcttctactgatgctataagaaatctttatctcgataaaatgaaggtggatgggaaagtgttagttgcgaaatttgcacttaaacagttttttcattccgactttggtgactttatctcatttgtcgagaaaagaattacagattgtcttaatgaaactttaaggattatcaaagctgttgaacatggctttgtacgtgttgggcagcataagattaatcgccgtattaatgatgacttaaagttatgcattgatttcaatactgatgattatccggcaaatatgccagatatatatattaagtttaacgatacatttgatgggaacggggcgttatattgtgacaatgatgccctcatatccctctataccgatgttgcttcaattatcaatgtgccggtgatgatggaagtaagattgatcaataaaagagggcgtgttgtctgtgattcttcgcattcaacttacgtatctctcgaaagtaatgaccgatacagagtaactgatcgcacattactaataactgaagcttttgacgattttcgtaacgcgtctcaatga

SEQ ID NO: 118121 - DNA, 957 bp, Enterobacter cloacae; identical to SEQ ID NO: 105510

SEQ ID NO: 118122 - DNA, 276 bp, Enterobacter cloacae; identical to SEQ ID NO: 105511

SEQ ID NO: 118123 - DNA, 591 bp, Enterobacter cloacae; identical to SEQ ID NO: 105512

SEQ ID NO: 118124 - DNA, 258 bp, Enterobacter cloacae; identical to SEQ ID NO: 105513

SEQ ID NO: 118125 - DNA, 537 bp, Enterobacter cloacae; identical to SEQ ID NO: 105514

SEQ ID NO: 118126 - DNA, 447 bp, Enterobacter cloacae; identical to SEQ ID NO: 105515

SEQ ID NO: 118127 - DNA, 981 bp, Enterobacter cloacae
atgagcctggagaaacgtatgagttatgacgatttgccctattttcgtgaccagattctggaacgcatcgactcgctcaagtgttttctttcgaacacccccccgatgatggcaaacctgatgactgtctccaccgtatctagaacagaagagcgcttgaagcaggttaaacccatcagggttagtattaaagacgatgcttcggttgaggaaattattcaggcacttactgacatctgtgtggatgacatagagtcattaagtcatgattccaccaaagtaaccactaaatacccgggtctaatcattgtccccgaaagagcagatcttctcgaaagcttgatcacttctataaacgaagcaaaaaatgattttgctgcggcaatgaggcgtatcgataataaaaagaatgtccgttttgataaagtgcacaagaagctcccgggccttgtcgctatgcactcaacaagaaatatccttttcatcaagtcccagcttaaaaaagttactttttcatggcggctaaaccgaaaccaggaagttaaaacagcagagcaacttgtgagtttgttggagcgcaggagagcctcagaagtaaaaaatgtagcaactaccaatttgaatgtcgtgtctaatatcgataaggctttacaccgtcttgaatttcacccactgaagcagggcgaatcttatcgcctttgtcgaactaactctttccctgttccgattgctcacatttttgcatttaggcctgaagggcaggaacgaaacgggaataaatatgctgagactgattattcagtagtaaaagcatccttgcccattttcgcagcaggcaacatacctcaattaaaaacgctctctgactgggctcctgaaaacagccagggtccgtccaaccaacggaagctgagcctgaaatatacagaactcgtgccgggggctgagctgggcattttcattgtcagccccgaaaattaa

SEQ ID NO: 118128 - DNA, 906 bp, Enterobacter cloacae; identical to SEQ ID NO: 105517

SEQ ID NO: 118129 - DNA, 330 bp, Enterobacter cloacae; identical to SEQ ID NO: 105518

SEQ ID NO: 118130 - DNA, 1176 bp, Enterobacter cloacae; identical to SEQ ID NO: 105519

SEQ ID NO: 118131 - DNA, 213 bp, Enterobacter cloacae; identical to SEQ ID NO: 105520

SEQ ID NO: 118132 - DNA, 1083 bp, Enterobacter cloacae; identical to SEQ ID NO: 105521

SEQ ID NO: 118133 - DNA, 1557 bp, Enterobacter cloacae; identical to SEQ ID NO: 105522

SEQ ID NO: 118134 - DNA, 1638 bp, Enterobacter cloacae; identical to SEQ ID NO: 105523

SEQ ID NO: 118135 - DNA, 1041 bp, Enterobacter cloacae; identical to SEQ ID NO: 105524

SEQ ID NO: 118136 - DNA, 639 bp, Enterobacter cloacae; identical to SEQ ID NO: 105525

SEQ ID NO: 118137 - DNA, 642 bp, Enterobacter cloacae; identical to SEQ ID NO: 105526

SEQ ID NO: 118138 - DNA, 639 bp, Enterobacter cloacae; identical to SEQ ID NO: 105527

SEQ ID NO: 118139 - DNA, 162 bp, Enterobacter cloacae; identical to SEQ ID NO: 105528

SEQ ID NO: 118140 - DNA, 468 bp, Enterobacter cloacae; identical to SEQ ID NO: 105529

SEQ ID NO: 118141 - DNA, 1209 bp, Enterobacter cloacae; identical to SEQ ID NO: 105530

SEQ ID NO: 118142 - DNA, 957 bp, Enterobacter cloacae; identical to SEQ ID NO: 105531

SEQ ID NO: 118143 - DNA, 1080 bp, Enterobacter cloacae; identical to SEQ ID NO: 105532

SEQ ID NO: 118144 - DNA, 774 bp, Enterobacter cloacae; identical to SEQ ID NO: 105533

SEQ ID NO: 118145 - DNA, 1143 bp, Enterobacter cloacae; identical to SEQ ID NO: 105534

SEQ ID NO: 118146 - DNA, 1059 bp, Enterobacter cloacae; identical to SEQ ID NO: 105535

SEQ ID NO: 118147 - DNA, 582 bp, Enterobacter cloacae; identical to SEQ ID NO: 105536

SEQ ID NO: 118148 - DNA, 1158 bp, Enterobacter cloacae; identical to SEQ ID NO: 105537

SEQ ID NO: 118149 - DNA, 456 bp, Enterobacter cloacae
atgagctttttcgacaaagttaaaggtgccattaactcaggccgtgacgaactgacccgccaggttggccgtttcaaaaacaaaaaattcatgcagggcaccgttgctgtatgtgcccgtattgccgtatcgagtgacggcgtaagttcggaagaaaagcagaaaatgatgggctttctgcgctcttcagaagagctgaaggtcttcgataccaatgaggtgattgagttcttcaataaactggtttcaagcttcgatttcgatgttgaaatcggcaagggcgaaaccatgaaatacatcctggcgctgaaagatcagcctgaggccgctcagctggccttacgtgttggtattgccgttgcgaaaagtgacggtaacttcgatcaggacgagaaactggcctcccgcgagatcgctatcgcgttgggcttcgacccggctgaatttggcctctga

SEQ ID NO: 118150 - DNA, 1041 bp, Enterobacter cloacae
atggtttccacacacatcggcttcccgactgaaacggtcattgtttttattgcgctttcagtcggtgccatctttattgacctgtttatgcaccgtgatgacaagcctatttcgctgaagagtgcggcgctctggtccgtattctgggttgtggttgcgatggcatttgccggtttcctctatatccaccacggtgctgaggttgccagtctgtttgtcacgggttatgcgctggagaaagtgctgtcggtcgataacctgttcgtcatgatggccatcttctcctggttcgccgttccggatcgttatcgccaccgtgttctctactgggggatcattggtgccattgtcttcaggggcatctttgtcgccatcggtacgagcctgctgagtctggggccgtatgttgaagttgtcttcgctattatcgttgcctggacagcggtcatgatgcttaaaagcggtgatgacgatgatgaaattgaggattactcccagcatctggcttaccgcatggttaaacgcttcttccctatctggccgaagctcagagggcatgccttcctgcttaaccagaaggaagtggatgctgaactggcgaaaccagaaaacagcgatgtcaccattggccgtggtaaaaaagcggcgctgtatgcgaccccgctgttcctgtgtgtggctgtggttgaactctcggacgtaatgttcgcgtttgactcggtaccggcaatcattgccgtcagtcgtgaaccgcttatcgtctatagtgccatgatgtttgctatcctgggcctgcgtactctgtactttgtccttgaggcactgaaacagtacctggttcatctggagaaggccgttatcgtgctgctgttcttcatcgcggcaaaactcggcctgaatgcgaccgatcacatctggcatcatggttacagcatcgcggcaacaaccagcctgtatgttgtactgggtgtactggcgctgggcattctcgcaagcgtcatgttcccgggcaaacctgaatctgaggaaaaggggagttaa

SEQ ID NO: 118151 - DNA, 579 bp, Enterobacter cloacae
atgagtgtttctctttccaaaggcgggaacgtctccctaagtaaagcagctccgtcaatgaaaaacgtcctggtgggccttggctgggatgcgcgttcaacagacggtcaggactttgacctggatgcttcagcattcctgctggcctcaaacggcaaagtgcgcggcgattcagatttcatcttctataacaacctgacgtcatccgacggttccgtaacgcacaccggcgataaccgcaccggtgagggcgatggtgatgatgaatcgctgaaaattaaactggacgccgtcccgtctgaagttgacaagatcatcttcgttgtgaccatccacgatgctcaggctcgtcgccagagctttggtcaggtatccggtgcgtttattcgtctggttaatgacgataaccagactgaagttgctcgctacgatctgaccgaagatgcgtccactgagactgccatgctgttcggcgagctgtatcgccacaatggtgagtggaaattccgcgcagtaggtcagggttatgctggtggtctggcatctgtatgtgctcagtacggcattaacgcgtcctga

SEQ ID NO: 118152 - DNA, 576 bp, Enterobacter cloacae; identical to SEQ ID NO: 105538

SEQ ID NO: 118153 - DNA, 1242 bp, Enterobacter cloacae; identical to SEQ ID NO: 105539

SEQ ID NO: 118154 - DNA, 546 bp, Enterobacter cloacae
atgagcgcggacgaaaacaacctgatttggatcgatctggagatgaccggcctggatcccgagcgcgatcgcattattgagatcgccacactggtcaccgatgccaatctcaatattctggcggaaggcccaacgattgccgtgcaccagtccgatgaccagcttgcgctgatggatgagtggaacgtgcgtacccataccggcagcgggctggtggaacgcgtgaaggccagcaccctgggcgaccgcgaagcggagctggcgacgcttgaatttctgaagcagtgggtgccagcaggaaaatcgcctatctgtggcaacagcattggtcaggatcgtcgtttcctgtttaagtacatgccggagctggagtcctacttccactaccgctatctggatgtgagcaccctgaaagagctggcccgccgatggaaaccggaaattctcgacggcttcacaaagcaggggacgcaccaggcgatggacgacatccgtgagtctgttgcggagctggcgtactatcgcgaaaactttattaagctctga

SEQ ID NO: 118155 - DNA, 1053 bp, Enterobacter cloacae
ttgagtaaaaataaactctccaaagggcagcagcgccgcgtgaatgcaaatcaccagcgccgtcttaaaaccactacggagaagcccgattacgacgacaacctgtttggcgaagcgacagaaggcgttgtgattagccgcttcggcatgcacgccgatgtcgaatccgccgacggggatatccaccgttgcaatatccgtcgcaccatccgttccctggtgaccggtgaccgcgtggtctggcgtccaggcaaagaggcggcggaaggggtaacggttaaaggtatcgttgaagccgtgcatgaacgcacgtcggttctgacccgtccggatttctacgacggcgtgaagcctattgccgccaacatcaaccagatagtgatcgtttcagcgattttgcctgagctttcgctcaatattattgaccgttatctggtggcctgcgaaacgctacaggttgagccgctcatcgtgctgaataaaatcgatctgctggatgacgaggccatggcctttgtaaatgagcagatggatatttaccgcaacattggctatcgcgtgttgatggtttccagccgcaccaaagatggcctgaagccgttagaagatgcgctgaccgaccgcatcagcatctttgcggggcagtccggcgtaggtaaatcgagcctgcttaacaacctgctcggccttcagcaggagatcctgaccaacgatgtgtctgacgtctcgggcctgggccagcacaccaccaccgcctcacgtctctatcacttcccgcacggtggcgacgtaattgactccccgggcgtgcgtgaatttggtctctggcacctcgagccggaacaaatctttaacggatttgtcgaattccatgactatttaggcgcttgcaaataccgcgactgtaaacatgacaacgatccgggctgcgctatccgcgaagcggtagagaacggagaaattgcggaaacccgtttcgaaaattaccaccgtattctcgaaagcatggaccaggtaaaaacgcgtaaaaacttttctgattctgataactga

SEQ ID NO: 118156 - DNA, 1011 bp, Enterobacter cloacae
atgccggatcaggaacgacaaaacaatggcctggaggctaccttgttaaactcatttaaactttcgcttcaatacattctgccgaaactgtggctcactcgcctggcgggctggggcgcgagcaaacgagcgggctggctgaccaaactggtcatcgacctgttcgtgaaatactacaaggtcgacatgaaagaagcgcagaagccggatacggcaagctaccgcaccttcaacgaattttttgtgcgtccgctgcgcgacgaagtgcgcccgctgaataccgacccgaacgtgctggtgatgccagcggacggcgtgatcagccagctgggtaaaattgaagacgacaaaattttgcaggcgaaaggccataactacagccttgaagcgctgctggccggtaactacataatggccgatctgttccgtaacgggactttcgcgaccacctatctctccccacgcgactaccaccgcgtgcatatgccgtgtaacggtattctgcgcgagatgatctacgtgccgggggatctgttctccgtaaaccacctgacggcgcaaaacgttcctaacctgtttgcccgtaacgagcgcgtcatctgcctgtttgatactgaatttggcccaatggcgcagattctggtgggtgctaccattgtaggcagcatcgaaaccgtctgggcgggcaccattacgccgccgcgcgaaggcgtgatcaagcgctggacctggcctgccggcgaagaagaaggttctgtggccctgctgaaaggtcaggaaatgggccgcttcaagctgggctcaacggtcatcaacctgttcgcaccgggcaaagttaacctggtcgacgagctggaaagcctgtccgtgaccaaactcggccagcctctggcagtatcgacggaggtctttgtgacgccagaggttgcgcctgccccgttgccggaagaagagatcaaagccgagcacgacgccagcccgctggttgacgacaaaaaagacgaaggctaa

SEQ ID NO: 118157 - DNA, 3324 bp, Enterobacter cloacae
gtgcgcccgattatcgtattactgatggcctggtgcctcagcatgggggcgtacgcagcgacggcccccgacgccaaacagataacccaggagctggagcaggcaaaagcggcgaaacccgctcagccggagaccgttgagtcactccagtctgcactgaacgcgcttgaggaacgaaagggttcccttgagcgcgcgcagcagtatcagcaggttatcgacaacttccccaaactctctcagaccctgcgctcgcagctaaacaacctgcgcgatgaaccacgccaggtccccgcggggatgacgtccgaggcgcttaatcaggagatcctgcaagtcagcagccagctgctggaaaaaagccgtctggcgcagcaggagcaggaacgggcgcgtgaaattgccgattccctcagccagcttccacagcagcaaaccgatgcccgccgtcagttaaatgaggtggaacgccgcatcgggacgcagacaggcagcacaccgcagaatcaggcgcaaaatcttgggttgcaggcggaatccgccagactaaaagcgctggttgatgaactggagctggcgcagctttccgctaacaaccgccaggagctgtcgcggatgcgttccgagctggcgcagaagcagagccagcagctggatgcatatctccaggcgctgagaaatcaactcaacagccagcgtcagcgtgaagctgaacgtgcgctggaaagcaccgagttactggccgaaaacagtgctaacctgcccgacagcatcgtcgcccagtttaaggttaaccgcgagctttctgccgcgctgaatcagcaggcgcagcgcatggatttggtggcctcgcagcagcgtcaggccaccaatcaaaccctccaggttcgtcaggcgctcaacactctgcgtgaacagtcccagtggcttggctcgtctaacctgttgggcgaagcgttacgcgcgcaggtggctcgtctgccagagatgccaaaaccgcagcagcttgatacggagatggcgcagctacgcgttcagcgtcttcattatgaagatctcctcaacaagcagccgcaaatccgccagatccgtcaggctgacggacagccgctcaccggcgagcaaagtcgtattctggaagcgcagctgcgcacccaacgcgaactgctcaattccctgttgcagggaggcgatacgctgatccttgagctgaccaagctgaaagtctcgaatagccagctggaggatgcgctgaaagaggtcaacgaagccacgcaccgttaccttttctggacgtccgacgtacggccgatgaccttcgcctggccgattgagattgtgcaggatctgcgccgcctcatttcattggacaccttcagccagctgggcctcgccagcgtaatgatgataaccagcaaggagaccatcttcccgctgctgggggcgctgattctggtgggcttcagtatttattcccgtcgtcactttacccgtttccttgagcgctccagcgcccgagtgggaaaagtaacccaggatcacttctggctgacgttgcgtacggtgttctggtcaattctggtcgcgtctccactgccggtgctgtggatgacgctcggatacggcctgcgtgaagcctggccctacccgcttgccgtcgcgattggcgatggcgtgaccgccaccgttccgctactgtgggtggtgatgatttgcgccacgtttgcgcggccaaatggtctgttcatcgctcactttggctggccgcgtaatcgcgttgcgcgggcgatgcgttactacctgatgagtatcgggctgattgtgccgctgattatggcgttgatcatgttcgataatctcaatgaccgggagttctccggctcgctgggacggctgtgctttatgctgatctgcggggcgttagcggtagtgacgctcagcctgaaacgcgccgggatcccgctctatctcgacaagaccggcagtggcgataacatgtttaaccgtctgctgtggaacctgctgctcagcgcgccgctggcggcgatgctggcggcagcggtcggttatctcgccacggcgcaggcgctgctcgcccgactggaaacgtcggtggctatctggttcctgctgctggtggtctaccatgttattcgccgcggcatgctgatccagcgtcgtcgtctggcgtttgaccgtgccaaacaccgtcgcgcagaaattctggcccagcgcgctcggggtgaagaagagccgaaccacgtcaacagcaccgaagggaccacagacgccgatgacgtcgaactggatctggatgcgatcagtacccagtccctgcggctggtacgctcaattctgatgctggttgccctgctgtcggtgatcttcctgtggtcggaaatccactccgcgtttggcttcctggagaacatctctttatgggatgtgacgtccacggtgcagggggtcgaaagcctggagcccatcaccttaggggccgtgctgattgcgattctggtgctgatcatcaccacgcagctgatccgtaacttccctgccctgctggagctggcgctgttgcagcatctggatttaacccccggcacgggctatgcgatcaccactatcaccaagtatttaatcatgctgtttggtgggctggttggcttctcgatgattggtatcgaatggtcaaaactgcaatggctggttgccgccctgaccgtaggcctgggctttggtttacaggagatttttgccaacttcgtttctggtctgatcattctgtttgaaaagccgattcgaattggcgatacggtgaccatccgcgatctcaccggcagcgtcaccaggatcaacacccgcgccaccaccatcagcgactgggaccgtaaagagatcatcgtcccgaacaaggcgtttatcaccgagcagtttatcaactggtcgctgtccgactccgtcacgcgtgtggtgctgaccgtacccgctccgtcggatgccaacagcgaagaggtgacgcagatcctctatacggctgctgaacgctgttcgctggtaatcgacaacccgccgccggaagtgttcctggttgatttgcagcaggggatccagattttcgagctgcgtatctacgccgccgagatgggacaccgtatgccgctgcgccatgagatccaccagttgattctggctggcttccgcgagcacggaattgatatgccgttcccaccgttccagatgcgtctggaaacgctggacggacgtaagacgggaagaacgttgacgtcagcggcgcgtacgcgcccggcgggaagtttgtaa

SEQ ID NO: 118158 - DNA, 1500 bp, Enterobacter cloacae
atgcctcactcactcaaaaaaatgacccttaccgggctcatcctgatgatttttacgtcagtctttggctttgccaacagcccgtccgcgttttatctgatggggtacagcgcgacgccgttttatatcgtttccgctctgttcttctttatcccgtttgcgctgatgatggcggagatgggctcggcgtaccggaaagaagagggcggcatctattcgtggatgaacaacagcgtcggcccccgttatgcatttatcggtacgttcatgtggttttcatcctacgtcgtctggatggtcagcacggcggccaaggtctgggtgccgttctcaacgtttctcttcggtgcggataaaacgcaggtctggtctctggcggggctgagctccacgcaggtggtcggtattctggcagtgtgctggatggtgatggtcaccctggtggcctcgaaaggcatcaacaaaattgcccgtatcactgccgttggcggtatttccgtgatgtgcctgaacctagtgctgctgctggtcagcatcgccattctgtgcctgaacggcgggcatttcgcacaggaagtcaacttcgtttcatcgcctaatccgggttaccagtccgggctggccatgctctccttcgtggtgtttgccatctttgcttacggtggaattgaagccgtgggcgggctggtcgacaaaaccgaaaatccggaaaagaacttcgccaaaggcatgatctttgccgccatcgtcatttccattggctactcactggcgattttcctctggggcgtcagcaccaactggcagcaggtgttgagcaataacaccaccaacctcggcaacattacctacgtgctgatgaaaagcctgggggtgacgctgggcaacgccatggatctcgcgccggaaacgtcggccaccctggggatctggtttgcgcggattaccggcttgtcgatgttcctcgcctatactggcgcattcttcacgctgatctactcgccgctgaaagcgattattcaggggacgccaaaggcgctgtggcccgcacgtatgacgcagctgaacgctgccggtatgcctgccaacgcgatgtggatgcagtgcctgctggtgtgcgtgttcattctgctggtgtccttcggcggtgataccgcgtcggcgttctataacaagctgaccctgatggcgaacgtatcgatgacgcttccgtatctgttcctgaccctggcgttcccgttctttaaggcgaagcgggatctggagcggccgtttgtgatcttcaaaacccgcgcggcgacgctgctggcgaccactgttgtggtgctggtcgtcgcgttcgccaatatctttaccgtcattcagcccgtggttgaggcaaatgactggaacagcacgctgtggatggttggcggaccgatcttcttctcgctgctggcaatggggatttatgagcattaccgtcgtcgctcgacggcctgtgtagcagaagtggcgtaa

SEQ ID NO: 118159 - DNA, 978 bp, Enterobacter cloacae
atgagcgaaacggccacctggcagccgagcgcatccattccaaacctgctaaagcgcgcagcaattatggcggagatccgccgtttctttgccgatcgcggcgtcctggaggtggaaacgccgtgcatgagtcaggcgacggtcacggatattcatctggtcccgtttgaaacccgttttgttggcccaggccactctcagggcatgaatctgtatctgatgaccagcccggaataccatatgaagcgtctgctggcggccgggtgtggtccggtctatcagctgtgccgtagcttccgtaatgaagagatgggccgacaccataatccggaattcaccatgctggagtggtaccgcccgcactacgacatgtatcgtctgatgaacgaagttgacgatctgctgcaacaggtgctggattgcgcggaagctgaaacgctctcctatcagcaggccttccagcgccatctggaaatcgatccgctgtcggctgataaaacacagctgcgtgaagtggcggcaaaactggatctgagcaacgtggcggatagcgaagaggatcgcgacacgctgctgcaactgctgttcacctttggtgttgaaccgcagattggcaaagatcgtccgacgtttgtctatcacttcccggccagccaggcctcactggcgcagatcagcaccgaagatcaccgcgtggcggagcgttttgaggtgtatttcaaaggcatcgagctggcgaacggtttccacgagctgaccgacgcgcgcgaacagcagcagcgtttcgagcaggataaccgcaagcgcaacgcgcgcggtctgccgcagcagccaattgataacaacctgctggaagcgttaaaggccggtctgccggactgttccggcgtggcgctgggcgtggatcgtctggtcatgctggcgctgggcgccgagcagctgggcgatgtgattgcctttacggtcgatcgcgcctga

SEQ ID NO: 118160 - DNA, 1791 bp, Enterobacter cloacae
gtgcaaacttttcaagccgatcttgccgtaataggcgctggcggggctggattacgcgctgcaattgctgcggcacaagccaatccgaacgctaaaatcgcattgatttcaaaagtctatccgatgcgcagccacacggtagccgcagaaggaggatccgccgccgtcgcgcaggatcatgacagcttcgaataccatttccacgacacggttgcagggggcgactggctttgcgaacaggatgtcgttgattacttcgtgcaccattgcccaacggaaatgacccagctggaacagtggggatgcccgtggagccgccgtccggacgggagcgtcaacgtccgccgcttcggtggcatgaagatcgaacgcacctggtttgccgccgataagaccggcttccacatgctgcacaccctgttccagacctccctccagttcccacaaatccagcgctttgacgaacatttcgttctcgacattctggtcgacgacggtcatgcgcgcggactggtggcgatgaacatgatggaaggcacgcttgtccagatccgcgcgaatgcggtggtgatggcaacgggcggcgcgggtcgcgtataccgctacaacaccaacggcggcatcgtcaccggtgacggtatgggcatggcgctcagccacggcgtcccgctgcgtgatatggagttcgtccagtatcacccaaccggcctgccgggctccggtattctgatgacggaaggctgccgcggtgaaggcggtattctggtcaacaaaaacggctatcgctatttgcaggattacggcatgggtccggaaaccccgcttggcgagccgaaaaacaaatacatggaactcggcccacgcgacaaagtctctcaggctttctggcacgagtggcgcaaaggcaacaccatctcaacgccgcgcggcgacgtggtgcatctcgacctgcgtcatctcggcgagaagaaactgctggagcgtctgccgtttatctgcgagctggcgaaagcgtatgtgggcgtcgacccggtgaaagagccgatcccggtgcgtccaaccgcgcactacaccatgggtggtatcgaaaccgaccagcagtgcgaaacccgcatcaaagggctgtttgcggtgggcgagtgttcctccgtcggtctgcacggcgcaaaccgtctgggctcgaactcgctggctgagctggtggtctttggtcgcatggcgggcgaacgtgcgatggagcgtgccgcaacggcaggtgaagctaacagcgcggcgctggatgcgcaggttgcagacgtcgaaaaacgcctgaaagacctggtgaaccaggaaggtaatgaaaactggtcgaagatccgcgacgaaatggggctgtcgatggaagaaggctgcgggatctaccgtacgccagagctgatgcagaaaaccgtcgacaagctggcggaactccaggaacgcttcaaacgcgtgcgcatcaccgacacttccagcgtcttcaataccgatctgctttataccattgaactgggccatggcctgaacgtcgcagagtgtatggcccattccgccctggcgcgtaaagagtcccgcggcgcgcaccagcgtctggatgagggctgcaccgaacgtgacgacgtcaatttccttaaacacactctcgcctggcgcgatgcggatggcactacgcgactggactacagcgacgtgaaaatcaccacgctgccaccggcgaaacgcgtgtacggtgcagaagcagaagccgccgataagaaggagaaggcgaatggctga

SEQ ID NO: 118161 - DNA, 735 bp, Enterobacter cloacae
atggctgagatgcaaaaactgaaaattgaagtggtgcgctacaatccggaagtggacgccgcgccgcacagcgctttctatgaagtcccttacgacgagcaaacctccctgctggatgcgctcggctatatcaaagataacctggccccagacctgagctaccgctggtcctgccgcatggcaatttgcggctcctgcggcatgatggtcaacaaggtgccaaagctggcgtgtaaaaccttcctgcgtgattacaccaaaggtatcaaggttgaagcgctgggcaacttcccgattgagcgcgatctggtggtcgacatgacccactttatcgaaagcctcgaagcgattaagccgtacatcatcggcaacccgcgcacgccggatcaggggccaaacacccagacgcccgcgcagatggcgaaataccatcagttctccggctgcatcaactgcggcctgtgctatgccgcctgtccgcagtttggcctgaaccctgagttcatcggcccggccgccattaccctggcgcaccgctataacgaagacagccgggaccacggtaaaaaagaacgtatggcgcagcttaacagccagaacggcgtctggagctgcacattcgtgggctactgctccgaagtgtgtccgaagcacgtcgacccggccgccgctattcagcaggggaaagtggaaagctcgaaagactttcttatcgctaccctgaaaccacgctaa

SEQ ID NO: 118162 - DNA, 396 bp, Enterobacter cloacae
atgacgactaaacgcaaagcctacgtgcgaccaatgccgtccacctggtggaaaaaactgccgttttatcgcttctatatgctgcgtgaaggcacggctgttcccgcggtctggttcagcctcgaactgctgtacggggtttatgccctcaagcacggcccggaagcctgggccagttttgtgggcttcctgcaaaacccaatcatcgttgtgctgaacctgattgtgctcgccgccgcgctgcttcataccaaaacctggtttgaactggcgccaaaagcagcgaacatcattgtaaaaggcgaaaaaatggggccagagccggtcattaaagggctctgggcagtgacggcagttgtctctgtggtcattctgtttgtcgcactgttctggtaa

SEQ ID NO: 118163 - DNA, 360 bp, Enterobacter cloacae
gtgatcaatccaaatccaaaacgttcagacgagccggtcttctgggggctgtttggcgcaggcggcatgtggagcgccattattgccccggtcattatcctgctggtcgggataatgctgccgctggggctgttcccgggcgatgcgctgagctatgagcgcgtactggcctttgcgagcagctttattggccgcgtgttcatcttcctgatgatcgtcctgccgctgtggtgtggtctgcaccgtatccaccatgcgatgcacgatctgaaaatccatgtgccaagcggtaaatgggtcttctacggtctggcgaccattctgacggtcgtcacgttgattgccgtggtcaccatctga

SEQ ID NO: 118164 - DNA, 876 bp, Enterobacter cloacae
atgacgcgaagctatctacccctcaattcgcttcgggcttttgaggctgccgcaagacatctcagttttacgcatgcggccattgaactgaacgtgacgcattcggctattagccagcatgtgaaaacgctggagcagcacctgaactgtcagctgttcattcgcgtgtcgcgcgggctgatgttgactaccgagggcgaaaatttactgccggtgctgaatgattcgttcgatcgtatagccggaatgctggatcgcttcgctaaccatcgtgcgcaggagaagctgaaaatcggcgtggtgggtacgtttgccaccggggtcttattctcgcagctggaggattttcgccgtggctatccgcatatcgatcttcagctttccacccataacaaccgcgttgattcggctgccgaagggcttgactatacgatccgctacggtggcggggcgtggcacggtaccgaggctgaatttctttgtcatgcgccgctcgcgccgctgtgtacgcctgatattgccgccagtctgcacagtccggccgacatcctcaggtttacgctgctgcgctcctaccgacgcgacgagtggaccgcgtggatgcaggcggccggcgagcatcccccttcgccaacgcaccgcgtgatggtatttgattcgtccgtgaccatgctggaggccgctcaggcaggggtgggtattgctattgcgcctgtcgatatgtttacccatctgttagccagcgagcgcattgtgcagccctttgcgacgcagattgagcttggcagctactggctgacccgattgcagtcccgggcagaaacgccagccatgcgcgaattttcccggtggctggtggagaagatgaaaaagtaa

SEQ ID NO: 118165 - DNA, 1146 bp, Enterobacter cloacae
atgatgaaaaaatccctttgctgcgccctgctgctcggcatctcttgctctgctctcgccacgccagtgtcagaaaaacagctggcggaggtggtagcgaatacggttaccccgctgatgaaagcccagtctgttccaggcatggcggtggccgttatttatcagggaaaaccgcactattacacgtttggcaaggccgatatcgcggcgaataaacccgttacgcctcagaccctgttcgagctgggttctataagtaaaaccttcaccggcgtgttaggtggggatgccattgctcgcggtgaaatttcgctggacgatccggtgaccagatactggccacagctgacgggcaagcagtggcagggtattcgtatgctggatctcgccacctacaccgctggcggcctgccgctacaggtaccggatgaggtcacggataacgcctccctgctgcgcttttatcaaaactggcagccgcagtggaagcctggcacaacgcgtctttacgccaacgccagcatcggtctttttggtgcgctggcggtcaaaccttctggcatgccctatgagcaggccatgacgacgcgggtccttaagccgctcaagctggaccatacctggattaacgtgccgaaagcggaagaggcgcattacgcctggggctatcgtgacggtaaagcggtgcgcgtttcgccgggtatgctggatgcacaagcctatggcgtgaaaaccaacgtgcaggatatggcgaactgggtcatggcaaacatggcaccggagaacgttgctgatgcctcacttaaacagggcatcgcgctggcgcagtcgcgctactggcgtatcgggtcaatgtatcagggtctgggctgggagatgctcaactggcccgtggaggccaacacggtggtcgagggcagcgacagtaaggtagcgctggcgccgttgcccgtggcagaagtgaatccaccggctcccccggtcaaagcgtcctgggtccataaaacgggctctactggcgggtttggcagctacgtggcctttattcctgaaaagcagatcggtattgtgatgctcgcgaatacaagctatccgaacccggcacgcgttgaggcggcataccatatcctcgaggcgctacagtaa

SEQ ID NO: 118166 - DNA, 531 bp, Enterobacter cloacae
atgcgcattctgcctgttattgccgcagtaacagccgcgtttttagtggttgcttgcagttcccctactcctccgcctggcgtcacggtagtcagtaatttcgacgcacagcgcttcctcggcacctggtatgaaatcgcccgaatggaccatcagttcgaacggggcttagaaaaagtcacggtcagctacagcgcgatggatgacggcgggatccgggtcattaaccgcggctataacccggatcgccagatgtggcagcagtcagttggtcaggcctatttcaccggcgcgtctaaccgcgcggccatgaaagtctctttcatcggcccattctacggcgggtataacgtcattgcgctggacagagagtaccgccatgcgctggtgtgtgggccggatcgcaactatctgtggctcctctcccgcacgccaacgatctcgacggaaatgaaacagcagatgctggacatagcgacccggcaagggtttgacgtgacgaaattaatctgggtaaaacagctgcattag

SEQ ID NO: 118167 - DNA, 318 bp, Enterobacter cloacae
atgtcctggatcgttcttgttattgccggtttgctcgaagtggtatgggcaattggcctgaaatatacccacggttttacccgcctgacgcccagcgtcatcactatcgccgcaatgattgtcagtatcgtcatgctgtcatgggcgatgcgaaccttgccagtcggaacggcttacgctgtctggactggaattggcgcggtaggggctgccattaccggcattctgctgctgggggagtctgcgagtctggcgcgcatcgccagcctcgcgttaatcgtcgcgggtatcatcgggttaaaactcagtacgcactaa

SEQ ID NO: 118168 - DNA, 600 bp, Enterobacter cloacae
atgttcaaaattcttttgattgaccgttgtcacttcacccgcacgggatttgaagcctggctcaatcattcagacctgttttcgggtcatttcgtcgtaaccggggtaaataatcttttcctcgccagagagcatatcctgcaatggaaacctgcgctggtcatcgctgatttatcgggcttccggcaggatttacaccattttcagcagctatcttccctgcttattgccagcgaaacattgccttttattatgctgcaatcggggcaggagcaggagatgacagattatctggcgcagttcccgatatggtcttcactttccaaaaataccgatctggaaaaactggcggcggtgataaacgacgcgctaacgacatgcgcaagcgcggagcttccggaaatggcggcaccgttactgacgcgtcaggaagagagagtactgaccctgtggatggatggtgcgagcaaccagaaaattgccagcaatctgcgcattaacggaaaaacggtgtatacgtacaaacgcaatatccgcatgaagcttcatatggatacgcgttactccccgtttttatcgctacaggaagtggagaattga

SEQ ID NO: 118169 - DNA, 147 bp, Enterobacter cloacae
atggttaagaaaacaattgcagcgatcttttctgttctggtgctttcttcggtactgactgcatgtaacaccacccgtggcgtaggggaagatatctccgacggtggtaacgcgatttctggcgcagcaactaaagctcagaactaa

SEQ ID NO: 118170 - DNA, 132 bp, Enterobacter cloacae
atgaaacgtaccgttaaaattctgcttctgttagcgttctccagcgcaattctctccggttgcaacaccgcgcgtggcgtgggcgaagatattcaggatctcggccatatcatttcccatgcggccagctaa

SEQ ID NO: 118171 - DNA, 567 bp, Enterobacter cloacae
atggcaacgtactatagcaacgattttcgtgctggtcttaaaatcatgatggacggcgaaccgtacgcggttgaagccagcgaattcgttaaaccaggtaaaggccaggcattcgcacgcgttaagctgcgccgcctgctgaccggtacccgtgttgagaaaaccttcaaatctactgactccgctgaaggcgctgatgttgtcgatatgaacctgacttacctgtacaacgacggtgagttctggcacttcatgaacaacgaaaccttcgagcagctgtctgcggacgcgaaagcgattggcgacaacgccaagtggctgctggatcaggctgagtgcatcgttaccctgtggaacggtcagcctatcgcggttacgcctccgaacttcgttgagctggaaatcgttgaaaccgatccaggtctgaaaggtgataccgcaggtactggcggcaagcctgccaccctgtctaccggcgcggtggttaaagtgccactgttcgtacagatcggtgaagtgatcaaagtggatacccgctccggcgaatacgtatcccgcgtgaagtaa

SEQ ID NO: 118172 - DNA, 1029 bp, Enterobacter cloacae
atggcgcatattgtaaccctaaacaccccgtccagagaagattggttatcgcaacttgccgatgtaatcaccagtcctgatgaattgctgcgtcttttagacctcgaacagcacgaagcgttgcgtgcaggtcgtgaggcgaagcgccttttcgccctgcgcgttccccgcgcgtttgttgcccgaatggaaaagggtaaccctggtgatccattattaaaacagacgcttacctctcaggatgagtttattaccgcccccggatacagcaccgatccgctggaagagcaaaacagtgtcgtaccgggtttgctgcataaataccgtaatcgcgccctgctgctggttaagggcggttgcgcggtaaattgccgctattgcttccgtcgccacttcccgtacgccgaaaatcagggcaataaacgcaactggcaggtggcactggactacatcgcggcgcacccggagctggatgaaatcatcttttccggcggcgacccgctgatggcaaaagatcatgagctggactggctgctgactcagcttgagaccatcccgcacattaagcgtctgcgcattcacagccgtttaccgatcgtcatcccggcgcgtatcaccgacgccctggtcacgcgcctggagcagtcccgtttgcaggtgctgctggtgaaccatatcaaccacgcaaatgaaattgacgcggactttcgtgcggcgatggcgcgtatgcgaaaggcaggcgtgacgctgctcaaccagagcgtattactgcgcggcgtgaacgacagcgcccgcgtgctggccgatctcagcaatgccttatttgatgcgggcgtaatgccctattacctgcatgttctggatcgcgtccagggcgcggcgcacttcatggtgacagatgaagaggcccggaagattatgcgcgagctgttaacgctggtttcgggttatatggtgccgaagctggcacgtgagattggcggagagccgagtaagacgccgctggatttgcagctgcggcagcagtaa

SEQ ID NO: 118173 - DNA, 354 bp, Enterobacter cloacae
atgcgcataaaagtctgtgcagggattgtaggtgcagcattgctgctggcgggttgtagcaccagcaatgagctgacggcagcgggccagagcgttcgctttgtggaagataagccgggcagcgaatgccagctgttaggcaccgccactggcgagcaaagcaactggatgtcggggcagcacggcgaagagggcggctctatgcgcggtgcggccaatgccctgcgtaatcaggctgcggcaatgggcggcaatgtgatttacggggtgagcagcccgacgcaggggatgctgtccagctttgtgccaaccgccagccagatgaacggccaggtctataagtgcccgaactga

SEQ ID NO: 118174 - DNA, 648 bp, Enterobacter cloacae
atgagtgcatcatcctcaggagaggaaaaagtaacctgggtgggctatctggcgttcgtgctcaccatcgtatttttctcaggttttttcgccaaaagtaccgaatggtggcgcgtgctggattttaccgtgctgaacggcagctttggaccggtgaacggcgcgctaacgtttcgcggtgagggcggcacaggagcgaaagatgggtttttgtttgcccttgaactggcgccctcggtcattttatcgctcgggatcattgccgttaccgaggggctgggcgggctgcgcgccgcacaacagctcatgacgcccattctgcgcccgctgctcggcgtgccgggcatctgctctctggcgcttatcgccaacctgcaaaataccgatgcagccgcagggatgaccaaagagttgactgacgaaggggcgattactgaccatgaacgcgccattttcgccaccttccagaccagcggtagcgccattattaccaactatttttcttctggtgccgcactctttacctttattaccgtcccggtgatcacgccgcttgccgtcattctggtgttcaaatttgttgacgcgaacttcctgcgactgtggatcgcccacatggaagttcgccgcgttcaggaggaaagatga

SEQ ID NO: 118175 - DNA, 462 bp, Enterobacter cloacae
atgatcgcccagccgcgtaaaaatatcatggacctgtttatcgatggcgcccgccgcggctttaccatcgccaccaccagcctgctgccgaacgtggtcatggcgtttgtcatcattcaggcgctcaaggtaaccggcctgctggatattgtcggcagggtatgcgagcccatcatggccctgtgggggcttccgggtgcggcggcaacggttcttctggcctcggtaatgagcatgggcggcggtgtgggggtctgcgccagtctggtcgctgccggcacgctcaacggtcacgatgccaccatcctgctgcccgccatctatctgatgggtaatccggtgcaaaacacgggccgttgccttggcaccgcaggcgtcaacccgaagtattatccgcacatcatcactatctgcgtcattaacgccctgctctcaatgtgggtgatgcagctactcttctga

SEQ ID NO: 118176 - DNA, 1164 bp, Enterobacter cloacae
atggatttttcagtgctggaaccgcaccttttccgcaatgcgcagctttacgctcccgaggatcttgggcattgcgatctgctaattgccggaggaaaaatcgtcgcagtcgaaaaagcgggccacgccacaacgaggccagactgtcctgaaagcgatctcgccggagcggtggtttgtccggggtttatcgatcagcatgtacacctgattggcggcggcggtgaagccggtccccacacccggacgccagaggtgcgattgtctgcgctggtggcggctggcatcacctccgttgttggcctgctgggcaccgacggcgtgacccgccatcccgagtcgctgctggcgaaaacgcgggcgcttgagcatgaagggatcagcacgtggatgctgacaggcgcgtatggcctgccttctccgacgattaccggcagtatcgaaaaggatgtggcgctgattgataaaatcattggcgtgaaatgcgcgatttccgaccatcgctcttccgctccggcagatgaccagctcgcgaatatggccgcccagtcacgcgtcggcgggctgctgggcgccaaagcggggatatccgtgtttcacctcggcaacagcccgaaacggctggagccactgcttaacatcctgaataacgccgacgtgccccgcacgaagctgctgccaacccacgtcaaccgcgcccaggcactgttccacgccgcactggactatgcccgcgaaggggggtacatcgacatcaccaccagcatcagtgagcccattgatgccgctaccgccatcgcgacggcccgtgacgcgcaggtgccgtttaaccggctcacgttcagctcggatggcaacggcagccagccgaattttgacgcaaacggtaatcttgttggcattggcgtggcgggttttgagtccctgcttgagacgctacagcagctggtcggccgatatcacctgccgctggaggaggcgcttctgccatttacgcgtaacgtggcggagtttctcggtctggagcataaagggcggatcgcgcccggatgcgatgccgatttcctggtgctgacggatgacctgaagatccgtgaggtctgggcgaaaggccgccagatggtgcgtgaaggcgtggtgtgcgtgaaaggcacgtttgagtag

SEQ ID NO: 118177 - DNA, 1647 bp, Enterobacter cloacae
atggcagctaaagacgtaaaattcggtaacgacgctcgtgtaaaaatgctccgcggcgtaaacgtactggcagacgcagtgaaagtcactctgggcccgaaaggccgtaacgtagtgctggacaaatccttcggcgcgccaaccatcaccaaagatggtgtttctgttgcacgtgaaatcgagctggaagacaagttcgaaaacatgggcgcacagatggtgaaagaagttgcctctaaagcgaacgacgctgccggtgacggcaccaccaccgcgaccgtactggcgcaggcgatcatcaccgaaggcctgaaagccgttgctgcgggcatgaacccaatggatctgaaacgtggtatcgacaaagctgtcgcctctgctgttgaagaactgaaagcgctgtccgtaccgtgctctgactctaaagccattgctcaggttggtactatctccgctaactccgacgaaaccgtaggtaaactgatcgctgaagcgatggataaagtcggtaaagaaggcgtgatcaccgttgaagacggtactggtctggaagacgaactggacgtggttgaaggtatgcagttcgaccgcggttacctgtctccatacttcatcaacaagccagaaactggcgctgttgagctggaaagcccgttcatcctgctggctgacaagaaaatctccaacatccgcgaaatgctgccagtgctggaagccgttgcgaaagcaggcaagccgctggtaatcattgctgaagacgttgaaggcgaagcgctggcgactctggtggttaacaccatgcgtggcatcgtgaaagtggcagcggttaaagcacctggcttcggcgatcgtcgtaaagcgatgcttcaggatatcgctaccctgactggcggtaccgtgatctccgaagagatcggtatggagctggaaaaagcgaccctggaagacctgggccaggcgaaacgcgttgtgatcaacaaagacaccaccaccatcatcgacggtgtgggtgaagaagctgctattcagggccgtgttggtcagatccgtaagcagatcgaagaagcaacttccgattacgaccgtgaaaaactccaggagcgcgtagcgaaactggcaggcggcgtagcggtaatcaaagtcggtgcggctaccgaagttgaaatgaaagagaagaaagcacgcgttgacgatgccctgcacgcgacccgtgctgcggtagaagaaggcgtggttgctggtggtggtgtcgcgctggtgcgtgtagccgctaaactggctggcctgactgctcagaacgaagaccagaacgtgggtatcaaagttgcgctgcgcgcgatggaagctcctctgcgtcagatcgtgtccaacgccggtgaagagccgtctgtggttgcgaacaacgtgaaagcgggtgaaggtaactacggttacaacgcggcaactgaagaatacggcaacatgatcgacttcggtatcctggatccaactaaagtgacccgttctgcactgcaatacgcggcatctgtagctggtctgatgatcacgaccgagtgcatggtgaccgacctgcctaaaggcgacgcgcctgacttaggtgctgctggtggtatgggcggcatgggtggcatgggcggcatgatgtaa

SEQ ID NO: 118178 - DNA, 294 bp, Enterobacter cloacae
atgagtattcgtccgttacatgatcgtgtgatcgtcaaacgtaaagaagttgaaaccaagtctgctggcggcatcgttctgaccggttcagcagcagcaaaatcaacgcgtggcgaaatcatcgctgtcggtaagggccgcatcctggaaaacggaactgtgcagccactggacgttaaagttggtgacatcgtcattttcaacgatggctacggcgtgaaatccgagaagatcgacaatgaagaagtgttgatcatgtccgagagcgacattctggcaattgttgaagcgtaa

SEQ ID NO: 118179 - DNA, 1248 bp, Enterobacter cloacae
atgagtggactcaggcaggagttggggctggcgcagggcattggcttactctcaacgtctttattaggcacgggggtatttgcggttcccgcgctggcggcattggttgccggcaataacagtctttgggcatggccggtgctgatcgtgctggtgtttccggtggcgattgtctttgccatactcgggcggcacttcccgagcgcaggcggcgtagcgcattttgtcggcatggcgtttgggccgcggatggagcgcgtcaccggctggctatttttgtcggtgatacccgttggccttccggcagccctgcatatcgcaaccggcttcggacaggcgctgtttggctggcacgatgaacagctgctgctggctgaactcggtacgctggcgattgtctggtgggtaggctcacgcggggccagctccagcgccaatctgcaaacgctggtcgccgtgttaattgtcgcgctgatcgtcgccatctggtttgcgggtgacattaccgtggcggatattcctttccccgcgattaacgacatcgaccacgcacagcttttcgctgcactatccgtcatgttctggtgtttcgtcggtctggaggcgttcgctcatctggcatccgagtttaaacagcccgagcgtgatttcccccgcgcactgatgattggcctgctgctggcgggtaccgtgtactgggcctgtaccgtactggtgctgcacttcaacgcgttcggtgaagagaaagctgccgccgcgtcgctgccgggcatcgtggtgcagctgtttggcgttaaggccctgtgggtagcctgcgtgattggctatctcgcctgctttgccagcctcaacatctatattcagagcttcgcccggctggtgtggtctcaggcactttataaaccggatagccccctctcacgcctgtcaaagcgtcagcttccggtgaatgcgctgaataccgtactgggctgctgcgtggtgagttccctggccatttatctcctcgacatcaaccttgacgcgctgattgtctacgccaacggtattttcatcatgatctacctgctgtgcatgctggcgggctgtcggttgctgaaaggacgctttaaggcgctggcggctgtcgggtgtgtcctgtgcctgatgctgctggcgatggtgggatggaagagtgtgtacgccatcgtcatgctggcggggctgtgggtgtttttaccgaagcggcaaaagccgcaggcccggtga

SEQ ID NO: 118180 - DNA, 465 bp, Enterobacter cloacae
gtgcgctggataccatttattgctttctttctttatgtttacattgagatttcgattttcatccaggttgcccatgtgctgggcgtcctgctgacgctgattctggtgatcttcacctccgtcatcggcatgtcgctggtgcgcaatcagggtttcaaaaatttcctgttaatgcagcagaagatggccgcaggcgaaagcccggcagccgagatgatcaaaagcgtgtcgctgattattgctggcctgctgctgatcctgcctggtttcttcaccgacttcctcggcctgctgttgctgttgccgccggtgcagaagcatctgaccatgaagctgctgccgcacctgcgtttcagccgtatgccaggcggtggtttcagcaccggcccgggggatacctttgaaggggaatatcagcgtaaggatgagcagcgcgaccggttagatcataaagacgatcggtga

SEQ ID NO: 118181 - DNA, 1437 bp, Enterobacter cloacae
atgttaaacaacattcgtatcgaagaagatttgttgggtaccagggaagttccagcggatgcctactatggtgttcacactctgagagcgattgaaaacttctacatcagcaacagcaaaatcagcgacatccctgaatttgtgcgtggtatggtgatggtaaaaaaagccgcggctctggcgaacaaagagctgcaaaccattcctaaaagcgctgcaaatgcgattatcgccgcgtgcgatgaggtgctgaacaacggcaaatgcatggatcagttcccggtcgacgtctatcagggcggcgcgggcacctccgtcaacatgaacaccaacgaagtgctggcaaacatcggcctggagctgatgggtcatcagaaaggtgaataccagtacctgaacccgaacgaccacgttaacaaatgtcagtccaccaacgacgcctacccaaccggcttccgcatcgcggtgtatgcctctatcgtcaaactggtcgacgcgattaatcagctgggcgatggcttccagcgtaaagccgttgagttccaggacatcctgaaaatgggccgtacccagttgcaggacgcggtgccaatgaccctcggacaggaattccacgcgtttaacgtgctgctgaatgaagagaccaaaaacctgctgcgcacgtccgaactgctgctggaagtgaacctgggcgcaaccgccatcggtacacgcctgaacacgccagatggctatcagcagctggcggtacagaagctggctgaagtgtccaacttgccggttgtgcctgcggaagacctgattgaagctacctcagactgcggcgcctacgtgatggtgcacagcgcactgaaacgtctggcggtgaaactgtccaaaatctgtaacgacctgcgcctgctctcctccggtccgcgcgctggcctgaatgaaatcaacctgccagagttgcaggcgggttcatccatcatgccagctaaagtgaacccggtggtgccagaggtggtgaaccaggtttgcttcaaggttattggtaacgatacgaccgtcaccatggcctcggaagccggtcagctccagctgaacgtgatggagccggtgattggccaggcgatgtttgaatctatccatattctgaccaacgcctgctacaacctgctggaaaaatgcatcaacggcatcaccgcgaataaagaagtgtgtgaaggctacgtctataactccatcggcatcgtcacctacctcaacccgttcatcggccaccacaacggcgatatcgtcgggaagatttgtgccgaaaccggtaagagcgtgcgtgaggtggttctcgagcgaggattgttgaccgaagccgaactggacgatatcttctccgcccagaacctgatgcacccggcatataaagcgaaacgatataccgatgaaagcgaacagtaa

SEQ ID NO: 118182 - DNA, 1302 bp, Enterobacter cloacae
atgtttggagcagaactcgtcatcgtcctgttggcgatttatttgggcgcacgactcgggggtatcggcatcggttttgctggcggtctcggagtgcttgtacttaccctgatctttcagattaaacccggcgcaatcccttttgacgttatcgaaatcatcatggcggttattgctgctatcgcggctatgcaggtcgcaggcggtatggactacctggtgagcctggcggagcgaatgctgcgtcgccatccgaaatacatcaccttccttgccccactggtgacctggtttatgaccattctcgccggtaccggccacaccgctttctccacgctgccggtaatcaccgaagtggcgaaagagcagggtattcgcccgtctcgccctctttctattgccgtggtcgcctcccagattgcgattaccgcctcgcccatttccgcggcggtggtcttcttcgcgggtatccttgagccgatgggcgtaagttacctgacgctgctggcaatctgtattccggtcacgctgattgcggtaatgatcactgccgtactgtgtaacttccttggcgccgagctgaaagacgatccggtttaccaggagcgtctggcaaaaggtgaagtgagcctgcgcggtagccaggtcttcgagctgaagccgcatgcaaaacgctccgtgctgctgttcctgattggtatcgtcgccgtgatgttctacgccaccgccatcagcgatacggtaggtctgatccagaacccggttctgccgcgtaacgaagccattgtggtgtttatgctgaccatcgcgacgctgatcagcatcacctgtaaaatcgacaccagcgaagtgctgaacgccagcaccttcaaatccggtatgagcgcctgcgtgtgcgtgctgggcgtggcgtggctcggcgatacctttgtgaaagcgcacatcagcgatatccagaccgttgcaggcgacctgctgcacaactatccgtggctgctggcagtagtgctgttctttgccgcgacgctgctgtactcccaggctgcgaccaccaaagcgctgatgcctgcggcactgatgctgggcgtaacgccgctgacggcgattgcctcttttgcagcggtttccgccctgttcgttctgcccacctacccaaccctgctggccgcggttgagatggatgacaccggctcaacccgtattggtaaatacgtgtttaaccacgcgttcctgatcccgggcgtggtggcgattacgctctgcgtgatcctcggctttatcatcggcggcattgtgctgtaa

SEQ ID NO: 118183 - DNA, 324 bp, Enterobacter cloacae
gtgaacacgcctgatgctgttgttgtactgtgcaccgcccctgatgaagcttctgcccaggatctggccgccaaagtgttggccgaaaaactggctgcctgtgtcacacttcttcccggcgccacctccctttattactgggaaggcaagctggagcaagagtacgaagtccagatgttgctcaaaaccaacctgacaaaccagcaggcgctcctcgactgcctcaagtctcatcatccataccaaaccccggagctgctggttctgccagtggtccacggcgataacgattatctctcatggctcaacgcttcattacgctga

SEQ ID NO: 118184 - DNA, 1704 bp, Enterobacter cloacae
atggctcaacgcttcattacgctgatcctgctgctgtgcagcacgtcagcttttgccggattgtttgacgcacccggccgttcgaactttattcctgccgaccaggcgttcgttttcgactttcagcaaaaccagcacgatctcagtctcacctggcaggtgaaagagggttactacctctatcgcaagcaggtcagcatcacgccggcaaaggcgaacgtcggcgcattgcagatgcccgctggcgagtggcacgaggatgagttctacggtaagagtgaaatttatcgccagcgcttaagcgtgcccgtcacggtgaatcaggcggataaaggcgccacattaacggtcacctatcagggctgcgccgacgccggattctgttacccacctgaaacaaaggtcgttccgcttagcgaagtgaaagcggcggcctcccctctccccccaggggagagggccagggtgaggggtgaaggcaaagccgcttcagaccttccgttctcagcgctttgggcgttattgattggtatcggcatcgcctttacgccctgcgtgctgcccatgtacccgcttatctctggcatcgtgctgggcggtaaacaacgcctttccactacccgcgcgctgttgctggcctttatctatgtgcagggcatggcgttaacctatacggcgctcggcctcgtggtcgctgctgccggattgcagttccaggccgcccttcagcacccttatgtgcttatcggtctgtcagcggtgtttattctgctggcgctgtcgatgtttggcctgttcaccctgcaactgccctcttccctgcaaacccgtctgacgctaatgagcaaccgtcagcagggtggctctgcgggcggcgtgttcgccatgggtgccatcgccgggctgatttgctccccctgcaccactgcgccgttgagcgccatcctgttatatattgcccagagcggcaacctgtggctcggcggcggcacgctgtacctctacgcgctcggcatgggcctgccgctgatcctgatgacggtgtttggcaatcgtctgctgccgaagagcggcccgtggatggagacggtgaaaaccgcgtttggttttgtcattctggcgctgccggtatttctgctggagcgcatcatcggtgatgtgtggggtacgcgtctttgggcgatgctcggcgtggccttcttcagctgggcgtttatcgtgagtctgggggcgaagaaaccgtggatgcgcctgctacagatccttctgctggcggccgcgctggtgagcgtccgtccactacaggactgggcgtttggcaccccggcaggtcaaacgcaggctcatctgaattttatacagattaagaacgtggatgaccttaaccgcgccctggcgcaggcgaaaggcaaaccggtcatgctcgatctctacgcagactggtgcgtggcctgcaaagagtttgaaaaatacaccttcagcgatccgcaggtacaacacgcgctgagcgataccgttctgctccaggcgaacgttaccgccaacagcgcgcaggataaggctctgctgaagcaacttaatgtgctcgggctgcctaccatcctgttcttcaataaacagggggaagaacagccgacgcaacgtgtaaccgggtttatggacgcgacggcattcaacgcgcatttgcgcaatcgccaaccgtaa

SEQ ID NO: 118185 - DNA, 576 bp, Enterobacter cloacae
gtgcaacgcgaagacgtactgggacaagccctgcaattgcttgagattcaagggatcgccagcaccacgcttgagatggtcgccgaccgtatcgattaccctctggatgaacttaagcgcttctggccggataaagaggcgctgctgtacgatgccctgcgctatctcagccagcaggtggatatctggcgcaggcagctgatgctgaatgaagagctgaccaccgagcaaaagctgctggcgcgctataccgcactgacggagtgtgtaaccaacaaccgttacccaggctgtctgtttatcgccgcctgcacctactatccggatcccgggcaccccatccatcaactggcagatcagcaaaaacgtgccgcgcacgagttcacacacgagctgctgaccacgcttgaagtggatgacccggcaatggtcgcgaagcagatggagctggtgctggaaggttgcctgagccgcatgctggtgaaccgtagccaggcggatgtggatacagcgcaccgtctggcggaagatattttgcggtttgcgcagtgtcgtatgggtggtgctctgacctaa

SEQ ID NO: 118186 - DNA, 591 bp, Enterobacter cloacae
gtgaatttattacccttcctgctgtttgcatttgtcgcctcgattacaccggggccaaccaatattctggtactggctaacagtcagcactttggcgtaaaaaatacggttcctgcgatcctgggcgggtgtattgccgccagcgctattgttctggtttcaggtgctggggcaggagaagtgttacgccagtatccgctgatacgtcaggtaatgagctgggcgggcgtgctgtggctttcctggatgagctggcagctgtttagcgccccggccgcgaatctctcctccagacgccatgtccggtttaccgcgcgggcggcggcgttattacaggttgtaaacccaaaaacgtggatgatggcgctggcagttgtcagcctgtttgctccggcaagcgaccatgcatttcaggatgttgcgctgatggcgctagggtttctggcgatctctgtggcttgtttgttgtgctgggcgtggctggggaaggcggtgaaccggattttccgcaccaccgtggcgatggtgcgatttcagcgcgcgatggcgctgtgcttgtttatttccgcctggacggaaatgctggcttag

SEQ ID NO: 118187 - DNA, 1032 bp, Enterobacter cloacae
atgtctgacaaaaaccattatacgacatgggaagaattgcttgaggagtacttcttcgcccgaaacctgcgcgctgcaacagaatggagctacgcaaaggttgtaaaggggttcctgaaatttacgggggctgacataaccccatcaatggttactcatcatgaagttctaagatggcggcgatatgtactcagagaaaaacaacaatcggcgcagacctggaacaataaaattgcacatctcagggccctctataactatgctatggaaagtggtttattgcctgcgggcaaaaacccttttaacaactgcactgtacagcgggacagaaagaaaaaacggactttaaaccgctctcagctaacccgcctttatctgataatgcagcaggctgaaattgaatccaaccggaaaattttcgcacgtggcgggcggagtgcgctttacccggcttggttctggataaccgtcctggatacgctcagatatacgggaatgaggcaaaatcaactgctgcatattcagctcagggacgtcaatctgacagaaggctatatagatctgcgccttgaggggagtaaaacgcacagggaatggcgcgttcccgttgttaagcagctgcgtttgcggctacagcttcttcttacacgggcaacggaggctggagccgggccaaaagataacctcttcgatgtcagtttttacattgccgggaaaaaagcaaaatttgacagaaatgatgtgacagtgatgcatcaaaagatccgctccttttttcgccgtctgtcaaaggaatgtggttttgccgtttcgccgcaccgtttcagacataccctggctacagaactgatgaaagcaccggaaaggaatcttcagctggttaaagatttactgggtcatcgtagcgtaagcacaacaatggaatatgtggaactcaagatggacattgtgggaaaaacactggaagaagaattgtccctgcacacagatctctgtgtagaaagggaattacaactattgacacaaaactga

SEQ ID NO: 118188 - DNA, 1620 bp, Enterobacter cloacae
atgcgcgacagaatcaggaccctgaggtttctgttttcaaaaggtgaaccggaaccagtacatcatgtatccgttgtcacacctgccggctaccacactccgcgtacggtcgatacgctgtgccgtagtccgttaagaaaaacctgcctgcaacaaatatgggaaaacagctcacttccggcggatgtttatcaccggctttatataacgccaatgcatggcttactggccagggtacagaatgtgccggcaacacagcagggaaagtggtcgcagtcagacggcttcggggaccttacgctgcagttcacaacctgtgcggtcagactggctaaaggatacatgtttccacccggcgctgcgccagaagagcaggcagagcaaaacgtgatgtggaatgcggtcattttctggtctgcactgttctggcatttgccgctcctggcgtctctggagggtgagttgcttgacggtaaacgctggcttccgggaataaccgttccggactcgccttatcgatttcgcttccgtgaagctgacaactcttcagcttttgcagcgctggcagccggacaacttatgccagcagaggctacaggatggctggcagaaaatcccgaagctctgggtaatcttgccggttccttatggaatcagcatccggcgatgccacttatcagaagcttaatgaagcaagctgccgaaaaggtggaatcgccttcgctggaggtatccggggcaaatgagaaagttaacaccctcatagagccggctctttcagttccgcaaacgccgtctgatcaagagattgaattagaaccgtcagaagaaacaacactgaaaactacatcgccagaagctgcagatttgcagggaattcaactcgcatcttctattgcaccggtgccgatggctgatggcagcaatctcgtcagcaatgaaaaggcaggcgagagtacggaatgtgatccaaacgaaacagagaaggctgatacagagatgctgctaagccttttcagtgccattgaagagcctgatatgaccgggactgaagcatgtgatgaagagtcttcaatcagtacgagaacagaaaatgagccagaattttccccccttaatgaactacttccagatgctgataagcctgagataaatcagacagtagcagaagactctttccctgaacacgctgtagaggataacatccctttacacagcattaacattgacgcacaaaaaacagtgataaaaaaacagactggcactgaatttctcaggtggctttctgaaggacttaagagcaagcgaattgacattaatcagcctgattcgagggcgcatgcagttgcagggttcatctttctcagggttccggacatattttatctttacatcagagaaagcggagcagagctaagcagggataccatacaaatggaatttgagaagctgcatattcacaaggtgcgccggggagagcgttttattaaagcgaaactgtaccactctcctggcaaagaaggcacgtttaaacctgtaagtggatatcttgtcaagactacacaccttttcagaggagcgtcttcccctgaagacagcgggcttctgtctttcctgtga

SEQ ID NO: 118189 - DNA, 1509 bp, Enterobacter cloacae
atgacctggaaaacaacagctgaacaaaacgccatcatcgaatggaagggtaatcatcttgtggtaaatgcgtttgcaggcacaggaaaaacctccacgttagtgaactacgctgaagccaacccggaaagtaagatgctttacctcgcctataatcgcgctgtgcgggatgaggctgaacgcaaattcccatttaacgtagagtgtaaaacgtcgcatcagcttgcatgggcccgtttcggcaggcattttcgtgaccggctgacagccagtctgcgcattacggatgtggccagaaagctcaatacccgccactggccgctggcgcggctggcgctcagcgggctgaacatgttcctctgcagtgctgatcccgagccgggaatgatacatctgccgtctgaggatgatcgccacggtctcgatgcaggcaaaattctgggggcaatccaaatcctctggtatgaaatgagccgtactgattcagtctttcccgtcacgcacgacacctaccttaaactgttccagctctctcatcctgacctgtcaaaacgctgggacaccatcctcttcgacgaggcacaggacgccaatccggtgaccagtgtgtttgtactaaatcagccctgccgggtcatcctggtcggcgaccgctaccagcaaatttaccggtttcgcggagcggataacgcgctcaatgcccctcagctggcgcaggcagacagattgtggctgacagcgagttttcggtttggtcctgaggtcgcgcggatggccaacatcctgctggagcgtgccggagaagaaaagcgggtgacgggtaacggggggcaggacgccgtcgtcagcagcatcccggatgaggctgagcacgtagctgtactgagccggacggtgtctggcgtgattggcagcgccttgacggcaagcctcatggaaaaaaaagtcttctgggtcggagggattgaaggctacaaaacggaggagctggaagacctgtactggttctccgccgatatgcctgtaaagatgcagtccccgcgcctgagccgggactaccgggattttgacgagtactgctcgatagccaaagccacgcaggacgtggagatgaaccaggctattcgcctgctcgatgactttttcccgctccctcaaaagctggccattatgcgccgtcaggtagtcactcatgaaaaagacgctcaggtcacggtttcaaccgcacaccgcagcaaagggctggaatggccggtggtaatgctgagtgaggattttactgacattaccgacccgcttctttcggaggatgagcggcaggatgagactaacctgctgtacgtggctgtcacccgggccagaagaacgcttgtgcttaacgagctgatgcgctggctgagcgatgaagtcggaaaaaaccgcgagacgacgtacgaaaccgtaccgtccggaaatggagagagcgccgacaggcacgaagaaacgggaaaaacttctgagagtgagtaa

SEQ ID NO: 118190 - DNA, 261 bp, Enterobacter cloacae
atgaaaaataaacgcttagcttcaaaagcgatcatgtcggttttagcagaaatggatcgccaggatgaaaaatggggtgctaaccgtgatttggatccctttttatgggctgcgattcttggtgaggaagtaggtgaatttaaccagtcaattttacatgatttctacggtggtaagcatgccggcacagcccgagaggagatggtacaaatagctgctgtagccatgcaaattattgaattttatgatagaaaaagctga

SEQ ID NO: 118191 - DNA, 1083 bp, Enterobacter cloacae
atgattgttactcaggactttaacccagactgggtctccccgcccggagacacgatcatcgatctgatggatgaacacggtttgtctgatgagcagctaagcagaaaaatgggacttcccctgcctaaaggtcaaaagctgcttaagggtgaaatttgccttgatgaagttattgccacaaaattacaggatatttttaacgtctccatttccttctggttaaaaagggaaatggcttatcggtcccaagtagcttacatcaataatgttaatgatgaatggttagcctctcttcccgttaaagatatgacaaaactcgggtggattgctaaatgcagttctaaagagttaaagttaaaaaaatgcctagaattttttgatattaactctgtcagagatttttacgataagataaatactgaagctccacttgttgcattcagaaaatccttaagctacaagacggaacctatggctgatttagcttggctaacacgagctgcacaaatcagtaagcaacgggatcatgtagcctggtctaaagaaaaattaaaatctctaatcccagagataagaaaactaacgacagaacctaaattgagtacgtttattcctgcgttagaacaaaaacttgcaagtgcgggtgtatcttttgttgttttgcctactccagctggatgcagagcaagcggggcaacttgcttttttgaatacaacaaaccaactgtcattgttagcttcagatatctgactgatgaccatttttggtttacactcttccatgagctagggcatttaatcttacatgatgaactgagcgtgcggcttgaaggagatatcgatgtttctaataaagatgaacaagaggccaatcgcttcgctgcagacacgcttataccttgcgaattccgaaagcaattggaaaattgtagtgtaaagaactggaaacctatattgcgtatagcaagaaagatcggagtctctaaagggatttgcttaggttatcttcagcatagagaaatcatcccttatactcaccttaataagtttaaggtgagatataaaaaagaagatatcatttaa

SEQ ID NO: 118192 - DNA, 966 bp, Enterobacter cloacae
atgagctatgaaaataccaatccgaggcgtcatgttgctgttccagatattatcaaaaaacttgaatatttctctgaacatgattttttgctaaaaggacttaaaagtgaaatgcattttgttacttttgcaaaacaaatcgctgacagtattagaaggattgaatatgtagaaaagatttctccttctcataaaaaaattcatgaacttagagcagatccgaattctgaaatatttgacccattgcgtgcagcatatatacatctaaataagggggagtacgatgaagcatgctggaatgtttttttggctactcactttggcaaaaatatatctacgaaatggcagctgtgtcgtgatatttatagcggattaggaacggaaatatggagctggtataagataacagatgattttgtgggttttgaaaaatggtataacgatgctagtcaagaattagtcagaaatagcactctaagacaatatggcaatcatagaaagtatgagacactaaaggctaattcaaaacgttcaataccaaaagtatttaggtcttatttggactttataggaaatacgaaaagccatgaagcacgattcgaggaggcaaaaaccatagctaaaacacctgaagatctcttcagtctgttatattcaaatatgaattcagtgctttctttcggcagaactgcaaaatttgattatcttacaatgctaaaaaaaatatcattactcgatgttgaaccagggcatttattcttgcgcggatcgactgggcctgtaaaaggttgtaggctcttgtttaacggagataaattgaatggggatagagtggatttattagacgagaaattgaaagctcttgcggaaatattggatattccttatttaaaaatgcaagtgcttgaggattctttatgtaactggcaaaaatccccaagcgagtatttatatttcggtggttaa

SEQ ID NO: 118193 - DNA, 975 bp, Enterobacter cloacae
atgcctattttaatcaaagaagattgcattgatgatttgatacattctctacatgcggaaatcttagaaaacggttcgttagtttctccgacaaagggagaaaactacgaaatattaggggcttaccttgttcttaccaatcccatatccagaattagtagaactgagtcacgcagtaaaataatcagttgcttaggtgagctgctatggtatttttctggacaaaatgaattaggttttattaagcattatattcctaattatcatgaatttgctgaggttgatgataaagtacatggtggttatggcccacgtataatgaatatgcatgggaatattaaccagttaaagaatatcattaatacccttaaaaaaaagaactcaacaagaagaacggtaatccaactttttgatgcaaaggatttggtccctgaagataaaaatatagaagagtataaggatataccatgcacaatttcacttcagttcattataagagaaaataaactagagttatttgtgaatatgcgttccaatgatgcttttaagggttttacacatgatgtatttgccttcactatgttacaggagtttgtagccagattgctaaaatgcgaactcggtaattatcaccattatgttgcgagcatgcatatttacaagagtgatgttgataaaataaaaaaccttcaaaatgaaggtttcatgagtacaaagccgctcatgagagaaatgcctaatataagtgggctcgattttattgacaaaatcatgaccatcgagaagttgttaagggaagacaagatgctcgatattttttcactggatattgatgattattggaaggatctatttagaataataaagatttatttcttactaaagtcaaaaaatcaagtggataaaatttttgccgactatgaaataaagcagctttctaatacaaattatagacttttctttgagagtagataa

SEQ ID NO: 118194 - DNA, 933 bp, Enterobacter cloacae
atgtccgaatggtgtcataaccgcctggaaatcaccggtaaatccgtctgcatcgatgtcatgctgcagtggataaacggcactgacgtatcgcgtcaccgccacgccgtgcagcagagcataaagctgtttctggccggcgcggcggggatactcaagccggtgcggaccacgtcgtatccgccctgtcaggggctggtccgtgcaggcacagggctttccactgcggccaatcaggcgtttgaaagctggctgatattgttgctgaaggatgctgtcctcgatgcggaaactatcagggccattgaccggctgtatcaccagtcaggtcttggtgcgctgaaatggaagaatattcccgacccggcacgtgaggttatggcgaagctgattgccagacagtacaccgactggtttggtctggtcagcgccggcgatgagtctgatgccgcaactgcctgggagcggctcagccagtatcctgaacgctcccagccctgcgatatgctggccgtcatacccacgcggctggcagcagagctgaacggtgccggtgggctgatgtccggtgtgtcgaccacaaccagcctctactgccggcagtacggcatggagtggccggccgggcacaatgtcaactggcagcgccatacgctaaacagtcttacgctgcagatggatacgccctggctcccaccgtcaggtgaggttgtcggggaaatttcagcggtgtttgactgcgaggtgcgtcacagctacagcgagcccgtgagcgggctcagcggttacgactgctatgacggcggtgaacatgttgacggacacaaaggcgcgtccggcgcgcctcaacccggacaggtgctttatctcgtcagcgatgagccggcgttaccggctcaggaagcagtatcttatcgtgaggtccgggggtaa

SEQ ID NO: 118195 - DNA, 987 bp, Enterobacter cloacae
atgaaaaaaacgacttcacacaaggcggcccgccgtccggcaaaacagactgacctttatcgccagatcaccgaccgcattgttgtcgcgctggaaaacggcgtcgcgccctggcgtaagccgtggcgcgcggcttccggcagcggtctggccggtctgcccctgaatgccacaaccggacgtcactacagcggcgtgaatgtcctgcttctctggatgtcagcggaagagcagggtttccgcaataaccgctggatgacttaccggcaggcgcagcaggctggcgggcaggtgtgtaagggagagaaagccaccctggcggtggtttataaggactggacgaagcaggcggaggatcgcgaaggcaaccgcctttatgacagtgacggtaaaccgctgatggaaactgtgccgatgctcaaacccctgcagctgttcaacgctgagcagtgtgaggggttgccggcagaggttgcggcttctcctgaacagcccccgacggtggatgaggacggcatactctgtccggacgtgatgaacagggtgatccggatgtttaacgccacaggggttaaacaccggatgctgcctcagaaccgggcttattaccgcccgctgacggatgaaattgtgatgccggtggctgagcagttttttacggaggcggactgctggtccacgctgttgcatgagctggtacacagtaccggtcatgcgaagcgacttaaccgggaggggataacctcctcatcccgcaagttcggggatccggtgtatgcctttgaggagctcatcgccgaaatgggcagtgcgtttttgtgtgcccaactcggggtgttcggtgaggttcagcacgacagctatgtggaccactggctgaaggtgctgaaatctgacaaaaaggccctgttccgcgcctgccggcatgcccgggaagcgtcggaatatctgctggcactgcctgaaagtcaggctgtggcggcgtaa

SEQ ID NO: 118196 - DNA, 348 bp, Enterobacter cloacae
atgggactggatatttttctctacagccagcaccggcagatcgtcgcagtaccggcaccgtatcatccggtgtgtgaactgagccgcgatttttcactgattacctgggtggataagcatgtcggtgaggtggaaaacgcgacctgtctggaactgtcacgcgagcatattcagcaactgaaagagaggctggactgtgcgattgcgacatttacagagggtaatgaggataatccgcttcttcaacgccggctgcagtacgttttcaccctgcgtgacaggctggaaagcctgctcagtgattttgactttgaacatgaatacctgtggttttatgccgcatggtaa

SEQ ID NO: 118197 - DNA, 549 bp, Enterobacter cloacae
atgctttttttcgacaataaagacctgacgaacgtcctgctgaccgcccgcatgcagggaggccagcttcatctggcaaaggatgagggtgtttatctgatgccggccaccggtgcctggcagggcaacgatccggtgccgcgtattgcgtatgccgcagggtgtcaccctcagaaaaatgaggactggtacgacacggcgcgcctgcttgccggcggcgatgatttcattgaatcactgacgataagcgacgcgatcgccacctctgtactgtccggcaggacggacctgaggatcctgattaccgacacacagatacaggtgctcaccgcagcgactgaccgggtgaaagtggcgcagtatcgccagaaggccgatcagcttttggcgagtgcagtctgtcacttcagtgcctgtgtcgggcctgatgaattctgccgctggcgtgaaaacgccgtgcgtctgctgacgcaggcggccttcatcagctgtaagcgggcgaagcctgaagatcatcaaacctttctgaacgcctgtggcaggctgtag

SEQ ID NO: 118198 - DNA, 648 bp, Enterobacter cloacae
atgaaagacctgtcttcttccccggcttccatgtcggttgtctacaccatcgagcacgtcagcacggttccgttgcgtcactggcatgctttcgttctggccgtaacagaaaccttctggcaattgccggtgcgtctgcgtccgggaaatatgtatctgccgtcgcttaaccgcgcggctgacctgtttccggttgctgatgtcatggcgttctgtggcgattcaggcggctgtttctggccggtcaacatgaccattgagcgggagcgcagccacaatacgctgagtatccaggagctggattttcagcatcagccctgcgatttctttgcgcgtgttgtgatggtcctgctgcataacctgtgtccggacagcttccggatacattcttcagacgagggtcgcagctgggcgttaccgttacgctggattgaacaacatctcggcctgcctgagcaaccgacgctgagcgcgcctcagccggtactaaaaacaccggtaggcgagggcgcgtttgattccctgctgctgcagctgctctccggtggtgagcgggtgctgagcaatgaggactggaacgcattcgtgctggcggaattccatttgtacgaactgaagcgggtcgcggaaacatctgactcgttttaa

SEQ ID NO: 118199 - DNA, 366 bp, Enterobacter cloacae
atgcacacagacgtttatacgcttaaaactccactggacacgctcagctggctttgcctgcttgagagtgaactcctgagcatcagggcatttcagcgtctcgatctacatacggaccgggatgaaccgaatgaactgacgtttctggaagattccatcattgggaccggcacagcttatggctggtttgtctttttacttggggaaggcgatattccgcctttgcctgatacgtctaaaaatctgctcttcacgctggacgagctgggaaaagaaattaaccggcccttctgggagaaggccgtggatgaaggtatccaggatgcccggtgtgatcgggctatagcggctctcgaacggatgtaa

SEQ ID NO: 118200 - DNA, 375 bp, Enterobacter cloacae
atgactgaagcactgcacgatgtcactttccgtattctgtcgatgtctgagacgcgacgggatgtatgtcccgctcagtatggcctcgtaagtggcgttttcatccggggcgaaatcctcagagataacgtctcctgtggcgaacaggtttttgtcgcaccgctcggtgattgtgatccagctgaccccgaactctgtgtctggtgtcagtattacggatattcttcccgggttaaggccggcgacatactggatggtgtggccgtttctggcataaatctcaccgatccactgtcgttagctgtgctgcaacgcctccgctttaatcctgaatatgtgtatcaggagcaatctgattcatatgcactgaactga

SEQ ID NO: 118201 - DNA, 837 bp, Enterobacter cloacae
atggtcagccggaccatgggcgtgtcgcgtgcgcaactgtcactgcggattaaccgttctgccgactggcaggacaggcgctgtaaccggcgtaatgaagaagcagacgcagaaatactgtcggctatcctcaacattatcagcgatatgccgagttatggttatcgacgcgtgtggggcatcctgcgcaagcaacgtcgcacagagggacagccacctgtgaatgccaaacggctttacaggataatgagcgagcataacctgttgttgttgcatcacaaaccagagcgaccgaagcgtgaacataagggcaagatagcggtggcagaaagcgatatgcgctggtgttcagatggcttcgagttcggctgcgacaacggcgaaaaactgcgggtaacgttcgcgctggactgctgcgaccgtgaggccatagactgggcagcaagcacgggaggctatgacagttcgaccgtgcaggatgtgatgctgaggtcggtggaaaagcgcttcggcgacaggctgcccgacacagcggtgcagtggctgacggacaacggttcagcatataccgcgcatgaaacgcggaggttcgccaaagagctgaatctggagccatgtacaacagcggtgagcagcccgcagagcaatggcatggccgaacggttcgtgaagacgatgaaggaagactatatcgcgttcatgccgaaaccggatgtgagaacagccctgcgaaaccttgcagcggcgttcacgcattacaatgaaaatcacccgcatagtgcgctgggatatcactctccgagagaataccggcggcagcgggcatcgttaacttaa

SEQ ID NO: 118202 - DNA, 396 bp, Enterobacter cloacae
atgtctaacactaacaccaattttgagatgaccgggatcctgttagggcaagaagtccgtaaacgtaaaactcctcaggagaagatcgccattatccagcagacgatggagccgggtatgaatgtctcccatgtcgcccgcctgcatggtatccagcccagcctgctgtttaagtggaagaagcaatatcaggaaggcagcctcaccgccgttgcggctggagaggaagtcgttcctgcttctgagcttactgctgctctgaagcaggtccgggagcttcagcgccttctgggcaagaagacgatggaagttgagatcctgaaagaagccgtggagtacggtcagtcgcgaaaatggatagcgcacgcgcccttgttgccaaaggacggggaatag

SEQ ID NO: 118203 - DNA, 321 bp, Enterobacter cloacae
atgtctgtcatctcttctgcggttttccctgaacatctccttactcagcttcagcagtctgctgacgcagttgtccggagattgaaatctttcatttatctgcatcgcaacagcagctggtatgtcaacggctcgggcaattatgccgtccgtgcgcatatctcttctgtcaaagatcagggcgttaacgtctttcttaccgttcgtacaggttgccaccgcgctgagtatgtatttcaccgcctgccggtttcctttcctgagggaatcacaggtcgtcgaaacgcatacctctatgcctgtcgtgatgtagccccctga

SEQ ID NO: 118204 - DNA, 198 bp, Enterobacter cloacae
atgtatatgcaggcagccctggatcatctccgggcgcaaggtgaaacactgaatgatgaagatatcgcacgcctctccccgctttgccacggacatatcaatatgctcggccattattccttcacgctggcagaactggtgaccaaaggacatctgagaccattaaaagaggcgtcagaggtagaaaacgttgcttaa

SEQ ID NO: 118205 - DNA, 900 bp, Enterobacter cloacae
atgtccagattcagtaaacagctgtgcaaacaacttgtcacacttgctcgtcagggacggggaagttataaaactgtggctgaccgctcaagaattgcagaacgtttttctgaacgtctgtctgaactgaatattcagattagggacgtaaaacatatcaaaacttcccatattgaaaagtatattgagagcaggaaggcagacagtttgtctctccggacgttacagaatgagatgtctgctatccgctctgttttattatcagcagggagaaataaactggccgatcccaatcataccagcctgagtaatcaggccctgggaatttctggtgctaaccgggatggaactaaactccctattacagatgaaaaacttaatgcggttgtgaattttgcgcttaaaaaagatgaaggtgttgcgctcgcggtacaactttcccgatatcttggattgagaacggaagaaaccgtgcagtccgcaaagtcgttaaaaacatggaagcagtcattgattaacaataatgagcgtgtccgtgttgttttcgggacgaaaggcgggcggccgagagaaacaacagttttcaatcgtgaaaaagttttatcaattctggataaggcaattcattatgtcagtgaacataacggaaagctgattgataaaccctctctgcataccgcaattgatcgttaccgaaatattgtaagagaggcagggatgaatggtaaaaatgcgccgcacagtttacgttatgcttactcacgggatgctgtaaatcatcatattaaaaatggaatgagtcgagacgaagccgaggcattagtttcaatggacctaggccacggagatggccgggggcggtatatcaaacaggtttattttcgtggggaaacagaatag

SEQ ID NO: 118206 - DNA, 306 bp, Enterobacter cloacae
atgaaagtggttgatatggatattttaaaacaacgccttatgattctgattttcggattatctaactttttattcttttatttattattaacctctattgatctaaatatattcttaatgactaggcttgatttctcaatattacatttgcagataattaagcctctgatgatgcttttaatttttttatccataactcacttattaaataacacctcactctaccaaggattaacctggggaaaacctaacaagcagtcatttgtttttttcttgctcataattattgcttacactgcttcatag

SEQ ID NO: 118207 - DNA, 549 bp, Enterobacter cloacae
gtgaggagtcttaccgccattttaataattcctgttcttgtcacagcctgtagcatgcaggaaatagcagatacaaataagaaaatcagtgatggtgcttcaggtataatgaactctttgaggggaaactctaacccatcaactgatgttacgacaccaatgcatttacctcagtcattaaaaaaagaatccaagtctaaaaattatactgtagctgttgatgtagatactgctgctgccagaataaaaagacattacaagtttatgtcaagtcaggagctggatagtttacggaatagctctaatgactgggcatggaaagcggccgctgaagatgatgcacatccagtttgggaggcaatacctggtagctattataaaatgggatctgactggaatgataacgatcatttagatgtagaaattgaaaaaaacgggagtgggagtaaactctatataacatattcatcggcatctgcagaaaggctatcgggttctggcgtacagaagttgatgaaggaaattcattccgtggctataggtgagtga

SEQ ID NO: 118208 - DNA, 1272 bp, Enterobacter cloacae
atgtttgcgctggtcgatgtgaattctttttatgcttcatgcgaaaccgttttcaggccagacctccgtggcaaacctgtggttgtactatccaataatgatggatgcataatagcccgttcagcagctgcgaagtcacttgggctaaaaatgggtgacccttggttcaaggttggccgcgaggcggaaagaagaggcgttgttgccttttccagtaattacagcctttatgctgacatgtctgacagagtgatgactattttgcagatgttagctccccgcgtagaaatatacagtattgatgaagccttttgcgatcttacgggagtaagtggtcttttatcacttgaggtttttggccatcagatacgtgagcagatcaggcgcaggacacaccttaccgtgggggtggggataggcccaacgaaaactctggctaaactggcccaatatgcaagtaaacgctggccagctacgcgaggagtagttgacctgagcaatatagggcgacagcgaaagttaatggccttggtgccagtcgaagaggtctggggtattggccgtcggctcggtaaaaaattgcagttgatggggattaacaatgcactccagctgtctgagctgtctccttcatttattcgtaagcaattttcagtggttgttgaacgaacagtaagagaactcaacggcacgccctgcctgggccttgaagagtttacagctccaaaggagcaaatcatatgctcccgctcctttggagaaaaacctacagatgaattcagcatccatcaggccgtctgcgctcatgccgaacgtgcagcagaaaagttacgcgcagagcaccagttttgtaaacgcgtagcggtattcatcagtaccagtccctttgcagagaatgaatcgttctataaaaatcaggctgtaacggagcttgctgttccggcccgtgattcccgggatatcatcaaggcggctgtaagagctcttgaaacaatattcatcccggggcatcgttatcaacgcgcaggtgtaattctcaccgattttcgcagcgcggcagtaccacaacttaccctgttcggtgaccttcagcctcatcgtaatagcgatgaattaatgacactcatagacagcattaacagctctggtaagggttcagtctggtttgcagggcagggcattaaaagtgatgccacaggctggaagatgcgaagagaaagactttcgcccgcttttacaaccagattggatgatattgtcagagtaaggtaa

SEQ ID NO: 118209 - DNA, 516 bp, Enterobacter cloacae
atgccaattcctttagaacagacgatgtgttgggataaaatttcgcagaaaaattcagcaaacacaccggttttgatgatggcggcgatcgccagacttacaggtagcaatcaatcactggcatgcgttccgttgtttggtgatggggtttcatgtggtttcccttctccagcacaggattatgtcgaaaaacgtctttccctcgatgacctttgcatccgctatccggaaagtacctatctggtgcgagcagagggggattcgatgcttaatgccgggattaaagacggtgatttactaatagtggagtgtattcgtgaggcaaagcacggtgacattgtcattgcagccgtagatggggagtttacctgtaagaggcttcagctcttgccatcaccagctctggtcccggctaatccagcttattcttcaatcccccttactgaggatatagaaacagtggtctttggtgtggtacgtcatctcgttcactccttcaaattccgggatgcctga

SEQ ID NO: 118210 - DNA, 1521 bp, Enterobacter cloacae
atgacaacaaacagctatcttgagtattttctcacgctgctcggctgggtgatcaataacggcctgtggaatgtcctgctgagcaccgggctttttgtcctgccgctggcgtttaaggtggtggggatctggctgaaggtccgtgaagagggggaggatgaaggcaacaaggggatgctgtcgctgccccgtatcgagaacgcgctgtatgccggtttcctggtgatgattgcctgctgcgtaccgctgattaatgtcagcctcagtacgatgcagtacgacacaacccgggcaaagagcggtggtgtgtggacgccaaaagcgccggatgaaagcggctatgccggcgtggtcaccagtctcaacgaccagacggctgctgcaccggtatggtgggtgctgattcataaactctcaaaaggggtaacccaggcggccgtggcgaccattccctgccgccctgacatgcgccagatccgctttgaagtgcagcatacgcgtatcgacaacaaagcgctggcgcaggagctgcaggacttcaccaacgactgctattcggttgcgttgtatctgtggaagcaacaggatcagggccagacaaaggacaaaaccacgctgcgtgatatcgaatggattggcagcagtacattcctgagccggtattatccttcgttgcagtccaaactgccccgggctgcgttcccatggaccgacagccgggacagcggccgacccaataccggaagaggaggctatcccacctgcagcgaatggtggagcagtgcggataccggtctgaaagcccgcgtgaaggaccaggctgatccggatatgtggctgcgtatctcggccgcaatgaaaatgtcaggctttaacgacagtgactatcaggaagccgtcatccgtcgtctggtcagcccggaaagcctgacggtctcacagaatggtcacgtgtatgccggctatggaggtaacgccgattttaccctggataatgcagcggcacgcgtggcgtccgtcgccgggacttccctcggcagtctggccgcgttcccggcgttcgatgcgatgcggcaggcgctgccaatggtgcaggctatcctgctgatggcaatatatgtcatgctaccgctgattctggcatttgcggcctacgaattcaaaaccgttattacgttgacctttgttatgtttgctcttaacttcctgacattctggtgggaactggcgcgctggctcgacagctggctgttaaccgcgttgtacagttcggatacacacagtcggttcaatatggcgggactacagaacagtaccgatgaccttattatgaatctggttatgggcactatgtttcttgtacttcctgccgtttggttaggggcattatcatgggcaggagttaccatcgggaatgctttaagctcagcatatcagcaaggaacagcaaaagctgaaagttctggaggtaagttgggagaggcaggagctaatgctgttgcaaataaagctatgaagtaa

SEQ ID NO: 118211 - DNA, 339 bp, Enterobacter cloacae
atgcgtaataaaacgactgtcaggaaagtccttacccgtgccggcatcttcctcgcctgcatggcgctgttcatggtggtctcactgatgatggctgacaccgccatgaaacatccgactgaagctgctgcattccggagctggatgcagtcgacgcgttacggctggctgatgtggcgactggcgctgtatgcgctggttgcctggggcctctggaaaatccggcatgcgccgggcttccgggaggcataccggcggccgctgctgcgcatcagtgtggtcagtgtgctttttatcgcgttgtgtgagtacgcgatgtttaccggtccgggagcctga

SEQ ID NO: 118212 - DNA, 1476 bp, Enterobacter cloacae
atgaggaaaaccgtgaaaaaatcaccttcattttcagccgttcgcgtaagcctgctgctgaccggctccctgctgactgtcctcccgggcgcgcacgcggccgatgatgacaataccattctcggtatgtccctgccgcaggtgaacaacagcgccatcggttacggcaagtccgtcgatggtgcggtatcggacaaactgttctacaccctcgggggcgggtcggtcatttcccagccggccacgcgcggcaatatgcagaagctggggctgaataccggctggagcagtgacctgatgtgcggcaactttgatctgaaaaccaccgtcggcaaccagctcaacggcgtcacatccggctttaaaaacctgatgggcgacgtgattcagggggccaccggcgcggtggccagtctgccggcgatggtcattcagcgggccaaccccggtctgtatgacatgctcaccaacggcgttcttcaggccaatgtgtcattcgacaaggcgcagctcaactgccagaacatggcgaaaaagatgatggacttcagcgacagcagtaactggacgcagcaggccatgatggatgaatacaagtctgttgtgaacagcggagatactgatgcggttcgtgcagatgaggcggggcggaaagtcaccggcacgtcgggcaacaactggattggtggtcagaaacgtgggggggcggggcagcccgccatccgtgtcacccatgaccttgttgctgccggctacaacatgatgaacggtttacctgtcaccgctaattcgactgtcggcgaaagcagctgtaacggtggcgcatgctctaaattcggcagcgcggaagaggcggcggccatgaccgtgaaggtgctgggcgatcgttcgatgcgcacctgtgccaacgcgagcgaatgtaccagcggtgatgcggatgaccagcccggtacgaccgttgccggcaccggctttgccccactgctggaggaggcaaccaaagccaacgctgagcagctggtcaggctcgtcaacggtacggaaaagcccacggccgcgaatctggcgaagctgaaaacaggcggactgccggtgacggccggcgtgattaaagccctgcagcgtgatccggataatgctgccctgaccgcccgccttgcaggcgaactggccatgtctgacacggtggaaacggcgctgctgatgcgtcgcatgatggttaccggtatgtcggagccgaatgccgctgcccagccaaaggccattgataccgccagccagcgtattgaggcgctggatcgggaaattgcggcgctgaaaaacgagatggagatgaagcgtgaactgtcacgtaattcggtgctgaccattatcgacagggagaaccagcgcgtcgaaaccaacccgcagacccagtctgatgacaataccgacagtcgcttcaaccagatggcagcgccgcagtcggctgaatga

SEQ ID NO: 118213 - DNA, 993 bp, Enterobacter cloacae
gtgaatacaaaaccttcccgcatcagaaccacggtgtgctcgctggcggttgccacggtgctgggtacggcaaccgcgccggcagctgttgcggcacttaacactgcgcagattattgccagcgccgtgtcgcaaaactgtataagctggcgtgtgagtggcatctgttactggctgttctgcaccccctttggctgcaaagtgcgcacgtcggtcaaggtcacccacttcatcccacaggcagtcgtttcgacctatgtcgcaccgggcggcaacccgtggcaggaaatggcgtttgtcagccagaccgccggcgggctggaaagtgccgtgaccagcgggctttccggtgtttctgccggaggagccaatccggccgacatgaaaaatcccggccagcgcaagtccgccgttcgtttcaagtatgccgatgcgattggccacccggccacctccctgattggcggcagtattccgggctattcctgtgataccgcagccaccccgttaatgccttacttcctgagtacgctggattcggcggcctggcgcacgggcgtgccggagtccctgtatccggaagcgcttgtgcccggccagcgggaaatcggcagtcaggcagcggcgaacatgtggggcaacgtctatccccgttcggggtttatcagccagaccgatgatgacaaagcctctgccgtggtggcacagcgtgtggcagacattatcacccgcgccggccagccgcatgtgtatcaggtgcttaagggcaaccgccatgacgggtactggccaccgggcgaggtcacggaaaacaccggcacgcaaaatcacaaatggcagcggctggctccccacatgactcagtcatgtgccgtcttcccggacgggggccacaccgccgcgagcgataacaatgaagcctttgcgctctggcagccctacagctgctgcaaaaagcgcgggcagaaatttctgggcagcactgatatctga

SEQ ID NO: 118214 - DNA, 399 bp, Enterobacter cloacae
atgaaactgacctctcttgttttcctgccggctctgctgccggcatccgtactggccggcacggtcatcttcaccgacagtcagcatctgccggcaaatctgccgccggacgtgccggtggtccttcttgatggtcctgaccaactgcaggccgagatgttcggggaactgcctgcagacccgcagcaggccgaagcacaggtcaggcaggttatggcatcatctgcctggcaacaaaaacagctgcagctgaatgactcctatcgccaggtggtccgggcctgggaactgggcattaaaaaagtgccggccgtggtgtttgatgaccgcgatgtggtgtacggcaccacggatgttgacgtggccacttccctgcgtaaccggggaggtggtcagtga

SEQ ID NO: 118215 - DNA, 744 bp, Enterobacter cloacae
atggcacctacactgatagaatcctacactaaagatttaagagagtggcctcatactggagccactctctttgttcgttctggctacctccttgcctccacctcccttttcaaagtttcagagcatgaaatacttgctcctgaagatgacattattcgatatattcttattgagcgtgtgggcgcacgcatcggggatgtagagttgagcaacctcattttagatcatgaagatgatggtttggatgaacaaagcaccattcaggagctttttcgcgccgggattattgatcagacccagaatgtcaccgctggtcgggtagggcttcgaaactacagctttgtagaggacggtcagcgcatagactgctttcaagtcgcaggggcatacattcaacccaaaagccatcgcaagggcatcatgagcaggacttaccttttcttgcttaactggtatgagcatttggtttgtgatgatatgcagaccatagctggcgcgcaaatttgggctggcccgatggttcgtgctggcgaggtgcggatctacaacgagaagggtgaatcgtttgaagatgttcttggtgagaaggggattggcagacataccggtttcttaccatggaataaagggcgtatgtttgacacatctccttgggacccgaataaacttcagactacggtacaaaaattcattgtactgatcatatcccgcgactcctgccagagaattggtttcatgacctga

SEQ ID NO: 118216 - DNA, 396 bp, Enterobacter cloacae
atgcacgacgtactgaacgaaaagcgttcaattcagacaattcgtgatcataccagcatcattgccacgcacgccttcaagcagcatttgctccaggtgcgcactcttgacaatgtaggcatggctgcgcctgaagactttcacttcattgtcactttcaaggatgatgtggacaacgctgatgccacagttaagccgctagcagaagccgttctgctcggtgatcgcgtccgtttcatcgttaaacctgcaaaacagtacccagagctgactaaagtaatggccggctttgttgaggttattgaacattctattcgtcgtttctttgatactaatggtagaatcataagcaccagaaaagttaatggttctgctgagaaatggcacctacactga

SEQ ID NO: 118217 - DNA, 378 bp, Enterobacter cloacae
atgatgacactgaagtaccctgaacccgccattcatgagcacagtggcggtgcgcttttcaccctgtcgcctcagggggagcccggcgtgctcccggcgacacatcagcatctggtgaggctgcgggcgatgctcaggcagcgcctgaccgggccggtcaaaatgacgtgtcacccgcaccgggtgggactcagcagcagcgtggccatctatcttgagggaaagctgaagcaggcggtgaatattcttatcaccgtgacgggacagacgagctggccgcaggaagaggagtatgcgcatccgcgctggtatatcacggtgccggattcggctgacctggtgtatctgatgctgtggattaacgggcttgacgtataa

SEQ ID NO: 118218 - DNA, 2859 bp, Enterobacter cloacae
atgctttcactgtttacgcgtaataaatccaccaaccggcagacgccggttgatgacggccagtccgttcaggcagatgaaaccctgaccgcggccgtgaagggccggcaacccctgaagcgccccgggaaaatgacgcgccaggatgaggagaaggtttatcacgccaatccgtccatcattgactttttgccctgggcagaatttctcgatgaagagcagtgtctcctgcttgatgacggcgtgtcggtgggggccgtttatgatgtgacaccggtggcgaccgaagggcgaaccgaagagcgcctggagcagatccgggactcggttgaggatgcacttcaggacagctttgatgaacatgacgtgaatccctgggtcgtgcagttcttctgccaggacgaggacgacactgacgcgtacctggacaggctgcgcgggtatgtcaaaccgcatgcacagcgcacggcgtttaccgacgcctggctgggtgaaatggagcgccatattcgcagtatctcccggcctgagggactttttactgactcgctgattaccggccagccgtggcgcgggcagcagcgccgcacccggatggttgtttatcgctggcttgggaaaagccgggatccgatgccgccggtggcgatgctcaaccaggtgtgcgaccgggtcgttaatgccctgggcggggcggggatccgctgcacccggcagaacggcctgcaggtgcatggctggctgctgcggctgttcaatccgtcaccggactgggtggagaaaaccacgctctatcggcaggctgcttacgcagacccgcgcgagacacctgaaggcaccgtgccggtcagcaatgattttgccgaaactctgtggttcacgccgccggtttcagacccggaaaacggcgtgtggtggattgacaacaagccgcactgcgcggtggcggtagaaaaactgcgtacaccgccggagccgggcaccctgaccggcgagaaaagccggggtgaaaagaaaattaatgccctgatggatatgtttccggaagggaccatggtgtgcatgaccgtggtggtgcagccccaggaccggcttgaagagcagtttaaccggctgtcgaaaaatgcggtcggtgagaatactgagtcgggccgcgtccgccaggatgtgaagacggtcaaagagtatctgggcaaccggcacaagctgtaccgggcggggatcaccttcctgctgcgcggcgacgacatgaccagcctgaagcgcaagcggctggagctgtccaccgtattgctgggggccggtctgcagccggtacggccggagtttgaagaaggtccgctgaacagctggctgcgggcgctgccgatgtgctttaacccggacagcgacaaaaaacactggtatacccgtctgacatgggttcagcacctggcaggacttttgccggtaaccgggcgggaaaccggcacggggcaccccggcttcagctttttcaaccgcggcggggataccctgacattcgatccgctcaacaagctcgaccgcacccagaacgcgcatctgctgttgttcggcccgaccggggcgggcaagtcggccacgctgtgtgccgcgctctcccagctgatggccgtccatcgtccgcggctgtttattgcggaggccgggaactcgttcggcctgctggccgacttctttgacagcctcgggctgacggtgaataaaatcagcgtcaaacccggaagcggcgtcagtctgccgccgtttgctgatgctcacaaactggtggaagaaggcctggccgcccaggccgtggatgagagcgacctgccggatatcgacacggacgacgatggcgaggatgacaagcgtgacgttctcggtgaaatggaaatctccgcgcgcatgatgatcaccggcggcgacccgaaagaagaggctgaccttaagcgtgccgacagggcgatgatacgtgaggcgctgctgatggcggcgcatgccacgtataaggaagggcggcagatgctgccgtctgacctgcagaaggcgctgtacgacattgcctctgacaacgatgagggcgtcatcaatgtccgcaatgctcagcgcaaggcgaaagcggcggaaatggcggaatccctgggcatgttcactcaggccggcagctttgaagcggagctgttcaaccgcgaaggggcgctgtggccggaagcggacgtgacgctggtcgacctggggcatctggcgcgtgagggctacgaggcgcagatggccctgaccatggtctcgatgaccaacatgatcaacaacatcgcggagcgtgaccagttcctgggccgggatattgtcttcacggtggatgaggcgcatatcgtgacggtcaacccgctgctgtcgccctacatgacgaaggtggtcaagatgtggcgtaagctcggggcatggctgtggctggccacccagaaccttaaagactacccggatattgccgaaaaaatgctgaacatggcggaatggtggatttgtctgaccatgcctccggaagaggtgaaagatatcagccgattccgcgcgctcacgccggagcaggagtcggtgctgctgtccgccagtaaactgtcggggtgttatacggaaggcgtggtgctggcgaaacggatcgaagcgctgtttcgtgccgtgccgcccagtctcttcctggcactgggcatgacggaaaaagaagagaaagccgaacgccgggcgctgatgaatgaatttcactgcagcgaactcgaggcggcaaaacgcgtcgcgcagaatctggaccgactgcgcggtctgacggagaaacaacaggagcctgccacggtatga

SEQ ID NO: 118219 - DNA, 411 bp, Enterobacter cloacae
atgtacagaacggttttcattctggccctgagctgtgtgatgctcagcggctgctcaacctccaaagaggaaatgctgccggcgggcgataacaccatgcttgaactgtggaacggggcggatggtggcggcagtacttcccgccagtctgcggcggctcgcgacacgctgcgacgcccgctgacgggcagcgaaacgcaggcggacgcgcaggccgaccgcagctacagccgtactcaggaaagcgaaatcacccagcagtttccccggctgcccaaccccgacatggtgatgtacctgtatccccatctggcagacggtaacacgccggtgcccggttacagtaccgtgttcccgttctacagccagacgcagtatgccatgcctggcgagcgcacggaggccctgtaa

SEQ ID NO: 118220 - DNA, 369 bp, Enterobacter cloacae; identical to SEQ ID NO: 81035

SEQ ID NO: 118221 - DNA, 1503 bp, Enterobacter cloacae
atgcagattaaatctaatgccctggtgaagtttatcgtgccggccgtggtgattgccgggctggccgtggggctcaaaagctgcaaaaacgaaccggcagaacaatctcaggcaaaacaaagcggcggccccctgcataatctctcgccggatgaactgaaggcgctgggggtggaaggcgacacgccggaggacaccctgcgcacgctcatcggccggctgaacgatgtgcgtgaccgccagaaaacgctggataagcagaacgcggatttggtgaaagaaaacgagcggttgcgccgacgcaatcaggacgtttcaggacaagtgaatgaggctgttaatggcctgcgcgagcagtacgacaagcggcaggctcagcttcagaacgaacaactgagcctgacggcgaaaatccaggagctgactgacaaactcaaaaagcctgacagcgagaaaaaaacggcggacagcgatatcccgctggggctgggactggacggcatgggcagcagcaccggggggagcgcttctcagggcagcgacggcatgatgtgggtcgcgccgacggaccagaaagagacggatccgcgggatgcggccagcggcaaagcctcacctcagttcccgacctcttttctgggggaaaatgagctgacccgccagaaagccgcctatgaggagaaagtgaagggacggacgaatgaaaaaggggcggaagagagcgccgagccggtttacacgctgccggaaaattccacgctggtcggcagccgcgccatgacggcactgcttggccgtgtgcccatcaacggcaccgtgaccgatccttatccgttcaaagtgcttatcggtaaggataacctgacggcgaacggcatcgagctgccggacgtcgaaggggcgattgtttccgggacggccagcggtgactggacgctggcctgcgtacgcgggcaggttaacagcgtcacctttgtcttttccgacggtacggtacgcaccctccccagacccgacaccagtaacaacgccggcgggcaaaataataacgctcaggctaaacaggacaccggcaccagtggcggtatcggctggatctcggatgaaaacgggatcccgtgcattggcggcgaacgtaagtccaacgcctccacctacctgcccaccatctttggcctgtcggctgccggtgcggcgggtgaagcgatgagccaggggcagtacacgacgcagaacaacgtgaatggcatttccgccaccatgaccggcgacgccggacaggcggcgctggggaaagccatttccggcggtatgtctgaaaccaccgactggatcaaacagcgttacgggatggcgtttgatgccatttatgtgccgcccggtgcccgtcttgccgtgcatatcacccgtcagctggccattgattatgaagataagggccgtaaggtgcgctacgacttcaccctgccgggtggcgtcagtgacaacggcggactggactga

SEQ ID NO: 118222 - DNA, 951 bp, Enterobacter cloacae
atgagtaaaaacccccactaccgcgccgggctgatggcgctgtccttcgccctgctgcccctggcaatgctggtatcacgtcctgccagcgcagatgagctgatgaaatgggagcgtattccgctgcagatccccctgaaggtggggcaggagcgggtagtctttgtggacaaaaacgtccgcgtcggttttccgccggcgcttaacggcaaacttcgggtgcagagcaccggaggtgccgtctacctgaaagccgacagcgcctttccgcagacgcgggtgcagctgcaggatgtggaaagcggcgaggttctgctgtttgatatcgccgccggtgaaaaagggccgactgagccggtgcggctggtctacagcggagatgtcagcacgctgagtcacgccggcgatgcggccggtcagccaggtggtgcagaccgggctgcttccggatcaggctcatctgctcccaccggcagcgatgatggtactcaggcaaagcgtaaaaaaatccgctacagcgcccccatcccggtgctgctgacccgatatgccgctcagagcctttatgctccggcacgtacggtcgaggcggtcccgggtattcatccggtcaatcctcatctgccccgacgtgtcagcacgctgtatccctctgaaccattaacggtcacgccgctggctggctggggtgtggcaaaccgcagcgtggtggcactcaggctcacgaacaccggcagccgtaaggtcgttctggatccacgctcgctgcagggacagtttgtgtccgccaccttccagcaccgctgggtcggtccggccggcacgcctgaagacaccaccacggtgtatgtggtgaccgccggtcgtccggagagcgcattcattgctgagccgtctgcactgcgtaaagcgacccgcacggtaaaacaggaggcccgccatgcagattaa

SEQ ID NO: 118223 - DNA, 660 bp, Enterobacter cloacae
atgagccgttttcgccatgcggtaaaagaccgcgaccagcatattcagacgctgcgcatcgcctgcgccgtgctcgcctttttccttttattcacctgtgccggctggatgctggcacccagcaagctgaccgtgcataacccgccggatttacgtaccggcagcacgcggccctggtgggaagtgccgcccccgacggtctactcctttgcgttttacatttttcagcagctgaatgcctggccgaaaaacggcgaggtggactattccgccaaaatcaatgcgctgtcgccgtatctgacgccgtcctgtcaggatttcctgaaagcggatgcaaagaaacgcggtgacgccggggagctcaccgaccgcgtgcgcgtggtgtatgaagtgcccggtcgcggttaccagtcacagagcgtgaccgtacaggatcgcgatcactggattgcccgcctggacgtggtcgccgatgaatatttccatgccgagccggtcaaacgcgccctggtacgttacccgcttaaagtggtgcgctgggaaggtgatgcggagcgcaacccgttcgggctggcgctggactgttatgccggtgtgccccagcgtctggaggcggcaccgcctgcacctaaaccggagaagtcaggagtgtttcagtga

SEQ ID NO: 118224 - DNA, 357 bp, Enterobacter cloacae
atgcagaccattcgttttttacctgaccgtctcaacagtgagcccgtggtgtttcgcgggtttaccacccatgagatggggctggcagcccttgccggcgcgggtgcgggtctgctcctgtcactgccgtttatcccgcttgccggatgggttgtcgttcccaccggcctgctggtcatgccgctgctgctcgtctggttcggcggccgctggatggccaggctcaagcgcggtaagcccgagaactggctctggcagcgactggagacgaaaaaacgccggctggggatgggcaatccgaaactgatagtggatgcccggggctggtcactgaaacgtaacaggagagcctcatga

SEQ ID NO: 118225 - DNA, 387 bp, Enterobacter cloacae
atgcaccattctgagtctgttgttgcccgcctgcgccgtctcgccagtcgtacgctgacccgcgccggtacgcttgccctcctgggctggctcacctgcaaaccggcctttgcggacttgccaagcgttgaagcgcctgaatccggaggcggaagcgggctgtccggacaaatcaagggctacctgcaggacggcattgttatcggggggctggtcgtggcggccgttgcctttatcaacgttgccattgccgccctgcacaccttcaccgaagtccgcaatgagaaagccacctggaccaaattcggggccattgtggtggtgggtgtggttctgctggttgccgttatctggctgctcggcaagtctgccgacattctgctgtag

SEQ ID NO: 118226 - DNA, 243 bp, Enterobacter cloacae; identical to SEQ ID NO: 100922

SEQ ID NO: 118227 - DNA, 348 bp, Enterobacter cloacae
atgaactcacatcgtccggccatgcggcgcaaccgtcgtgtcccgggcatcactggcctggtattgctgacctttctggcatcagctgctgcacaggcatccgagaaagacgagcttgcgtctgttcagcgtcagctggaccaggttcaggcgtcgcttgaacgggcccgcgtggcggctgcacaggccgacccggctgaccgtggccgctttttctttgattaccgtcaggccacatccgatctcaacaccatccgcagcggcattgaccgctatctggagccctcccgcgcgcaaccgcgtgacccgtcttatgtggccggtaattaccggcgggagcggccctga

SEQ ID NO: 118228 - DNA, 348 bp, Enterobacter cloacae
atgatgaagactgttctgaaggccacgttaatcactgcactgattaccggccctgttcttgcggccgacggtactggcaaagtccagctttcagacctgcatttcgccacagcagcaaatggtttgcagcaaattgaaggcacgggaacaaacgtgtcaggtgggcctgtgaagactgtaattgtcaaattcaacttgcttcagaatggggcagtaataggaaatacggcagcgatggctgaaaatctggagccgggtcagcaatggaagctacaggccccctacgacagcataaccaacaagccagacagctttaaagtgacagaactgacggtatttaataactga

SEQ ID NO: 118229 - DNA, 759 bp, Enterobacter cloacae
atggctgaggtaaaacgtcccccacagcagcagacgctgccggaacgcaagcacggcattctgtataatctgctctggggctggccatgggccctggtgggcgtggtgctgtcctcgctgctgctgagcctgctgattgaatatatcggcatcgccttcttctggccggaagccggggcggcgcacagtgaagcggtcatgaacaccgagctggggtggctgtccacagagttcacccgcagcctgctgctgtctgaaccatcggtgacggttgtgcgctgggtgagcaccgcctatcagtgggcctttatggacagtggcttcctggactgggtccggcagcagtatgcacaccagatgcacagtgacaatgccgtcacccgggaaatcaacagctggagcggctggcttgccggctacctgcgtgaatacctgctggccacggtatggatcagcattatcaccctggtacgcgtcaccatcctggtgctgtccgtgccgttgtttgtgctggtcgtggtggtggcgctggttgaggggctggggcggcgtgatctgcggcggtacggggcggggtatgaaagttcgtttgtctatcatcatgccaagaagctggtcaaaccggccgctgtggtgcccgccatgctgtacctttcctggcctacggcagtctaccccaatctgctgttgttgccggcggctgttctgctggggatcgccgtaacggtgaccactgcgtcgttcaagaagtatctttaa

SEQ ID NO: 118230 - DNA, 2100 bp, Enterobacter cloacae
atgagtaaccgttacgtcattgaggccctgctgcgtccggccgttgagctgaataccgccgtggtatcgggcatagcggcgtatgtctgtgtgcaggcaccctgggctgtcgctctggctccgtctgtcagctatgtcaccgcagccgggtttgcggcgctggccgtcacccgcacgcatcaggggatgaagattattcgctaccgccggaatctccgccgcctgccgcgctatgtcatgagtactaaacagatccccgtcagtcatcgtcgcctgtttctaggccgggggttccgctggacgcagaaacacacccagcggctgcaggatacgctgcgccctgaagtggcccgttacctgcagccaaaccgcttttacctgggggcgcgtcagctcgaaatgatgacagagcaccgtctgccctggctgggtaagctgctgagtgctgatacgccgctgaacccggtgcggccgttaccgccggtgggcggaaacccggcgctgcacggcatcgagcccgacgaaaaagacgtcactctggccctgggggagcgcgttggccatacggtggtgtacggcaccacgcgcgtcgggaagacccggctggcagagctgctggtcacccaggatatccggcgggatgaagtcaccatcgtgtttgatccgaaaggcgacgcagacctgatgaaacgcgtctgggcagaggcccaccgggccggacgcggggacgagctgtatatctttcatcttggctggcctgaaatttcagcccgttataatgccgtcgggcgttttggtcgcgtgtcagaggtggcgtcccgcgtggccggtcagctgtcgggtgaggggaacagcgcggcattccgcgaatttgcctggcggttcgtcaacatcatcgcccgtgcgctggtcgccctgggcgagcgccctgactacacgctgattatgcgctacgtgaacaatatcgccgatctctatatccgctatgcggaaaaaatcatccaggcgcagctgccggctctgcagacgcagattgagaataatcagcaggtgctgggagaggacgacgtgccccgtaacatgcagggtcagccggatgccttacgtatctgggccattgaggttgccctgagttcagaagagggtaaaaaactctatgatcccatccttgacgggctgcggtcagcggtacgttatgaccgtacttactttgacaaaatcgtggcgtcgctgctgccgctgctggaaaaactgaccaccggcaagaccgccgagctgctgtcgccggattatcaggacattgacgacacgcggccgatttttgactgggaacagatcatccgtaaaaaagccgtggtgtatgtggggctcgatgcgctcagtgacagtgaagtggcgagcgcggtcggtaactccatgttcgccgatctggtgagtgtggccgggcacatttataaacacggtatcaatgctggcctgccgggcgggaaagaagggaagtccctgattaacctgcactgcgatgagtttaacgagctgatgggggatgagtttattcctctcatcaacaaagggggcggtgccggcatgcaggtgacggcctatacccagacgtcttctgatattgaggcacgcatcgggaatgcggccaagacggcccaggtacagggtaactttaacaacctgattatgctgcgcgtcagggagaaccgcaccgccgagttgctgaccacgcagctgccgcaggtggagatttacaccaaaacgctggtctccgggcaccaggacacggccgatgtcaatgcagaccaggacttcacctcaagcacccaggaccgcgtcgggacggtaaaagtcccactactggagccggccgatatcgtgacgctgccaaaagggcaggcgtttgccctgctggaaggcgggcaactgtggaaaatccgcatgccgctgcctgccggggatgctgatgatgtgctgatgccggaaagtatcgagaaaatagcggaggagatgcggcgcagctatcacagcggcgaatcctggtggcgggacggtccggccctgaacgtgccggtcacaggaggggcgaatggctga

SEQ ID NO: 118231 - DNA, 489 bp, Enterobacter cloacae
atgcacatcatcctgaacagcctgcgttacgctttgtggcttgtgttctgtttattccgtcatgccgttttcgtgcctgccgctttcggcggtgtctacctgctcgcctggcttgttttcggccatccggtcagtgacctgaacgaccagttgcagaaggaggcaacggcatggcgcaccgcgccgcccggacattacatgtgggaggaatgcccggtgcctgataatgcggctccgcctgaggcaaagccggcagcctgtaccgtcactgccgtctccacagaaaccgcggcgaacaattacctgctgtcattgcgggccgtatggatcatttttttcatcctgtcgaatgttctgtatgtgctctggcgcttactggcggatgccctgcgttaccactccctttcctgcagggaagccggtgccgggaggggaacgtatatccgtatggccgacggtaaaattataaaggaggcagacgatgagtaa

SEQ ID NO: 118232 - DNA, 573 bp, Enterobacter cloacae
atgagcgcgccagatagcaacggtctgctgatggcacacccttacggggcggtcatactgatcgtccttttcctggtggtgatggcctttctgaacctgcgctggcgtgagaaagccagcacccgccgtcaccggcgataccgggcaacggcggggcgggtactgaataagcttaacagcctgccgggagacgggcagcgtctgacctatctgcgcaaaatcagcccctatgtctttgaagagctgttgctgtctgcctttgaacgtcaggggctggccgtagtgcgcaatgcctcctacagcggtgacggcggccttgatggccaggtcatcatcgacggcgagtactggcttatccaggccaaacggtacagtcgtgctgtttcccccgcacatgttgaggacttcgaccggcttctcctgcagtccggccgccgggggctgtttatccacacgggccgtaccggaaaaatgagccgcacccttcgcacggcgtcaccgcgtctgcgcatcatcagcgggcaacgcctgctggccattctcgccggtcaggacgtccggcagtatctctga

SEQ ID NO: 118233 - DNA, 534 bp, Enterobacter cloacae
atgaaaacgctgtccttactgctgtttaccctccttcccctgaccggccatgctgaactgaatgtgattgctgatctgggcggtgaagatgctgcgccgtattttgaggccgttaataaacagcccggcatgcccggcgtcagtgacgtacagccttcacgccagccggaccacggtgttccgctggctgacgggatggcgggtatgttacccgttaacacacctgaactgagcccggggaatacagcagaccggccgctgcagttgcccggcattggggcgttgtttctgatcggggatgatgctctgtcccgtgaatggctgaaagccaatgccggcgcgctggctgaacagcatgcggccgggatgatagtcaacgtcacagacatggataccgtgcgcgagctgcgcgaactggcacccggtgtcagcctggccccggcttccgggagcgagctggcccgtcgcctgcagattgcgcattatccggtactcatcaccgataccagcctgacgcagcaggttaagccgtaa

SEQ ID NO: 118234 - DNA, 636 bp, Enterobacter cloacae
atgggcaatcgcagcattctgaccggcgcactggcgctgggcttactgatggcggccgtccctgacggccatgctgaccagacggtgccggagggttacgtccgcgtggccatggcgcacggcgtgccccccgaagcgctttactcggtatcactgagcgagtcatcgcgcaaacttccccgcggaatacggccatggccctggaccatcaatgtggcaggcaaagggtatcgctatgagacgcgcctgcaggcctggcaggcgctgcaggtctttatgaagcgtcacccgcttaagcgcatcgatgtcggtattgcccaggtcaatctgggctggaacggtcatcattttgcctcgacgtgggatgcgtttgacccttacaccaacctgaacgccgccgccaccattctgcgtgagtgctgggcgcgtaagccaggcagctggctggatgcggccggctgctaccaccatcccgcaggtggtcagcctgctgcacgttaccgcgccattgtgagagggcatctggcaaaaatcagccctgcaccccgcatttctgcgccggcagctgaagcgccccgctcggttgctgcgctcacccccgatccaggcttcgtctggactgaacccgggagataa

SEQ ID NO: 118235 - DNA, 723 bp, Enterobacter cloacae
atgaaactgaaacatacctttttagccgccatgctgctgagtcccctgacccaggccgcgaccacatcaggacagacggatgtcagccgacaggaatcaacacaacgggcggactccgcacaacaaaacctgcagcagcaggccggtcagtggggactcagtgccgacgattatcagcgttatcagcagctgatgaaggggccccggggtatccagtcgccgggtctcgatccgctttccaccctgggtattgaggcgcagacgtcggcagagcgccgtaagtttgctgaaaagtgggtgaaggaagagtttgcccgcacccagaaggagcttgatttccagcgtgaggtgaacgcggcctggcagcgcctgtatccgggcacgctgccggtcaatatggggaacgcctccggcgtggcgcacgacagtggtggccgcctggcgctgttcgtcaggtcaaaagactgcgccacctgcgacgcgaaactgtctgccgtgctggctgacaaccggccggtggacatctatttggtcgacagccagggcagtgatgatgcgcttcgcagctgggcacgggaccatcacattcctgtggaaaaggtccgcaagcgccagatcacgcttaaccacgacggcggccggtggatgcgctttggtaacggcctgatgccggttttactgcagcaggcgggagacggtaaatgggcaatcgcagcattctga

SEQ ID NO: 118236 - DNA, 759 bp, Enterobacter cloacae
atgagcgaacagcaaccattccatattgaccccgctccggcccgtaaaagattcagctggcgtccccgccgccgcctcatctggggcgctgccagcggtgtggcgctggccggcattctggcgctgggctacaccgccttcagtctgggcatatcgaaccttgatgaacgccttgcacgccttgaatctcagggcagtacagcggccactgttgagacagtcgcggccctgcagtcagatgtgaccacgctcagcaccggcctgcaggatacccggaaaaaacttggtgagatgcagcaggagctgagcgctgctgcgaaacaggccggcagcgacgacgccgtgcgtcagtcattgcgaacccttcaggacgcccagcaggggctggaaacccgcctgagtgcgctgactgagcagctgacagcgctgaaatcacagccggcacccgcacccgccgcacctgtcgccgcaccggtcaaaaaaaacgcgcctgctgcaaaaaagccccgtcccgctgacacacgtcgtgctgctccgtcccttcgcgtggcccgcaatgcgccttttgtgctgacgggcgtggagaagcggggggcagagtcctgggctgccatcgcgccccggggctacagcagcctgtcgcaggtggccctggtcggagagggcgaaaccgtggccggctggacgctggtcagtgccggttatggtgaggcgacgtttcgggttaacggccgcctgactgtgctcagagcagaataa

SEQ ID NO: 118237 - DNA, 666 bp, Enterobacter cloacae
atgaaacgtaacacctctcacaacatattttcaccaggcaggcttgccactgttcttcccctgctgctccttgcgggctgtgtttcccagccgcaaaagttgcagcaacgcgcgcctgccgacccgacacccggcaccaccgtcacccgcaacgttcagccggtctctccggacgagtatgcgcggacgccggaagtggtgcgctacgatcgttatctgctggtcagtaccgatccgcaggcggcccagcgtgaccctctctcgcaaattattgatattcgcatcccgtcatccctgcatcctaccgtggcggatgcgctgcgttacgccctgcgccagtccggttattccctgtgcgcgaccggttccgccaacggcgtgctttaccgccaggcattgccggcagtccagtaccagctgggcccgatgcgcctgcgtactgccctgcaggtcctggccggtccggcctggcagcttgaggtggatgatgtacagcgtgtggtctgccacagcctgcgcgacggctaccagctgccggtctcccagcttccgccgccggtcagcagctggtccacgcctgcgccgtccgccgtatcacaaccggccatcagcgcccctcagtccgtccccgttaaacctgtcagcggagggtttctgagaaaatga

SEQ ID NO: 118238 - DNA, 249 bp, Enterobacter cloacae; identical to SEQ ID NO: 81053

SEQ ID NO: 118239 - DNA, 243 bp, Enterobacter cloacae
atgcctgttatactgaggatcaacggtttccggttctttttttattctaatgaaggtaacccgctcgaacctgcacacattcacgtaatgaaagcaggtagtgaagccaaattctggttaacgccatcagtggcactggccaataacgatgggtttaattcacgggtattaaaagaactgacggggatcgttgaagataatcaagcattgtttctggaggcctggaatgactatttcagctaa

SEQ ID NO: 118240 - DNA, 513 bp, Enterobacter cloacae
atgtcctcacgcggcgttaacaaggttatccttgtcggaaacctcggccaggatcctgaagttcgttatattcctaacggcagtgcagttgccaccctttctctggccacgtctgagagctggcgcgataagcagtccggcgaacagaaagaagtgaccgaatggcacagggtggttattttcggcaagctggcagaaattgcgggtgaatatctgcgcaaaggctcccaggtttacatcgaggggcatctgcgcacacgcaaatggaccgatcaggccggccaggagaaatacaccacagaggtggtggttaacattggtggcaccatgcagatgcttggcggccgccagtccggcagcggacagaggcagcctcagcaacctttaggaccgactcacagtggccaggcctccggcagcagtgccggtgcgccaccgatggacttcgatgacgatataccgttcattggattcgggtatggagtaccaaaatcggcaatccatgcactctga

SEQ ID NO: 118241 - DNA, 471 bp, Enterobacter cloacae
atgtctgcaaacaatacttctgcatctgcaaaatctgagtacttcaacctgactattaaaggcatcgggtatctcagcaacatccgccaggttaaccatcagaatggctcgttcctcagctgcgtaatcaatgcactgagcggtccgactgacaatccggcctacgtccgttttgacatttctgtcgcaggtaaagaggctaccagccttatcgcccgctgccagaaagccgtcgatgaagacaaaaaagtcctgctgggctttaacctgagtaatccgtccacggacatatttacgctgaacaagggcgagcatgccggcgaacagcgtgtcagtctgaaagcccgcctgataaaggtggactggatcaaaataggccaggacatggtctacaagactgaaaaatctgactccgtgccgccgcagaatggctctgccgcacagcaaaactacgcagagaactcattctga

SEQ ID NO: 118242 - DNA, 2010 bp, Enterobacter cloacae
atgcaactctttctgtgtgaaaaaccatcacaggcaaaggatattgcccgcgtgctgggtatcagcaagcgtgagcagggatttatcagcggcggtaacatcgttgtgacctgggcggtcggccatttactcgaaactgccagccctgaagcctatggtgagcagtatggcaggccatggcgtgccgatgtcctgcctgtgctgcctgagacctgggaaatggtcgtcaaggagcagacaaaatcgcagttcactgttatcagtaagctgctcaaaaaggcctctgaggtggtcatcgccaccgatgccgaccgcgagggcgaggtgatcgcgcgtgagctgctggaatactgccgctacagtggcgcggtacgccggctctggttgtcagccctggatgaggccagtgtgaaggaagcacttagcaatattcttcccggagaaaaaacagccctgctgtacgatgccggcaagggccggagccaggctgactggctcatcggtatgaacctgacccgcctttatactctcaaagcccgtgactcaggggtgtcagaagtgctgtccgtcgggcgggtacagacgccgacgcttgccatggtggttaaccgggataatgaaattacgtccttcgtgccaaagccctggtggcaggtacatgcgcttattgaaaaagagggcgtccggttccgggctggctgggtgcccgttgagcagtactgtgacgaggaaaagcgttgcatcaatcctcaggcagcccgggcggtgggacagctttgtcagcagcagggcagggctacggtactggaggtgacccagaagcgggagaaaacggcggcccccctctgttttgacctgggcacccttcagcaggtctgttcccgaaaattcggaatgggcgcaaatgatgtgctcgccattgctcaggcactttacgaaacccataaagcgaccacctacccccggacagactgcggtttccttccaacttcgatgcagcaggaaatacccgacgttctggcagcagtggcaaaatccgatcccgctgtggccccggtactgaatcagttggacaggcagtttgtctcgcgtgtctggaatgacaagaaaatcaccgcgcaccatgccatcattcccacccgacaggcatttgatttgtcgcgcctcagcgccgatgagcagaaggtctaccatctgattcgccagcattatttcgcccagttccttccgctgcaggaatctgacgtgacggaggcctctttcaatatcggtggacagctgttccgtacacgcgggaaagtcggtgtggtgacgggctggaagtcattgttccaggctgaaaaagatgacgatgaagaggacgtcgacggtgacagtatggcgctgccggcgctggtaaaaggggatatttgcgctgtcaccggttctgaggttaaggatatgaaaaccagtccgcccaaaccgttcacggaggggacgctgattgctgccatgaagaacgcggccagtttcgtcagtgacccgaagctgaagaaagtgctgcgtgataacgccggtctgggcacagaggcgacgcgtgcggctgtgcttgaaaccctcttcaaacgacactatctggagaaaaaagggaagcacatccactcaacgcagatggcccgggagctgattgcggccctgccggaaacgctgacgagcccgggcatgaccgcattatgggagcaggcactggatgatatttcgcaggggaaaatgtcgcttgcagtctttatgcaaaagcagctgcagtggacccgtcaccttgtcgaaaaaggccgccaggacagtgtgaaaattactgctcccgtcacgcctccctgcccgttatgcaaaggacccacgcgtaaacgtaaaggtaaaaatggtgatttttgggggtgcatacgctatccggactgtgagggaattatcagtacaggtaagaagaaagcagcgaagcgtaaaaaaacatcggttaaggctaaaacagaataa

SEQ ID NO: 118243 - DNA, 555 bp, Enterobacter cloacae
atgattcgccctgtgttcctcctcacctccttctttttactgagcggatgctcaacaacggactgggctgcgattaataaacaggtcagtgacacagccgcaaacctgacaaaaacgttgggcggcaacagcagcggagaaagtggcgggatgcctctgatgagtccggcgaggcaacaggccatgcagtccgtcgataaaacgttctccgtgccggtcgatgtggataccgcggcggcccgcctgaagcgccattacaaatttatctccacgcaggagcttgaggcactgcggcaggccgcaaatgacggggactggaaagcggcggctgaagatgatgcgcatcccgtctgggacgccatgccgggcagctactacaaaatgggctccgactggaacgaacgtgatcacctggatatcgaaatcgagaaaaacgggtccggcagcaggctctatgttgtctatcgctcatcatcatcacagcgtctggccgggtccggcgtcacgaagctgatgaatgatgtccgcgctgttgcagcgggtgaaaaacgctga

SEQ ID NO: 118244 - DNA, 726 bp, Enterobacter cloacae
atgtctgatggtaaaacaaagggcggaacaaccgcttcacgagcgggggccctacagtcctctgttaatatcctgctccatacacattatgcaatccggctttgggagggcaggaaacgtgatgctccggacgagacaggggtgaaaaaaaagaggcctgaaataatcagcatgccgcaagccattgcgcgagctggtaatgcttcccgagactcagcggcagataatccctatgccgatatggctctggtacggctcgaagaagccctgcaacgagcaacacttaaaattaatgaaaacgtcagttcactggatgccatattgtcagccgtacccaaaggggtaacgctctcggaagttgaatcagccgatccgttaaatgtcagcgttttcagccgttcaccgttaggataccggtgcgtatggcttctggttggatatgatcagttagcaatgaaagctttccaggcttttcattacggactgatttcgcgttcgcaacgtgacgctatcctggacaatggtggccatgctgttcgtcaggtctatggcgtgattcagccttaccgaacacttgcagtgactcgccgtgatattgcagaaaaaaccacgcaagggcttgttgccattgagcgaaatggcgaacctgatccggatgtgttaagcggtaaaaaacgttcttcgttctcacctccgcttaaaaacaccatagcagaggaggaatga

SEQ ID NO: 118245 - DNA, 1239 bp, Enterobacter cloacae
atgagtctgcctgcagaaagcctgattgcttatacgctggataaaatgaatgcccgccttgcggccagtccccggcgggatgatggcaggatacgtaacggcctgctgtttaccggaaatgtgcatgattccattccccgccggctgttgctcgacacgcggttgtcaccactggacaagatgggctggatgatgatccggctgtatgcacaaaataatgagggggcggttttccccagctatgacgaactgcagctgcagcttgcctcacccggaaaggggaaagcctcaagggaaacggtaagccgcgtcctgcttatgctgcgaataaccggctggctcagcctctgtaaacgcgtgcgggatgataaagggcgggtgcgggggaatatctatgctcagcatgatgagcccctgacgttcagcgatgcggaaatgctcgaccctcgcttccttgatacggtggcggatgcctgcctgagtaaaaaccggactatcagccagaccgcccgcgaagtgctcgacgatataaaaaacgaccccaccatgcgccattatcgcagccatcttgcgctgatcgaatcgcgtctggaccgcccacagacgcccagccagatggcgaaacatcatcaccgaataccctgtcccgcaccgggttcggaaaccgaactcagtcataaacggcctggaatcgccgctaaaaaacagggttcggataccgaactcagtccagaaaggcataacaactcactgagttcggaatccgtactgccagtaaaaacaagcagttatggccaggttcggaaaccgaaccattacgtacgtagtatcacacacagtgtgaataaaaatacgtacgtaccgggtaaacctgtgcttcccgacagtctgcatgaacttgttccggcagaagatattgccatgctgaccgcacagctgcaggcgctgcctgaagaacaggcacaacttgtgctgctcagcctgcaaaaggtgatggcacgccagcagctcagcaacccggttggctggttgctggccgtgatgaagaaggcgcgtgagggcaggttatacgcgccccgtcagggtggcgatatatctgacagtgtcgggcaaaaaacagttcagcgtcccgaacagcaacaatggaaacccgaaccacgcgcctctgcccgcccggtatcggaggaaaatatcagggatctggtgaagaaaattcgggaaaaaatcataaattcatga

SEQ ID NO: 118246 - DNA, 249 bp, Enterobacter cloacae
atgaaatacaggatggttgcgccgggcctgcgggctccccatggtacgccgccgcaatgctgtcagaaagcgttacgtcaggttcgccgtttccggcagggggcgcgtaattacacccggctcgatgagaaaggctgcggttactacaaaatcgatctcggcccgttctggcgtctgctgagtcgcaacgaaggccggacgtggcttcttctcagccacgaacgctataacagcgccatacggaaatag

SEQ ID NO: 118247 - DNA, 591 bp, Enterobacter cloacae
atgatgaacagtttatctcaggctgcaaacggattattgatgcagctggttatggatctcagaagtggctatctccgccgctgcgaatcgctgggactgaaccgcgaggaaatgcagatgctgcaggggctctcgctcgaagagcttcactacctttccggcagtgaggtgtcgatcatcagtgtgggcatcaatcacggcaatctggtgcgcatgctgcagcaggcccggactgaacagaaacgactccagcgtatcgatcgggcgctggcgttgggcggctccattgaactgatggccaattacttcgggctctccagtacggacgtggcggcccgccgtcgtattgccggtatcgatgtccggccggggcgcggtaacgcactgggtgatgaggaaaacgccgccctgtggcgtcagtggcaaaagtccggcgttgaagatgcggaaagtgctgacgggctggacgtgatgatgctggctgcagaacagatgaacgtctcgctgacgtcggtctggcatgcggtccgcggctggcacaagacccggcagccttctccggcacgaacgccggtaaggaagacggcatga

SEQ ID NO: 118248 - DNA, 711 bp, Enterobacter cloacae
atgaataactcacagcgacagttgcgactgctgaatcttgtcaggaaactgctgaagctgggccgcagcaacagtaatgcccatgaggcaggactggctctgcagcgtgcccagaagctgatggccagatacggtatcagcgagcttgacgccggccttacatccgtgcgcgaagcgtcttcccgcacggccccttcggatgctgaaaaagttccggaatggatggtgacccttgtccggggcgtctgtcatgcctttggctgccaggcttattactcatggcgtcagacctctgccgggtatcgccgttcggtaaccttttacggattcagtgaaaaacctgagatagcagcctatgcctttgatgtgctgacgcgccagctgaaagatgccacaaattcttatctcaaaacccagagtaagcggctgaaactggccacacgccgggcgagagcggagcagttccgtgacggctgggtatgtggtgtgcgtgaggtgatatcggcaactgacatcagcagcgaggagcagcaggtgatgagccactggctggaaagccgcagtatgaaaacagtcacaacccgtgaactgaaagcctgccgcggggcggatacagcacgttatcaggggtatgaagccggacaaaatgcccgtcttcatcagggtgtcagcggccggggtccggcagccattggttaccgtcaggattaa

SEQ ID NO: 118249 - DNA, 1701 bp, Enterobacter cloacae
atgagccgtaaaagttctaatgtgggggctgccatgctgcagcccggacgccagtcgcaggcggccggcaatatcagcgtcatgccggcggctgaaatgcccatggtcctgacgctcgaccagttaagcccgaatcctgataatccgcgaacatcacgcaatccgcgttatgacgatatcaaggcttccatccgttcgcgcgggctggacaccgtacccaaagtcacccgtgacccggatggtgagcccgatatgtacatcttcagcgacgggggtaatacacgttatcagatcctgtcagaactgtggcaggaaaccggagaagaccggtttttccgcgtccatgtgttgttcaagccgtggccgggacggctgcagtgtgttattggccatctggcagagaatgaagtgcgcggggagctgagttttattgaaaaagcgcaggggatccacaaagcccgctctatatatgaagagcagatgggaaagacggtttcgttgcgtcagttgtcagagctactgacccatgaaggtttgccagtccattactcaacagtcagccgtatggaagatgcgctgaaatatctttatccgtggatcccagacctgcttgagtccgggcttggcaggccacaaataacatcactgctggcgctccggcatgatgcggaacgcgtgtgggatgagttttgcctgatttcagacacaggcgacaaatccttcagcgacgtttttggccagtgttgtggccgtttcaactccccggaactgtggtctctggagatgtttcgcgatgaatttattggtgatttactgcaggcgttaccccatccggaactggactatgaccgctggatgatggaactcgatcctaaagaacgcaaccgcagacatcactttggcgagccggagacggttgcctttcccgccgcaaacaagcctgttaatgctgatcacgccctgcataccacaggctcagatgagagtgaaggcgtcccgctacctgtctccagttcacgtcctgaggtctcaggaggggctgtaacgcccgttccgggtaatgcgtcttctccttctgaaacaccgattaatgagcccccccggcatgaggttcagccagatatgtacggtgccgcgccggttatttcaggtgagagcggggatgttagcgggctggttaccctctccgatgggtacggagaagagaatggcggagaagaggacaatggggaggatggcctgctttctcttttaacaccagaacctgaagttgtcctgcaggatgacgcgccggtgagtaatgacagcatctggcatgtgccggcccatcaggacgatatcgaacacctgcaaaataccgcttttcgtctggcatgggagctgggtgaggtccttggctgcgaagatgaaattcttcctcaacgcgacaaggacacgtctgccggttacgtcggggcaggtgaggtgtgttctgaagccgccgcatttctgctgggcctgaccggcgaagcgcctgtgctgcatccggcggcaggggtgtgtggtctgccggagcttttcaccggcggcccgggtgagggggaagcacctgccctgacagatgaagatgctctgaaactgctccgcctgatgcgcgttatgcgccgtctccgggagctgcaacgcggtctgaagtacggggaggataacagtgatgaataa

SEQ ID NO: 118250 - DNA, 1371 bp, Enterobacter cloacae
atgtctgagatgatgatgccctgctcttatgaggctgagcaggccgtactgggcggactgatgcttgataacgaccggtgggatgaggtgatactgcaaatctccccggaagatttgttttcccggccgcaccgtatggtctttcgcgtgatggccgagctggccggagaagggctaccgctcgatctcatcactattacggaacggcttgagaacagaggcgaccttgaacagtgtggcggctttgcttatctggctgaaatgagtaaaaacacgccgtctgcagccaatatcctggcttacgccggggtggtggcggagaaaagccgcctgcggcagctgatgactgtgggtaacagtcttctttccgatgtgcaggccccgaaagccagctcggcgggcattcttgagtcggccgaaggtaagttgtttaacattgccgaacagggagccatgcagctcaacagtgagaccggtgttaacgaggcgctggataaactgctgacgcagctggaaagcatgtccgccagtgacggcctcaccgggacaccgacagggttcagtgaactggacgcgatgacctgtggtctccagcccggcgatctggccctgctggccgcccgtccttccatggggaaaacgtcgctggccatggccgcctgcacagcggccgtgagcgcaaaacctgacgatcacgtctttgtgttcagtcttgaaatgccctcagagcagctgatgatgcgcctgctggcgatggaaggccgggtggaactgtcccggcttcgcagcggcaacatggatgatgaagactgggctcgcgtgtccgaggcaaccggtcgcattattgagtggaaaaaccgtctgatcattgatgataccagttaccagaccccggccacactgcgcgcccgcgcccgacgctatgtccgcaaatacggcagaccctctctcatcatgctggactatctgcagcttgtccgctcccccgagcaggaaaaccgcacgcaggaaatagcggaaatttcccgctcgcttaaggcgctcggtaaagagctgggctgtccggtactggcgctttcccagctcaaccgcctagtggagcagcgggccgataaacgccccaataatggtgacctgcgtgactccggtgcgctggagcaggatgcggacctcatcatgtttatttaccgggatgaggtttataaccccggcacccctgatgccggggtggctgagatcattgtcggcaagcagcggcaggggccaaccggcacggtgaaagtcaaatttgacgggcgttataccctcttttcggagtttcaggaaggcagctatgacttcggttaccgcagagggaggaaacaggcatga

SEQ ID NO: 118251 - DNA, 876 bp, Enterobacter cloacae
atgaaaatacttcccgttatttctcccaaaggtggagaaggcaaatccacgtttgctgcttaccttgccggttttcttgccgatgccggcctgaacacccttcttgtggatgcagactattcccagcccacagccagcagtatcttcgcgctggagcatgaatcccctttcggtctctatgaattgctgatgcagatggtcagtgaccatacgcaatgcatttcgcagaccgccataaaaaatctcgatgtcatctactctaacgacccggacgaactgttgccgaccgcgatgctccacgctgcagacggccgtctgcgcctgcgtaacatacttcagcatcctttctttaaccgttatgacgtcattattgtggattcgaaaggcgcaacaggcgtcatgaccgagctttccctcctttcctctaccggtaatgtgatgggcgttgttaaacccatccttccggatgtccgtgaatttatccgcggctcccttcatatgcttacccgcctgaaaacctatgaaaattacggtatccgccttcctgatatttccattctcgtcaactgtatcgaaaacactctgcttgaccgtgaagcaatggacggtcttgccgccatcattaacgaaaaacactacgacgcctctgcgctgggcaaccgtgacgtttatcgtttactcgatacccgtatcgaggcgctggatattttcaaactggggcacgtcaagcagcagcccgtgcatcgtctggaatacaaaacacgccgcaaaggtccggccgcagccgtcaccatgcacgacctcgcgtctgaactgttccccgagtggcagagccatttcagtgacgttctgacccgggaggtgcgtcatgtctga

SEQ ID NO: 118252 - DNA, 711 bp, Enterobacter cloacae
atggttgggtttttgcttttctgtatccgctacgcattgaattttcccttctgtcaggtaatagtgattttttcccctgacaatgaaaatgatatgaccttatctgctttaaaagtcgggtcactgctcctgctgttgatcctgttttataccggcctgttcacgagcgatcgcatcacctggctgatggaggtgacgcccgtcattatcatcatcccacttctgcttgccacgcaccggcgataccccctgactccccttctctataccctggttttcttccacgccatcattctgatggttggtggtatgtacacttatgcaaaggttccggttggttttgaggttcaggagatgctcgggcttagccgaaatccgtatgacaagctcggtcacttcttccaggggctggttcccgcactggcagcgcgagaaattctgctgcgcggtgggtatgttcgtggacataagatgacgggatttctggtgtgctgtgttgctctggccattagcgccacctatgaactcattgagtggtgggcagctttggcaatgggacagggtgcggatgattttcttgggacgcagggcgatccatgggatacccagtctgatatgttttgcgcgctgcttggtgcgttaacgacggtgctgatccttgggcgtttccatcagcggcaattgcttcgtttgaatgtttgtcagggatag

SEQ ID NO: 118253 - DNA, 354 bp, Enterobacter cloacae
atggtcgagccttataaaagcgaaatcctgccgcactggcgttataaaaatgctgaagtcgcagcgcgttcggcagaagagatctacgccctttttgaagaataccgcaggaaaaacgattttgtcggcatggatatggcgcgtaaattcatacagatgggatacacccgtgcccggcgatacgccaatcataaaggcggtaaaaagtatgatgagaagcgccaggtcaaacccctcgatcacgatccagtaaaagcagaagccgctgcggtgttcaaaacgtggtgggataaaattcgtgccgatgaagattatttgcagcgaaaaaaggctcaccagcaagcgtggggataa

SEQ ID NO: 118254 - DNA, 1308 bp, Enterobacter cloacae
atgacagaaaccgtagccagtgcagatacggataacacaagtttagcaggcaaggatactcgccgtcgggtttgggcaatcgttggagcttcatcggggaaccttgtagagtggtttgatttttacgtctattcattttgttcactctactttgcacatatcttcttcccgtcagggaacactacaacgcagcttctgcaaaccgcaggcgtttttgccgccgggttcctgatgcgtcccattggcggatggctgttcggcaggatcgcggacaggaaagggcgcaagacatccatgctcatctccgtatgcatgatgtgcgtcggctcgctggtgattgcctgcctgcccggatatgacactatcggaacatgggcaccggcgttgttgttgctggcacgcctgttccaggggctgtcagtgggtggcgaatacggcaccagcgcgacatacatgagcgaagtagctgttgaagggcgcaaaggtttctatgcatcattccagtatgtaaccctcattggcggtcagctgctggcgttactggttgtggtgatccttcaacaaattcttagcgatgaagatttacgcgcctggggctggcgcatcccgtttgccctgggggccgccctggcggttgtggcgctgtggttacgccgtcagcttgatgaaacctcccagcaggaagtcagggcgctgaaagaagccggttcgatgaaagggctgtggcgaaaccgcaaagcatttttgatggtattaggctttaccgccgcaggctcgctaagcttctataccttcaccacctatatgcaaaaatatctggtcaacaccacgggcatgcatgctaacgttgcgagtgtcgtcatgacggtggcgttactggtctttatgctcatccagccgattgttggcgcgctgtcggacaaaataggtcgccgcacctccatgctgatctttggtggcatgctcaccctggggactgttccgcttttgacggcgctacagcatacaacctctccgtatgccgctttcgctttgattatggtggcacttattattattagtttttacacggcaatcagtggcattttgaaagcggaaatgtttcccgcacaggtgagggcgctgggcgtaggcctctcttatgcggtcgctaacgccctgttcggcggttcggcagagtatgtcgcgctatcccttaagtcatggggcagtgaatcgacctttttctggtatgtcaccatcatgggggcgctggcgtttattgtctccctgatgctgcatcgtaaaggaaaagggatccgcctttaa

SEQ ID NO: 118255 - DNA, 324 bp, Enterobacter cloacae
atgcgtacgcctttcctgataatccctcttttcctgaccggttgcagccatatggctaatgataactggtcgggtcaggataaagctcaacactttctggcgtctgcaatgttgtccgctgcgggtaatgaatatgcgctgcaccagggttatagccgggatcgaagtgccacaatgggactgatgttctccatcagcctgggggcatcaaaagaactttgggatagccgcccctcgggaagcggctggagctggaaagattttgcctgggacgtagccggggcaacaaccggctacgccgtctggcagatggcgcattattaa

SEQ ID NO: 118256 - DNA, 1356 bp, Enterobacter cloacae
atgttgtcaaaatttaagcgtaataaacatcaacaacaccttgctcaactaccgaagatttctcagtcagttgatgatgtagagttcttttatgctcccgctcatttccgggagacgcttcttgaaaagattgccagcgctacgcgacgtatttgcattgtggcgctctatcttgaacaagatgaaggtgggcgtgcgatcctgaacgcgctctatgaagcgaaacgtcagcgtccagaactggatgttcgcgtgctggttgactggcaccgtgctcagcgcggccgtattggtgccgctgcctcgaataccaatgctgactggtattgccacacggcccaggaaaatccgggtattgatatcccggtgtatggcgtaccggtgaatacccgtgaagcgcttggcgttcttcattttaaaggatttatcattgatgacagcgtcctttatagcggtgccagcctgaatgatgtgtatctacatcagctcgataaataccgctacgatcgctaccatctgatccgcaatccgcagatggccgacatcatgttcaactgggttgataaaaacctggttcatggccggggtgtgcaccgtcttgacgatcctcatcgtccgaaaagcccggaaatcaaaaacgacgttcgctccttccgccaggaactgcgcgatgcggtttatcgttttcagggggatgccagtaatgaagaactgtccgttacgcctctggtaggcctgggaaaatccagcctgctgaacaagaccatcttccatttgatgccgtgcgcggagcataagctcaccatctgcaccccgtacttcaaccttcccgccgttctggtgcgtaatatcattcagctgctgcgtgatggtaaaaaggtggaaattattgtcggggataaaacggcaaatgactttttcattccggaagatcaacctttcaagatcatcggcgcactgccttatctctatgagattaacctgcgccgcttcctgagccgtttacagtactatgtgaacacggaccagctggttgtgcgtctctggaaagatgaagacaacagctatcacctcaaaggaatgtgggtggatgatgagtggatgctgctgaccggtaataatctcaacccacgcgcctggcgtctggatctggaaaacgccatccttattcacgatcctcagcatgcgttagccgcgaaacgcgatcgtgagctggagcttatacgcacgcatactacagtggttcgtcattatcgcgatctgcaaagcatcgctgattatccggtgaaagttcgcaagctgattcgccgtctacgtcggatccgtatcgaccgcctcatcagccgcattctgtaa

SEQ ID NO: 118257 - DNA, 2664 bp, Enterobacter cloacae
atgagccagagagggttagaagcgctactccgtccgaaatccattgccgttattggcgcctcgatgaaaccggaccgcgcagggtgtctgatgatgcgtaacctgctggctggcgggtttaacggcccggtcatgcccgttacgcccgcttataaggcggtacagggggtactggcgtggccggatgtgcagagcctgcctttcgttcccgacctcgccgtgctctgtacgcatgcgaaacgaaacctcgaactgcttgagtcgctcggtcagaaaggctgtaaaacctgcattattctttcctcgcctcctgaacagcagcccgaactgctggcctgcgccagccgctaccagatgcgcattcttggtccaaacagcctcggtctgcttgcgccctggcaagggctgaatgccagtttttccccggttccgatccgcaaaggcaaactggcctttatttcgcagtcggctgcggtatccaataccatcctcgactgggcgcagcagcgtgagatgggcttttcctacttcatcgctttgggcgacagcctggacattgacgtcgatgagctgctggatttcctggcgcgtgacagcaaaaccagcgctatcctgctctaccttgaacacctgagcgacgcccgtcgttttgtgtcggcgtcgcgtagcgcatcgcgaaataaaccgatactggtcatcaaaagcgggcgcagccccgcggctcagcgcctgctacattcccgttccgggatggatcccgcatgggatgcagcgatccagcgcgccggtttactgcgggtacaggatacgcacgagcttttttccgccgtcgaaacgttaagccacatgcgccccctgcgcggtgaaaagttgatgattgtcagcaacggtgccgctcccgccgccctggcgctggacgagctctggctacgcaacggcaagctggccactctgggtgaagagacgctacagcgcctgcgggacgcgttaccgggaagcgttgttcccggtaatcccctcgatttgcgcgatgatgccagcagcgatcgttacattaaggcgatcacgattttgctcgatagccaggactttgatgcactgatgattatccattcgcccagcgcggttgcgccaggcagcgaaagtgcgcgtgcgctgattgaggcagtccgaaaacatccccgcggcaaatacgttaccctgctgaccaactggtgcggcgagttctcctcccaggaggcacggcgtctgtttagtgaagccgggttgccaacctaccgtaccccggagggcaccattaccgcgtttatgcatatggttgaataccgccgcaaccagaagcagctgcgtgaaacgcctgccctgccgggcaatctcaccgcaaattcagtggatgtgcacaggcttttgcagcaggccatcgaagagggcgccacttctcttgatacacatgaggtacaacccattcttggcagctatgggatgcaaaccctgcccacctggattgccggcgacagcgctgaggcggtacatatcgctgagcagattggttatccggtcgcgctgaagctgcgctctcccgatattccgcacaaatcggatgtacagggcgtcatgctgtatctgcgcaccgcgacagaagtacaacaggccgcggatgccattatcgatcgcgtaaaaatgacgtggccacaggcccggatccacggcctgctggtgcagagcatggccaaccgtgcgggtgcacaggagctgcgcgtggttgtcgaacacgatccggtttttggtccgctcattatgctgggtgaaggcggcgttgagtggcggccagaagaacaggcggttgtcgcgcttcctcctctaaacatgaacctggcgcgttatttgattattcaggccatcaaaagcaaaaaaatccgcgggagaagcgctctgcggccgcttgatatcgccggattaagccagtttctggtgaaggtctccaacctcattgttgactgtgcggagatccagcgcctggatattcacccccttcttgcctccggaaatgaatttaccgcgctggacgtgacgctggatattgcgccctttatcggtgatcgggaaagccgtctcgccattcgtccttatcctcttcatctggaagagtgggtggagatgaaaaatggggaacgggcgctgtttcgccctatcctgccggaagacgagccgctgctgcgggcgttcatctcgcaggtgacgaaggaagatttgtactatcgctatttcagcgaaatcaatgaatttacccacgacgatttagccaatatgacccagatcgactacgatcgagaaatggcgattgtggcggtccgccgttccggagcgggagaggagatcctcggcgtgacgcgtgccatttccgacccggataacgtggatgcggagtttgccgtactggtgcgttccgatcttaagggtttggggttgggcagacggctgctcgaaaaactcattggttatacgcgcgatcacggattgtcacgcctgaatggcattactatgccaaacaatcggggtatggtgaccctggcgcggaagctcggttttgacgttgatatccagctggatgaaggcattgtctctctgtccctcagcctgatttcgacggataaacaagagtaa

SEQ ID NO: 118258 - DNA, 699 bp, Enterobacter cloacae
atgactgataacgctgtacttcaattacgcgccgagcgccttgcgcgcgccacccgcccttttctggcccgaggcaatcgtattcgccgctgccagcgctgccttttaccgctgaaagtgtgtctgtgcgaaacgcttgcaccgagcgaggcgaaaagccgcttttgtctggtcatgttcgataccgaaccgatgaagcccagcaacacggggcgtttgatcgccgatattctgcccaacaccgcagcgtttcagtggtcgcgcactgagccacctcaggctctgctcgacctggtggcaagcccggactatcagcctatggtcgttttcccggcatcatatgcaggcgaacaacgtcaggtgcttacggcgccaccatccggtaagccgccgctgtttattatgctcgacggcacctggaccgaagcgagaaagatgtttcgcaaaagcccttaccttgatgcgctgccggtgatttccgtcgatctgtcgcgcgtttcggcctatcgcttgcgtgaagcgcatgccgacggtcaatattgcaccgctgaagtcgctattgcgctactggatctggcgggcgatacccaggcggccggcgcgctgggctcccacttctcctgcttccgtgaacgttatcttgcgggaaaaaccgttcataagggtagcgtcacagcaacagagacagaaagcgtttaa

SEQ ID NO: 118259 - DNA, 420 bp, Enterobacter cloacae
atgaataccgtatgtgccaactgtcaggctgtaaaccgcattccggacgaccgggtggatgacggtgcgaaatgcgggcgttgtggccacgaattatttgatggcgatgtcattaacgcgacgggtgctacgctggacaaactcctcaaggacgatctgcctgttgtggtcgatttctgggcaccgtggtgcggcccctgccgtaactttgcgcccatcttcgaagacgtggctgaagagcgcagcgggaaaatgcgttttgtcaaagtgaataccgaagcggaacgtgaactcagcgcccgttttcgcattcgcagcattccaaccattatgattttcaaaaatggtgaagtgatcgatatgctcaatggtgcagtaccgaaagcgcctttcgacagctggttaaacgaatccctgtaa

SEQ ID NO: 118260 - DNA, 1086 bp, Enterobacter cloacae
atgaacgacgaaatgaaaaacaaaagcggcaaggtcaaagtgatgtatgtccgcagtgatgatgactctgataaacgcacccaaaatccgcgtaccggaaaaggtggcgggcgtccggcgtcttctcgtgcagacggtggccgtcgccccgcccgcgatgacagaaataaccgcggcgatgaccgcaaacgtgatgaccgtaagcgtgacgatcgcaaacgcgatgatgttgtccgtgacggtggatcgccatggcgtaccgtttctcgcgcgcccggtgaagaggcgaccgaaaaagccgatcacggcggtatcagcggaaaaagctttatcgatccggaagtgctgcgtcgtcagcgtgcggaagagacccgtgtctacggtgagaacgcctgtcaggccctgttccagagccgcccggagtgtatcgttcgtgcatggtttattcagagcgtgaccccgcgtttcaaagaagcgctgcgctggatggcggcgaaccgcaaagcctatcacgtggttgacgatgccgagctgacaaaagcgtccgggactgaacaccacggcggcgtctgcttcctgatcaaaaaacgtaacggcactaccgtgcagcagtgggtcagccaggcggatgccgatgactgcgtgctggcgctggaagatgtgggtaacccgcataacctgggcgctatgatgcgtagctgcgcgcactttggcgtgaaaggcgttctgttgcaggatgccgcgctgctggaatccggtgcggcgattcgtactgcggaaggcggtgcggagcatgttcagccgatcaccggcgacagcgtgctggaagccctggagcaattccgtaaagcgggctacaccattgtcaccacctcaagccgtgccgctacgccgctgtttaaagcgacgttgccgcgcaaaatggtgctggtgttaggtcaggagcgtgatggtctgtctgatgcggcactctccagcgctgacctgagcgtctctatcgacggcactggcaacgttgaaagcctgaacgtatccgttgcgaccggcgtgctgctggcggaatggtggcgtcagaacaaggcataa

SEQ ID NO: 118261 - DNA, 690 bp, Enterobacter cloacae
atgacaacacctttaacctggcatgacgtgctggcagaagagaagcagcagccctattttattaacaccctcagtaccgttgcggctgaacggcaggccggccagacaatttatccgccgcagaaagatgtgtttaacgccttccgctacaccgaactgagtgatgtaaaggtggttatcctggggcaggatccgtaccacggccccgggcaggctcacggactggcattttccgtgcgtccgggcgtggccatccccccttctctgctgaatatgtataaagagctggaaggaacgattcctggtttcacccgccctaatcacggttatctggaaagctgggcgcgccagggcgtgctgttgctgaataccgtattaactgtccgggcgggtcaggcacactcccacgccagtctgggatgggaaacctttaccgataaggttatcagcctgatcaatgagcatcgtgaaggcgtcgtgtttttactctggggttcgcatgcccaaaagaaaggggcgattatcgatcgtcagcgtcatcacgtgctgaaggcaccgcacccgtcgccgctgtctgcgcatcgcggtttctttggcagtaatcattttgttctgacgaatgagtggctggaaaagcgtggcgaaaagccgattgactggatgcctgtgttaccggcagagagcgagtag

SEQ ID NO: 118262 - DNA, 384 bp, Enterobacter cloacae
atgattacaggtatccagattactaaagctgcaaatgacgatctgctgaactctttctggctgctggacagcgagaaaaacgaagcgcgctgtgtagtagcgaaagcaggttttgcggaagacgaaatcgttccggtgagcaaactgggcgaaattgaataccgtgaaattccaatgcaagtgcaaccagaagtacgcgtggaaggcggtcagcacctgaacgttaacgtcctgcgtcgcgaaacgctgatggatgccgttgagcacccggaaaaatacccgcagctgaccatccgtgtgtctggctatgcggtgcgtttcaactctctgaccccggaacagcagcgcgacgttatcgcgcgtacctttactgaaagcctgtaa

SEQ ID NO: 118263 - DNA, 1329 bp, Enterobacter cloacae
atgactgtaacgactttttccgaacttgaactcgatgaaagcctgctcaatgcccttgagagcaaaggctttacacgcccgaccgccattcaggccgcggccattccgcctgcgcttgagggccgcgatgtgctcggttctgcgccaaccggcacggggaagacagcagcctacttgctgcctgtgttgcagcatttgctcgactttccgcgtaaaaaatcaggcccgccgcgcattttgatcctgaccccgacccgtgaactggcgatgcaggttgccgaacacgcgcgtgagctggcggcgaacacccatctggatatcgcgaccatcaccggcggcgtagcgtatatgaaccacgccgaagtgttcagcgaaaaccaggatatcgttgtcgcgacgacgggccgtctgctgcaatacataaaagaagagaacttcgactgccgcgcggtggaaacgctgattctcgatgaagctgaccgcatgctggacatgggctttgcccaggatatcgaacacatcgcgggtgaaacgcgctggcgtaatcagacaatgctgttctcggcaacccttgaaggggatgccattaaagatttcgccgaacgtctgctggaagatccggtggaagtgtccgctacgccatcgacccgtgagcgtaagaagatccaccagtggtactaccgcgcagataaccttgagcataaggttgagttgttgaaacacctgctgaagcaggaagaggcaacccgtaccatcgtcttcgtacgcaaacgtgagcgcgtgcatgagctggcagaaatgctgcgcaacgccggcattaacaactgctatctcgaaggtgaaatggcgcaggttaagcgaaccgaagggattaagcgcctgaccgatggccgcgtgaatgtgctggttgccaccgatgttgccgcgcgtgggatcgacatcccggacgtgagccacgtaatcaactttgatatgccgcgcagcggtgatacttacctgcaccgtattggtcgtaccggccgtgcgggccgcaaaggtattgctatctctctggtagaagcgcacgaccatttgctgctacagaaaattggccgctacgttgaggagccgctgaaagctcgcgtgattgacgggcttcgtccgaccacacgtgcgccgagtgaaaaaatgacgggtaaaccgtccaagaaagcgctcgcgaaacgtgctgagagaaaagagaaagaaaaagagaagccgcgcgttaaacagcgccaccgcgataccaaaaatattggtaagcgccgtaagccaagttctgctgcgccagagacaaaaacggaagagtaa

SEQ ID NO: 118264 - DNA, 738 bp, Enterobacter cloacae
atgtctcaactcaaagcgcagttgcgccgcgatggttttacgtttaaacagttttttgtggcgcacgatcgttgtgcgatgaaagtcggcacagacggtattttactgggtgcatgggcgcctgtcgcaggtgtaaaacgcattctggatattggtacgggcagcggacttcaggcgctgatgctcgcgcagcgaacggaagaacacgtcacgatcgacgccgttgagcttgatcctcaggcggctcggcaggcaagtgaaaacgctgccgactctccgtgggcagatcgcatcagggtagaatgcgccgatgtcctgacctgggcgtcggagcaaaccgcgcgttacgatttgattgtcagcaatccgccgtatttcacgccaggcgtggaatgtggaacgccagaacgcgagcaggcacgttacaccggctcgctcgatcacaaggcgctactgaccagtgcggcggagctcatctcggaagagggatttttctgcgtggtcttgcctgaaagcacgggtaataccttcattgagatcgcacgggggatcggctggaatctgcgtcttcgtaccgatatttcggatacggaaggacgcttaccgcaccgcgtgttgctggcgctctcgccgaaagagggggaatgctttatcgacaggatggtcattcgtgggccagaccagcgttattccgaagattacactgcactgacccaggccttttatctgtttatgtga

SEQ ID NO: 118265 - DNA, 1620 bp, Enterobacter cloacae
atgaacacgacgcctgaacttcattgtgatgtactgatcatcggcagcggtgctgccggcctatccctcgcactgcgcctggcggaacatcagaacgtaatcgtgctgagtaaagggccgatgagcgaaggttccaccttctatgcacaaggcggtattgccgccgtgtttgatgaaacggatagtatagcctcgcacgtagaagacaccctgattgccggcgccgggatcgtggatgagcatgcggcagagtttgtcgccagcaatgcccgccactgcgtgcaatggcttatcgatcagggcgtgctgtttgatacgcatgttcagcctaatggtgaagagagctatcacctgacccgtgaaggcgggcacagccaccgccgtattctgcacgctgctgatgcaaccggaaaagcggttgaaaccacgctggtcagcaaagccctcagccatcctaatattcgggtgctggagcgcagcaacgccgtcgacctgattatttccgataagattggcctgcccggcacgcgccgtgttgtcggcgcatgggtgtggaatcggaataaagagaaggtggaaacctgccaggcaaaagccgttgtgctggcgactggcggcgcctccaaggtttaccagtacacgactaacccggatatcgcctccggagacggtatcgccatggcctggcgcgcaggctgccgcgtggcgaatatggagtttaatcaattccatcctaccgccctgttccacccgcaggcacgtaacttcctgttaactgaagcgttgcgcggcgaaggcgcgtatctgaagcgtccggacggttcccggtttatgccggacttcgacccccgaggtgaacttgccccgcgggatatcgtggcccgcgccattgaccacgagatgaagcggcttggcgtcgactgtatgtatctggacattagccataaaccggaagactttattcgccagcacttcccgatgatttatgaaaagctgctgagtctgggtattgatttaacccgcgatccggtgccgattgtacctgccgcacactatacctgtggcggggtgatggttgacgatcatggtcgtaccgacgtggatggtttgtatgcgatcggcgaggtcagctacaccggcctgcatggtgcgaatcgcatggcctcaaactcgctgctggagtgtctggtgtatgggtggtcggctgcggaagatattaccaaacgcatgccctatgcacgtccgacaacacacttgccggcatgggatgaaagtcgggtagaaaacccggacgaactggtggttatccagcataactggcacgagctgcggcttttcatgtgggattatgtcgggattgtacgcacaacgaagcgtctggaacgcgcgttacgccgcatcatgatgttgcagcaggaaattgatgaatattacgccaacttccgcgtttctaataatctgctggagctgcgcaaccttgtgcaggttgccgagctgattgtgcgctgtgcgatgatgcgcaaagagagccgtggcctgcattatacgctggactatcccgaaccgcttgaaatgtccggcccgtcggtgttgacgccgcaggttcacataaacagataa

SEQ ID NO: 118266 - DNA, 576 bp, Enterobacter cloacae
atgagcgagcagttaacggaccaggtcctggttgaacgggtccagaagggagatcagaaagcttttaacctactggtggtgcgctaccagcataaggtagcgagtctggtttcccgctatgtaccgtcaggcgatgttcctgatgtggtgcaagagtcttttattaaggcctatcgcgcgctggattcattccggggggatagtgctttttatacctggctgtatcgtattgcagtcaatacggctaagaattatttggttgctcagggccgtcgtccgccttctagtgacgttgacgctatcgacgcagaaaacttcgaaagtggtggcgcgctgaaagaaatttcgaaccctgagaacttaatgttgtcagaagaactgagacaaatcgtttttcgcacgatcgagtcgctcccggaagatttacgcatggcaattacgttacgggagctggatggcctaagctatgaagagatagccgccatcatggattgtccggtcggcacggttcgttcacgaattttccgtgcgcgagaagccattgataataaagttcaaccgcttatcaggcgttga

SEQ ID NO: 118267 - DNA, 651 bp, Enterobacter cloacae
atgcagaaagaaaaactttccgctttaatggatggtgaaacgctggataatgagctgctcgatgagttgtctcattctcccgaaatgcaacagacctgggagagctatcatcttatccgcgactctctgcgcggtgataccagcgaggttctccatttcgatatctcagcacgcgttatggcggccattgagaacgaacctgttcatcagaccacgccgctgattcctgaagcgcagcctgcacctcaccaatggcagaaaatgccgttctggcacaaggtgcgtccatgggccagccagctcacccaaatgggggtcgctgcgtgcgtatcgcttgcagttatcgttggggtccagcactataatactcagtctgaagccaatcagcagcctgaagcgccagtgttcaatacgctgccgatgatgggtaaagccagcccggttagcctgggcgtaccggcagatgcctccgcaagcggcggacaacaacagcaggtacaggagcagcgccgtcgcattaatgcgatgttgcaggattacgagttgcagcgccgtctgcactccgagcagcttcagtttgagcaggcccaaacccagcaggctgctgtgcaggtgccaggaaaccaaactttaggaacgcaatcgcagtaa

SEQ ID NO: 118268 - DNA, 954 bp, Enterobacter cloacae
atgaagcaactttggttcgccatgtctttgatggcgggtagcctgttcttctctgctaacgcctcggctgatgtttcatccggggcgttgttgcagcaaatgaatctggccagccagtcactcaattacgagttggcatttatcagcatcaataagcagggtgtcgaatcgttacgctatcgccacgcccgccttgataaccagccgctcgcccagcttttacagatggatggcccgcgtcgggaagtggtccagcgtgggaacgaaatcagctatttcgagcctggccttgagccgtttacgctcaatggtgactacatcgttgactccctgccgtcgctcatttacaccgattttaaacgtctcgccccctactatgattttatctcggtggggcgaacgcgtattgccgacaggctgtgcgaagtgatccgcgttgttgcgcgggatgggacacgttacagctatatcgtctggattgacgcagagacgaagctgccgatgcgcgttgatctgctcgatcgcgacggtgagacgctggagcagttccgcgtgatctccttcgatgtgaacagtcaggttgacaacagcatgcagaatctggccaaagccagcctgccgcctttgctttccgtgcctgccggcgattctgtctattttaactgggtaccatcctggatcccgcaagggttcagcgaagtttccagcagccgtcgccagctcccaaccatcgaaacaccagttgagtcgcgactctattccgatgggctgtttagcttctcggtgaatatcaatcgcgctacggcgaacagttccgaacagatgctccgtaccggtcgccggacggtcagcacgacggtgcgcgataatgcggaaattaccattgtcggtgaattaccgccgccaacggcaaaacgtatttcagacagcattaaattcagggctgcgcaatga

SEQ ID NO: 118269 - DNA, 477 bp, Enterobacter cloacae
atgattaaagagtgggccacggtcgtatcctggcaggatggcgtagcgcttgtcagctgtgacgttaaagcatcatgcagcagctgcgcttcgcgagccggttgcggcagccgcgtgttgaataagctggggccgcaaacgtcgcacactattgctgtgccgagcgatcagccgctggtggcagggcaaaaagtggagctgggcatcgctgaaggtagcctgctcacttccgccatgctggtttacctttctccgctggcaggtctgttcgtgatgggcggggttttccagatgctgttcggcacagatttggccgccatgtgcggggccgctttgggcggcgtgggcgggttctggcttgctaaaggcgtttccccaaggcttgccgcccgggaagcgtggcagcccgttatcctcagcgttgcactggcacccgaccaacttcgtgttgagacgctctcttctgaggcccggtaa

SEQ ID NO: 118270 - DNA, 219 bp, Enterobacter cloacae
atggctatttcagatagttatctaaagtcgtgccttgggcgcgaacgagacaaagttgaagaaaaggcagaccgtgatggtctgtgggtacgcatctccaaaaagggggccgttacttttttctaccgattccgcttcctgggcaaacaggacaagatgacgatcggcagctatccggagttcggattaaaagccgcgcgcgatgaagtcgcaaagtag

SEQ ID NO: 118271 - DNA, 903 bp, Enterobacter cloacae
atggtctgcattcagaaagaatcagccgggcaggtcctccgctcgtttgaactgcacgttttccccaagctcgggaaataccctgcgcatcagctcacgctacacaactggctcactgtcctggacagattggcccaaggttacagcgagatcacccggcgcgtgatcagcaacggccgacagtgttattcctgggcagtgaaacggcaactgctggaagttaacccgctgtcagaaatgtctgggcgtgatttcggcatccagaaacaaatgggtgagcgaaccctggaccgtaaagaactggcgattgtctggcgagccattgaggattcccgcctcattgagcgaaacaagatcctctataaattgtctctgatatgggcgtgcagggttggcgaactccggcaggctgaagtcgcacactttgattttgaagaagggatctggactgttccatgggaaaaccacaagacagggcggaagacaaagaaaccgataattcgacctatcatcccggaaatgctcccgctgataaaacgggccattgagctggcgccaggacgctttgttttttcaaaatatgaagacaagccgatgagtgaaggcttccatatgagcatcagcagtaacctggttaagttcatgctcaaggcctataacgagcaggtcccacactttactattcatgatctgcgcaggactgcgcgaacgaatttctcagagctaaccgagccgcatatcgccgaaataatgcttggccacaaactgcctggtgtgtggtcagtgtacgacaagcacacctatgttgaggaaatgagagtggcatatggtaagtggtgggcccgacttatgagcatcgtcgagcccgacattctggagttcacgccgcgtcaggtcgggtga

SEQ ID NO: 118272 - DNA, 285 bp, Enterobacter cloacae
atgagcaaagcaacgaataaatttgagctgatgagcactaaagacatctgcgggcagctgtgtatttcctcacgtacgctcgaacgctacaggaaaagagccccaaacgagaaccctttccctgagccagattgcgcttacatgggtggacccaataaatggctcagaaccaaagtcaccgcctggcagattaaagagatgtcacgatcaacccgtaagccgatgtctcacctgaacctaacccgtgatgataaaggccgtctcacccgacctgacgcggcgtga

SEQ ID NO: 118273 - DNA, 243 bp, Enterobacter cloacae
atgcgactaattaatcgtggtagtcagcaatccccgttagcgcgtcaggcatgcgaaatcgcgctggctgctcaccagcaaagatacggcgactatgggcgcagcaagatgaaagagacgtatacggtgaaggttgaaggcgtgaaggtctgggtggaggtggtgaaccgcaaggcgagctatgtggccacggcaataacaggcatgcgccgcttgcgtgcccttcccggccaggcgtcctga

SEQ ID NO: 118274 - DNA, 693 bp, Enterobacter cloacae
atgacgaaaattattgaacgtgggatgatttttaacggcgagatggtgcgcgccatcctcgacggccgtaagacccagacacgtaggattattaaggactgcacggtcggaagagacccaatttcaaaattcattcagatcgggaagaagtttatcggttgttacccggaagatgttcccgaactaatcagggaatgctgcccgtacggagtaccaggcgatcgcatatgggtgcgggagaccttccaagggcctctctttgatttcgagcaaatggaagcctatcaggaagattcttcgaaattcaaaaagccagaattttgtgtctacaaagctgatggaaagccagctcctgagttttttgacgctgacgacaatctgcattgtggctggcgcccgtcaatccacatgccgcgctgggcgtcccgcatcacgctggagattaccggcgttcgggtcgagcagttaaagagcatcagcgaagaggaggcccgatcagaaggtgttgcccgattgcgtgaaggtttttggaaacattaccagccgggctggacgcagcatcagctaagcgccaggggatcattcgctacgctctgggattccatttacggctctggtgaatgggatagaaatccttgggtctgggtggtcgagtttaaccgtatcgaaggagatgagcatgcgactaattaa

SEQ ID NO: 118275 - DNA, 1113 bp, Enterobacter cloacae
atgatggaaaacatgaatatcgtaactgctgagcagcaggctccaaacacaatctctgccagcaatgcaattttcaatgtgcaggctcttgggcagcttaccgcctttgcaaacctgatggctgactctcaggttactgttcctgcacacctggcagggaagcctgccgattgcatggcgattgtcatgcaggctatgcaatggggtatgaatccttacgcagtggcgcaaaaaacacatctggttaacggcgtactgggatatgaagctcaactgatcaacgctgtgattgccagttcaagcgctattcgcggacgcttccactaccgctacggcggcgaatgggagcgatgcgcaaaaacgaaagagattcagcgtaaaaagcatgggaaaaacggggaatacactgtcacagaacgcatccgtggctggaatgatgaagatgaaaacggcttatttgtacaggttggcgccattttgcgaggtgaatctgaaatcacctggggtgaacctgtttacctttcaggaattgtcactcgcaactcaccgctctgggtttccaatcctaagcaacagatcgcttatctggcggtgaagtactgggctcgcctgtattgccctgaagtcatcctcggcgtctatagtccggacgaagttgagcagcgcactgagaaagaaataaatccggcgccgcagcgaatgagcatggctgaaattgctgcggacaacgtatctagcccacagaatacgcatcagtcctcagaaaatatcgacactctggccaaggatttccgcgaccgcattgaagccgctcaggacgtagatagcgccaaagcggtccgtgccgacatcgaaaccgctaaagcgacgcttggatccgcactgttcaccgagctgaaaaacaaagccgttaagcggtactacctgatcgatgcacgtaacaaggttgaggcggctatcaactccctaccttctccggaagaaccggacgcgatagagcggttcacggaagccgagcgtgtgctcgcatcttcaaagcgtcacctaggcgacgagctgcacgatcagttcagcatcaccctggcggatatgaaaccggaatacgtggactaa

SEQ ID NO: 118276 - DNA, 705 bp, Enterobacter cloacae
ttggtcgcgcaggaagcacagaagccacaaccactgaaagtctctggcacgaaggccgatctgattcaggccgtgaaagcagtcaaaccagatgctgtttttgccgacgagttgctggatgcctggcgcgataacccggaagggaaagtgctggtcacccgccagcagttgagcaccgcgctgaacattcaaaaagcacttctggctcacccgaccgccggcatgctactgacccacccgagccgcgccgtcgaggtgagttacttcggctttgacgaggagacgggcctggaagttcgtgtgcgcccggacctcgagatcgacctggacggtgtgcgtatcggctcagacctgaaaactatcagcatgtggaacgtaaagcaggaaagcctgcgcgcccggctgcaccgggaaattattgaacgtgattatcacctgagcgcggctatgtactgcgaaaccgcagcgctggaccagttcttctggattttcgtcaacaaagacgagaactaccactggatcgccatcatcgaggcatccgctgaattactggagctgggcatgctcgagtaccgtaaagcgatgcgcgctatcgcaaccggattcgacacaggtgaatggccagcacctatcactgccgactacaccgacgaactgaacgacttcgaccagcgccgcctcgaagcgctgcgtactcaggcataa

SEQ ID NO: 118277 - DNA, 2607 bp, Enterobacter cloacae
atggaatttttccatctgctcaaagccagtcagaagtctggcaagaaagatgcggtgatttggttcactgcgaaaagtgcagcccgcgccaatctccaactcgatgttgcactggaagaagcaggcattgaagaaactggccgcggtaaagactacgccaaaccgatccgcaccgatttccccgtatataacgacctgccggaagaaggcacggtggattacacctggtgcgagcgctacgcactccaggacgatggacgcacctggctgccaaaggcaggagctgagtctactggatccgtgtttaacactgccgctccggaaacgaccgttaaagtcgaaactatcggcgagagtgtcacgcttgaaaaccgtacttcagcagtccgttttgccttccacctgaccagcgacaaatatcagacgcatatcagtaaagcgcagcagctggctgccagcgaaatgtcactggatgaaggcaacacctatctccagaatctgctactggcgaagaacgacacccctgaagttgccgaactcagcctaaacgctgagtggaaactggtacaggcgattaagcaggtattcgcgccagatgaagagcacgaagtaaaactactcgctgcttttatggccgactggttgagagtagatgctggcgaccgcaatgaggtagtaagagagtggaggagcggaaagcttactctgctcaaatcagaaagaaccagcgacgccggggttgaaactggccagcatatcgctactgatgacggtatccagatcggcgagcacgacgatgaaaacacccgttatccagtgtgcagaatgcccttccgtaagcagcttcttgcacagttcaccgccgacgaactacgcctccacgttacccgcgaagagtacgaagctatcagcatgctggagatggacactgacaacagctacgtccagaacctactgctggcggcagaaaactgcgaagaggttaagggctacgataccaaagacctgtggcgctacaccgacgccattcgcaaggtattcagccaagagaagcgtcacgaactcgcgttggttcttcgtttcaccaaaatatgggcagaaactgattacattgaccgtggcatcctggcgcgtgaatgggctgccggtaaccgcatcagcagcgtgcagcgtactgattccggcactaacgctgatggcggctatgttaccgaccgcggcgaaggcgcgcatcatacgatggacacactcgatcttgagatcgcatgcgccctgctgcctatggattttcatcactttgaaatcccctccagcgttttgcgccgcgccaaagagatcgtggcgaagcgagaagaaccatggaaatcgtggagtgccattctgcgcaaccagcctggggttttgtcggcaaaccgcgcggctatcttcaacttgatccgcatcgctccagaaaacattcatcacactccagtggctcatcttgagttcgtgaataaaaccatgacggcagagtttaactccgcggttgagctccttccgttatctgcgccagttgttgaggtgggagctcaagcagctcaaccgaaagttgaaaacctcggaggtggaattttctccatcgatgccctattggatggaactaccgattcggtcatcaatacctcctcaaatgaagtccaaaaaacggaaaacgcagcggagaccaccagcgatgtgcagatggaaacgactcagccagagaaagtcgaaaatactgatccggtacaaccaggcgaaggcgttgatgcagctgatacgcaagcagttaccgtagctccggcagagatactggccgcagccgcaccaagcctcactaaccaggaacaggctggtgttcaccaaaaaacagattctgtcagccaggaagagccagaacctgctcaaagcgaaccagaatcggcacaaaacgaaccagaagtgcatcaggaagaaccagctgttgaatatcctgcttatttcgagccaggccgctatgaaggtcttccgaacgaggtttaccacgctgccaacggcatcagctcaacccaagtgaaagatgcgcgcgtatcgctgatgtacttcaatgcgcgccacgttgagaaaaccatcgtcaaagaacgctccgcagttctggacatgggcaacttagtgcatgcgctggcgttgcagcctgaacaactggatgcagaattcagcgttgaaccggctatcccggaaggcgcattcacaacagccgcgtccctgcgcgcctttatcgatgagtacaacgctagcctgccggcgctgctgtctgccgacgacatcaaggtgttactggaacagtacaacgccactttacccgcgcaggtgccgctgggcgccagcctggaagaaactgcgcagaactatatggcgctgccagctgatttccagcgtatcgatgcagaccagaagcagacggcaacggcaatgaaggcatgcatcaaagagtacaacgccaccctgccgccgcaggtgaaaaccagcggtagccgcgacgcgcttctcgaacaactggcgattatcaatttgacttggtcgcgcaggaagcacagaagccacaaccactga

SEQ ID NO: 118278 - DNA, 252 bp, Enterobacter cloacae
atgttccgccagcctggcgacaagggcaaacaagagggaatcatcatggttcatcagcactatggcacccagacggtcaaccgcggcgcagttatgccaggcatgctcgtcaaacacaaagattcaacctggaccgcgtctgctaatgcacgaggccgtctgtatcttcaccgtggcgtcgaacgcacctacaccaaagatttgctggttgaggtctatttaaacggcgttggaaatggccttagccattaa

SEQ ID NO: 118279 - DNA, 402 bp, Enterobacter cloacae
atgaatgagattaactacccagtgtttgccaagcgaattcaacaggtcatgacagaaaacggctggaacaaatccgatcttgccaagaaagtcatgctctctcacacggctgtgcaaaattgggccaaagggaaaaacgttgcgagtggtgaaagactaaaacggttagccgctgctacgggtaaacccgagcactggttctttctccctatagaagaaattgactcctccgaacgctctcagaggaagctggacgaaactgaattagtgatgctttctctcttcaatcagcttcccgaagctgagaagctacgtcttatccttcacacgaaaggcgtcttgaatgatttagagctgctcaagaacgacgtctacgatctgataaacaacaaccacaaataa

SEQ ID NO: 118280 - DNA, 231 bp, Enterobacter cloacae
atgaacaaagaaactcagcaaaaaattagtaacgcagcttcccgggcctctattggtaagcattttggtatcagcggtcaggctgtcgggaagtggatttataaaaatggaattccacagaaacgcatcatcccgttatgccagctcctgggctgggtggttacccctcatgaaattgatcccgaagcatatccaaatcccactgacgggctgccaaaacaggagtcctga

SEQ ID NO: 118281 - DNA, 543 bp, Enterobacter cloacae
atgcacggcatttcatatcaacaaaataccggaataacaccggcggcgatgataaatcgcaatcagccaagcgcggcagataagcacgaacagatccgcgacgccgttcgtgcctgggccgcttcactggataaccaggatgtcgttgccggaatcatcgttgaggagtgggaacgacagggcggcgccgggctggaatttcccgaagacctgagccgtaagcgtcagaaactcttccgctggctcgatggtgatacggagtatgcacgcaaaaacatcagccagctgtcgcccgcgatcatcgccgttctaccgcttgagttccgtggccgcctggtacctcaggactgctttatgacgcgctatgcagcgatggagaaggagatcggcgaagcgaaacgcgcggtgattctgagggcgccgcagcaccagctggtgaaagaggtgagggagggcattgaacacctgctggcgcttctgcctggggaggctgttgttcaggttctgagtggtctcgcagtcatgggaccgggcgtcatgtga

SEQ ID NO: 118282 - DNA, 993 bp, Enterobacter cloacae
atggagaaccagaagaccggattcatcccgttgtaccggagcgtactgaagaagccctgggcgaaagatgtgttcctgcgcacgttgtgggagaaccttcttttgggtgctgcacgtcagccctacacggcgaactttaaaggccgtcaatggcccttacaaaccggacaactggtaaccacaacggccgatttggggctgaaattatgcgaccgggaagggaagccgagtagtcgtcacgccgtggacaggatgcttgatgttttcgaacgcgaaggaatgatttctcgttctggagagaagcgaaaaggcactgtgataaccatcacaaattatgagcaatatgctcaaaaaatagacgatttacccgcgcaattccccgcgcataacggcgagcatatcaccgcgcatgacgaagccagtagtggcgcggcttgcgagggtcatgccgcgcatttacccgcgcataagaccgcgcaattccccgcgcatcatgaacaacaatataataacaacaatataaataataagatctcttcgtctcggaattctgaagaatcccgaaacgaggcgactcaaaaattcctctctcgtcaccctgaagctgccgacggaatctacaccccggcaggaaaatcatggggtactgctgacgatctcaaagccgctcgctggatacactccctgcgcctgacggtcaatgccagcctgagcgaaccgaaatgggtcgaatgggctaacacaatccgcctgatgcgcgtccaggacaaacgtacgcacttcgagatttgcgatctgttcaagtgggccaacaaggatgatttctggaaagacaacatcctgagcccgtcaagtctgcgcaggaagtgggacgacctaactaccaagcgcctgcgtagcggtggacagacaacgaagaccactgccaagggcaaggtcgatttcaacaacacagactggatcaacggggtgttcgatgaaaagtctttctga

SEQ ID NO: 118283 - DNA, 693 bp, Enterobacter cloacae
atgaaaagtctttctgagcagatggtcagcatagaccgtgaaaattttgcgcgcatagcacgcggcatgcctgaattgccggatgcgcaggacacgcccgctgagcagaccgctgaaatcttcaacgcgctgtttagcgccttgcgtgcaacattcccggccagcgtgcatagcttcagcgaccagtctgagtttgacgaactgcgccgccagtgggctcaggcatttcgtgaaaacgggatcaccaccatggaacaggtaaacgccgggctgcgcattgcacgtcgccaggaacgcccgttcctgccgtcgccaggtcagttcatcgcatggtgtcgggaaggtaatggcgctctcggtatcaccgttgacgatgtcatgtccgaatactggcgctggcgaaagctggtttttcgctacccgaccagtgagcaatacccgtggagccagcccgtgctctatcacatttgcctggaactgcgcagacgcggtactgacggccagctcagcgagaaagaacttgttcgcgttgctggtgatctactccacgactgggaaatgcgtgttcttgatggaaaacctgttccaccagtacgccgggcactaaccgcaccagctcaggatcgaggcccgactccggcgcagatgctaatggcgaaatacaaacagcgaaaagacgctggactgatttga

SEQ ID NO: 118284 - DNA, 687 bp, Enterobacter cloacae
atggaaaccgtaattcaagcactggaaaaaatgggccgggcgacataccgcgaagttgctgcccgtcttgatatcgacccggtcgatgcgctcaccatgttacgtgagcagcgtgatcaggggttgtgcgattttggcgatggcggctggttcctcggtaccgtgacaggtaagcctcagcagccaacgctaaaggctcctgtgaatccggccccgcgtctgaaaggtgaggagccggaacccgttgatcctgatgtcgtccgacagcagctgcgtgagcagggggcaatgacgacagtttcgctggctgcggccgtcaatcgcaatgcccgcggaatggtctctgttcttcgcgcgctggagcgccagggcgttgtggtgaagaacgggaagggcaaaggcgttacctggtcccttgctgttgttacagaaccccttaagcaagaaccggtaccggaggcacctgccgcgccggaagaagcaaaaccagtcgaacagatcgtgagtgaaatcccctcgttcaccgaagggcgcgccgcagtcgaagcggtaccagcggtgcgggacatttctcgcgaaatccgccgcaccagaaacaagctggagcaactgaccaaactgcgtgacgcggttcgtgttattggtcgccacagaaatctcgtgcagcagctgacagggagggaataa

SEQ ID NO: 118285 - DNA, 261 bp, Enterobacter cloacae
atggccagaaagaaaaccgacaaagaacgcaccctgatcatcaaccggattatcgaactggtgaaggagcaggggcgcatcaccacgaatgacgtcgttgcgatgttcggcctgcaccggaccacggcggagaaatatctccgcgtagcggtggagcagggtggcctggttcgccacgggcgctgcggtatcttccgtgacctgcgggcaacaatcgattttgacctgaaacgtttttcacacaacaaggcggcagcatga

SEQ ID NO: 118286 - DNA, 489 bp, Enterobacter cloacae
atgattaccgagaaagacaacgttttttattgtgactgcggattctcctttgagagggggcgcagcgggaatcatgaatgtggggacggtcttcgcaggaagcttgaatccttccgcacggcattcttggaatacagcgaaaagacagattggatgcaggccgataaacgttttgacgttattaagccctggggaaaacaccgcgccgacgtgctgaaggaatacattgaacatcttgaatcgaagctgttagcaggagaaagcggattccctctgctcaccgttgagcgattaatgcgcgagaaagaagctctcgagaagcgagtggttgagcttgaagcgaggatggtgaagctgcctgagcgttacgaggtagaaatatgtccaactccttcccctgatggggagtggtattcacgcgaagatattttgtcggccctgatatctgctggcgtcagctacgccgccgcagccaggaaaggagagtga

SEQ ID NO: 118287 - DNA, 210 bp, Enterobacter cloacae
atggctaagtcaccattacgctatttagttcgctcgtataaaaaaacgtttattgcttggggcattcctaagcgaaccgcaaagcaaatggctcgtgaaaatgctctggttacatggtttgagcaggggcaattggttcggcaggaagtgacggaccaacatactgccgacgattacgtttctgaagatttaagttattggggagactaa

SEQ ID NO: 118288 - DNA, 405 bp, Enterobacter cloacae
atgagcgaactaaccaaagaatggctcctgaagactatcgcggagcttgaagaagagcgcgatgcgacgccaggcgcagtaaacgaagatgcggctatggcgcttgctgcgatgaagctggcgctggcatcgctcgaagcaaggagccgcaaactttttacatgtagcgcgtgtggcgccgagggtttggacgagcctttagagtcgaagtgccattgcaatgaagatggcgcgcactggattgaaagtgttgtttacaccgctccgccagcgctgatgttgccggaggaaatgccaaaaggcctggccggtcagattattagcctgctggcgcataacattggcgataaatttttggcacagaaaatctggaatgtctgccgcgctgccgcaaaaggagagtga

SEQ ID NO: 118289 - DNA, 747 bp, Enterobacter cloacae
atgtccgagaaaataatactcgatatgtgctgcggttcccgcatgttctggttaaacaaatgcgactctcgcgctgtctttaccgacattcgcagtgaggagcatgagctttgcgatggccgccgtctggttatccgtcctgatttcattgctgactttcgtgcgctgccgtttgctgataacaccttccccgtagtggtgttcgatcctcctcatcttgaacgagttggtgaagctgcctggatgggtaaaaaatacgggcgattgaacaaaaaaacgtggcgttctgacctgcgcgccggtttcaaagaggcgttccgagtattgcggccacacggtgtactcattttcaaatggaacgaaacccagattccagttagccaggttctggcgctgacggatgtaaaaccaatcattggtcagcgtaccgggaaaaatgacaaaacccactggatatccttcgttaaagacggtgagccacagaacaactatgacccgcaattgcagtacgccacgaaacgaattatcgaactggaaaacctcctgctggtggacgtgcaggataccgtctggcctgtcgaggtcggaatggtatacagccatattgaaaacgccggggctctcccggcacaccaccagcgccgcctgaaacatcacatcaaccggatgtggcttgagaaaatgccggttccgtcgattatcgtcgctgcccgttcgctggccaccgccatggaggaatacgcgtga

SEQ ID NO: 118290 - DNA, 1884 bp, Enterobacter cloacae
gtgagagaaattattgtcgataactttgccggcggcggcggggcgagtacaggcattgaaatggctatcgggcgcagtgtggatattgcgatcaaccacgacccgaacgccgttgcaatgcacaccaccaaccaccccgatacgctgcactattgcgaatccgtgtttgacgtaaaccctcagctggcgaccgctggccgcccggtggggctggcgtggttctccccggactgtcgccacttctcgaaagccaaaggctcgaagccggtggagaaagatattcgcggtctggcgtggatcgtcattcgttgggcgctggcggtgcgaccgcgcgtgatgatgctggagaacgtggaggagttcaaaacgtggggtccgctcatcgtatcggctgacggtgggcagcgcccggacccggaacgcgctggcgaaaccttcgaagcgttctgcggcatgctgtccggaggtatccccgccgggcatccggcgctggtggagtgctgcgagttcctgggcattgccgccgacggcatgcaggcgcagcagctggtggccgggctcggttatgcagtcgattaccgcgaactgcgcgcctgcgactttggcgcgccgaccatccggaagcggttcttcatggtgatgcgctgcgacggggtgcatgtgacctggccggaagtaacccacgcggatccgaaatctccagcagtgcaggctggtaagctggcaccgtggcgaacagctgctgaatgcatcgactggtcgattgccgcgccgtcaatttttggccgtaaaaagccgctggcagaaaacactctgaagcggatcgcccggggaattcagcgtttcgtcctggacaatctgacgccgttcatcgtgaagtgtaaccataccagcaaccgttcgggctatgactgtttcagaggccagagcctgaatgagcctttgcagaccatcacaaaaaaacacggctacgcaatcgcagtaccgcacctgacgaagttccgcacgggtgccaccgggcaggaagtaactgaaccggtaccgacgatcaccgcaggtacatcgaagcgtccgggcggcaacgggcatgcactgggtatggtagaagccgcgcttacaccttttgttggtcgtcagtttggcggcagcgtaggacaccgggcagacgaacccagtgcgacaatcaccgctggtggcggcggcaaatcgcagctggttatgcccacgctgattcagatgggctatggcgaacgtcctgggcaggagcctcgcgtgctgcaactggataacccgctgggtaccgttacggcaggcggcaataaattcgccactgtgagcgcgttcctggcgaagcactacggcgggaattaccagggcgctggcgtgggcatggacgaaccgatgcactctgtgacaaccgtcgatcaccatgccgcggtaacctctcatctggtgaagctgcgtggcacctgccgggacgggcagcgcaccgaccagccaatgccgacaattaccgctggcggtacgcatgtgggggaggtgaaaaccatgctggccgtagacgggtacgacgagcagcgcgcacagcaggtgctggagttcctgcgcgaatactgtggcccggacagcactggcctggtgacgctggatggggtggtttatcgcatagtcgatattggcatgcgcatgctgcaaccacatgagctataccgggcgcagggattccctgagtggtacatcatcgaccaggatttccgtggcgtgaagtacgcgaaggataagcaggtggcgcgttgtggaaatgctgttcctccgccattcgccgaagcgctggtgagggcaaatctgcctgaactttgtgtgtcgagagagttggtggcctga

SEQ ID NO: 118291 - DNA, 417 bp, Enterobacter cloacae
gtgaaaaaattccttcttctgggcatggtgcttccagtgttatcaggttgcgtgattaaagaacaaacaagatatgtagaatctccagttgctaccaatctcaacaatgcgaccaataatcaggctggtgctgccacaaaaaaatgcagcattacgaattataaagaagcaaaactagatagccagtctccgtcagggactgtgattattgattacggtaatcgattcgatatcatgtttgaaaattttgggaacggtgaggttttccatagtcccatactgaatattgcgaaagaaaatatgattattggctattcaggaagcatgatgtatagcaagggaataggaaagatggctgggttttacggaacgtataatacagattcaaagttcaacaccatattccagtgctattga

SEQ ID NO: 118292 - DNA, 234 bp, Enterobacter cloacae
atgaaaattgagttaaccattgatcgcacaaagaaacttccagatggagcaatgccagcgctggaaaaagaactgctgaaacggctccgaaatcagttcgaggattgcagtctggttgttcgtcgtgctggttcggatgggttaagcgtttatggtggggcaaaggaagcgaagaagacggttgaagggatccttcaggaaacctgggaaagtgcagacgactggttctattaa

SEQ ID NO: 118293 - DNA, 600 bp, Enterobacter cloacae
atggcgcagttacaactcattaagcagtcctcagggatcctgatcccggctacgccggagaccagcgatttgctgcaatcaaaaatcaagctcggcgccgtgctggtggccgatttcaaacaggtacgcaatcctgcgtttcatcgccgcttcttcgctctgctgaatctgggcttcgaatactgggagcctaccggcggcgcaatctcctccaacgagcgcaagctggttaccggctacgctaaattcctggcctcctatggcggaaacgaaggcgcactgctcgatgccgctgagcactatcttgagcaggttgcgagccgccgcgtaacaagcgggatcagcctctgtaaatccttcgatgcataccgcgcctgggtgactattcaggccgggcattatgacgctatcaaacttccggatggcacacttcagaagcacccacgcagtatttcattcgccaacatggacgaaattgagttccagcagctgtacaaggccgcgcttgatgtcctctggcgctggatattatccaaggcattcagggaccagcgcgaggcggagaacgccgctgcgcaactcatgagcttcgcggggtga

SEQ ID NO: 118294 - DNA, 210 bp, Enterobacter cloacae
gtgacgggaatgaagaagacctggttccatcataccgattgcacaacccagcagtccgaagaactcattgcggaataccagcgccgcggcgtgaaggtagagcgcaacctgaactcagattatctcacctggaccgtcagcgcccggctgcctgaaggcaataaaccaccgcgtataaatcgccggtggcaaaaccggatatgggggtga

SEQ ID NO: 118295 - DNA, 357 bp, Enterobacter cloacae
atgaaaatttacgaaattacgccgattggcaaaccccgaatgactcagcgcgaccgatggcataaacggccagcaacagcagcgtactgggcatacaaagaacatgtcaggttgctgggcatccgtctgcctgagtccggatatcacgtcacgttcgtcatccccatgccaaagagctggagtaagacgaagcgggcgcaatatgtcggccgtcctcatcaacaaaagcctgacaaagacaatctggaaaaagctctgctggatgcagtgtttgacgaggatagccatgtctgggacggacgggttaccaaaatctggggagaaaccgggcaaatcatcatcgaggaggccagatga

SEQ ID NO: 118296 - DNA, 141 bp, Enterobacter cloacae
atgaagccagaaacgcttgagatactccgcgcacgctggcagcgccttcggatttaccgccgcccgggatcggtgctggtggactaccgcatccttcgtaattttattcgcattaaccagttggcaggagttgcaatatga

SEQ ID NO: 118297 - DNA, 810 bp, Enterobacter cloacae
atgaacctcgaatcaatcgctaaatatttcgcgccaaaatcaccgatgttcagtgactcctcgagggcgactgccaccgacaatttgaccggaactgatgttatggccgcgcttggactggttaacgccaagtgtgggtttggattcgatttataccttgcaaaaattggtatcagctgccctgaccgggcaatggaggcgctttatggagcatcgttggacctatgccgacgctttaaatcagttacagaactcgatgaaaaagttcggcagcgcgttcttgaaattatgtgtgcttttgcataccaggattacgcccgtagtgcggcaagcgttcgcagatgtgactgctgcgatggtagcggctttaccgaagtcgaggtattcaccaacaaaatccaataccctgacggcaagccgccaaaatgggcaaaagttacaaagggtgtttacccctcatactgggaggagtggaaatcagttcgggagagagcgcgcgttctgtgcaaagcgtgtaacggcaaaggcgttatcagcaatgcgtgtcgctgccacgggaaagggagggtgctggataagaaaaagacagaggaacagggcgtgccggtcatgaaggtgtgtgaccgttgcacggggagaggttacgcccggctaaaattttccaatgtgctggagggcgtccgcaccgtatgggatgtaaaaaaaaccaccgcttacggtcagctgcaaccgctgtttgaattgctggtggaagaatgccacaggcaagaaggttatgcagacagcgccttaaaggcagttacgatgtag

SEQ ID NO: 118298 - DNA, 963 bp, Enterobacter cloacae
atgtcagacgataagaaagatccaaagggtaaagctaagggcgggattgctagggcgaagtctcttactaaagagcagcgttctgacattgccaaaaaagcagcggcagcaagatggaaagacaagccgttgaaagcaacccacaagggaagctttatggaagagtttggcattgatactgagtgttatgttttagacaatgaatctaaaacggctgtggtaactaaaaccgggctggcaaaactcattggtcttggggagcgagtaaaagatatcgaccgagttcttaacgctcaatatatgcaagattacgtagacgcagttttgcttgagaaaatggaaaatccttatatttttcaatgggagaacgatggcgcagtactcggttcttttactggcggacatggatatgatatttcagtagtaattgatatttgcaaagcccttacggcagctaaagatagtggcgatcttccagcatctagactaaatgcagctatgcaagctcaagacttagttaactcggcggcaaaggttggtattactaacgttgcttacgctgtagctggattcaaacctgaagtacagcaagtaattgatctcttcaaagcatttgttagggaagaagctaggcagtatgagaaagagtttcccaacgaactttatgaggcttggtacaaaatttatcaattaaacaagccaggacgagggcgtccattcttattcaaaaaattgactattgagcaaatttacaagcccttggccaaaagcgaaggtaagattcttgaccttgctaaaagtagcaaagatgaattcggaaaatccggagacaagatccaccagttcctatctgaggttggcgtcaaggcgctcaagcagcagattggtaaggttttagcggtaacgactctatttgatgagaaagacgcttacgaatctgcattggaaaaagtaaacaagtga

SEQ ID NO: 118299 - DNA, 387 bp, Enterobacter cloacae
atgtccgatccattttccggcacagggctggccggtttagctttgactggagcaagtgtttacggtctattgaccggaactgattacggtgttgtttttggagcatttgcaggcgcagtattctacatagcgacagcagctgacctgagtgtgttacgtcgcctggcctacttcttcgtgtcgtatatcgtcggcattctttgttcggggttgttggggtcaaaactcacatcctggacggggtacaccgagaagcctctggatgctattggtgccgtaatagcttctgcattagccgttcaaatccttacgttcctgaacaagcaggacatcggctcgctggtggcgctgataacgcgccggggaggttcaggtggtactaaatga

SEQ ID NO: 118300 - DNA, 282 bp, Enterobacter cloacae
gtggtactaaatgacccaacagcaactatcaacgcgctgctctgcgccggagttgtaattgctctgatgttttaccgccgtggtgattcgcggcatcggccatggatttcgcgtttagcctggctgattaccgtcacttacagcgctgtaccgctggcgtacctgtgtgggatctacccgcattcatcatgggccaccattgcggccaatatcatattcctttccgtgctggtggccgtcaaaggcaacgttgcacgtctggttgatcatctgaggcactaa

SEQ ID NO: 118301 - DNA, 204 bp, Enterobacter cloacae
atgaaccaatcacaatttcagaaggcggctggtatcagcgccggattagctgcgcgctggtttccgcatatcgacgccgccatgaaggaatacggcatcaccgcaccgcttgatcaggccatgtttattgcccagatggggcatgaaagcaccagatttacccgactggtggagaacctgaatggactgaccccgccccggtag

SEQ ID NO: 118302 - DNA, 954 bp, Enterobacter cloacae
atgacgacacaacgacttcaacgtgactggcgtatcccaaccgccgggctcgccgtgctggtgttacttatggcaggttttgcactgcatacgcactggaatgcttttattcagtggtgcctcgccacccagatcaccctgcaccgatatctggtgatgtatctgctgcaacttaataatcatcagtacagcggtgggctatggttgttaaccggtgcgtttctttatggtgtactccatgccgttggacctgggcacggcaaatttatcgtcaccacgtatctcaccaccaataaagagagccagctcgcggcgcgcgtcgtaccgtttatcggtagcatgatgcagggcgtcagcgcgatcgtctttgtctttatcctggcggttggattgaacctcgcgtcaggagatatcagcaccagccgttggtacgtcgagaaaatcagcgccgtgctgattgccgtcttcggtgcgtttatcatttatcaggcgctcagcagcctgcgtccgcgcaaaatggcgattagcgccatcaagccgcttcaacagcataatgaacgctgtggctgctgccatcacggcgtaggggtggatctgactaaaagcgactggaaaacccgtctgggcgtggtgctggccattggcgcacgcccgtgcagcggggcaattatgatcctgatgttctcgaatgcgctcggtattattagctgggggattgctgctgtgatgacaatgtcgctgggcacggcgctgtcgattatggggctgtcgctggcagtacgttacgcgcgtgaacgcacagtaacctggtttggcggcggcacgtccctgaactgggtaatgccgatggtcaaaattgccggaggggttgttctgatactgttcgcgacgatcctgttccttacggtgatccccgtcagcgccggcggcgactatattgccgcaggatgctaa

SEQ ID NO: 118303 - DNA, 1503 bp, Enterobacter cloacae
atgcttagaaggaaaaaagtaaaacccatcacgctgcgcgatgtcaccattattgatgacgcgaaactgcgcaaagcgattacagcggcctcgctcggtaatgcgatggagtggttcgattttggtgtttacggctttgtggcctatgcacttggtaaagtgttcttccctggtgccgatcccagcttgcagatgattgctgcgctgggtacgttctccgttcccttcctgattcgtcctctcggtggccttttcttcggcatgctgggtgataaatatggtcgccagaagatcctggctattaccattgtcatcatgtcgataagtacattctgtatcggccttattccgtcgtatgcaactattggtatatgggcgccgattctgctgttgatctgtaagatggcgcagggcttctccgttggtggcgaatataccggcgcatcgatttttgtcgctgaatattctccggaccgtaaacgtggctttatgggcagctggctggactttggttcgattgccggttttgtcatgggcgcgggggttgtggttctgatctcaaccgtagtgggtgaagagaacttccttgactggggctggcgtattccgttcttcctggcgctgccgctgggcatcattgggctttatctgcgtcacgccctggaagagacgcctgcgttccagcagcacgttgaaaagctggagcagggtgaccgtgaagggttacaggatggcccgaaagtgtcgttcaaggagattgcgaccaaacactggcgcagcctgctgacctgtattggtctggtgatttccaccaacgtcacctattacatgctgttgacctacatgccgagctacctgtcgcataacctgcactactcggaagaccacggtgtgctgattattatcgccatcatggtgggtatgctgtttgtgcagccgattatgggtctgctgagcgaccgctttggccgtaagccattcattattctcggcagcgtcgccctgttcgcactggcaatcccggcctttattctgattaacagcaatgtgctggggctgattttcgccggtctgctgatgctggcggtgatcctcaactgcttcatcggggtgatggcttctacgctgccggcaatgttcccgacgcatattcgctacagtgcgctggcggcagcctttaatatctccgttctgattgcgggcctgacgccgacgcttgctgcttcactggtggagagcacgcagaacctgatgatgcctgcttactatctgatggtcattgcggtgatcggcctgattaccggtattaccatgaaggagacggcgaatcgtccgttgaaaggggcaacgcctgcggcgtctgatattcaggaagcgaaagagatcctgcgtgagcactacgataatgtagagcagaagattgaagatattgacgcagagattgaggcgctccagacaaaacgctctcgccttgtcgatcagcatccgcgaattaacgagtga

SEQ ID NO: 118304 - DNA, 993 bp, Enterobacter cloacae
atgaagattaaagcaacaatagaacgcatcccgggcgggatgatgctggtcccgctggtacttggcgcgatattaaatacgctagccccgaataccggtgcttattttggcggttttacaaaaggtatgattaccggaacggtaccgattctggcagtctggttcttttgcatcggcgcatctattaacttgcgtgcaacaggtacggtattacgtaaatcagggacgctggtcattactaaaattgcggtcgcctgggttgttgcgatgatctgtgcgatgttcattccggagaatggaattcagaccggcttcttcgccggattatctgttctggccatagtctcagcaatggatatgaccaacggcggtctctatgccagcctgatgaatcaatatggcaccaaagaagaatcgggcgcgttcgtgctgatgtccctggagtcgggtccgctgatgacgatgttgattctgggttctgccggccttgcctcttttgaaccacaccattttgtcggggcgatcctgccgttcctgattggttttgcgctgggcaacctcgatcacgatctgcgtgatttcttcagcaaagccaccccggtactgatcccgttcttcggcttcgcgttgggcaataccatcaacctgaacgtgattctggaaaccggcctgctgggcattgtgctgggtgttgccgtcatcgtcatcacgggtattccactgattattgcagaccgcgtcatcggaggcggcaacggaaccgcgggcgtggccgcctcttcggccgcaggcgctgcggtagccaacccggtgattatcgcccagattaacccggcctttgaacccgtggccgcttccgccacggctctggttgccgccagcgtgattgtgacggcaattctggtccctgtcatcacggcactgtatgccagacgctttgggcatgtgcctgagtcccggacagaacctgaagcggtagaaatgcaccactaa

SEQ ID NO: 118305 - DNA, 879 bp, Enterobacter cloacae
atgacaacacagctactggacggtcccgggcggacgctggagtgtattcacccaaaatttatggtcgatttggtccagggggcggacgctgcacgtcactccctcctggggccacagcaactgcaatttcgtgagcgtttgacgcaggagatcattacgcagacccggctgcggccgtgggcaatggcgggaatgctcaacgaaaatgcagcgctgcggctgggtctggcggagaaactggccggtatgctcgaccccggacaccttgcgctgacccgtatgtccgacaggctggtagccctgcgccagcaggtgaatccacgcctccctcaaccgcccggattgttgcaacagtacgaagagctctcctcacatttcaaccagcgtgccgcctataaagagaaagcgctcgcgcagcgcggccttacggttcaggcgggtgagcacagtgagcaaatttttacccgctggcgagccgggcagtatgacggctggtcgctggctggccgctgctttatcgtgctggaagagttgcgctggggggcgtttggcgatgcctgtcgtctggcgaatagcgatgtggcggccatgctgaaagataatctgcgcagcatggccgcaaactatctggcacagggaattaatgcttctcccaccacccggcatttttaccatcagtggctgacgacgcccgcttctcccggtctgattgattataaagatatgctgggctggctgggggactggtgtcaggcggataaacatccggtgagctggtcagtgacgcagagctggcaaacggtcgcgctgggaatgccgagactctgttcggcaaaacggctggtggatggcatggtggaagagatatttggtacgtga

SEQ ID NO: 118306 - DNA, 2355 bp, Enterobacter cloacae
atgcacacacagaccatatttgaattaagccaggaagctgaacgattgttacagctcgctctgaacaatcttgattcattaaaatctatgccgattgcaaagctggatagcacagccgctgcgatgagcggcgttaataacaacgttttgccgttacattttagcgcacggggtgtcgacgctcagcaggcgatgctgaataacgaattacgcaaaataacccgcctcgaaatggtgctggcgattgtgggtaccatgaaagcgggaaaatcgaccaccattaatgcgattgtgggcacggaagtgctgccgaaccgcaatcgtccgatgacggcacttcccacgctgatccgccatacgccgggccagaaggagccggtactgcattttttgcacgtttcgcccatcgataccctgattacccagttgcagaaaaaactgtgcgataaagatcgcggcaagctggcgcggcgtctggaaatcgacaaggacatgaatacgctgctggagcgcatagaaagaggtgaggcgtttgaaaaacatcacctgggcgcggagcccatctttcattgtctgaaaagcctgaacgatctggtgcggctgtctcaggcgctgggcgtggagtttccgttctctgagtatgccgcgatagaacatattccggtgattgaggtggagtttgtgcatctcgccggtctggatgcgcacctggggcaactgacgctgctcgacacgccggggccgaacgaggccggtcagccgcacctgcaaaaaatgctcagcgagcagctggcgcgcgcctccgccgtgctggcggtgatggactatacacagcttaaatctatttctgatgcggaggttcgtcaggcaatttcggctgccggcaaatccgtgccgctttacgccctggtcaacaaattcgatcagaaagatcgtaacagcgacgatgaagagcaggtgcgggcgatgatttccggcacgctgatgaaaggaaatatttctccggggcaaatttatccggtctcttccatgtgggcctatctggcaaaccgcgcccgctatgagatgaacgttcatgggcgccttcccgatcatcaggatcagcgttgggtacaggattttgccgaggccgcgctgggccgccgctggcgaacggccgacctggacgatattgaccatattcgccatgcggcggatctgctgtgggaggattcgctgttcgaacagcccatccgcaaactgatttacgcggcttacgccaacgcctcgctgttcgctttgcggtcggcatcgcataagctgctgaactatgcgcaaaatgccagagaatacctggattttcgccatcagggactgacggtcgcttttgatgagctggagctgaatattgcgcgtctggaagaggatatgacgttgctgcgtcagcggcagagcgtggtgagcgatgaggtccagcatgaagttgaagaggcgctcaacacaacggatgcattcctgcttcgccagaaaggtgaacttcaccaggcgctgggcgacatttttagccgcccgtctattcttgatttagcagggcgcgagccatccagtttgcgtgcagacgacgcggatgcaatccagcagctggtgcttgacgatgaagggcaggcgcagattgtcctgagcaagattcgatcgtcatgcgagcagattatgctgaatgcgcagagcagaattggccgggagctggcgttacgcttcgatcagctggagtctacgcttgcccgatcgttgaatgaggcgatgcgccctatcgagacgcgaatcaaggaacagctcagtcatgccggatttcgggcgcggattagcttcccggcgtttcaggcaaaccagcttaatttcaatacgcgcggcttatttaatgatgccattgtgcaggacacccctcccgccagtcagccagccggggcaggcagcgtacgtaataccgtctcgcgctggctcaataatcccggctggggctgggaagagtatgtcgtgacgcgcacacgctatgtcatcgacatcgttcagcttcatggcaaatttacgcaacatatcgatcagttttgcgatcaaatacgtaaagctttggccgcgcaggtcgatgtctctgttacggcaggtatggcaacgttctttgcagagttttcgttgtgcctgaccgggttacaggaaagcttgcgtgatagccttgccgtgcggcagcagaatgaacattcaacccgggcgcttagccagttgttgaagcaaagtatgactactgcggcgtggattcaggaagatacccgactgttacgcgatgatattcaaaccttattcgcggcagagcaaccatga

SEQ ID NO: 118307 - DNA, 336 bp, Enterobacter cloacae
atgcaacttccacactgcccgaaatgcaattctgaatacacctatgaagacaatggcatgttcgtttgcccggaatgcgcccatgaatggaacgatgcggagcctgcacaggacagcgatgcgctgatcgtgaaagacgcgaacggcaacctgctggcagacggcgacagcgttaccgttgtgaaagatctgaaggtaaaaggcagttcctccatgctgaagatcggcactaaagtcaaaaatatccgtctggttgaaggcgatcataatatcgactgcaaaattgacggcttcggtccgatgaaactgaaatctgagttcgtgaaaaagaactga

SEQ ID NO: 118308 - DNA, 432 bp, Enterobacter cloacae
atgccgttaagtccctacatctctttcgccggcaactgtgcggaggcgaccgccttctatcagcaggccatcggcgcagaactcctctacaaaatcaccttcggcgaaatgcccaaagacgaaaacagcgaagaaggctgtccgtcaggcatgaacttcccggataccgccatcgcccactctaatgtccgcattgccggcagcgatatcatgatgagcgatggtctgccacccggtagcaacacgcagtacgccggatttacgctggtgctcgacacgcaggacgtggatgaaggcaaacgctggttcgacaacctctctgatggcggcaatgtcgaaatggcctggcaggagactttctgggcgcacggattcgggaaagtcaccgataaatacggcgtgccgtggttgattaacgtcgttaaatcgtag

SEQ ID NO: 118309 - DNA, 789 bp, Enterobacter cloacae
atgcaaactgtcattcgcgtcgagaaactgagcaaaaccttccatcacaacaaggcgctgcatgccgttgatctgaccgtccagcagggcgaaatggtggcgctgttggggccgtctggttcaggtaaatcaacccttcttcgtcacttgagcggcctgattacctgtgacaaaacgccggaaagccgcgtcgaactgctgggtaacaccgtgcaacatgcggggcgtctggcgagcgatattcgcaaaagccgcgcccagacgggctatatctttcagcagttcaacctggtgaaccgcctgaccgtgctcgagaacgtgctgattggcgcgctcggcagcaccccgttctggcgcacctgcctgcgctggttctccccatcccagaagcaagaagccctacaggcgctgacccgcgtcggcatggcgcatttcgcccaccagcgcgtctccacgctctccggcggacagcagcagcgcgtcgccatcgcccgcgccctgatgcagaaagccaaaatcattctggccgatgaacctatcgcctcgctggacccggaatcggcccgcatcgtgatggaaaccctgcgcgacatcaaccagaacgacggcatcaccgtggtggtgacgctgcatcaggtggattacgccctgcgctactgcgagcgcatcgtcgccctgcgtcagggccatgtgttcttcgatggcgcaagccaccagtttgataacgaacgtttcgatcatctctaccgcagcgtaaaccgcgtcgaagagcgcgcgcaggctgcttaa

SEQ ID NO: 118310 - DNA, 1017 bp, Enterobacter cloacae
atgaactacaaagccgttgccgcgctggccttcaccagcatgttcagcatcagcaccctgctaagccctgcttacgctgaggaacaggaaaaagcgctgaactttggcatcatttcaacggaatcacagcaaaacctgaagccgcagtgggaaccgttcctgaaagatatggaaaccaaactggggatcaaagtaaacgccttcttcgccccggactacgcgggcatcattcagggaatgcgcttcaacaaagtcgacatcgcctggtatggcaacctctctgctatggaagcggtagatcgcgcgaacggccaagtcttcgcccagaccgttgcggcagacggctccccgggctactggagcgtgctgatcgttaacaaagacagcccgatcaacaatctcaacgacatgctcgccaaacgcaaagagctgacctttggtaacggcgacccgaactccacttccggcttcctcgtccctggctattacgtcttcgcgaaaaacaacgtctccgccagcgactttaagcgcacggtcaacgccagccacgaaaccaacgccctggccgtggcgaataagcaggttgacgtcgccaccaacaacactgaaaacctcgacaagctgaagacctccgcgccggacaagctgaaggaaatcaaggttatctggaaatcgccgctgatcccgggcgacccgatcgtgtggcgcaaaaacctctctgagaataccaaggacaaggtctacgacttctttatgaactacggcaaaacgccggaagagaaagcggttctggcgcgtctgggctgggcgccgttccgcgcgtccagcgatttgcagctggtgccgattcgccagctggcgctgttcaagcagatgcagggcgtgaaggacaacaagggtctgaaggaagaagagaagaccagcaaagtgtcggaaattcaggcgcagctggacgatctcgaccgcctgaccgccgcgctcggcgccatgaccagcgtgaataaagcggtgcagtaa

SEQ ID NO: 118311 - DNA, 780 bp, Enterobacter cloacae
atgcaaaccatcaccctcccgccgccaaagcgcagctggttctcgctcataagctgggccgttctgctggcggtgctcgttatctcctggaagggcgcggagatggatccgctgctgctcttcaaagattccggcaacatggcgaccttcgccgccgacttcttcccgccggacttcagccagtggcaggactacctcggtgaaatggcgatcaccctgcaaattgccgtctggggcaccgccctcgccgtgatcctctccattccgtttggcctgatgagcgccgaaaacatcgtgccgtggtgggtttaccagccgatgcgtcgcctgatggacgcctgtcgcgccatcaacgaaatggtctttgcgatgctgttcgtggtcgccgtcggcctgggtccgttcgcgggcgtgatggcgctgttcatccacaccaccggcgtgctctccaagctgctctccgaagcggttgaagccatcgagcccggcccggtggaaggcatccgcgcaaccggagcgaacaaaatcgaagagatcctgtacggcgtcctgccgcaggtgatgccgctgctcatctcctactccctgtaccgcttcgagtccaacgttcgctccgccaccgtggtcggcatggtgggcgcaggcggcattggcgtcaccctgtgggaagccattcgtggtttccagttccagcaaacctgcgccctgatggtgctcatcatcgtcaccgtgagcctgctggatttcctctctcaacgtttgcgtaagcacttcatctga

SEQ ID NO: 118312 - DNA, 726 bp, Enterobacter cloacae
atgcacttatccagacatccgaccagttaccccacccgctggcaagagattgcggcaaagctcgaagtggagctgcgcacgcactaccgctgcggagactacctgcccgctgagcagcagcttgccgaccgctacgaagtgaatcgccacaccctgcgtcgcgccatcgatcaactggtggagcgcggctgggtccagcgccgtcagggcgtcggcgtactggtgctgatgcgtccgttcgactacccgctcaatgcccaggcgcgttttagccagaacctgctcgatcagggcagccaccccaccagcgaaaagctgctgtcagtcctgcgccccgcctcccgccacgtggcggacgcgctggggattcaggagggcgacaacgtcgttcacctgcgcacgttgcgccgggtgaacggcgtggcggtctgtcagatcgaccactacttcgcggacctcaccctctggcccgtgctgcaacatttcgccagcggttccctgcatgattttcttcaggacgcgacgggtatcgcgctcaaacgcacccagacgcgcatcagcgcccgccgcgcgcaggcgaaagagagcaaggtgctggagatccccaacatggccccgctgctctgcgtgcgcaccctcaaccaccgtgacggcgacgtcaacgcaacggaatactccgtcagcctgacccgcgccgacatgattgaatttaccatggagcactga

SEQ ID NO: 118313 - DNA, 453 bp, Enterobacter cloacae
atgcacttcgacacctccactcgtcagcgctggatgcgcgtgctggcccacagccagcctaatgcgctggctgcccgcatgagcacgctcggcctgacgccggactacgacacgatccgcgcgccggagatcggcctggtgcagatccaggcacgcatgggcggcaccggcgagcgcttcttcgccggcgatgccaccctcacccgcgcggtgatccgcctgaaaagcggcacgctgggctacggctacgtacttgggcgcgacaaaacgcacgccgagcgctgcgcagcgatcgacgcgcttttacaggaacagccgcattttcagacgttaatggaaacccttattgccccgctggaagccgaccgcgccgcacgccttgccgcgcgtcaggccgaagtgaataccagccgggtcgacttctttacgctcgttcgcggagacaacgcatga

SEQ ID NO: 118314 - DNA, 585 bp, Enterobacter cloacae
atgacgcttcaacctgcttttaccctggccgtccaggatgcccaacagagtttccgtcgcctgctgaaagccatgagcgagccgggcgtcattgtctcgctgcaccagctctcccagggctggctgccgctgaacctcgcctcgaccagcgtgctgctgaccctggcggacaacgacaccccggtatggctgtcaggcgcattgctgaacgatatcgccagccagaacctgcgctttcacaccaacgcgccgctggtcgagcagccccagcaggcggtcttcgccgtggccgacgagcaaatcagccacgaacagcttaacgccctgagcgaaggcagcgccgtcgcaccagaaaccagcgctacgctgattttgcaggtctccagcctgagcggtggccgcatgctgcgcctgacgggtgcagggattgccgacgagcggatggtcgccccccagctgccggagtgcatcattcatgagctgaccgagcgcccgcatccgttcccgctcggtatcgacctgatcctgacctgcggcgagcgcctgctggcgatcccgagaaccactcacgtggaggtgtgctga

SEQ ID NO: 118315 - DNA, 1065 bp, Enterobacter cloacae
atgtacgttgccgtcaaagggggcgagaaggcgatcgccgccgcccatgccttgcaggcgcacagacgccggggggatgacgcccttcccgagctgagcgtcgcccagattgaacagcagttaaacctggccgtcgaccgcgtgatgaccgaaggcggcatcgcggaccgcgaactggcggcgctggcgctgaaacaggccagcggcgataacgtggaagccatcttcctgctgcgcgcttaccgcactacgcttgcgaagctggcggttagcgagccggtgaatacggcggaaatgcgattagagcgccgtatttctgcggtgtacaaagatattcctggcggccagctgcttggtccgacctacgactacacccatcgcctgctggacttcactctgctggcgaacggtgaaacaccgcagctcagcgtctctgacgctgaacaagacgcctccccgcacgtctttagcctgctggcaaaccaggggctggcgaaggcggaggaggacaccggcagcacaccggatgacatcacccgcacgccgccggtctatccctgttcgcgctcgtcccgcctgcaacagctgatgcgcggtgacgaagggtatctgctggcgctggcctactccactcagcgcggctatgggcgcaaccaccccttcgcggcagagatccgcagcggttatatcgacattgaaatcgtgccggaagagctgggttttgcggtgaacatcggcgaactgctgatgaccgagtgcgaaatggtcaacggttttgtcgcgccagagaatgaagatccgcactttacccgcggctacgggctggtgtatggcctgagcgagcgcaaggcgatggcgatggcgctggttgaccgtgcgctccaggcgccggactacggcgagcatattgcaggcccggcacaggacgaagagttcgtgctggcccacgcggataacgttgaggccgccggctttgtctcgcacctcaagctgccgcactacgtcgatttccaggccgaactggaactgctgaaacgcctgcaacgggagcgcgccaatggctaa

SEQ ID NO: 118316 - DNA, 846 bp, Enterobacter cloacae
atggctaacttaagcggctacaactttgcctatctggacgaacaaactaaacgcatgatccgccgcgccatccttaaggcagtggcgatccccggctaccaggtgccattcggcggccgcgaaatgccaatgccctacggctggggcacgggcggtattcagatcaccgccagcgtgatcggcgaagcggacgtgcttaaggtcatcgaccagggggcagacgacaccaccaacgccgtgtcgatccgcaacttctttaagcgcgtaacgggcgttaatactaccgaaaaaaccgaagacgcgacgctgatccagacccgtcaccgcattccggagaccccgctgactgaagatcagattttgattttccaggtgccgatcccggagccgctgcgttttattgagccgcgggaaaccgaaacccgcaccatgcacgccctggaagagtacgggatcatgcaggtcaaactgtatgaggacatcgcccgcttcggccatatcgccaccacctacgcctacccggtgaaggtgaacggccgctacgtgatggacccgtcgccgatcccgaaattcgataacccgaagatggacatgatgcccgccctgcaactttttggcgccggacgtgaaaaacgcatctacgccgtaccgccgtacacccgtgtggagagcctggattttgacgatcacccgtttacggtgcaggagtgggacgagccgtgcgccatctgcggttcgaagcatagctatctggatgaagtggtgctggacgacacgggcaaacggatgtttgtctgctccgacaccgattactgccgccaacagagcgaggcgaacagccaatga

SEQ ID NO: 118317 - DNA, 756 bp, Enterobacter cloacae
atgaaaccgctgctttcggttaataacctgactcacctttatgcgccgggcaaaggctttagcgacgtgtcgtttgagctgtggccgggcgaagtgctgggcattgtcggcgagtccggctccggtaaaaccaccctgctgaagtccatctccgcgcgcctgacgccgcagaatggcgacattttgtatgagggcgtgtcgctgtatggcatgagtgaagccgatcgccgccgcctgctgcgcaccgagtggggcgtggtgcaccagcacccgatggatggcctgcgccgccaggtgtcggcggggggcaacatcggcgaacggctgatggccaccggcgcgcgccactacggcaacatccgcgccacggcgcagcactggctggaagaggttgaaattcccgcctcgcgcatcgacgacctgccgaccaccttctccggcggcatgcagcagcgtttacagattgcccgcaatctcgtcacccatccgaagctggtgtttatggatgaaccgaccggcgggctggacgtctctgtacaggctcgcctgctcgacctgctgcgcggcttggtggtggagctaaacctggcggtggtgattgtcacccacgatttaggcgtcgcgcgcctgctggcagaccgcttgctggtgatgaagcagggtcaggtggtggaaagtgggttaaccgaccgcgtgctcgacgatccccatcatccgtatacccagctgctggtgtcgtccgtattgcagaactga

SEQ ID NO: 118318 - DNA, 681 bp, Enterobacter cloacae
atgatccacgttgaaaatgtcagtaaaacctttgtgctccaccagcaaaacggcgtccccctgccggtactgcaaaatgcctcgttagaggtcagcaacggcgaatgcgtggtgctgcatggccattccggcagcggaaaatccaccctgctgcgctccctgtatgccaactacctgccggacgaaggccatattcatattcgccataacaatgaatgggtcgatctggttcaggctcccgcgcgcaaagtgctggaagtgcgccgctcgacgatcggctgggtcagccagttcctgcgggtgatcccgcggatctccgccctggacgtggtcatgcaacccctgctggatctcggcgtgccgcgcgaaacctgcgccgctaaagccgccagcctgctgacgcgcctcaacgtaccggagcgtctgtggcacctcgccccgtcgaccttttccggcggcgagcagcagcgcgtcaacatcgcccgcggctttatcgtcgattacccgattttactcctggatgaacccaccgcctcgctcgacagtaagaacagcgcagcggtgatggaactgatcgaacaggccaaagcgcgcggcgcggcgatcgtcgggatcttccacgacgacgccgtacgccaacgcgtggcggacagactgcacccgatggggacaaacgtatga

SEQ ID NO: 118319 - DNA, 1137 bp, Enterobacter cloacae
atgattatcaataatgtcaggctggtgctggaaaatgaggtcgtgaacggctcggttgaggtgcgggacggtgtcatccgcgcctttgccgaaacccggagccgcactcctgaagcgatggacggcgaaggcggctggctgctgccggggctgattgagctgcataccgataatctcgataaattcttcaccccgcgcccaaaggtggactggcctgctcattcagcgatgagcagccacgacgcgctgatggtcgccagcggcatcaccacggtgctggacgcggtggcgattggcgacgtgcgcgacggcggcgatcgcctggagaacctggagaagatgatcaacgccgtggaggagacgcaaaagcgcggcctcaaccgcgccgagcaccgcctgcacctgcgctgcgagctgccgcaccacaccaccctgccgctgtttgagaagctggtgggccgcgagccggtctcgctggtttccctgatggatcactcgccggggcagcgccagttcgccaacattgaaaagtatcgcgaatactatcagggcaaatattcgctcaacgacgcggagatggcgcgctacgaagaagagcagctccagcttgcggcccagtggtcgcagccgaatcgcctctccattgccgcgatgtgccgggaccggaatattgccctggccagccatgacgacgccacgcacgatcacgtgcgcgaatcccaccagcttggcagcgtgatagctgaatttcccaccacgtttgaagcggcagaggcatcgcgtaagcacggcatgaacgtcctgatgggcgcgccaaatatcgtgcgcggcggatcgcactccggcaacgtggcggcaagcaggctcgcctcgctcggcctgctggatatcctatcctctgactattaccccgccagcctgctggacgcggccttccgcgtcgcggacgacgagaacaacagcttcacgctgccacaggcgattcgcctggtgacgaaaaacccggccagcgcgcttaatcttcacgatcgcggtgaaattgccgaggggaaacgggccgatctggtgctcgcccaccgtaagggcgagcacattcatatcgaccacgtctggcgtcagggaaaaagggtgttctga

SEQ ID NO: 118320 - DNA, 549 bp, Enterobacter cloacae
atgggaagactcatctggttaatgggcccgtccggctccgggaaggacagcctgctgtcggcgttacggcagcgggaacattcacagctgctggtcgcgcaccgctatatcacgcgcgatgccaacgccggaagcgagaaccatatcgccctgagcgagcaggagttttttacccgcgccggacaaaacctgctggcgctgagctggcatgccaacggttactactatggcgtcggtattgagattgacctctggctgcatgcggggttcgacgtactggttaacggctcccgggcgcatctcccgcaggctcgcgcccggtacgaagcggcgctgctcccggtctgtttgcaggtttccccggacgttctccgtagccggctgcaaaagcgggggcgcgaaaacgcgcgcgagatcgaccagcggctggaacgggcggcgcgctacaccccgtcgggttgccatctcctcaataacgacggaagtttgctacagtcagtcgagaccttgctatcgcttattcgccagaaggagaaacagcatgcctga

SEQ ID NO: 118321 - DNA, 435 bp, Enterobacter cloacae
atgcctgactgccagcttcgccccgccaccgccgacgatgcgccgatcgtttacgcgctgatctgcgaacttaagcaggccgagttcgatcatcaggcgtttcacgccgggtatctggccaacttgcaggatcacaatatgcgttaccagctggccgagctggacgggcagatcatcggtatgatcggcctgcatatgcagtttcacctgcatcacgcccgctggatcggcgagatccaggagctggtggtgatgccgcaggcgcgcggattaaaagtgggcagccagctgctggcctgggcagaggacgtcgcgcgacaggcaggcgccgagctgaccgagctttccaccagcgtgaagcgcgtggacgcgcaccgtttttatgttcgtgaaggatatacgcaaagccatttccgcttcaccaaaccgctgtag

SEQ ID NO: 118322 - DNA, 759 bp, Enterobacter cloacae
atgagtctgacgatcacgctgacaggaaccggaggggctcagctggtgccggtgtttggctgcgactgcgcggcgtgccgacgggcgcgtttacaggaaaattatcgccgtcgcccctgtagcgcggcggtgaaattcaacgattcggtcaccttgctggacgcgggtattccacacctgatggacgactggcccgcggggagtttcaggcagattttgcttacccattatcatatggatcacgttcaggggctttttcctctgcgctggggcgtgggagcgaccattccggtttacggtccgccggacgacgcaggctgtgacgacctgttcaggcatccgggccttctcgatttcagccacacggtggagccgtttgtgatgtttgaacttcagggcttgcgggtcacgccgctgccgctcaaccattcaaaactcacgtttggctatctgctggagtccgcccacagccgcgtggcgtggctttctgataccgccgggctaccggataaaacggtgacgtttctgctaaacaatcagccgcaggcgatgattatcgactgtagccatgaaccgcgcccggagacgccgcgcaaccattgtgacttgaatacggtgattgcgctgaacgaggtgattggctgtccgcaggtgatcctgacgcatatcagccatcagtttgacgtgtggatgatgaataacccgctgccgtccggcattgaagcggggtatgacgggatggtgctggtgttggattaa

SEQ ID NO: 118323 - DNA, 324 bp, Enterobacter cloacae
atgaaacgttactctaccgctctgttattgggtctgctgactttaaccagccaactggcgcatgccgatgtgattgatgatgccattggcaatattcagcaggcgatcaacgacgcctataaccccggcagcagccgtaatgatgacgacgacgatcgttacgatcgcagccgtcaaaccgacagccgccagtacgacgatcgtcgtcgacagttagaagatcgacgccagcgtttagacgagcgtcagcggcagctggatgacgatcggcgtcggttagaagaggatgagcgccggttagaggatgattacgatcggtggtaa

SEQ ID NO: 118324 - DNA, 450 bp, Enterobacter cloacae
atgaaaaagattgcatttggctgcgatcacgtaggttttatgctgaaagaggatattctggcccatctgcgcgcgcgtggcatcgacgtggtggataaaggcacctgttctccggagcgtactgactacccgtattatgccagcgcggttgcacaggctattatcgataaggaggtggatggcggcatcctgatctgcggaacgggggtagggatctccattacggccaataagttcccgggcatccgcgcagtggtctgtagcgaaccttattcagctcagctttcaaggcagcataacaacacgaatgtgctggcatttggttcgcgcgtggtcggactggagctggcaaaaatgatcgtcgatgcctggctaaatgcaccgtttgaagggggacgacatcaggcgcgagtcgatgcgataggggcgattgaacaggccaggaattga

SEQ ID NO: 118325 - DNA, 891 bp, Enterobacter cloacae
atgagtcagtcagaatttaaaaaagagctgcctaacggcattggccttgcaccgtacctgcgcatgaagcaggaaggcatgaccgacaacgaaagccgtatcgtcgactggctgctccagccgggtaacctgagcggcgcgcctgcgattaaagacgttgccgaaacgctgatggtgtcggaagcgatgatcgtgaaagtggccaaactgctcggctttagcggtttccgtaacctgcgtgcggcgctggtcgactacttctcgcaatccgaacaagtattacctgcggaactcgcttttgatgaagcaccacaggatgtggttaacaaagtgttcaatattacgctgcgcaccattatggaaggccagtcgatagtgaacgtggatgaaattcaccgcgcggcacgtttcttcgcccaggccaaccagcgcgatctgtacggtgtgggtggttctaacgctatttgcgccgacatccagcataagtttctacgcatcggcgtgcgctgccagtcgtatcaggacgcgcacattatgatgatgtcggcatcgctgctgaaggaaggggatgtggtactggtggtctcccattccggccgcaccagtgatgtgaaagcagcagttgagttagcaaaaaagaacggcgccaaaattatctgtattactcatagctaccattcaccgattgctaaacttgctgattatattatttgttcgccagcaccagagaccccgttattagggcgcaacgcctccgcgcgtatattacagcttacattattagatgcgttatttgtttccgttgcacaacaaaacatcgaacaggccacacttaatatgcaaaaaaccggcgctattgtggatttcttctctcctggcgcactgaagtaa

SEQ ID NO: 118326 - DNA, 936 bp, Enterobacter cloacae
atgaataaatatctgaaatatttcagcggcgccgctatgggcttaatgttatccaccagcgcgtttgctgctgcggaatatgcggtggtattaaaaacgctctccaatccattctgggtggatatgaagaaagggattgaagatgaagccaaaaccctgggagtaagcgttgatatttttgcctcgccgtcagaaggggattttcagtcccagctacagctgttcgaagatctgagtaataaaaaatacaagggtatcgcttttgccccactctcctccgtgaatctggtcatgcccgtcgcgcgcgcctggcagaaaggtctctatctggtgaatctcgatgaaaaaatcgatatggataacctgaaaaaagcaggtggcaatgtagaggggtttgtcacaacggacaacgtggccgtcggcgcaaaaggggccgattttattatcaataaacttggtgcggaggggggcgaagtcgcaatcattgagggtaaagccggtaacgcatcgggcgaggcgcgccgcaatggcgcaacagaagccttcaaaaaagcaaaccaaattaagctggttgccagccagcccgctgactgggatcgcattaaagctctggatgtggcaaccaacgtgctgcaacgaaacccgaatctgaaagccttctactgcgcgaacgataccatggcaatgggcgtggcacaggcggtggcaaacgccggtaaaatcggcaaagtgctggtggtcggcaccgatggtatcccagaggcgcgtaagatggtcgaagccggtcagatgacggcaaccgtcgcacaaaacccggcggacatcggggcgaccggcctgaaattaatggtggatgccgcgaaaaccgggaaagtcatcccgctggaaaaaacgcctgaattcaagttggtggattcgattctggtgacaaaataa

SEQ ID NO: 118327 - DNA, 1533 bp, Enterobacter cloacae
atggtcacgccatatatctcgatggcggggatcggcaaatcctttggtccggttcacgcattaaaatcggttgatttaactatataccctcatgagatccacgcgttattaggggaaaatggtgccggtaaatcaaccttaatgaaagtattgtcgggaattcatgaaccgaccaaaggctccattattattaatgaaaagaattacgacaaattggatcataaactggcagcaagactgggcatcggcattatatatcaggaactcagcgttattgatgaattaaccgtgctggaaaatctatatataggccgtcacctgactaaaaaggtttgtggcatcaggattattgactggaaagagatgcgcattcgcggtgcgatgatgctcttacgcgtcggattaaaagtcgatttagatgaaaaagtagcgaatttatccatcagccataaacagatgctggaaatcgcgaaaaccttaatgctcgatgccaaagtgatcattatggatgaacccacatcttcattaaccaataaagaggtggattatcttttcttgatcatgaatcagctgcgtaaagaaggcaccgccattgtctatatctcgcataagctcgcggaaatccgccgcatctgcgaccgctacacggtaatgaaagacggttccagcgtatgcagtggcctggtgagtgacgtttcaaacgacgacattgtgcgcctgatggtcggccgcgaactgcaaaacagctttaacgccatgaaagagagcaccggcaacatcgaacgcgacacggtgtttgaggtgaacaacgtcaccagccgggacaagaaaaaagtgcgtgatatttcgttcagcgtgaaccgcggcgaaatactgggttttgcgggtctggtcggctcgggacgtaccgaactgatggactgtctcttcggcgtggataaacgcgcgagcggtgaaattcgcctcaacggcaaaaccatctccccgcattcgcctctggatgcgttgaaaaaagggatggcctacatcaccgaaagccgccgcgaaaatggctttttccctaatttctctatcgcccaaaacatggccgtcagccagagcctgaaaaacggtggctataaaggggccatggggctctttcgcgagcatgaagaacgcaagaccgccgaagcacagcgccagttgctggcgttgaagtgccaaagcgtagagcaaaacatcaccgaactctccggcggcaatcagcaaaaggtgctgatttctaaatggctgtgttgcaacccggacgtcatcatttttgatgaacccacgcgaggcatcgacgtcggcgcaaaggccgaaatctacaaggtgatgcgccagctggctgacgaaggcaaggtcatcctgatggtgtcatctgaattacctgaaattatcgccgtctgcgaccgcatcgccgtgttctgcgaagggcggctgacgcaaatcctgaccaatcgcgacgacatgagcgaagaggagatcatggcatgggcattaccacaagagtga

SEQ ID NO: 118328 - DNA, 981 bp, Enterobacter cloacae
atgggcattaccacaagagtgaaaggcgatatggcggagaaaaagccatttaacttcgcgctgttctgggacaagtacggtaccttttttatcctcgcgattatagtcgccatctttggcacgctgtcatcggagtacttcctcaccaccaacaacatcacgcagatttttgtccagagctcggtaacggtgctgatcgggatgggcgaattctttgccatccttgtcgcgggtattgatctgtccgtcggagccattctggcactctccggcatggtgactgccaaactgatgctggctggtgtcgacccgttttttgcagcactgattggcggcgtactggtcggcggcgcgctgggggcgatcaatggctgtctggtcaactggaccgggctacatccgttcattatcactctcggtactaacgccatttttcgcggcatcacgctggtgatttccgacgctaattccgtctatggcttctcgttcgactttgtaaacttcttcgctgccagcgtcctcgggatacccgtaccggtcatcttctcgctgatcgtcgcggtgatcctctggttcctcaccacccgtatgcggctagggcgcaatatctacgccctgggcggtaacaaaaactcggcgttctactccggcatcgacgtgaagtttcatattctggtggtgttcattatttctggcgtatgcgccgggctggcgggcgtggtgtcgactgcgcgtctgggcgcagcggagccgctggccgggatgggatttgaaacatacgccatcgccagcgccatcatcggcggaaccagcttcttcggcggtaaaggccgcatcttctcggtcgtgattggtggtctcatcatcggcaccatcaataacggactcaatatcttacaggtacaaacctactaccagctggtggtaatgggcgggttgattatcgccgctgttgccctcgacagattgatcagtaagtaa

SEQ ID NO: 118329 - DNA, 696 bp, Enterobacter cloacae
atgaaaatttcaccctccctgatgtgtatggatctgctgaaattcaaagaacagatcgaatttattgaccagcacgcggactacttccatatcgacatcatggacggccactttgtgcctaatctgacgctgtctccgttctttgtcggccaggtgaagaagctcgccaccaaaccactggactgtcacctgatggtgactcgcccgcaggactacataagccagctggcgcaggccggagcagacttcatcacactgcacccggagaccatcaacggtcaggctttccgcctgattgaagagatccgtcgtcacggtatgaaggtgggactcatcctcaacccggaaaccccggttgaggcaatgaaatactatattcataaggcggacaaaatcaccgtgatgaccgtcgatccaggctttgccgggcagccgttcattccggaaatgctggagaaaattgccgagctgaaagcctggcgcgaacgcgaagggctgagctatgagattgagatcgatggctcatgcaatcaggccacctataaaaaactgatggccgccggcgcagatgtctttatcgtcggaacgtctggtctgttcaaccatgcagagaatatcggggatgcatggcagcttatggccgggcagatcctgtcggcacgaaacgaggttgttcctcatgcaaaaacagcctga

SEQ ID NO: 118330 - DNA, 945 bp, Enterobacter cloacae
atgcaaaaacagcctgatgtcgtcgccggagtggatatgggggccactcatatccgtttttgcctgcaaacggccgacggtgcggtgttgcattgtgaaaaacagcgcaccgcggaggttatccgctctggtgtggtgtgcggcgtgacggaaatgatcacggctcagctgcgtcatttacaggttcactgtcgcggtctggtcatgggctttccggcactggtcggcaaagacaaacgcaccattatttcgacgccaaatctgcctttgcaggcgaatgagctccgcgatctggcgggaaaacttgaagatgcgctaggctgcccggtcgaattttcccgcgacgttaaccttcagctttcgtttgacgtggtgcaacacaatctccagcagcaagaggttctggcggcctaccttggcaccggcatgggatttgccatctggctaaacggtgctccatggacgggcgcgcacggcgtagcgggcgagctcgggcatattccacagggggatatgacgcggcactgtggttgtggcaacccgggatgtctggaaacggtttgttccggtatcgtattgaaacagtggtacgaacagcagccccgcgagtatgcgatgggagatatcttttcagccgtacccgatgaccccttcgtacagcaactcctgaatcatgcagcccgcgccattgccaccagtgtaaatctgttcgatccggatgcggtgatcctcggaggcggcgtaatggatatgcctggctttccgcgcgaagcgctgattgtcgggataaagcagcatttgcgccgcccgctgccgcatgagtccgtgaaatttatccctgcctcgtcgtcgtcttttaacggcgctcagggggccgctaccctggctcgctgccggttcctgccatcaccttgcgcagcgcctgcgccagctgtgcgcgggtga

SEQ ID NO: 118331 - DNA, 2298 bp, Enterobacter cloacae
atgtcttcacgccccccgttcttcaccagcgcccgcggtcgcctgctgatatttaacctgctggtggtggcggtaacgctgatggtaagcggcgtggcggtgctcggctttcgtcatgccagccagatccaggagcaggtgcagcagcaaacgctggatgatatgactggcagcatgaacctcgcgcgcgacacggccaacgtggcaacggcggcggtgcggctgtcgcaggtggtcggtgcgctggagtacaaaggcgaagctgaacggcttaaacagacgcagatggcgctgcgccactcgctggagcagcttgccgatgcgccgctggcgcagcaggagcccgcgctggtggcgcgtattattcgcaggagcaatgagttacagcagagcgtgacgggaatgctggagcgcgggcaaaaacggcatctggagcgtaacgcgctgctcagcgcgctgtatcaaagccaaagctatctgcgtcatttgcaggatatcaaccgccgttacgcgagcaatgtgccagacgcccggcagcttgcagagatggacaggctgatcgttgccgccattgataccccttcaccgcgcgccacggtgcagcagctggatgcagtaaccgcgatgttacccgcgagcgccctgcaaccggtggtcaacctggtgctcccggattttaatgatgagctgcgcaagctcgcgccactgtcaaagcagctggaggagagcgatctgtccatcagctggtacatgttccacatcaaggcgctggtggcgatattaaaccgcgacatcaatcagtacgttgaacaggtggcgcaggcctcccggctgcgtaccgcccaaagccaccaggagctgcgctccatcagcgtgtttatcagcgtcttcgcggtgctggcgctgatcatcaccggctgcgcctgctggtatatttaccgcaatctgggctccaacctgacggctatctcaagggcaatgtcgcgcctcgctcacggcgagcaggatgtgtcggtgcccgcgctacagcggcgtgatgagctgggggaactggcgcgcgcgtttaacgtttttgcccgcaataccgcttcgctggagcacaccacgcggctactgaaggagaagacctcgcagatggaggtcgaccgcatcgaacgtcaggggctggaggaggcgctgctgcacagccagaaaatgaaggcggttgggcaactgacgggcgggctggcgcatgattttaataacctgctggcggtgattatcggcagtctggagctgaccgattcagcgtcaccggacgcgccgcgcatcactcgtgcgctcaaagccgcggaacgcggggccatgctcacccagcgtctgctggccttctcgcgcaagcaatccctgcaaccccatgcggtagagatgaagccgctgctggagaacctgagcgagctgatgcggcactcgcttcccgccacgctgacgctggatattgaagcgcaaaccccggcctggcccgcatggattgacgtcagccagctggaaaacgccattatcaacctggtgatgaacgcccgtgatgcaatggaggggcaaaatggtgtgatcaaaatccgcacctggaaccagcgtgtgacccgcagcgacgggcgcaggcaggatatggtcgcgctggaggtgattgaccacggctgcgggatgtcgcaggaggtgaaatcgcaggtctttgaaccgttcttcaccaccaaacagaccggcagcggcagcgggttagggctgtcgatggtgtacggctttgtgcgtcagtccggggggcgcgttgagatcgaaagcgcgccggggcagggaaccaccgtgcggctccagctgccgcgctcgacgctgcccgcgttctccgatgatgccgcgctggcgaccacggccccggcagaaagtgagctgcttgtgctggtcctggaagatgaggcgggcgtgcggcagaccctgtgcgagcaactgcaccagcttggctacctgacgcttgaagccgaaaacggcgagcaggcgctgaacatgctggacgcatcaccggatatcggcatgtttatcagcgacctgatgttgccgggcggcctgagtggtgcggaggtgatcggccatgtacgcagccactatccgcagttgccggtgctgctgatcagcgggcaggatttgcgcccggcgcataacccgcagctgccggacgttcagttactgcgaaaacctttcacccgcgcacagctggcgcaggcgctgcgcaaggtgatggcaggaaccggcagcgagccagggtag

SEQ ID NO: 118332 - DNA, 1515 bp, Enterobacter cloacae
atgagcagaaccccggttttagagatgcgccacattgccaaaacctttggcaatttccacgcgctcaagggtgtggatttgacggttttccccggtgagatccacgcgctgatgggggaaaacggcgccggaaaaagcacgctgatgaagatcctcgcaggcgcttataccgccagcagcggcgacatcctcatcgacggtcagccgtttcacatcaaaggtccgaaggatgcgctggccgcaggcattaccctgatttatcaggagatgcagcttgctcctaacctgaccgtggcggaaaacatttttctcggcagcgagctgtcgcgcggcgggctggtgcagcgcaaagagatggccgcccaggcgcaggcggtgattgaccgtctcggcgcgcagttcagcgccaccgacctggtgatgaagctgaccatcgccgagcagcagcaggtggagatcgcccgcgcgctgcaccgcaacagccgcattctggtgatggatgaacccaccgccgccctctcttcgcgcgaaacgcaccgcctgtttgaactgattttgcgcctgcgcgatgaagggatggcgattatctacatcagccaccgcatggcggaagtgtatgagctttccgatcgcgtcagcgtcctgcgcgacgggcagtacgtcggcagcctgacgcgcgacaagctgaatgcctctgagttggtgcgcatgatggtgggccgcccgctcagcgatctgtttaacaaagagcgcgatattccgctcggcagcccgcgtctgaacgtgcaccacctgacagatggcaaaaaagtgctgccgtgcagtttgcaggttcgctccggtgaaatcgtcgggctggcggggctggtcggggccggtcgctccgagctggcgcagctgatcttcggcgtgcgcaaagccaccggcggcatgatcgaggtcgacggcgaaccggtggtgatccactccccgcgcgcggccattgaaaacggcatcggttttcttaccgagaaccgcaaggagcaggggctgtttctggagctggcggcgcaggagaacatcaccatggcgacgctggagcgcgacgccaccttcggctggctgaaccgcaaaaaagcgcagtctatttccgatgacgccatcgccctgctcaatatccgcgtgccgcattctcaggtgcgcgcgggcgggctctccggcggcaaccagcaaaagctgctgatctcccgctgggtggcgattggcccgcgcattctgattctggacgaacctacgcgcggcgtggacgtcggcgcgaaaagcgagatctaccgcatcatgaaccagatggcgcgcaaaggggtggcgattctgatgatctccagcgagctgccggaagtggtgggcatgagcgaccgggtgtacgtgatgcgggaaggcagcatcgcgggtgaactccacggacgcgacatctctcaggaaaacattatgacgctggcaaccggcgtgaacgacacacatcatcaggcggtgtaa

SEQ ID NO: 118333 - DNA, 996 bp, Enterobacter cloacae
atgacaactccaacccatccgcagcaggtggcgaaatccgcctccgccaaaaaaatgctgatgagcgatctgatgcaaacgatcggcattttgccaattttaatcctgattgtggcggtatttggctttatcgccccgaactttttcaccgagagcaacctgctgaatattacccggcaggcgtcgatcaacatcgtgctggcggcggggatgaccttcatcatcctgaccggcgggattgacctctctgtgggctcgattctgggcactacggcggtagcggcgatggtggtctcgcttatcccggaatttgcgatgctctccattccggcggcgctgatgctcggtatggtgctggggctgttcaacggcgcgctggtggcctttgccgggctgccgccgtttatcgtcaccctcggcacctatacggcactgcgcggcgcggcgtatctgctggcggacggcacgacggtcattaactccaacattaacttcgagtggatcggcaacaactacctcggcccgattccgtggctggtggtgatcgccctggcggtgattgtggtgtgctggtttattctgcgtcgcacaaccctcggcgttcacatctatgcggtcggcggcaatatgcaggcggcacgcttaaccggcatcaaggtctggctggtgctgctgtttgtctacggcatgagcggcctgctctcgggattaggcggcgtgatgagcgcctcgcgcctctacagcgccaacggcaacctcggcacggggtacgagctggatgcgattgcggcggtgatcctcggcggaaccagcttcgtcggcgggatcggcacgatcaccggcacgctggtcggtgcattgatcatcgccaccctcaacaacggcatgacgctgatgggcgtctcctacttctggcagctggtgatcaaaggggcggtgatcatcatagcggtgctgatcgacaaataccgtacccgacaccatcaaagtgcataa

SEQ ID NO: 118334 - DNA, 942 bp, Enterobacter cloacae
atgagattgaagcccttagtgaccgcgctctgtgctggcgcgctgctggccgcaaccccgtttgcgcaggcaaaagatctgaagtccatcggcgtgacggtgggcgacctggctaacccgttcttcgtgcagatcaccaaaggtgccgagctggaagcgcgcaagctggcgggagataacgtcaaggtgacgctggtctccagcgggtacgatctgggccagcaggtatcgcagatcgataacttcattgccgcgaaagtggacatgatcatcctcaacgccgcggattctaaagggatcggcccggcggtaaaacgcgccaaagaggcggggatcgtggtcgtggcggttgacgtggcggcggaaggggccgatgccaccatcacctctgataacacccaggcgggggagatggcctgtaagtacataaccgaccgtctgaaaggtaaaggcaacgtggtgatcatcaacgggccgccggtttctgcggtacaaaaccgcgtggagggctgccagaccgagttcaggcgccacccggatatcaaagtgctctcggataatcagaacgccaaaggcagccgcgaaggcggactggaggtcatgacctccctgctggcggccaatccgaagatcgacggcgtattcgcaattaacgatccgacggcgatcggcgccgatctggcggcgaaacaggctcaacgtaatgagttctttatcgttggcgtggatggcagcccggacggtgaagaagccctgaagcgcgaaaactccctgtttgtggcgacaccggcgcaggatccgcaggtgatggcggcgaaggcggtggagattggctatgacattctccagggcaaacctgcgccgaaagagcctgtgctgatcccggtgacgatgatcgataaaaagaacgtcggcacgtataaggggtggacggttaagtaa

SEQ ID NO: 118335 - DNA, 687 bp, Enterobacter cloacae
atgaaacgctccgacatcaatgaaatcctcggccacacgcggcagttcttctccatgcacgacgtgcatctcccgccgtttgccagctttccgccaacaaaatggcagcagcttgaccaggccgcctggcaggaggtgttcgacctcaggctcggctgggacgtgacggcgtttggcggcaaccactttgccgcagaggggctgacgctgttcaccctgcgcaacggctcccccaacggcgtaccttatgaaaagtgctatgccgaaaaaatcatgcacgtccgcgacggccaggtgacgccgatgcatttccactggcgcaagcgggaggacatcatcaaccgcggcggcgggaatctgattattgagttatggaatgcgggcgcgcatgaggagaccgaaaacaccgacgtgatcgtcacgatagacggctgtcggcagacgcacgcgcccggcagccagctgcgcctcacgccaggggagagcatctgcctgacgcccggcctgtaccacagtttctggggtgaacgcggctttggcgacgtgctggtgggcgaagtgtcgtcggtcaatgacgatgaacacgacaaccactttttacagcccatcgatcgctacaacaccatcgaagaagacgaaccggcggtgctggtgctgtgcaacgagtacaacctgtttcggatataa

SEQ ID NO: 118336 - DNA, 861 bp, Enterobacter cloacae
atgccattgatttctcttgccgacggtctggcacacgccagagaacaccgctacgccctgggcgcgttcaacgttctcgactcccattttctgcgcgcgctgtttgccgccgcgaagcaggaacgctcgccgtttatcatcaacatcgccgaagtgcattttaagtacgtgtctctggagtcgcttgttgaagcggtgaagttcgaagccgcccgtcacgatattcccgtggtgctgaacctcgaccacgggctgcattttgaggccgtcgtgcgcgccctgcgcttagggttcagctcggtgatgttcgacggctcgacgctgagctatgaggaaaatatccgccagacccgggaagtggtgaagatgtgccacgcggtgggcgtctcggtggaggcggagctgggcgcagtcggcggagatgaaggcggcgcactgtatgggcatgcggatgaagcgttctttaccgacccacagctggcgcgcgagtttgtcgatttaaccggtatcgacgcgctggcggtcgccattggcaacgcgcacggcaaatacaagggcgagccgaagcttgatttcccccgtctggacgccattcgccagcagacgggcctgccgctggtgttacacggcggctctggcatcagcgatgccgacttccgccgcgccatcgagctgggcattcataaaatcaacttctataccggcatgtcgcaggccgcgctcgccgccgttgagcagcgcatggcaaaccgccagccgctgtacgatgagtttgccgaactgctgctgggcattgaagaggccattaccgatacggtcgcggagcagatgcgcatcttcggcagcgcggggcaggcataa

SEQ ID NO: 118337 - DNA, 1020 bp, Enterobacter cloacae
atggaacgcaaagggattatcgccgcaggcaacatgctggtggatcacgttcatcagatcgtgcagtggccggagcgcggctggctggcggaaatcacccacagcgaacgctcaaccggtggtgcgccgctcaacgttctgctgacgctggcgaaaatgcacgtcggcctgccgttacaggcggtggggctgattggggaagacagcgacggagactatattctggcgatgctcgaccagtatcacgtcaatcgccagcgcgtgcagcgtacaacgttcgccccaacgtcgatgtcgcaggtgatgaccgaccccagcggacagcgcacctttttccactcgccgggcgccaaccgcctgctggatcttcccgccttcgatcgtttagacggatcgctgaagatcttccatctcggctatctgctgctgctcgacagcctggacatgccggacgaggagtttggcacccgcagcgcgcggttactggcacagatgcgcgatcaggggtatgaaacctcgctcgatctggtctcccgcaagggcgatccgcgctatcagccgctggtgctccctgccctgcgccatcttgattatctggtgattaacgagctggaagccggtgagtttagcgggcttgagatccgcgacggtcatggtgcgctgaacatggtccatatcgccgacgctgccgcacagttgctggcggcaggcgtgcggcagcgggtagtgatccactgtccggaaggggcatggggtgaagcgccgggtgaaaaagggcaatgggttccttcgtggaagctgacgcaggacgagattatcggcagcgtcggtgcgggcgacgcgttttgcgcaggctttttatacggttgccatgaatcgctgtcgcttaccgagagtatttatctggcgcacgcctgcgcgcgggccagcctgctggcggccaatgcgattgacggcgcgaaaacgctggccgagcttcaggcgtttattcaggagaacggtcaggcggctttctcatga

SEQ ID NO: 118338 - DNA, 732 bp, Enterobacter cloacae
atgaaaccggcgattctggtggttgatgatgatgtcgcagtctgcgaactgctacaggatgtgctcagcgagcacgtctttaccgtgctgacgtgtcacaccggtcaggacgcggtgaaccgtgtccagcaggatcccggcattgcgctggttctgctggacatgatgctgccggatatcaacggattacaggttttgctgcaactgcaaaagcagcgaccatcgctaccggtggtgatgctgacggggctgggaagtgaatcagatgtggtcgtcgggctggaaatgggcgccgatgattacatcggaaaaccgttcaatccgcgcgtggtggtcgcccgcgttaaggcggtgctgcgtcgaaccggcgcgctggacgcggagcctgccgcgccgcgcgttgaaggtattacctttaacggctggacgctggacaccacccgctgcgagctgagcgatccgcagcgtaataccgtgccgttaacccagggcgaatacggcctgctgctggcattaacgcaaaacgcccgccgggtactgagtcgtgaacagctgctggagctgacccacagcgaaagcgccgaggtctttgaccgcactatcgacgtgttgatcatgcggctacggcgaaaaattgaggtcaatccgcaccagcctttgctgatcaaaaccattcgcggtctgggctatgtttttgccacggacgtttcccatcatgagaaagccgcctga

SEQ ID NO: 118339 - DNA, 420 bp, Enterobacter cloacae
atgaaaaaagtcgtcacggtttgcccttattgtgcctcaggttgcaagatccacctggtggtcgataacggcaaaatcgtccgggcggaagcggcgcagggtaaaaccaatcagggcacgctgtgcctgaaagggtactacggctgggattttattaacgatacccaaatcctcacgccgcgcctgaaaacccctatgatccgccgcgaacgcggcggcaagctggaagccgtctcctggaatgaagcgctggattacgtcgccacgcgcctcagcgccatcaaggccaagtatggcccggatgcgattcagaccaccggctcctcacgcggaaccgggaatgaaaccaactatgtgatgcaaaaattcgcgcgcgccgttattggtaccaataacgtcgactgctgcgctcgcgtctga

SEQ ID NO: 118340 - DNA, 1680 bp, Enterobacter cloacae
atgagtaatgccatcaatgagatagataacaccgatctggtgttcatcttcggctataacccggcggattctcaccctatcgtcgcgaatcacgttattcgcgccaaacagaacggggcgaaaatcatcgtctgcgatccgcgtaaaattgaaaccgcgcgcattgcggatatgcacatcgcactgaaaaacggctcgaacatcgcgctgttgaatgcgatggggcatgtcattattgaggagaacctctacgaccaggcgtttgtcgcgagccgtacggaagggtttgaagagtatcgcaagattgtcgaaggctatacgccggagtcagtagaggcgataaccggcgtcagcgcgcaggagatccgccaggcggcgcggatgtacgccggagcgaaaaccgccgccatcctgtggggcatgggcgtgacccagttctaccagggtgtggaaaccgtgcgctcgctcaccagcctcgccatgctgaccggcaatctgggtaaagcgcatgtgggcgtgaacccggtgcgtggtcagaataacgtgcagggtgcgtgtgatatgggcgcgctgccggacacctatccgggctaccagtacgtgaagttcccggaaaaccgcgagaagtttgcgaaggcctggggcgtggaaagtctgccggcacacaccggataccgcatcagcgagctgccgcaccgcgcggctcacggtgaagtacgtgcggcctacatcatgggtgaagatccgctccagaccgacgccgaactgtccgcggtgcgcaaaggctttgaggatctggagctggtgattgttcaggatatctttatgaccaaaaccgcggcagcggcggatgtgattctgccgtcgacctcctggggcgagcatgaaggtgtctatacggcagcagaccgcggcttccagcgcttcttcaaggccgtcgagccgaagtgggatctgaaaacggactggcagatcatcagcgaaatcgccacccgcatgggctacccgatgcactacaacaacacccaggagatctgggacgagttgcggcatctgtgtccggacttttatggggcaacctatgaaaaaatgggtgagctgggctacatccagtggccgtgccgggatgagtcagaatccgatcaggggacgtcatacctctttaaagagaagttcgacaccccgaacgggctggcgcagttcttcacctgcgactgggtcgcgccgatcgataagctcaccgacgagtatccgatggtgctctccaccgtgcgtgaagtgggccactactcctgccgttccatgaccggcaactgcgccgcgctggcggcgctggcggatgaaccgggctacgcgcagatcaacaccgccgacgccgaacggctcggtattgaagatgaagcgctggtgtgggtgaactcgcgtaaaggccgcatcattacccgcgcgcaggtcagcgaccgtccgaacaaaggcgcggtctatatgacctaccagtggtggattggcgcctgtaacgagctggtgacggagaacttaagcccgataaccaaaacgccggagtataaatactgcgccgtaaacgtggagccaatagcggatcaacacgctgcggaacagtatgtgatcgacgaatataacaagctgaaagcccgcctgcgcgaaagcgcaatgggatga

SEQ ID NO: 118341 - DNA, 384 bp, Enterobacter cloacae
atgagtgcgaataccgaagctcaagggagcgggcgcggcctggaagcgatgaaatgggtagttgtagccgtgctgctgattgtggcgattgtcggcaactatctttatcgtgacatgatgctgccgctacgcgcgcttgcagtggtaattctgattgctgcggcgggtggtgtcgcgctgttgacgacgaaaggcaaagcgaccgttgcgtttgcccgcgaagcgcgtaccgaagtccgcaaggtcatttggccgactcgccaggaaacattgcacaccacgctgattgtagcggcggtaaccgctgtaatgtcactgatcctgtggggactggatggtattctggttcgcctggtatcctttatcactggcctgaggttctga

SEQ ID NO: 118342 - DNA, 546 bp, Enterobacter cloacae
atgtctgaagcccctaaaaagcgctggtacgtcgttcaggcgttttccggttttgaaggccgcgtagctacgtcgctgcgtgagcatatcaaattacacaatatggaagagttatttggcgaagttatggttccgaccgaagaagtggttgagatccgtggcggccaacgtcgcaaaagcgagcgtaaattcttcccgggttacgtgctggttcagatggtgatgaacgacgcgagctggcacctggtgcgcagcgtaccacgcgtgatgggctttatcggcggcacatctgaccgtccggcgccaatcagcgacaaagaagttgatgcgattatgaaccgcctccagcaggttggtgataaaccgcgtccgaaaacgctgtttgaaccgggtgagatggttcgtgttaacgacggtccgtttgctgacttcaatggcgtcgtcgaagaagtggactacgagaagtcccgcctgaaagtttccgtttctatctttggtcgtgcgaccccggtagagctggactttgctcaggtagaaaaagcctaa

SEQ ID NO: 118343 - DNA, 429 bp, Enterobacter cloacae
atggctaagaaagtacaagcctacgtcaagctgcaggttgcagcaggtatggcgaacccaagtccaccagttggtccagctctgggtcagcagggtgtgaacatcatggaattctgtaaagcgttcaacgccaaaactgaatccatggaaaaaggtctgccaatcccagttgtaatcactgtttacgctgaccgttctttcactttcgttaccaaaacccctccagcagcagttctgctgaagaaagcagcgggcatcaagtctggttccggtaagccgaacaaagacaaagtgggtaaaatttcccgcgctcagttgcaggaaatcgcgcagaccaaagctgccgacatgactggttccgacattgaagcgatgactcgctccatcgaaggtactgcacgttccatgggcctggtagtggaggactaa

SEQ ID NO: 118344 - DNA, 705 bp, Enterobacter cloacae
atggctaaactgaccaagcgcatgtccgtgatccgtgacaaagttgatgcgaccaaacagtacgacatcaacgaagctatcgctctgctgaaagaactggcaactgctaagttcgttgaaagcgttgacgttgccgttaacctgggcatcgacgctcgtaaatccgatcagaacgttcgtggcgcaactgtactgccacacggtactggccgttccgtacgcgtagctgtatttgctcagggtgcaaacgctgaagctgctaaagctgccggcgctgaactggtaggtatggaagatctggctgatcagatcaagaaaggcgaaatgaactttgacgttgttattgcttctccagatgcaatgcgcgttgttggccagctgggccaggttctgggtccacgcggcctgatgccaaacccgaaagtgggtactgtaacgcctaacgttgctgaagcggttaagaacgctaaagcaggtcaggttcgttaccgtaacgacaaaaacggcatcatccacaccaccatcggtaaagtggactttgacgctgacaaactgaaagaaaacctggaagctctgctggttgcgctgaaaaaagcaaaaccaactcaggcgaaaggcgtgtacatcaagaaagttagcatctccaccaccatgggtgcaggtgttgcagttgaccaggctggcctgagcgctgctgcaaactaa

SEQ ID NO: 118345 - DNA, 498 bp, Enterobacter cloacae
atggctttaaatcttcaagacaaacaagcgattgttgctgaagtcagcgaagtagccaaaggcgcgctgtctgcagtagttgcggattcccgtggcgttactgtagacaaaatgactgaactgcgtaaagcaggtcgtgaagctggcgtatacatgcgtgttgttcgtaacaccctgctgcgtcgcgtagttgaaggtactcagttcgagtgcctgaaagacacgtttgttggtccgaccctgattgcatactctatggaacacccgggcgctgctgctcgtctgttcaaagagttcgcgaaagcgaatgcaaaatttgaggtcaaagctgcagcctttgaaggtgagttgatcccggcatcgcaaatcgatcgcctggcaaccctgccgacctacgaagaagcaattgcacgcctgatggcaaccatgaaagaagctgcggctggcaaactggttcgcactctggctgctgtacgcgatgcgaaagaagctgcttaa

SEQ ID NO: 118346 - DNA, 366 bp, Enterobacter cloacae
atgtctatcactaaagatcaaatcattgaagcagtagcagctatgtccgtaatggacgttgtagagctggtttctgcaatggaagaaaaattcggtgtttctgctgctgctgctgtagctgtagctgcgggcccggctgaagctgctgaagaaaaaactgaattcgacgtaattctgaaagctgctggcgcgaacaaagttgctgtaatcaaagcagtacgtggcgcaactggcctgggtctgaaagaagctaaagacctggtagaatctgctccagctgcgctgaaagaaggcgtgagcaaagacgacgcagaagcactgaaaaaatctctggaagaagctggcgctgaagttgaagttaaataa

SEQ ID NO: 118347 - DNA, 4029 bp, Enterobacter cloacae
atggtttactcctataccgagaaaaaacgtattcgtaaggattttggtaaacgtccacaagttctggacattccatatctcctttctatccagcttgactcgttccagaagtttatcgagcaagatcctgaagggcagtacggcctggaagcagccttccgttccgtgttcccgattcagagctacagcggtaattccgagctgcagtacgtcagctaccgccttggcgaaccggtgtttgacgttcaggaatgtcagatccgtggcgtgacctattccgcaccgctgcgcgtaaaactgcgtctggtgatctacgagcgcgaagcgccggaaggcaccgtaaaagacattaaagaacaagaagtctacatgggtgaaattccactcatgacggacaacggtactttcgttatcaacggtactgagcgtgttatcgtttcccagctgcaccgtagcccgggtgtcttcttcgacagcgataaaggtaaaacgcactcttccggtaaagtactgtataacgcacgcatcattccttaccgtggttcatggctggacttcgaattcgatccaaaagacaacctgtttgtccgtatcgaccgtcgtcgtaagctgcctgcaaccatcattctgcgtgcactgaactataccactgagcagatcctggacctgttctttgagaaagtgatctttgaaatccgcgacaacaaattgcagatggagttggtgccggaacgtctgcgtggtgagaccgcgtcgttcgacatcgaagccgacggcaaagtgtatgtggaaaaaggtcgccgtatcaccgcgcgccacatccgccagctggaaaaagatgatatcaaacacatcgaagttccggttgaatacattgcaggaaaagtagccgcgaaagattacgttgatgaatcaactggcgagctgatctgcccggcgaacatggagctgagcctggatctgctggctaagctgagtcaggctggccacaaacgtatcgaaacgctgttcaccaacgatctggatcacggtccgtacatctctgagactgtacgcgtcgacccaaccaacgatcgtctgagcgcgctggtcgaaatctaccgcatgatgcgtcctggtgagccaccaactcgcgaagcggctgaaagcctgttcgagaacctgttcttctccgaagaccgctacgatctgtccgcggttggtcgtatgaagttcaaccgttctctgctgcgcgacgaaatcgaaggttccggtatcctgagcaaagacgacatcattgaagtgatgaagaagctcatcgatatccgtaacggtaaaggcgaagtggacgatatcgaccacctcggcaaccgtcgtatccgttccgtaggcgaaatggcggaaaaccagttccgcgttggcctggtacgtgtagagcgtgcggtgaaagagcgtctgtctctgggcgatctggataccctgatgcctcaggatatgatcaacgccaagccgatttctgcggcagtgaaagagttcttcggttccagccagctgtctcagttcatggaccagaacaacccgctgtctgagatcacacacaaacgtcgtatctccgcactcggcccaggcggtctgacccgtgaacgcgcaggctttgaagttcgagacgtacacccgactcactacggtcgcgtatgtccaatcgaaacgcctgaaggtccaaacatcggtctgatcaactccctgtccgtgtacgcacagacgaacgaatacggtttcctcgagaccccgtatcgtaaagtgaccgacggtgttgttactgacgaaattcattacctgtctgctattgaagaaggcaactacgttatcgctcaggcgaactccaacctggatgacgaaggccactttgtagaagatctggttacctgccgtagcaaaggcgaatccagcttgttcagccgcgaccaggttgactacatggacgtatccacccagcaggtggtatccgtcggtgcgtccctgatcccgttcctggaacacgatgacgccaaccgtgcattgatgggtgcgaacatgcaacgtcaggccgttccaactctgcgtgctgataagccgctggttggtaccggtatggaacgtgctgttgccgttgactctggtgttacagcagttgctaagcgtggcggtaccgttcagtacgttgacgcatcccgtatcgttatcaaagttaacgaagacgagatgtatccgggcgaagcgggtatcgacatctacaacctgaccaaatacacccgttctaaccagaacacctgtatcaaccagatgccatgtgtgtctctgggtgagccagttgagcgcggcgacgtgctggcagacggtccgtccaccgacctcggtgaactggcgctcggtcagaacatgcgcgtagcgttcatgccgtggaacggttacaacttcgaagactccatcctcgtctccgagcgtgtggttcaggaagatcgtttcaccaccatccacattcaggaactggcatgtgtgtcccgtgacaccaagctggggccagaagagatcaccgctgacatcccgaacgtgggtgaagctgcgctctctaaactggatgaatccggtattgtttacatcggcgcggaagtgaccggcggtgacattctggttggtaaggtcacgccgaaaggcgaaacccagctgacgccagaagagaaactgctgcgtgctatcttcggtgagaaagcgtctgacgttaaagactcttctctgcgcgtaccaaacggtgtttccggtacggttatcgacgttcaggtcttcacccgtgacggcgttgagaaagataagcgtgcgctggaaatcgaagagatgcagctcaaacaggctaagaaagacctgtctgaagaactgcaaatcctcgaagcaggtctgttcagccgtatctatgcggtgctggttgccggtggcgttgaagctgagaagctcgacaaactgccacgcgatcgctggctggaactgggcctgaccgacgaagagaaacagaatcagctggaacagctggctgagcagtatgacgaactgaaacacgagttcgagaaaaaactcgaagcgaaacgccgcaaaatcactcagggcgacgatctggcaccaggcgtgctgaagattgttaaggtgtatctggctgttaaacgtcagatccagcctggtgataagatggcaggtcgtcacggtaacaagggtgttatctctaagatcaacccgatcgaagatatgccgcacgatgctaacggtacgccggtagatatcgtactgaacccactgggcgtaccgtctcgtatgaacatcggtcagattctggaaacccacctgggtatggctgcgaaaggtatcggcgataagatcaacgccatgctgaaacagcagcaggaagtcgcgaaactgcgcgagttcatccagcgtgcctacgatctgggtaccgacgttcgtcagaaagtcgacctgaacaccttcagcgatgaagaagtgctgcgtctggcagagaacctgcgcaaaggtatgccaattgcaacgccggtattcgacggtgcaaaagaagctgaaattaaagagctgctgcaactgggtggtctgccaacgtctggccagattacgctgtttgacggccgtaccggtgaacagttcgagcgtccggtaaccgtaggttacatgtacatgctgaaactgaaccacctggtcgacgacaagatgcacgctcgttctaccggttcttacagcctggttactcagcagccgctgggtggtaaggctcagttcggtggtcagcgcttcggggagatggaagtgtgggcgctggaagcatacggcgcagcatacaccttgcaggaaatgctcaccgttaagtctgatgacgtgaacggtcgtactaagatgtataagaacatcgtagacggcaaccatcagatggaaccgggcatgccagaatccttcaacgtactgttgaaagagattcgttcgctgggtatcaacatcgaactggaagacgagtaa

SEQ ID NO: 118348 - DNA, 4224 bp, Enterobacter cloacae
gtgaaagacttattaaagtttctgaaagcgcaaactaaaaccgaagagtttgatgcgatcaaaattgctctggcttcgccagacatgatccgttcatggtctttcggtgaagttaaaaagccggaaaccattaactaccgtacgttcaaacctgagcgtgacggccttttctgtgcgcgtattttcgggccagtaaaagattacgagtgcctgtgcggtaagtacaagcgcctgaaacaccgtggtgtgatctgtgagaagtgcggcgttgaagtgacccagaccaaagtacgccgtgagcgtatgggccacatcgagctggcgtctccgaccgctcacatctggttcctgaaatctctgccgtcccgtatcggtctgctgctggatatgccgctgcgcgatatcgaacgtgttctgtacttcgaatcttatgtggttatcgaaggcgggatgaccaatctggaacgtaaccagatcctgaccgaagaacagtatctggacgcgctggaagagttcggtgacgaattcgacgcgaagatgggtgcggaagctatccaggccctgctgaagagcatggatctggagcaagagtgtgaaactctgcgcgaagagctgaacgaaaccaactccgaaaccaagcgtaaaaagctgaccaagcgtatcaaactgctggaagcgttcgttcagtctggtaacaaaccagagtggatgatcctgaccgttctgccggttctgccgccagatctgcgtccgctggttccgctggatggtggtcgtttcgcaacgtcggatctgaacgatctgtaccgtcgcgtgatcaaccgtaacaaccgtctgaaacgtctgctggatctggctgcgccggacatcatcgtacgcaacgaaaaacgtatgcttcaggaagcagtcgatgccctgttggataacggtcgtcgtggtcgtgcgatcaccggttctaacaaacgtcctctgaaatctttggccgacatgatcaaaggtaagcagggtcgtttccgtcagaacctgctcggtaagcgtgttgactactccggtcgttctgtaatcaccgtaggtccatacctgcgtctgcatcagtgcggtctgccgaagaaaatggcactggagctgttcaaaccgttcatctacggcaagctggaactgcgtggcctcgccaccaccatcaaagccgcgaagaaaatggttgagcgtgaagaagctgtcgtttgggatatcctggacgaagtgatccgcgaacacccggtactgctgaaccgtgcaccaactctgcaccgtctgggtatccaggcctttgagccagtcctgatcgaaggtaaagcgatccagctgcacccgctggtttgtgcggcctataacgccgacttcgatggtgaccagatggctgttcacgtaccgctgacgctggaagcccagctcgaagcgcgtgcgctgatgatgtctaccaacaacatcctgtctccagcgaacggtgaacctatcatcgttccttctcaggacgttgtactgggtctgtactacatgacccgtgactgtgttaacgccaaaggcgaaggcatggtgctgactggcccgaaagaagctgagcgtatttatcgcgctggcctggcctctctgcatgcgcgcgttaaagtgcgtatcaccgaatacgaaaaagatgaaaacggcgagttcgttgcgcacaccagcctgaaagacacgaccgttggccgtgccattctgtggatgatcgtaccgaaaggtctgcctttctccatcgtcaaccaggcgctgggcaagaaagcgatctccaaaatgctgaacacctgttaccgcattctgggtctgaagccgaccgttatcttcgctgaccagacaatgtacaccggctttgcttatgcagcgcgttcaggtgcatctgttggtatcgatgacatggtcatcccagagaagaaacacgagatcatctctgaagcggaagctgaagttgctgagatccaggagcagttccagtctggtctggtaaccgcaggcgaacgttacaacaaagttatcgatatctgggctgcggcgaacgatcgtgtatctaaagcgatgatggataacctgcaaaccgaaaccgtgattaaccgtgacggcgtagaagagcagcaggtctccttcaacagcatctacatgatggccgactccggtgcgcgtggttctgcggcacagattcgtcagctggcaggtatgcgtggtctgatggcgaagccagatggctccatcatcgaaacgccaatcaccgcgaacttccgtgaaggtctgaacgtactccagtacttcatctccacgcacggtgcgcgtaaaggtctggcggataccgcactgaaaacggcgaactccggttatctgacgcgtcgtctggttgacgttgcgcaggatctggtcgtcaccgaagacgattgtggcaccctcgaaggtatcaccatgaccccggttatcgagggtggtgatgttaaagagccgctgcgcgatcgcgtactgggtcgtgtgaccgcggaagacattctgaagccgggcaccgcagacattctggttccacgcaacaccctgctgcacgaacagtggtgtgacctgctggaagcgaactctgttgactccgtgaaagtgcgttccgttgtatcctgtgacaccgactttggtgtgtgtgcgcactgctacggtcgtgacctggcgcgtggccacatcatcaacaaaggtgaggctatcggcgttatcgcggcacagtccatcggtgagccgggtacacagctgacgatgcgtacgttccacatcggtggtgcggcatctcgtgcggctgctgaatccagcatccaggtgaaaaacaaaggtagcatcaagctcagcaacgcgaagtcggttgtgaactccagcggtaaactggttatcacttcccgtaacaccgagctgaagctgatcgacgaattcggtcgtaccaaagagagctataaagtgccttacggtgcggttatggcgaaaggtgatggcgagcaggttgctggcggtgaaaccgttgcaaactgggatccacacaccatgccggttatcaccgaagtaagtggtttcatccgcttcactgacatgatcgacggccagaccattactcgtcagaccgacgagctgaccggtctgtcttctctggtggttctggattctgctgaacgtactaccggcggtaaagatctgcgtcctgcactgaaaatcgttgatgctcagggcaacgacgttctgatccctggtaccgatatgcctgcgcagtacttcctgccgggtaaagcgattgtacagctggaagatggcgtacagatcagctctggtgacaccctggcgcgtattcctcaggaatccggcggtaccaaggacatcaccggtggtctgccacgcgttgcggacctgttcgaagcacgtcgtccgaaagagcctgcgatcctggctgaaatcagcggtatcatctccttcggtaaagagaccaaaggtaagcgccgcctggttattacgccagtagatggcagcgagccgtacgaagagatgattcctaagtggcgtcagctcaacgtgttcgaaggtgaacgcgtagaacgtggtgacgtggtttccgatggtccagaagcgccgcacgacatcctgcgtctgcgtggtgtgcatgctgttacccgttacattgttaacgaagtacaggacgtataccgtctgcaaggcgttaagattaacgataaacacattgaagttatcgttcgtcagatgctgcgtaaagcaaccatcgaaaacgcgggcagctccgacttcctggaaggcgagcaggttgaatactcacgcgttaagatcgctaaccgcgatctggaagcgaacggcaaaatcggtgcgaccttcgcacgcgatctgctgggtatcaccaaagcgtctctggcaaccgagtccttcatctctgctgcatcgttccaggaaaccactcgtgtcctgaccgaagcggctgttgcaggtaaacgtgatgaactgcgcggtctgaaagagaacgttatcgtgggtcgtctgatcccggccggtaccggttatgcgtaccaccaggatcgtatgcgtcgtcgcgcagcgggcgaactgccagctgcaccgcaggtgactgccgaagatgcatccgcgagccttgcagaactgctgaacgcaggtctgggcggttccgacaacgagtaa

SEQ ID NO: 118349 - DNA, 318 bp, Enterobacter cloacae
atggaagacttagaaaccacgattatggaactgcttgtcaacgcaggcgcagcgcgcagcgcggccctgacggcgttgcagatggcgcgaaaaggcgactttgatgaagccgagaaagcgatggaagaatcgcgtgaatatgtgaaacatgcgcatacgatccagacgcagcttatcggtcttgatgaagggaccgggaaacttccggttaacctgatcaccgttcactctcaggatcacctgatgaacgcgatggttattcaggatctggcgggcgatatgattgagctttatcgacgtatcccgttagtgaactga

SEQ ID NO: 118350 - DNA, 309 bp, Enterobacter cloacae
atgaagaacatcgttttatgctgtgcagcgggaatgtcaaccagcatgctggttcaacgtatgaaagatgccgcgcagaaaaaaggagtcgaagtaaccattaaagccgttccggtcgcggagtttaaagataacatcgcgacggctgatatcgtattactggggccacaggttaaatacgaacaggcaaaactccaggcgcaggccgatccgctcggaaaaaaggttgcggtcatcgacatgatggattacggcatgatgaaaggtgatgccgtactggaaaaagcgctcaaacttctggagtcataa

SEQ ID NO: 118351 - DNA, 1542 bp, Enterobacter cloacae
atggcactccacagtaaaaagctctcttttacccggccaattatggtcagcttcgcggggatcctgttcagtttcgcgctgatcgccatcctggtcatcctttcacagagaaaggattttcttgaggattatcataaaattaatggtaatttcacccataatctggcggtgaactataccgaatccatcctgcgagaaaatgactatattcttggtcgcgctgcgatgtacttcgcccgtaacgacagagtaaatcagacaataaatatcgatccgacacacggtttgcagatgttgatgcatttgcagaacctgatgccgacggtgtcgtctatctctctggcggacacagaagggcgccatctgcgcgcgccggaagtgctgccaacggagaaaagtaagtcgttcgacgccagaacccgcccatggtttgtcgggcaagcggaagccagcaactttcctcactacacccgcccctatctggactatttcacccaacatcctactgtcaccctctataagccggtcatttcaccggaaggccgtctgaagggcacgctcgctttccatcttgatttaacgtccatggggtataccctgcgccagatggtggcgcctgttcagggtgagttttttgtcgtggagcgtgacggcgccgttgtgctgcatccggacacgggggcgctctttaagcagtacgtaagcgaagcgctgatggacaaaatgaccagcggcgaaggccatcttttcgaccccaaaagtaaaacctggtattactactactctttcaccaatccggactggtttgtgatttatcgggtctccgatgccacgcttaacgtcatcacccggcatgaaaccaccgtcgtcggctggggatttgcgctggcggcaatcatcatcattttgttcgggctttaccttcgtcatgcctcgcgttctgtgctgatgaacattatcaacgccatcaaaaccggcgacgtcaaccaggcaccacgccttgaggcgatgctcagccataccattcgaaccaataaagaacgcgagctggcctatgtccgtcaggccacccatgatgcgctgacaggctgcaaaaatcgccgtgcgttcgataacgatgtggatgagctgctgaccgctcatcaacccttcgttctggcgctgatcgacatcgataacttcaaatccattaacgacacctggggccacctgagcggggatattgtgctgcgcaacgtggcgcgggaaggtattcagatcatgcagccgcaccacgtttccgtttaccgctacggtggagaagagttcggcgtgatattcccggccgagctgatgaactccgcgcacgcgctactggaagcctggcgcaccgccgttgaaaagcggacctggcgggaagagaacctgcgagtgaccttcagcgccgggatgggagagtggcacttcgaaccgctggaacaatttatcggtagcgtagatgaagcgctgtataccgctaaacaacagggtaaaaaccgcatcgtaagcacggcctgccgataa

SEQ ID NO: 118352 - DNA, 1128 bp, Enterobacter cloacae
atggctacctttaccgatcgctggcgtcagcttaactgggacgatattgccttacgcatcaacagtaaaacctctgcggacgtagagcgggcattaacagccaaacatttgacgcgcgaagatttgatggccctgctttctccggcagccagcgcgtaccttgaaccgatggcccagcgcgcgcaacgcctcacccgccagcgttttggcaacacggtgagcttttacgtgccgctctatctttctaatctgtgcgccaatgactgcacctactgtggtttctccatgagcaaccgtattaagcgtaaaacgctggatgagcatgagatcgcccgcgagtgtgcggctattcgtgagatgggttttgaacatctcctgctggtgacgggtgaacatcagggcaaagtggggatggactattttcgccagcatcttccggccatccgccgcgaatttgcctcgttgcaaatggaagtgcagcctctgtcgcaggaggaatatgcggagctgaaaaccctcgggctggacggcgtaatggtttatcaggaaacctaccatgaggcgacctatgcccggcatcacctgaaagggaagaagcaggatttcatcttccggctggaaacgccggataggctggggcgcgccggtatcgataaaattgggctgggcgcgcttatcggtctgtccgacagctggcgggtggactgctatatggtggcggagcatctgctgtggctacagcagcagtactggcaaagccgctattccatctctttcccgcgactgcgtccctgtacgggaggcgttgaacccgcctcgctgatggatgagcgccagctggtgcaaaccctgtgtgcatttcgcctgttcgcgccggaagtggaattgtcgctctccacgcgtgaatcccccgcgtttcgcgaccgcgcgatcccgctggcgatcaataacgtcagcgccttttccaaaacgcagccgggcggttacgcggacgatcacccggaactggaacagtttgcaccgcacgacggccgacggcccgaagcggtggcggaagccctgactgcacaggggctacagccggtgtggaaagactgggatagctggctgggaagagcctcgcattag

SEQ ID NO: 118353 - DNA, 768 bp, Enterobacter cloacae
atgttacgtattgccgacaaagtctttgattcacatctgtttaccggaaccggaaaattcgcctccccgcaactgatggtggatgccattcgtgaaagcggcagccagctggtgacgctggcgatgaagcgcgtggatttgcgtcagcacaacgatgccatacttgcgccgttactggaggcaggcgtgacgctcttaccgaatacctccggtgcgaaaacggccgaggaagcaattttcgctgcgcaactggcgcgggaagcgctcggcacccgctggctgaagctggaaattcatccggacgcccgctggctgttgcccgatccgatcgaaaccctgaaagcggcagagaagctggtgcagcaggggtttaccgttctgccctactgtggtgccgatcctgtgctgtgcaagcgtctggaagaggtcggctgcgcggctgtaatgccgctaggggcgcccattggctccaaccagggactggagacccgggcgatgctggagatcatcatcaagcaggcgaccgtgcccgtggtggtggatgcgggcatcggcgtacccagtcacgccgcgcaggcactggagatgggggccgatgcggtgctggtcaataccgcgattgcggtggccgacgacccggtgatgatggcgcgtgcgttccgccttgccgtcgagtccggtctgctggctcggcagtccggccccggctcgcgcagtgttcaggcgcaggccaccagcccgctgaccgattttctggaggcgctctga

SEQ ID NO: 118354 - DNA, 201 bp, Enterobacter cloacae
atgcgcattctgtttaacgatgagccgatgacgtgcgacgacgatctcaccgttgccgccctgctcgacatgctgcgccagctgaagccgggaacggcgctggcgctcaatcaacagatcctgccgcgcgagcggtgggaacatcagcaggtcaatgagggcgaccagatcctgctgtttcaggttatcgcagggggctga

SEQ ID NO: 118355 - DNA, 756 bp, Enterobacter cloacae
atgaaagatcgtgattttatgcgttacagccgccagatcctgctggaggatatcgccatcgaggggcagcaaaagctgctcgccagccgggtactgattgtcggtctgggcggattaggcacccccgccgcgctgtatctggccggcgcgggcgtgggcacgctggtgctggccgatgacgacgaggtacatctcagcaatctgcaacggcaaattctctttacgacagaagatatcaaccagcctaaagcgcacgttacgcgccagcggctgaaccagcttaaccccgatatcgaactggtcgcactccagacgcggctgagcggggaagatctgcaacgcgaagtggcccttgccgacgtggtgctggactgtacggacaatatggcgacacgtcaggccatcaacgcggcctgtgttgcgcagaacacgccgctgatcaccgccagcgcggtcggtttcggtgggcaaataatggtgcttacgccgccgtgggcacagggctgctaccgctgcctgtggccggacgaggctgaaccggagcgtaactgccgcacggcaggcattctgggcccggtggtgggcgtgatgggtactcttcaggcgctggaggccatcaagttgctcagcggcatggagacagaacgcaacacgctgcggctgttcgacgcccgctccagcggctggcgtcatctggcgttaaaccgtgccagccactgcccggtatgcggaggccgcaatgcgcattctgtttaa

SEQ ID NO: 118356 - DNA, 642 bp, Enterobacter cloacae
atgtaccagcctgatttcccccctgtccccttccgcttagggctttacccggtggtggacagcgtggcgtggatcgcccgcctgctggaagctggcgttcgcaccctccagctacgcatcaaggataaacgcgatgaagaggtggaggccgacgtggtcgccgctatcgcgctgggacgtcgctaccacgcccgcctgtttatcaacgactactggcggctggcggttaaacaccaggcgtacggcgtgcatctgggacaggaagatctggaaacgaccgatctcaacgcgatccgtgacgccggtctgcggctgggcgtctccacccacgacgatatggagatcgacgtggcgctggcggcccgcccctcttatatcgcgctcgggcacgttttcccgacgcaaaccaaacagatgccgtccgctccacagggtttgacgcagctggcggcccacgttaagcgccttgccgattaccccaccgtcgccatcggcgggatcagccttgaacgtgcgcccgcggtgctggagaccggcgtcggcagtatcgccgtcgtcagcgctatcacccaggcggcagactggcaggccgccaccgcgcagcttttacaactggcaggagcaggtgatgaaagatcgtga

SEQ ID NO: 118357 - DNA, 1896 bp, Enterobacter cloacae
atgtctactgcaaaactgacccgccgcgaacagcgcgaacacgcacaacgcttcatcgacaccctggaaggcaccgctttcccgaactcgaaacgcatctacatttccggctcacaggctgatatccgcgtcccgatgcgcgaaatccagctcagcccgacgcttatcggcggcagcaaagagaacccgcagtttgaagacaacgaagccgtgccggtatacgacacctccggcccgtacggcgatccttctgttgctatcaacgtacagcagggtctggcaaaactgcgccagccgtggattgacgcccgtaacgactgcgaagagctgagcgtgcgcagctcggcgtacaccaacgcgcgcctggccgacgacggtctggacgcgctgcgctttaccggccttctgacgccaaaacgcgctaaagcgggcaaatgcgtcacccagctgcactacgcgcgccagggtatcgtcacgccggagatggagttcatcgccatccgcgaaaacatgggccgcgagcgcatccgcagcgaagtgctgcgccaccagcatcctggtgaagggtttggcgctcgcctgccggaaaacatcacgccggaatttgtgcgtgacgaagtggccgccgggcgcgccattatccccgccaatatcaaccatccggaatccgagccgatgattatcggccgcaacttcctggtgaaggtcaacgccaacatcggcaactcagcggtgacgtcatccatcgaagaagaggtggaaaagctggtctggtcgacgcgctggggcgcggacacggtgatggacctttccactggccgctatattcatgagacccgcgagtggatcctgcgtaacagcccggtgccgattggcaccgtcccgatttatcaggcgctggagaaggtcaacggcatcgccgaaaacctcacctgggaagcgttccgcgacacgctgctggagcaggccgagcagggcgtggactacttcaccatccacgcgggcgtgctgctgcgctacgtgccgatgacggcgaaacgtctgaccggtatcgtctcacgcggcggttcgattatggcgaaatggtgcctttcccatcatcaggaaaacttcctctacgaacacttccgcgaaatctgcgaaatttgcgccgcgtacgacgtctccctgtcgctgggcgacggcctgcgtcctggctccatccgcgatgctaacgacgaggcgcagtttgccgagctgcacacgctgggcgagctgaccaaaatcgcctgggagtacgatgtgcaggtgatgattgaaggcccgggccatgtgccgatgcagatgatccgtcgcaacatgaccgaggagctggagcactgccacgaagcaccgttctacaccctggggccgttgaccaccgatattgcgccgggctacgaccacttcacgtcaggcattggcgcggcgatgatcggctggttcggctgcgccatgctctgctacgtgacgccgaaagagcacctcgggctgccaaacaaagaggacgtgaagcaggggctgatcacctacaagattgccgcccacgcggcggatctggcgaaaggccatccgggcgcgcaaatccgcgacaacgccatgtccaaagcgcgctttgaattccgctgggaagaccagtttaacctggccctcgatccgttcaccgcccgcgcctatcacgacgaaaccctgccgcaggaatcgggcaaagtggcgcacttctgctccatgtgcggacctaaattctgctcgatgaaaatcagccaggaagtacgtgattatgccgccgcgcagaccattgaagtcggcatggcggacatgtcggaaaccttccgcgcgaaaggcggcgaaatctacctcaaaaaagaggaggcataa

SEQ ID NO: 118358 - DNA, 498 bp, Enterobacter cloacae
atgttaaaccagctggaaagcctgactgagcgcgttggaggaagtaacaccctggtggatcgctggctacatgtgcgcaagcatctactcgtggcgtattacaatctggttggtcttaagcctggcaaagaatcctttatgcggctgaatgaaaaagcgctggacgacttctgtcagagcctggtcgactacctttccgacggccatttcaacctttatgaacgcattatccgcgaaatggaagggacaacgccgtatttagcggccagcaaactctgtccgctgctggaagccaacacccagcagatcatggactactacgattccacgctagagaacgctatcgatcacgataactatcttgagtttcagcaggcgctttccgaccttggcgaagcgctggaagagcgattcacgctggaagacaagctcatcgccctcgtgctggacaacaacctgaatatcagcaccagcgataacgttgcgcgccctgcttga

SEQ ID NO: 118359 - DNA, 774 bp, Enterobacter cloacae
atggatcgtattattgaaaaatcagatctgggttggtggatcgtcagtcacgaacaaaaattatggctgcccggtggggagataccctacggtgcggcagacatcttcgatctcgtcggccaaccggcgctgcggatcggcgagtggcagggcgatccggtatggttgatccaacaggctcgtcgtcaggatatgggatccgttcgtcaggtgttggatcgggatgtcggcctgttccagctggcggggcgcggcgtgcagctggcggagttttaccgctcgcacaaatactgcggctactgcggccacaccatgcacccgagcaaaaccgagtgggcaatgctttgcggccactgccgtgaacgctattacccgcaaatcgcaccgtgcatcattgtcgccatccgccgtgatgattccatcctgctggcgcagcatacccgccatcgcaacggcattcacaccgtcctcgccgggttcgtggaagtcggcgaaacgctggaacaggcggtggcgcgcgaggtgatggaggagagcggcattaaggtgaaaaacctgcgctatgtgacatcgcagccgtggccgttcccgatgtccctgatgaccgcgtttatggcggaatacgacagcggcgagattgttatcgatcagaaagagctgctggaggcgaactggtatcgctacgacgatttaccgctgctgcccccaccgggaacggtggcgcgtcgcctgatagaagataccgtggcaatgtgtcgggccgagtatgagtag

SEQ ID NO: 118360 - DNA, 1065 bp, Enterobacter cloacae
atgaccgaactgaagaacgatcgttatctgcgtgcgctgctgcgccagcccgttgatgtcaccccggtgtggatgatgcgccaggcgggacgctatctgccagagtacaaagccacgcgcgcgcaggcaggcgattttatgtcgctgtgcaaaaacgccgagctggcctgtgaagtgacgctccagccgctgcgccgcttcccgctcgatgccgccattcttttttcggacattctcaccattccggatgcgatgggccttgggctctatttcgaaaccggagaaggcccgcgttttacctctccgatcaaaagcaaagccgacgttgataagctgccgatccccgatcctgaaggcgagctgggctatgtgatgaacgccgtgcgcaccattcgccgcgaactgaaaggcgacgtgccgctgattggcttctccggtagtccgtggacgctggccacctacatggtggaaggcggcagcagcaaagcctttaccgtcatcaaaaagatgatgtacgccgagccgctggccctgcatgccctgctcgacaagctggcgaagagcgtcacgctctatctcaacgcgcagattaaagcgggcgcgcagtcggtgatgattttcgacacctggggcggcgtgctgaccggacgtgattatcagcagttctccctgtactacatgcacaaaattgtcgatggcctgctgcgtgaaaacgaaggccgtcgcgtgccggtgacgctgtttaccaaaggcggcggtcagtggctggaagcgatggcggccaccggctgcgacgcgctgggcctcgactggaccaccgatattgccgatgcgcgccgtcgcgtgggggacaaagtggcgctccagggcaacatggatccgtccatgctctatgcgcagcctgcccgtatcgaagaagaagtgtcgactatactgtctggtttcggccagggcgaaggccacgtcttcaacctcggtcacggtattcatcaggatgtaccgccagaacacgctggcgtatttgtggaggcggtgcatcggctttctgcccagtatcataagtaa

SEQ ID NO: 118361 - DNA, 672 bp, Enterobacter cloacae
atggatctcgcgtcgctacgcgctcagcaaatcgaactggcttcatcagtgatccgcgaggatcgtctggatacggaccctccgcggtacattggcggggcggacgtcggatttgagcagggcggtgaagtgacgcgagcggcgatggtggtgctgaaatacccttcgctggagctggtggagtacaaggtggcgcgtatcgccactaccatgccctatatccccggctttctctccttccgcgaatatcccgcgctgctggccgcgtgggagcaactctcgcgaaaacccgatctgctgtttgttgatgggcatggtatctcccatccgcgtcgcttaggcgtcgccagccactttggtctgctggtggacgtgccgaccatcggcgtggcgaaaaaacgcctgtgcggcgcgtttgagccgctctctgccgaaccgggcgcgctggcgccgcttatccataaaggcgagcagctggcgtgggtctggcgcagtaaagcgcgctgcaacccgttgtttatcgccaccgggcatcgggtcagcatggatagcgcactggcgtgggtgcaacgctgtatgaagggctaccgtttaccggagccaacccgctgggctgacgccgtggcctcttcacgtccggcattcattcgttggcaggaaattcagccgtga

SEQ ID NO: 118362 - DNA, 591 bp, Enterobacter cloacae
atgttacaaaacccgattcatctgcgccttgagaagctggaaagctggcagcacgtgacgtttatggcttgcctgtgcgagcgcatgtatcccaactatgccgcgttctgcaagcagacggcgtttggcgaaggccagatttatcgtcgtatcctggatttaatctgggagacgctgacggtcaaagatgcgaaggtaaattttgactctcagctcgaaaagctggaagaggctattccggctgcggatgatttcgacctgtatggcgtctacccggccattgatgcctgtgtggcgttgagcgagctgatccactcccgtctgagcggtgaaaccctggaacacgccattgaagtcagtaaggcatccattaccaccgttgcgatgctggaaatgacccaggaaggccgtgaaatgaccgacgaggagctgcgtgctaacccggcggttgaacaggaatgggatattcagtgggaaattttccgtctgctggcggagtgtgaagaacgtgatattgagctgatcaaagggcttcgcgcggaccttcgcgaggccggtgagagcaatattggtataatttttaaccaatga

SEQ ID NO: 118363 - DNA, 273 bp, Enterobacter cloacae
atgaacaagactcaactgattgatgtaattgcggacaaggctgatctgtctaaagtgcaggctaaagctgctctggaatctaccctggctgctattactgagtctctgaaagaaggcgatgctgtacaactggttggtttcggtaccttcaaagtgaaccaccgcgctgagcgtactggccgcaacccgcagaccggtaaagaaatcaaaatcgccgcagctaacgtgccggcatttgtttctggtaaagcactgaaagacgcagttaagtaa

SEQ ID NO: 118364 - DNA, 693 bp, Enterobacter cloacae
gtgaacagttttaacgaaggggcggcaacgccccttttgtcattctggcgtggaacgctcgcgctggcaggcgtactgttgctgtctgcctgtagccatgattcctcactccccccgtttaccgccagcggctatgctgacaaccagggtgcggtcaggatctggcgcaaagattccagcgatgaagtccatatgctcaccgcattcagcccgtggcataacggcaacacctcgaccgcagaataccgctggcagggcgatgcgctgtcgctcattgaactgaatatctacagtaagactcccgaacacgtgaaggtgcgtttcgacgaccacggcgagctgagctttatgcagcatgaggtcagtggactgaaacagcagctttccagcgatcaggtcgctctctaccgctaccgtgctgaacaactccgccagaccagcgatgcgctgcgtcagggccgcgtggtgctgcgccaggggcgctggcatgccgacggcacggtgaccacctgcgaagggcagacggtgaagcctgagcttgaatcctgggcaaccgaacacattcagcgtcgtcagcggcattcatctgtggaggtgagtgtggcatggctggaagcgccggaaggctctcagctgttgctggtggcgaatgaagatttctgcacctggcagccgacagagaagagtttctga

SEQ ID NO: 118365 - DNA, 1293 bp, Enterobacter cloacae
atgaaagtattagtgattggtaacggcgggcgcgagcacgccctggcgtggaaagcagcgcagtctccgcaggttgaaaccgtctttgtggcaccgggtaacgccgggaccgcgctggagcccgcactacagaacgtcgccatcggtgtaaccgacatcccggcgctgctgagctttgcccaaaacgagaatatcgatctgacgattgttggcccggaagcaccgctggtgatcggcgttgtagatgccttccgcgccgcgggcctgaaaattttcggcccaacggaaggggctgcgcagctggaaggctcaaaagccttcaccaatgattttctcgcgcgtcataacatcccgacggcggaatatcagaacttcaccgaggtagagcctgctctggcttacctgcgtgaaaaaggcgcgccgattgtgatcaaagccgacggcctggctgccgggaaaggcgttatcgtggcgatgaccctcgaagaagcggaagccgccgtgcaggatatgctggcgggtaacgcctttggcgacgcgggccaccgcatcgtgattgaagagttcctcgacggcgaagaagcgagctttatcgtgatggttgacggcgagcacgttctgccgatggcgaccagccaggatcacaagcgcgtaggcaatgccgacacggggccaaacaccggcgggatgggagcttactcccctgctccggtggtcactgacgaagtacaccagcgcaccatggaccgcatcatctggccaaccgtgaaggggatggctgcggaaggcaatacctacaccggtttcctttacgcaggcctgatgatcgacaagcagggtaacccgaaggtgattgaattcaactgccgcttcggcgatccggaaacccagccgatcatgctgcgcatgaagtccgatctggttgatctgtgtctggcggcgtgcgaagggaagctggacgagaaaacttccgagtgggacgagcgtgcctctttaggtgtggtgattgctgcgggtggctatccgggtagctacaacaccggagatgagatccacggcctgccgctggaagagattgacggtgcgaaggtgttccacgccggtacaaagctctctgacgacgaccgcgtgctcaccaacggcggtcgcgtgctgtgtgcgaccgcgctgggccagaccgtggcagaggcgcagaagcgcgcctatgcgctgatggcggatattcactggaatggcagcttcagccgccaggatatcggctatcgtgccattgcgcgggagcagggagagtaa

SEQ ID NO: 118366 - DNA, 1590 bp, Enterobacter cloacae
atgcaacaacgtcgtccagtccgccgcgctctgctcagtgtttctgataaagccggtatcgtcgaattcgctcaggcactttccgcacgcggtgtggagctgctttctacaggtggcaccgcgcgcctgttagcagagaaaggtctgccggtaaccgaagtgtccgattacaccggtttcccggaaatgatggatggacgcgtcaaaaccctgcatccgaaagtgcacggcggtattctgggccgtcgcggtcaggacgacagcattatggagcagcacaatattgcccccatcgacatggtggtcgttaacctctacccgttcgcccagaccgttgcccgcgaaggctgttctctggaagacgctgttgagaatatcgacatcggcggcccgaccatggtgcgctccgcagccaagaaccataaagatgtggccatcgtggtaaagagtagtgactacaacgccattattaatgagatggatgccaacgaagggtccctgacgcttgaaacgcgtttcgatctcgccatcaaagccttcgagcataccgccgcctacgacagcatgatcgccaactacttcggtagcctggtacctgcctaccacggtgaaagcaaagatccttctggccgcttcccgcgcaccctgaatctgaacttcattaagaagcaggatatgcgttacggcgagaacagccaccagcaggctgccttctatatagaagaagaggtaaaagaagcctctgtagcgactgcccagcaggtacagggcaaagccctctcctataacaacattgccgataccgacgccgcgctggaatgcgtgaaagagttcagcgagccagcctgcgttatcgtcaagcacgccaacccatgcggcgttgcggtaagtgcgtctattctggaagcgtacgatcgcgcctacaaaaccgacccgacctccgcgttcggcggcattatcgccttcaaccgcgagctggatgcggaaaccgcgcaggccatcatctcccgtcagtttgtcgaagtgatcatcgcgccatcagcatccgaagaggcgctgaaaatcaccgcggcgaaacagaacgtgcgcgtactggtttgcggccagtgggcagaacgcgtcccgggcctggacttcaagcgcgtgaacggcgggctgctggttcaggaccgcgatctgggtatggtgggcgaagccgatctgcgtgtcgtcaccaaacgtcagccaaccgagcaggaactgcgtgacgcgctgttctgctggaaagtggcgaagtttgtgaaatccaacgccatcgtctacgccaaagagaacatgaccatcggaataggcgcaggccagatgagccgcgtttactctgcgaaaatcgcgggtattaaagcaggtgacgaaggtctggaagtcaaaggttccgccatggcttctgacgccttcttcccgttccgtgacggtatcgacgcggccgctgctgtgggcatcacctgtgtgatccagcctggcggttcaatccgtgatgacgaagtgattgccgctgccgacgagcatggcatcgcaatgatcttcaccgacatgcgccacttccgccattaa

SEQ ID NO: 118367 - DNA, 534 bp, Enterobacter cloacae
gtgctcatctttaaatttgcagggcatttacgccgacatttccgcaaagtcgagctgagcgttgatacccctgcccagggcattcgtcttttgcttgctcagaatcatgagttcaaaaaagcattcctgaacgccagagtaagaatgcgagtggcgggtgaggatgttgaaacgtcttcggtgcagtggcacatggatcggcgcctgaaggatggctctgtagtgctgtttgtcccggtgattgagggggcgggacttgagaccagtacgatagttctcattgcctcactggtgctgtctgccgcctcggttgcttactccatctacatgtcccggaacatgaaaagcaaaacttcagcggaagcggccgaaacaaacaccctcacgaataactcgtttaccagtgcagaaaacagggtcggacaggggcatcctgtccccatactcctcggcgagatggaggtcggcagcaacgtaataagtctagggatagacacatctaataattccgactgggaagaatcaatcagctaa

SEQ ID NO: 118368 - DNA, 723 bp, Enterobacter cloacae
atgatgcaggaattactcgattatgcggcatcgtcgcaggatgaggtgtgcggcttaatcctggatggcgggcagttgttccgctgtcggaatgttcacccggagcctggaaagcacttccgaatcagtgatgatgagtggctggcggccgaggaggctggagaggtgactgcggtattccactctcacccaatgaacagcccggttctgtccggcgccgaccgtaaatgccaggttgcatcgggccttccatgggtgctggcctgtaacgggaaaatcagaacgttcaggcctgtggattactttttggggaggcggttcgagcacggagtgactgattgttacacgctattccgtgatgcgtatcacctgtgtggcattgacctccctgacttcgaaaggacgaatggctggtggctgagaggggagaacctttatctgaacaacatgtcgcgcaatggcttcaatcaggtatcgccgggagaagcgctgccaggtgacgtaataatcaggcaaccattccccggagctgacccttgccacgcaatgattctgctcgatgacaatatggttcttcaccacgattgctcagggcatttaagccggagagagcaaatgcgcccggcatacgttaagcagatgcattccatatggagacatgaacagtgctcatctttaaatttgcagggcatttacgccgacatttccgcaaagtcgagctga

SEQ ID NO: 118369 - DNA, 705 bp, Enterobacter cloacae
atgcgagacataccagcagaactaatcatcgagagcgttgacgccggagttggtgcattcatcgatttgtttgaagctgacctgcaaccatttggtggcgaccttatccggttccattccggtacaaacggctattacggcaatgttatctggaaaggtaaccagtaccaggcgtacccgatagcagtggaaggattcgagtcaaagaacgaaggcacatatgcccgcccgtcaatggcggtggcgaacgttacgggtttactgacgggcataaaccatgacttcgacgacatgcttggggtggtgatcacccgccgtcaggttccggtgaaatacctggacgcggtgaacttccccaatggcaaccctgacgcagatccgacgcaggaagcggtttcccgctacgttgttgaggagatgacggaagagacgttcgagcaggtgacctacacgctggcgacaccgattgactgcgacaacgccatcatcccggcgcgaactatccttgcagacgtatgccagtggcagtatcggggtgttgggtgcggctatgacggcccccctgttgcagacgagcgcgacaacccaaccactgacccggcgaaggacaaatgctctcaccgccgtagcggctgccgcttccgttatccacgaccggaaccaatgccaatcagcagcttccccggctctcagaaggtttcatga

SEQ ID NO: 118370 - DNA, 348 bp, Enterobacter cloacae
atgccagaaacattcacatggacaccgcagcgagcttaccaggttgaacgcacacccaacgtagccgtcgttaagctaggtgacggatacgaacagcggcaaacgaagggtatcaatccactgatggataaatactcgctcacctttcgcggcgtcagcggagcgtgccgcagtaaccctgcgaaggatgctgaggcattcctcaaggccaggggggcggttgaatcgttctactggacgtcatccgatacgggagtgaggaagctgtttgtctgccgatcctggaatatgacaaagaccgggccgctgtttgaactgacggccacttttgaacaggtgccaaggtaa

SEQ ID NO: 118371 - DNA, 213 bp, Enterobacter cloacae
atggattaccatattgaagatattactgcttttgataatgacaacggttccgggattattgccagagttgtttttcattatgaaacacatctcaagagcgtgtcagttaacgtacatctgcctttggataaagaggcatctctttcagtcattgaaagccgtgtatttgatgaagccaaaaaacagctcgctgccctggcatctgctttttaa

SEQ ID NO: 118372 - DNA, 3216 bp, Enterobacter cloacae
atgatgacccaaaacgtcggtgatattgaatatgtgattaaggccgataccgctcagttgctgcgagctgataagcaggtggttaatgtcaccaacagcatggagtcaggattcaaaaaggccgataaatctgctgatgcccttaatacgggattaacaaaacttgcatcgacactcaagctggttattgctgctggcactctccgtgaaatggctcgcatggtacaaagctaccaggagatggccgaacgcgtacagatggcgacctccagccaggatgagttcgagcgggtacagaagcgtctacttaatactgctaacggcacttatcgttcgctggcagaggcccaggagctttatatccgtagtgctgacggactgcgcagcatggggtactccaccgaacaggcaatcgacgttcaggactccatgtcttacgcgttcgtgaagaacgccgcatctgccgagcgtgctgattctgctattagtgccttcaccaaagcgataaacaccggcactgtatctgccgaccagtgggagtctatcaccacagccattccgacagtcattaacgatattgctacagctagcggaaaatcagctgcagcagtccgcgctcttggcgcatcaggtaagcttacagcttcggatcttaccgaaggcctgaagcagtcactcgaggcaaacacagctgcagctgcgggtatgtctaataatctggttgatgccagcgtcaggatgcggaccgccgttacctctatgctggtggcagttgaagggcaggccggagtaattcagaacttcacaaacagcatcatcgccgcagccgatacgatcctgagcttctctgaaaactctgaagccatgaagggatacatcgacagcgcaacactggccgccaaagcattcgccctggtaatggccgggcgctatgccggatcgttgaaagacgcagtaagtggcaagcttcagtctgtcgccgccacgcgccagcagaccgctgcagaaaaccagtctgcgcagtcattactcattgctgctaacgcagcgcagagaaaaactctagctgacaaagaagcggctttctcagccgttgcgctggctcaggctgaactgaatgttgctcgcggcagtagtgctgaaatgacggcgctggaaaatctcaacgcagcaaaatcacgtgcccgcgctgcttcgctggcgttggtggaagccgaaaccgcccaggctgcagctactgcaagggctgcggctgcggcacgcgctgcgtcggtggggtttggacttgctcgtggcgctctctcgctgattggcggcccggcgggtgttgcaatgattgctgcatcagcgctgctttactggtggcaaactgccaagcaggcgaaggaagaggcggttgcttttgctgatggtctggacaagctcaacagctctatgaagacgatgagcaacacccagcttagaggggctatagcagacgccaatatcgccctgaaagggctaaaggcaaccatagcggattcaaccgatgagattgaagatctcactgctaaacgtgatgactacataaagaaagggagccagttcaatacaacagcagagcaaggtaatgggttactccagaaagcagcagatctgaccaatctgataaatcagaaagagcgcgatcgtgcggaaaatcaggacaggctgactcgtacagcccaggcccgcgatagcatggagaccactcttaataacaatatgctcacctcaatgggtgtgcatgatcgcctaatagagaaaggctctacccttgagcaggtgcaaggggctgtggccagagcctttggcaaaactgccgatgaaatcaaccgggccaatcaggccgggcagaacttcaatccaaaatcattacagatcgcccctccaactgcagatggcgataaagtaatcctgaaccttgaagagcagaacgagcttctgaaaatacaggatgaacgccagcgggcagtggcaaaagccagaatggcggcatctaaggttactgacaaccctaatcagatcgcgtctgctgagcgtctggctgcagagaattacgatctacaggaagctgaggaggcacgacgcaaagcgcagcagcagaatgaacagcagggaaaaagcgcagccactcagatggaggccaacgcccagaaaattgctgattataagcagcgcgcagaaactgctgccggggcaacacaggatttgtcacgcgaacaggccatgttaagggctgagcagtctcttaataaaagcgctacggctgggcaaattgatgaaataagaaaatatgctgccgctgaatgggacgcagccaatgcggtgaagatgcggcagcaggccgagcaaggtaaaaagtttgcacagcaggagatcgtcgcaaacgtgaccacccctgacgccgtaacgggcgcagtgcaaaatccaacggctcttattgatttgcaggagcagcagaagttagcggcacttgctaagtatcagaccatagacaaggaaaatacacagctttacgaagatgccaagacggccattcaggagcaggcagcaaacgccaggaggaaaattgctgtagatgaggccaatgcacaaactgaggcgataggctccattctcggatcggcgtcacaggggtttgatagcctggcgtcaattatcgaaagcacgtctggaaagagcagtggtgcatatgttgccatgttcgccgctgcaaaagcattcgcgatagcgcaatcaaccttgagtcttaacacggcgattatgcaagccatggccgatccgactgctcttacgccagcacaaaaaatggcgaactacgcagccatcgcctcggccggcgcttccctgctttcgaatattgcaagtgtcaccatgagtggcggtcgccgttacggcggcacggtatctgctggtaacgcctatcgcatcaacgaggatggtcgttctgaaatcttccagactgctggtggtcagcagatgttcattccgaaccagtcagggaaggtgataccggctgataaggcgggtgggggaggaggggtggttgtgcagcaaactaaccattaccattttgatggcagcccaaacagtccagataccattaagcagttcgataaggtagcatataacgcagcattgagggctatcagaaacgaacagcgtccaaatgggatgcttgaaaaaagtcgttaa

SEQ ID NO: 118373 - DNA, 201 bp, Enterobacter cloacae
atgggttacgggaacaccgaaatcatcccaaaaatacaagctgagttttcacgccgaggaaatctaagtatcaccaaggacgactgtgaaacctatatcaatacaggtattcaagatgccaaggtaaaaatgaaaacaagcgacagcatcatccagcaatccaatcagtcgatgacgataaacgcaattcaaggctactaa

SEQ ID NO: 118374 - DNA, 219 bp, Enterobacter cloacae
atgtacacacgcgagagaattgcaagacttgaagccacagacgaactgcgagagcgaaacatccgaggcattgaatctgagctgaaaagcatcaaccaaaacctatcatcaatggaaaagcggttcattgataagatcgacgacaaccaaaaatggctggttggccttttggtatctgcaatactcgttccattattcattgctttagtcaccaagtga

SEQ ID NO: 118375 - DNA, 255 bp, Enterobacter cloacae
atgaatgaccgggtaatcgaatgcgcctccagagcggggcgcgacttctcagagttcatgtcaggtgaaaaggacattatgcaggcgctgtcctcggtggatcagtttggagaacaattgcgcctcaacggctgcgttaaccatcactttgtcagctatatgatgcggagcgccatcatgcaaactttcatggagatggcagaggccaggcaaaaagaggaacgccgccgcaagcgagcaaagaagaaggggtag

SEQ ID NO: 118376 - DNA, 564 bp, Enterobacter cloacae
atgactaatttatgcatgttcagtactcctgtccgcgtccttgatggcgatatggtatgcctaactgatatctgggtggcggcggctaaagccaaggaagagggactggcaccatctctgattaaacggaatatggacaagctacgcccgtggtactttttgcgaaacgcctccacgaagcgctttatcagcagtttactcaaactctcaaaaaacgagagtttggaattgcctgattctccgacgctcactactccggggaatggtggtggaacctttgcccacaaattaattgcttataaatatgctgcattcctcgactctgactttgaggctggcgcattcattattcttgataaattttttaccggggagttgcaaagaaagagcgatctggttgcagatctcaatctcagcattcttgagtttgataacaaaaaagactacgccagccattgtggtagcggcctggtcggatggaagcatgaaaagccggtgctgctagcgaagataaagaccttaacggaccagttgcagctaaccttgccagggtttagcgcatga

SEQ ID NO: 118377 - DNA, 654 bp, Enterobacter cloacae
atgaaagcaataaccgatatcggccaggccattgtccgctctgggggcaaagagatattcctcaacccgtcattcctcgccatgtctcgtattgggtcgccggaacagattgttgatgctttcgtgaaggttcatgccgggcattacccgaaacaccgaatctccgatactcaaatcctgaaggcggccaatgcccgatgctttactgaaatggcagcatctgcggcaaacgtagtacggaattgctctgagggtgatattgcagaggtgattggttcgtactcggtgaacgcagaaggacggctgctgttcaagcctggggttatcccaatcgaggatgttatccagcttgcccgccacctgattctgcatggcgtaatgggcgatcagccgccggaggatttcgaaggaaaaaaaggcgaatacagtgacaaattcgatgtacggtcattcgtctacaccgctgttgctcacctcggcatgagcgagtctgatgcctggaacatgacaatgaccagcttccgcgccgccatgaatgccaagttcccgcagaaagagaaagccagagtgccgactcaggagaaatacgacgaggttatggactgggccgagcaaatgctggctatcgacgcgcaacggaacggcccgcattaa

SEQ ID NO: 118378 - DNA, 735 bp, Enterobacter cloacae
atggcgtgtgaatcgggcgcttttaccgggcgcgacgtcgtcgtttattacgcgattggatgccctgaagtacaacccaccgccagcgcttaccgccgactcggcatgatgcgcggcaaaacagtaaatgcagagtgggaaaccgcagatgcgaccggcgacatgagcgctgcatttactcaggagagcctcgttacctacaagaacatttcgttctcaggtgacggtgtgacccgcaaagaggatgtttatgcgcagaacgcgcttaagcgtcacgtctacaacccgccagcagagaccagcaaccagccgtatgtgtggttcaaaatcatctctccgaacgatatcaccgaagggccgttcatggtgacatcatggggcgatgaggcgccgcacgacgacgttgccacctggtctgtcgaagcgtccagtgccggtcaggttgacgtgcgtgatgttggcgcggtaatcaccattaccactcagccgcaaaaccgcacactgaccgtaggtgacgcgctgaacctgtcagttgccgcgacggtttctgatggttctacgctggcttaccagtggcagaaaaacggcagtgatatctcaggtgcaacatccgcaacgtacaccaaagcgagtgtgattgctggtgatgctggctcatacacctgccaggtgtcatccaccacggcgggtaccgtcacatccggtactgcgacggttgttgtcaacgcagcctga

SEQ ID NO: 118379 - DNA, 387 bp, Enterobacter cloacae
atgacgcgtagcgaagtgtatgacgcgctgagagcgtggttgcagtcgcatggctttgatgttggttatcgcgtccagaagcgattctggaatgagttggagaataccgagggggaaagataccttgtcatccagcagaacggtggcggcaagccagaagaagcgataacccgcgattatttccgcatcctcctcctgtcaggtcagaacgacagcgatattaaccatgttgaagaccgcgccgacgccatccgccaggcgatgatcgacgactacaaaaccgaatgcatcatttcgatgcagccaataggcggcatcaccgccatccagaccgaagaagggcgttacctcttcgatatttcctttcaaaccatcatttccagataa

SEQ ID NO: 118380 - DNA, 396 bp, Enterobacter cloacae
atgcccgttaaaggtatcaagcgtgttcagatgaacacccgcaaggtgctgagtgatatcgctggcatccgaacggagaaggttctctatgaagtcatgaatgccggggccaaccatgctgctctaatcactcctgttaaatcgtcaaccctcatcaacagccagtacaagcggctcgaacccatgccctcaggaatgataggcagagtgggttacacggcaaattatgcagctgctgttaatgctgcaaagggcaagctcaagggcaagccaaggcctgacggtagcggtaattactgggaccctaacggcgagccggactttctccgcaaaggctttgagcgcgacggcctcaacgagattaaggccatcatcaggcaagggtacaaagtatga

SEQ ID NO: 118381 - DNA, 363 bp, Enterobacter cloacae
gtgtcagccacggctaactggtcttacaccaatgtcgccactgtctaccctcgcgtctatgacgactggaacaacacctggacaaacggcaccccatacctgattgactgcacctggacggcgaacaatgaagttgccgttgatggcagtggtaaagagttcaccacgaacctgattttctttactgagctgaagcgtaatggcgttaccgcaaccatgccacagcgagactggtacatcgccagaggtgacactacggcactatcagatccgctaaaagctggcgctaatgtcatcaaagctgtaaccgactgggatatgtcatttttcggtgaagagcccgactacaaaatcctgacgtga

SEQ ID NO: 118382 - DNA, 189 bp, Enterobacter cloacae
atggcgttgatatcggtcaagcagaggcttcctgagcccttcgtaaaggtctgggttatcactgactgcgggcggcgggtcacgggttacgttaaaagtaacggtgaatggtatttgctgtgccggaaggtagccgctgagaatccggagattatccggtgggaggatgatagtgtcagccacggctaa

SEQ ID NO: 118383 - DNA, 402 bp, Enterobacter cloacae
atgattaccacagtacaggccaaggaatatctggagtcagtcggtatcacgctgcctgatttcatcctgcaggctcttttagagcaggctggcagcattcaggagtgtctggatgcgcattaccctcccgcaaccgctctgctaatacagtcctacctgctggggctaatggcgctggggcagggtgacaagtacatcagttctcagacagggcccaacggcgcatcacgctcatttcggtacctgtcttttgctgaccgatggaaagcctctctggggcttctgaggggactagataagtatggatgcgctacaagcctgatcccgcctgatccaactaacaccgcttttgctggcatctggattgcccgaggcggctgcatgtgcaacgggagtcgatga

SEQ ID NO: 118384 - DNA, 297 bp, Enterobacter cloacae
atggctgaaaaatacgaagtggttaagccgtggcacggcgttgcgcttggtgacgttgttgagctgggcaaagtacacccgtcacttaaatcgcatgtgcgcaagctgtccgataaagctgctgcggaactgctacctgcaactccgggtgctggcactgacaacaaagcgcgcaaagaggcagtcattgcccgactcgatgcgctgggcattgagcataaaggaaacctggtcctggagaagctcaccgagttgttgccggaaggtgagttcgaacagcttttccctgctgaataa

SEQ ID NO: 118385 - DNA, 1098 bp, Enterobacter cloacae
atgtattttaccgctgaaacactggctactaaccgccgactgcaagggcactggagtgagctgtgggccaatcgtgatatctataacgcccagcatgacatgatggtcaacgcgtaccgcacgcgcatgacgcatgaaatgctggcggcgaatgccatcggaggctttacgcgtgaattctgggccgaaattgaccgacagattatccagatgcgcgatcaggaaattggcatggaaatcgtcaatgacctgatgggtgtgcagaccgtgctgccgattgggaaaactgcaaagctgtataacgtctctggcgatatcgcggatgatgtgtctatcagcatcgatggtcaggcgtcttactctttcgataatactgagtttggttctgatggcgacccgatcccggtattcactgctggttacggcgttaactggcgccatgctgccggactgagcactgtcggcatcgatctggctctggagtctcagtcggccaagatgcgtaaattccacaagaagcgcgtagacttttacctgaatggcgctccaagcattgttgtggaaggtatgccggctcagggcatgaagaaccatcgcaacactcagaaaattaacctgggtagtggcgctggcggcgccaatatcaatctcaccaccgctacaccggctgagctactggcattctttggccctacaggtccatttggcctcactgcccgccgtaacaaggttacagcttacgacaagctgtgggtgagccctgaagtctgggccaacatggctaagccgtatctggtggatatcaacaccggcacaaatgcgctgcttagcggaaccgttctggatgcgatcagcaagtttattcctgctaagtctatccagatgacctatgcactggaaggtaacgagttcctggcgtacgagcgccgacaggatgtgatttctcctctggtaggtatggctgtgggcgttgtaccgttaccgcgcctgatgccgcagagcaactacaacttccagatcatgtccgcagaaggtttgcagatcaagaaggacggcgaaggcctgtccggtgtggtctacggcgctaacctggcttaa

SEQ ID NO: 118386 - DNA, 456 bp, Enterobacter cloacae
atggcacgttatcgtcgcattaatatcgacggtcagtctctgtacaagaccgaaacccgcgttactgccgcatccttgctgcccggtaccgctgcagtcatcaatgacgacaatgagtttgcgcaggcaactgcgctggctggtcgtatctacatcatcgatgttgcctatcatcagggtctcaaaatcactgaagcagtgccagccggcgactccgcagtgggtaactacgtagaagagggccgcgagctggcgctgctgtgcgtggcggggacttacgccaaagacgatccaatcaagctgggtagtaatgggcaatttaccaaagctactgcagacaccgattcggtgattggctatagccaggacgatgcgaccatcgcagccagcactaccgatttcatccgcgtgcgtatgcgcgtcggtaccgtagccgctgcaggtgctggcgcttaa

SEQ ID NO: 118387 - DNA, 1266 bp, Enterobacter cloacae
atgccaatgcaggtaaacatcactacgaaggtgaacagtcagtctatccggcgcgaaacatacaacgggcgtgagcacctggtgctgccgagttacacgctgccggcgaacgtcgtcatgaatggcgggctgtacacgcaagagcaaatcaacgcccactatcaggggctggaaggcacgctcgcgccgctgggtcatccacaggttaacggtcagttcgtgtcggccttctctcctgaaggtcttaacgtcggctacgtaggcgcgtggaaccgtaacgttaagaagtccggcaatcgtatctacgtagaaaaatgggtggatgtggctcgagctgaagagtcggaaggcgggcgagaactacttgagcgcgtcgcagctattgagcgtggcgatgacgttccgcccattcataccagtgtcgccgctttcctcgaccagcttgagcctaacgaacaacagagagctacgggcgccgagtgggtggcgaagattcacagcatggaccatgacgccattctgctgcatgaggttggcgcggcgacacctgagcagggcgttggcctgatggttaacgctgatctggctcaaccgctcaaggctaactcgggcgcgctggttggcgaatcctaccgggagcgcgaacagcatctcgatcgcgcagccaaagcgaagtttgcggctggcgcggatgaatatgcatgggttgctgacttcactgactcgcaagcggtaatcatccgcaacggcggcagcgctgaggtgtttggctacaagtctgagggcggcgtaatcaccttcgaagataccggcaccgcagtagcgcgccaggagtcgtgggtcgcagtcgtcgctaacaaattcaaagctctattcacaccgcaggaacagcctgcaccaaaccacaaaacggagggcgacatgcctttaaccaaagaagaactggaacaaatcggcagcatgatcggccaggctgttgcgaccaatactgaagcggctatcaagcctctcgcggaaaaggttgatgcgctacaggcaaaccatcagcaactggcagacaccctgaccgccaactcacgcgctgaagagaaagcaaagcgtgaagctgtagctaaggtacacggcgaggtcgtggctaacgctctttcaggcgaagcgctggatgcgatgtttaaaacaatcggtgaatccgcaccgctgggcaccaactctgcgcaacagcagaaagaaaccggtgcgccgaaccctgacgaatatttcaaataa

SEQ ID NO: 118388 - DNA, 927 bp, Enterobacter cloacae
atggcgacgaagaagacgaagcctccaattctgccgcgtaactatcaggatccgaccggagccgatgcgctggaacgccgggcaatgaaagacttcgccaggcggatgaataagattggcaaggcgtacaaatcagcactcgacaaaataccttcctccatcgcagtaaacgcacgatacgaataccagttaaacccaacgctactctccatcatccttaacgatgccagttacctggtggatcaggtgctgcttgaaggtagcgactacgacctgtggttttacgagtacatcgatcttgcgtcggagaaagggaccgggcagtcgttctacaacctcagccagcagtcaccggtgtatgccgcctggcgcgaatcattggcctccatactcgcaagcgacccctaccagcaacgcatggcgctggtgcatgcccgtgtttttgaggaaatgaaggggctgagtgctgacgttaagcgcgacatggcgcgtgtactgactgatggtgtggggcgcgggctcaacccgctggatattgccagaaacctgacagaacagaccggcatcgagaagcgccgggcgaaccggatagcgcgcactgaagtgactaccgcgctgcgccgggccaagtgggatgaagaccaggaggcgaatgacctcttcggcatgaaaactctactggttcacatctcggctctgtcaccgacaacgcgacatacacacgcagtgcgccatgctcacctctacaccaatgaagaggtccgtgactggtacagcaaggatggcaactccatcaactgcaaatgcagccagcagtcggtgctggtggatgcggacggcaagccggaatacccggacaccatcacgaaactcaagcaggaatataaatcgatgcaggcgcgcggttacgcctgggcggagaaatag

SEQ ID NO: 118389 - DNA, 1350 bp, Enterobacter cloacae
atgactgacaaattaacactagccgtcaatcacgcgctgaatgacgtcaggcttgctcgcgcccgtatggggctgatggcaccaacaatggggctggataataaacgccattccgcatggtgcgagtacggcttccctgaacaagtaacctacgaaaacctctacgccctttaccgccgcggtggtattgctcacggtgcagtagagaagctgattggcaaatgctggcagacgaacccggaaatcatcgagggtgacgacgaagatgagagcgaagatgaaaccgcctgggagaagaagtccaagcaggtatttactaacaggctctggcgagcatttgctgatgcagaccgccggcgcctggtagggcgctatgccggcatcctcctgcacgttagggatgataaagactggaatctgccagtcaccaagggtcgagggctacagaaggtttccgtagcatgggctgggtcgctcacggtgagtgactgggacactggcattaactcgaagacatacggccagcccaagatgtggcaatacgccgagcggctgccaaacggtacaaatcgccgagttgatatacaccctgaccgagttttcatcctcggagactactcagacgatgcgatcggcttccttgagccagcctataacgcctttgtaagccttgagaaggtggagggcggctcaggggagtcattcctcaagaacgccgcacggcagcagaacatcaacttcgacaaagaggtagatttcagcaatctggcctctatgtacaacgtctcagttgatgagctgcaggagcgatataacgacgccgcccgcgagctaaaccgaggcaatgacaccctgctaattactcagggcgccagtgtcacatcactggtatctccggtttctgacccttcgcctacgtacgacgtcaacctgcaaacggctgccgccggggtggatatcccgacgcgcatcctggttggcaatcagcaggccgagcgctccagcactgaagaccagaaatactttaatgctcgttgtcagtcgcgccgcgtagacctcgctttcgaaatagaggacttctgcgacaagcttattgacttgcagatcgtcgattcagtcagccagaaagcagttatctgggatgacctgaacgaacagaccggtactgagaagctcactaacgccaagaccatgggcgagattaaccagaccatgcagggtagcggcgatgaacccgcgttcacccgtgaagagattcgcacggctgcgggctatgacaatgatgatgaagagcctttaggagaagaggatggcgacgaagaagacgaagcctccaattctgccgcgtaa

SEQ ID NO: 118390 - DNA, 2217 bp, Enterobacter cloacae
atgagtaacgccgttcaacttccgatccccgccaagcttgcgccgctgttcactgcggtgaataagcgttaccggtgctcgcacggtgggcgtggtagcgccaagacgcgcacattcgcactgatgactgcagtaaaggcgtatcagtcgatgatgaacggtgaaagcggcgtagtgctctgcgcgcgtgagttcatgaactcgctggaagagtcgagcatgcaggaggtgaaacaggcgatcctgtctgttccatggctggcttccaactttgatatcggcgagaagtacatccgcaccatcgacaagagcgttaactacgtgttctgcggtctgcggcataacctcgacagcatcaaatcgaaagcgcgcatcctgctgtgctgggtcgatgaggctgaatcagtcagcgaaatagcatggcagaagctgagcccgaccgttcgtgaggaaggttcagagatttgggtgacgtggaacccggagcgcgacggcagcgcaacggataaacgtttccgcaaagaggctggcgacgactgcatcaccgttgaaatgaactacacggataacccgtggttccctgacgtgctggaaggtgagcgacagaacgatcagcgacgcctcgacccggcgacatacgcatgggtgtgggaaggcgcttacctcgaaaactctgataagcaggttctggccggtaaataccggatcgctgagttctcggaaaacctctggaaagaagctgagcgcctgttcttcggtgccgacttcggtttcgccaaagaccctaacacactggtgcgttcgttcatcctgcacaaccggctgtacatcgaatacgaggcatacgggcagcagacagagctcgaccacatgccagagctatacgacacaatccccggatcgcgtgactggcccatcaaggccgactccgctcgacccgagacgatcagctatctcaagcgacagggcttcaacatctcagccgctgagaaatggcagggaagcgttgaggacggaatcgcgcaccttcgcggtttcgacgaaatcattatccatccacgctgcaagaacgtggcgcgcgaggcccgcatgtggtcctacaaaacggaccgcatcaccggcgaggtgttaccgaagctcgccgatggcttcgagcactgcatagctaaagggcaattgataaccaccatgcgtggagatatacccattgagcacgtgttagcccatgattttgttatgacttccattgggtggaagcaggttaaaaaggcctggctaacaagctactcaagggaaacggtcatagtttcttcagcaacgagaaaagttatatgtacgcctgatcatgaggtttttacagctaacagaggatttgttcgtgccgacgccttgaggtacaatgatgattatattgttactgtgagggctgcaaaatggttgagtatttcttctttaatgggaatagatacagaagatacccggaagccaagacaaggacagaaagggtttattttcaacgcagaacgcctgatggggttagacgtctccatcgcgatgtatgggagcatcattatggagaaataccggaaggcttccacgtgcatcacaaagatggcgacccactcaacaatgctgtcgaaaatctcgaactactttcggaaatcgaccatcgcgaacaccataaaggtgacgcatggcacaaaacaagaaagtcagatttcaaagagcaccttgacagaatcaggcctcttacaaaggaatggcacgcttctgaagagggtcgaaggaagcactctgagattggtgctcaggcgtataaaaacttcaaccccgatgagaagctttgtgcgaattgtgggaaccgatttgtgcctaaaaaaatcggctcgcaagataaattctgctccaacaattgcaagtcagaggcaagaagaaaatctggagttgatgatgaaactcgctcatgcgtctgctgtgagaaagaatttgtcgtcaataaatattcccggaacaaaacttgctctagagcgtgtgcaatgcgtctcagatgggccaataagtgacgtgtatgacatctcagtagttgggaagcatgaattctttgcaggaggagtacttgttcataactgctgggacggcatccgctacagccttgacggtcacattaagcgtaaagggcaggtggccgggatgatgattccgaaacgccttcgctaa

SEQ ID NO: 118391 - DNA, 456 bp, Enterobacter cloacae
atggcgacactgaaaggtgaggtcaaagccttcatcgttcagtctcttgcctgcttcgatactccatcccaggtggttgagctggtcaaaaaagaatttggcctgagcatcacgcgtcagcaggtcgaatcccacgacccgacgaaagcaaacggcagggggctggcgcagaaatgggttgagttattccacgaaacccgtaagcgcttccagaccgaattaagcgacatcccgatcgccaataaagcctatcgtctccgtgcgcttgaccggatgatgacgaaagctgagagcatgcgaaacatggctctggctgcttctctgatggagcaggcggcaaaagaggttggcgacgcgtacagcaacaaacagaaggtcgagcacaccagcccggacggaaccatgacgccgcagccgaccatcattcagctactccccgttgagccgaaagcatga

SEQ ID NO: 118392 - DNA, 639 bp, Enterobacter cloacae
atggctaacgatgacgagcgcaggccatatccgccagttaacttcatcgcctccgacaactggcagccatacaccaggctgatcccggcaaacgaagttcatgagtggataaaccgccaaatcctcagcgataccggcagcatccataaccctgaccacgaacacctgcttgaagctgatctctgcttcatgtgggcgtctgactcattcgcgaagaaaggacgttatgtcctcgggcaggccgagcaggtaatgctgcgggccggtggttggcagaaagccagaatggaacagcagatgcatgaatggttcgggcgcatcccgaagttcatcatcacgctggcagccgactactgctcacaatgcagtgacctcgaattctgtgcactggtagagcatgagctttaccacatcgcacaggccaccgatgatttcggagcgcctaagttcaacaaagagaccgggcatccagtgcttacactgcgcggccacgacgtcgaagaattcactggtgttgtacgtcgatacggcgccagcaaagaagtgcaggagctagttgatgcggccaatgcgccggcagaagtggctcacatcgagatagccaggtcatgcggtacatgcatgctaaagctggcctaa

SEQ ID NO: 118393 - DNA, 180 bp, Enterobacter cloacae
atggcgatgtgcagactgtcagttgaaatcaaaagcaggtggtgggttcctgtctacctaaggacgctgacagttttctgcctgatgatgcgttgcgagcctgactaccaaaaagttggtaacttcctcgttaagcatggcattagccagaagctgaagtatgagcctgtaaagagataa

SEQ ID NO: 118394 - DNA, 219 bp, Enterobacter cloacae
atgtccgacatctacaatatcaaactgacgacgaacgacggcggtgagtacagaggcaagatgtcacgacgtcagcctgagctggttaacggctttgtgccgctggcgacggaaacgggccagtggctttatttcgctcctgctgatgtgaagcgagtggagttcacgccagttcctaccgaggaagaaatcaatggcgatgtgcagactgtcagttga

SEQ ID NO: 118395 - DNA, 273 bp, Enterobacter cloacae
atggctaattacccgcgcatcttttctttccttactgggtgcctggcatttgttgcgtcactttcgctaaccggtttcagtgttagccgcacggtatgcacactgcggcgagtattagagcgcgtcatttccgcattcgctgtgaaaaccgcgcctgaaaaggctgattggcgaatcgtagagcgaatgtgtagcgaaagcgttcgagagaagattaacgtttttggccgccaccctcgcaataccggcgcgctatgcagtccactgctgtag

SEQ ID NO: 118396 - DNA, 471 bp, Enterobacter cloacae
atgattggcgcactggtaaagcgttactggctgcagttgctggtgctggctgtaattggcttactggctttcttcgtgaaccactaccgcgacaatgccatcaccttcaaagaccagcgtgacaaagccaccaagaatctcagcctggctaacgccacaattaaagacatgcagacccgccagcgagatgtggctgcgctggatgcgaaatatacgaaggatttagctgatgcgaaaaagcagcttgatgatctgcagcgttgtgttcgcgatggcaagtgtgggctgcacgtcaacgccagatgtcccgcgaatggaacggccagcaccggcggcatgggcgatgctaccggcccccgacttactgactccgctgaacgggattatttcaccctcagagagcgaatcgtcacagtgacgaagcaggttggctatctgcaggactacatcaaagagcagtgcctcaaatag

SEQ ID NO: 118397 - DNA, 441 bp, Enterobacter cloacae
atgcaaaccagtgataaaggcattgccctgatcaaagagttcgaaggctgcaagcttaccgcgtaccaggacagcgttggcgtctggacgatcggctatggctggactcagcctgtcgacgggaaaccaatccgcgccgggatgacgattaatcaggaaacggcagagcgtctgctgaagacaggactggtcagctacgaaagcgacgtttcccgcctggttaaagtcggcctgactcaggggcaattcgatgccctggtgtcgttcacgtataacctcggcgcccggtcattatcaacatcgactcttctgcgaaaactcaacgccggtgattacgctggcgctgccgatgagttcctgcgctggaataaagctggcggtaaagtcctgaatgggctcacccgtcgtcgggaggcagagcgggctctgttcctgtcatga

SEQ ID NO: 118398 - DNA, 342 bp, Enterobacter cloacae
atgaaaatgcataacgatccccactcctggacggagtttatcgaactactccacagctggtggcgtggcgaaacgccgatgggtgccgtattgctatcggttgccatggccgcattgagaatcgcttacggcggtggcggctggaagaaaatgattcttgaaggtgcgatctgcggagctctaacccttaccgctgtgtcagctcttgattactttaaccttccacagtctctgtcgatagctatcggcggcgcgctagggtttgttggtgtagagcaggttaaggttatggcttcccgggtgtttaattctcggtttggaggcggtgatgcaaaccagtga

SEQ ID NO: 118399 - DNA, 975 bp, Enterobacter cloacae
atgacaagtttagcaattgcagatcgcacaatcaacgtgactttctatggtaattctcttttcgttgttgagcacaacggtgaggcttataccccgatgaagccaattgtggagggtatggggttggactggaaatcgcaacataagaagatttctcaacgctttgcaaaaggtatggtcgaaatcaccataccttcggctggcgggatgcaatctatgatttgcctggcgttacgcaagctagctgcttggctgaacagtattagtccgaacaaggtccgcccggaaatccgcgataacgtcattcgctatcaggaagagtgcgacgatgtgctttacgagtactggacgaaaggcgaggttaagaacccgcgcaaggctaaaaaatcactacccggaaaaatcacctccgagcagcaggaagccattaagcaactggtaatgactcgcggtaaagcgttgccgaaagaatgccaggccaaagcgatgatcacaatgtggtcgtcacttaaatcccattttggttgcagctacaaggaaatcagcgaagaccagtttactgaggcgctttctattgcggctcgagtgccgttggaaggggagttcatcggaaagcaggagtcgcttcctgcaccgaatcttgacgttaacctgcccctccagtggtggatcgacaataatccagtggtacgcagcggtaatctgtcgttcggcaattcaaagtgcgctcctgcccttgatgtcactatgccgatgttatgtggtgataattcaacatcatcagctattcgcttgattaatattcttgaggcggcgggatttgatgtatctgcacccaaggctgaaatcgtagcgatgcgaagccatctggctaatgttgagtatggaatgaaggctatagctgacgcttgccgccgggcggggagtaaaaccatctcctttcgtggttctaaagcagagttcgtaatcaactaa

SEQ ID NO: 118400 - DNA, 183 bp, Enterobacter cloacae
atggcccctaaggagataagagtggaaaagagtgaagtaaagacgaccctgcgttatccgcagaagttgaaagaggagtttaaacgcatagccgatgaggaggggctttcagaaaatgcagccttggtccaaggattggtttggtggctaaagtacagagagaaaatgcaacatgcgctgtaa

SEQ ID NO: 118401 - DNA, 360 bp, Enterobacter cloacae
atggccgaaaaacaagtaaaagattacgacaagttcaacctacgcttcccggatgggatgcgtgacgctatagctgagcgggccaagcgcaatggcaggtcgatgaactctgaaattgtgcagatacttcaagaaacgctggataccgataaggctgtttctgaaagcgaccttgttgatttcgactcaactcaagccgcttttaatgccgcatcgacagtagaagagaaagagcagttcctaagtgaccttgcgaaaaaggatccgttcacggcagacattcttcgcgagggagaagagcacgcgaggcggcttgctgagatacttggtcgccgcatgggatatttggaccataaataa

SEQ ID NO: 118402 - DNA, 390 bp, Enterobacter cloacae
atgagaaacattcagcaagttttagaacgttggggggcgtgggctgccgataacagcgaggatgtttactggccgccgattgcagcaggtttctctggactcataccgtcgaaggtgcgcactcgcctccagtgctgtgatgaggatggtctgattatctcaaacctcatggcagggctaaggtcaaagcatcctgttgctcacgacctgcttttcgattactacgtattcggcaaaacattcatgcaactggcgaatgcgcatcattgctctgacgggcatataggcaaaaagctatcaaatgcagaagggatcgttgatggccttcttatggcgctggaaatcaggctggaaatggacagagaggtaaggatttttccggcagcatga

SEQ ID NO: 118403 - DNA, 201 bp, Enterobacter cloacae
atgaaggcattcactccagttgaagcgagaaagttcgttgccagcacctggtatgaaacgacgcagctttctaaaagagaaaggctatatgcgaaagctcgtgagctgataagcggcgatcgagcggaaattatctgtcagacagataaccctgaatacagaaactcagcacgggagtggtggaatcatgaccagagctga

SEQ ID NO: 118404 - DNA, 612 bp, Enterobacter cloacae
atggctaagttaccgcgccgtaagtgcgccaataaagcttgtcgtcagtggttccacccggcacgcgacgggcaggtagtttgctcattcgagtgcgccagcgcgatcggcaaagaacaggccgcaaaagcccgtgaagccgctaagcagaaggaagcgcagcgccaacgcaccgaagataaggaaggtcgccaacggcgcgctgcgcgtcgcaatgagctgaagccgatccgtcactgggttcagatgactcagcgcgccttcaacgactggcggcgcgaaatgctgctggccgccgggcacggctgtatctcctgcggaaccaagactgcttttgcctggcatgccgggcattaccgcaccacggccgccgcgccacagcttcgctttaatccggacaatatctggctccagtgctcagcctgtaacgttcacaaatccgggaacattgaggcataccgcgccgccctggtcgaactgatcggcgaagagcgcgtgcttgcgctggaatccaacaacgaaacccaccgatacacccgtgaagagctggacggcatccgcgccaaagccagggcagatcttcgcgtactaaaacagcgggaggcagcatga

SEQ ID NO: 118405 - DNA, 171 bp, Enterobacter cloacae
atgtctactccactctcccgcgtcatcacaaacgaaatcttccgcgttccggcgcgccgcaagcgtaagccagcggttaagccgtccgatatcccgacactgaagggcaacaccgcccgcctggtggatcagaaatggctgcgtctcgcggcaaggagaacgcatggctaa

SEQ ID NO: 118406 - DNA, 456 bp, Enterobacter cloacae
atgaatatccctcagtgcggcatcaagctgcatgctggcaacttcgccgcagttggaaagcttcttcaagagcagctggctaccggtcagcctctccgcctgcaagtcaaaccgtggcgcgagaagcgcagcctgtcgcagaacgcgctcagccatatgtggtacacggaaatcagcaactacctcatcgcccgcggtaagactttcgctacgcctgagtgggttaaagacgcgatgaagcacacctatctcggctacgaaagcaaggaccgtgtagacgtcgtgtctggcgaggtcaccaccgtccaatccctacgtcatacgtcagagctggaaacgggcgagatgtacattttcctgtgcaaagtcgaagcctgggcgatgaatatcggctgccacctgaccatcccgcagagctgcgagtaccagcagctgcgcgataagcaggaggcataa

SEQ ID NO: 118407 - DNA, 240 bp, Enterobacter cloacae
atgtacgacaaatatactctcaatcgctgcgacgcaatggagtggctggctgagcattacccagtctttccagacaagatgccagatgtgcccctaaaggctgactggtgtagtgccaacctgtttatggggtggggtttcgtgattttgctcgatggcaccctggtgtttgctgactgcctatcgcctccaatccgggcggaagacatggcaggcttcaaattgcccgatttggtgtaa

SEQ ID NO: 118408 - DNA, 195 bp, Enterobacter cloacae
atgtacgtttgtttatgtaatggtgtaagcgacaaaaaaattcgtcaggccgttcgccagtttcaaccacaatctttccagcagcttcgcaagtttgttccggtgggaaatcaatgcggtaaatgcgttcgcgcagcgcgtgagatcatgcaggacgaactgatgcagatcccggaattcaaagagatcgcgtaa

SEQ ID NO: 118409 - DNA, 477 bp, Enterobacter cloacae
atgaaaggtgatgttaaaatcataagttatctcaataaattattgggaaatgagcttgtcgcaatcaatcagtattttctccatgcaagaatgtttaaaaactggggactgactcgcctcaacgatgttgaataccatgagtccattgatgaaatgaaacacgccgataaatacattgagcgtattttattcctcgaaggcattcctaacctacaggatctcggaaaactgggcatcggagaagatgtcgaagagatgctgcgttctgatctccggctggagctggagggtgcaaaagatctgcgtgaagccattgcctatgcggacagcgtacatgactacgtcagccgcgatatgatgatccagatcctggccgatgaagaagggcacatcgactggcttgagaccgaactggatctcattagcaaaattggcctacagaactaccttcagtctcagatcaaagtggaaagttaa

SEQ ID NO: 118410 - DNA, 474 bp, Enterobacter cloacae
atgctactgtccctcccctttctgttgatctattttgcgttatcggccttgcttgttcgcaccgatatccgcacggggcttcttcccgataaatttctttgcccgctgctatggacgggcctgctctaccagctttgtctccatcctgattttttgccgagcgcggtagtgggtgcgatgacaggatatgccggattcgccattatctattggggataccggctcatctgccgacgtgaagggatgggatatggcgacataaaatatctggcggcgctgggggcatggcatggctggtgtgtactaccaatactggcattagtggccgcgttaatggctctgctgtatctggttgctttctcgttgtttacccctgataagcaggcattaaaaaacccactgccttttgggccatttctggcggcagcgggtttatgcgttggctgggaaagcctgattaactttccactttga

SEQ ID NO: 118411 - DNA, 312 bp, Enterobacter cloacae
atgcagaaccaaagaatccgtatccgccttaaagcgtttgatcatcgtctgatcgatcaatcaaccgcggaaatcgtcgagactgctaagcgcactggtgcgcaagtccgtggtccgatcccgctgccgacccgcaaagagcgctttaccgttctgatctctccgcacgttaacaaagatgcgcgtgatcagtacgaaatccgcactcacaagcgtctggttgacatcgttgagccaactgagaaaaccgttgatgctctgatgcgtctggatctggctgccggtgtagacgtgcagatcagcctgggttaa

SEQ ID NO: 118412 - DNA, 630 bp, Enterobacter cloacae
atgattggtttagtcggtaaaaaagtgggtatgacccgcatcttcactgaagatggcgtttctatcccagtaaccgtaatcgaagttgaagcaaaccgcgttactcaggttaaagatctggctaacgatggctaccgcgctattcaggttaccactggtgctaaaaaagctaaccgtgtaaccaaaccagaagcgggtcacttcgctaaagctggcgtcgaagctggccgtggtctgtgggaattccgtcttgctgaaggcgaagagttcaccgtaggtcaggacattagcgttgagctgtttgctgacgttaaaaaagttgacgtaaccggtacctctaaaggtaaaggttttgctggtaccgttaagcgctggaacttccgtacccaggacgctactcacggtaactccttgtctcaccgcgttccgggttctatcggtcagaaccagactccgggcaaagtgttcaaaggcaagaaaatggcaggtcagctgggcaacgaacgtgtaaccgttcagagcctggacgtagtacgtgttgacgctgagcgcaacctgctgctggttaaaggtgcggtcccgggtgcaaccggtagcgacctgatcgttaaaccagctgtgaaggcgtaa

SEQ ID NO: 118413 - DNA, 606 bp, Enterobacter cloacae
atggaattagtattgaaagacgcgcagagcgcgctgactgtttccgaaactaccttcggtcgtgatttcaacgaagcgctggttcaccaggttgttgttgcttatgcagctggtgctcgtcagggtactcgtgctcagaagactcgtgctgaagtaactggttcaggcaaaaagccatggcgccagaaaggtaccggccgtgcgcgttcaggttctatcaagagcccgatctggcgttcaggtggcgtgaccttcgctgcgcgtccacaggaccacagtcaaaaagttaacaaaaagatgtaccgcggcgcgctgaaaagcattctgtccgaactggtacgtcaggatcgtctgatcgttgtcgagaagttctctgttgaagcgcctaaaactaagctgctggcacagaaactgaaagacatggctctggaagatgtgctgatcatcaccggtgagctggacgagaacctgttcctggccgcgcgtaacctgcacaaggttgacgtacgcgacgcgactggtatcgacccggttagcctgatcgccttcgacaaagtcgtaatgactgctgatgctgttaagcaagttgaggagatgctggcatga

SEQ ID NO: 118414 - DNA, 303 bp, Enterobacter cloacae
atgattcgtgaagaacgtctgctgaaggtgctgcgcgcaccgcacgtttctgaaaaagcgtctactgcgatggaaaaaacaaacaccatcgttctcaaagttgctaaagacgcgaccaaagcagagatcaaagctgctgtgcagaaactgtttgaagtcgaagtcgaagtcgttaacaccctggtagttaaagggaaagttaaacgtcacggacagcgtatcggtcgtcgtagcgactggaaaaaagcttacgtcaccctgaaagaaggccagaacctggacttcgttggcggcgctgagtaa

SEQ ID NO: 118415 - DNA, 822 bp, Enterobacter cloacae
atggcagttgttaaatgtaaaccgacatctccgggtcgtcgccacgtagttaaagtggttaaccctgagctgcacaagggcaaaccttttgctccgttgctggaaaaaaacagcaaatccggtggtcgtaacaacaatggccgtatcaccactcgtcacatcggtggtggccacaagcaggcttatcgtattgttgacttcaaacgcaacaaagacggtatcccagcagttgttgagcgtcttgagtacgatccgaaccgttccgcgaacatcgcgctggttctgtacaaagatggcgaacgccgttacatcctggcccctaaaggcctgaaagctggcgaccagattcagtctggcgttgatgctgcaatcaaagcaggcaacaccctgccgatgcgcaatatcccggttggttctaccgttcataacgtagaaatgaaaccaggtaaaggcggtcagctggcgcgttccgcgggtacttacgttcagatcgttgcgcgtgacggtgcttatgtcaccctgcgtctgcgttctggtgaaatgcgtaaagtcgaagcagactgccgcgctactctgggcgaagttggcaatgctgagcatatgctgcgcgttctgggtaaagctggtgctgcacgctggcgtggtgttcgtcctaccgttcgcggtactgcgatgaacccagtcgaccacccacatggtggtggtgaaggtcgtaactttggtaagcacccggtaactccgtggggcgttcagaccaaaggtaagaagacccgcagcaacaagcgtactgataaatttatcgtacgtcgccgtagcaaataa

SEQ ID NO: 118416 - DNA, 279 bp, Enterobacter cloacae
atgccacgttctctcaagaaaggtccttttattgacctgcacttgctgaagaaggtagagaaagcggtggaaagcggagacaagaagcccctgcgcacttggtcccgtcgttcaacgatctttcctaacatgatcggtttgaccatcgctgtccataatggtcgtcagcacgttccagtctttgttaccgacgaaatggttggtcacaaactgggtgaattcgcaccgactcgtacttatcgcggccacgctgctgataaaaaagcgaagaagaaataa

SEQ ID NO: 118417 - DNA, 333 bp, Enterobacter cloacae
atggaaactttagctcaacatcgccatgctcgttcttctgcacagaaggttcgccttgttgctgacctgattcgcggtaagaaagtgtcgcaggccctggacatcctgacctataccaacaagaaagctgcggtattggtcaagaaagtactggaatctgccattgctaacgctgaacacaacgatggcgctgacatcgacgatctgaaagtcgcgaaaattttcgtagatgaaggcccaagcatgaagcgcattatgccgcgtgcgaaaggtcgtgcagatcgcatcctgaagcgcaccagccacattactgtggttgtgtccgatcgctga

SEQ ID NO: 118418 - DNA, 702 bp, Enterobacter cloacae
atgggtcagaaagtacatcctaatggtattcgcctgggtattgtaaaaccatggaactctacttggtttgcgaacaccaaagaattcgctgacaacctggacagcgattttaaagtacgtcagtacctgactaaggaactggctaaagcgtctgtatctcgtatcgttatcgagcgtccagctaagagcatccgtgtgactattcacactgctcgccctggcatcgttatcggtaagaaaggcgaagacgtagaaaaactgcgcaaggtcgtagcggatatcgctggcgttcctgcacagatcaatatcgctgaagttcgtaagcctgaactggacgctaaattggttgctgacagcatcacttctcagctggaacgtcgcgttatgttccgtcgtgctatgaagcgtgctgtacagaacgcaatgcgtctgggcgctaaaggtatcaaagttgaagttagcggccgtctgggcggcgcggaaatcgcacgtaccgaatggtaccgcgaaggtcgcgtaccgctgcacactctgcgtgctgacatcgactacaacacctctgaagcgcacaccacttacggtgtaatcggcgttaaggtatggatcttcaaaggtgagatcctgggtggtatggctgctgttgaacaaccggaaaaaccggctgctcaacctaaaaagcagcagcgtaaaggccgtaaataa

SEQ ID NO: 118419 - DNA, 411 bp, Enterobacter cloacae
atgttacaaccaaagcgtacaaaattccgtaaagtgcacaaaggccgcaaccgtggtctggcgcagggtacggatgttagcttcggcactttcggtctgaaagctgttggccgtggtcgtctgactgcacgtcagatcgaagcagcacgtcgtgcaatgacccgtgcagttaagcgtcaaggtaagatctggatccgtgtattcccggacaaaccgatcaccgagaagccactggaagttcgtatgggtaaaggtaaaggtaacgtggagtactgggttgccttgatccaaccgggcaaagtcctttatgaaatggacggtgttccggaagagctggcccgtgaagccttcggcctggcagcagcgaaactgcctatcaaaaccacctttgtaactaagacggtgatgtaa

SEQ ID NO: 118420 - DNA, 192 bp, Enterobacter cloacae
atgaaagcaaaagagctgcgtgaaaaaagcgttgaagagctgaacgctgagctgctgaacctgctgcgtgagcagttcaacctgcgtatgcaggctgcaagtggccagctgcaacagactcacctgctgaagcaagtgcgtcgcaatgttgcgcgcgttaagactttactgactcagaaggcgggtgcgtaa

SEQ ID NO: 118421 - DNA, 255 bp, Enterobacter cloacae
atgaccgataaaatccgtactctgcaaggtcgtgttgttagcgataaaatggagaaatccattgttgtagctatcgaacgttttgtgaaacacccgatctacggtaaattcatcaagcgtacgaccaaactgcacgtacatgacgagaacaacgaatgtggtatcggcgacaaggttgaaatccgtgaatgccgtccactgtccaagactaagtcctggacgctggttcgcgttgtagagaaagcggttctgtaa

SEQ ID NO: 118422 - DNA, 372 bp, Enterobacter cloacae
atgatccaagaacagactatgctgaacgtcgccgacaactccggtgcacgtcgcgtaatgtgtatcaaggttctgggtggctcgcaccgtcgctacgcaggcgtaggcgacatcatcaagatcaccatcaaggaagcaattccacgtggtaaggtcaaaaaaggtgatgtgctgaaggcggtagtggtgcgcaccaagaagggtgttcgtcgccctgacggttctgtcattcgcttcgatggtaatgcatgcgttattttaaacaataacagcgagcagcctatcggcacgcgtatctttgggccggtaactcgtgaacttcgtactgagaagttcatgaaaattatctctctggcaccagaagtactctaa

SEQ ID NO: 118423 - DNA, 315 bp, Enterobacter cloacae
atggcagcgaaaatccgtcgtgatgacgaagttatcgtgttaaccggtaaagataaaggtaaacgcggtaaagtaaaaaatgttctgtcttccggcaaacttgtcgttgaaggtatcaacctggttaagaaacatcagaagccggttccggccctgaaccaaccaggcggcatcgttgaaaaagaagctgctattcaggtttctaacgttgcaatcttcaatgcggctaccggtaaggctgaccgtgtaggctttagattcgaagacggtaaaaaagtccgtttcttcaaatctaacagcgaaactatcaagtaa

SEQ ID NO: 118424 - DNA, 540 bp, Enterobacter cloacae
atggcgaaactgcatgattactacaaagacgaagtagttaacaaactcatgactgagtttaactacaattctgtcatgcaagtccctcgggtcgagaagatcaccctgaacatgggtgttggtgaagcgatcgctgacaagaaactgctggataacgcagcagctgacctgacagcaatctccggtcaaaaaccgctgatcaccaaagcacgcaaatctgttgcaggcttcaaaatccgtcagggctatccgatcggctgtaaagtaactctgcgtggcgaacgcatgtgggagttccttgagcgcctgatcactattgctgttccacgtatccgtgacttccgtggcttgtccgctaagtctttcgacggtcgtggtaactacagcatgggtgtccgtgagcagatcatcttcccagaaatcgactacgataaagtcgaccgcgtgcgtggtttggatattaccattaccactactgcgaaatctgatgaagaaggccgtgctctgctggctgcctttgacttcccgttccgcaagtaa

SEQ ID NO: 118425 - DNA, 306 bp, Enterobacter cloacae
atggctaagcaatcaatgaaagcacgcgaagtaaagcgcgtagctttagctgataaattcttcgctaaacgcgctgaactgaaagcgatcatttctgatgtgaacgcttccgacgaagatcgttggaatgcggttctcaagctgcagtctctgccgcgtgattccagcccgtctcgtcagcgtaaccgctgtcgtcaaacaggtcgtccacatggttatgtgggcaagtttgggttgagccgtatcaaactgcgtgaagccgccatgcgcggtgaagtgccaggcttgaaaaaggctagctggtaa

SEQ ID NO: 118426 - DNA, 393 bp, Enterobacter cloacae
atgagcatgcaagatccgatcgcggatatgctgacccgtatccgtaacggtcaggccgcgaacaaagttgcggtcaccatgccttccgccaagctgaaagtggcaattgccaacgtgctgaaggaagaaggttttatcgaagattttaaagttgaaggcgacaccaagccggaactggaacttactctcaagtatttccagggtaaagctgttgtagaaagcattcagcgtgtcagccgcccaggcctgcgcatctataagaaaaaagatgagctgccaaaagtaatggctggtcttggtatcgcagttgtttctacctctaaaggtgttatgactgatcgtgcagcgcgccaggctggtcttggtggcgaaattatctgctacgtagcctaa

SEQ ID NO: 118427 - DNA, 534 bp, Enterobacter cloacae
atgtctcgtgttgctaaagcaccggtcgttattcctgccggcgttgatgtaaaaatcgacggtcaggttattacgatcaaaggtaaaaacggcgagctgactcgtaccctcaacaatgctgttgaagttaaacatgcagataacgctctgaccttcggtccacgtgatggtttcgtggatggatgggctcaggctggtaccgcgcgtgccctgctgaactcaatggttgttggtgttaccgaaggcttcactaaaaagcttcagctggttggtgtaggttatcgtgcagctatcaaagggaatgcagtaggcctgtctctgggcttctcacaccctgttgagcatccgctgccggccggtatcactgcagaatgcccgactcagactgaaatcgtgctgaaaggcgctgataaacagctgatcggtcaggttgcagcagatctgcgcgcctaccgtcgtcctgagccttataaaggcaagggtgttcgttacgccgacgaagtcgtgcgtaccaaagaggctaagaagaagtaa

SEQ ID NO: 118428 - DNA, 354 bp, Enterobacter cloacae
atggataagaaatctgctcgtatccgtcgtgcgacccgcgcacgccgcaagctcaaagagctgggtgcaactcgcctggtggtacatcgtaccccgcgtcatatttacgcacaggtaattgcaccgaacggttctgaagttctggtagctgcttctactgtagaaaaagctatctcagaacaattgaagtataccggtaacaaagacgccgcagcagctgtaggtaaagctgtcgctgaacgcgctctggaaaaaggcatcagcaatgtttcctttgaccgttccgggttccaatatcatggtcgtgtccaggcactggcagatgctgcccgtgaagctggccttcagttctaa

SEQ ID NO: 118429 - DNA, 501 bp, Enterobacter cloacae
atggctcacatcgaaaaacaggctggcgaactgcaggaaaagctgatcgcggtaaaccgcgtatctaaaaccgttaaaggtggtcgtattttctccttcacagctctgactgtagtgggtgatggtaacggtcgcgttggttttggttacggtaaagcgcgtgaagttccagcagcgatccagaaagcgatggaaaaagcccgtcgcaatatgattaacgtcgcgctgaacaacggtaccctgcaacacccagttaaaggtgttcacacgggttctcgtgtattcatgcagccagcttccgaaggtaccggtatcatcgccggtggtgcaatgcgcgccgttctggaagttgctggagttcataacgttctggctaaagcatatggttccaccaacccgatcaacgtggttcgtgcaactattgatggcctggaaaatatgaattctccagaaatggtcgctgccaagcgtggtaaatccgttgaagaaattctggggtaa

SEQ ID NO: 118430 - DNA, 180 bp, Enterobacter cloacae
atggcaaagactattaaaatcactcaaacccgcagtgcaatcggtcgtctgccgaaacacaaggcaacgctgcttggcctgggtctgcgtcgtattggtcataccgttgagcgcgaggatactcctgctgttcgtggtatggtcaacgcggtttacttcatggttaaagttgaggagtaa

SEQ ID NO: 118431 - DNA, 435 bp, Enterobacter cloacae
atgcgtttaaatactctgtctccggccgaaggctctaaaaaggcgggtaaacgcctgggtcgtggtatcggttctggcctcggcaaaaccggtggtcgtggtcacaaaggtcagaactctcgttctggcggtggcgtacgtcgcggtttcgagggtggccagatgccactgtaccgtcgtctgccgaagttcggcttcacctctcgcaaagcagcgatcacagcggaaatccgtctgtctgacttggcgaaagttgaaggcggcgttgtagacctgaacacgctgaaagcggctaacattatcggtatccagatcgagttcgcgaaagtgatcctggctggtgaagtttctactccggtaactgttcgtggcctgcgtgttactaaaggtgctcgtgctgctatcgaagctgctggcggtaaaattgaggaataa

SEQ ID NO: 118432 - DNA, 1332 bp, Enterobacter cloacae
atggctaagcaaccgggattagattttcaaagtgccaaaggtggatttggcgagctgaaacgcagactgctgtttgtaatcggcgcgctgattgtgttccgtattggctcttttattccgatccctggtattgatgccgctgtacttgccaaactgcttgagcaacagcgaggcaccatcattgaaatgttcaacatgttctctggtggtgctctcagccgtgcttctattttcgcactgggtattatgccgtatatttcggcatcgattattatccagctgctgacggtcgttcatccggccctggcagagttgaagaaagaaggggagtctggacgtcgtaagattagccagtacacccgttacggcactctggtgctggcaatattccagtcgatcggtattgctaccggtcttccgaatatgcctggtatgcagggcctggtattaaacccgggctttgcattctatttcaccgctgttgtaagtctggtcacagggaccatgttcctgatgtggctcggcgaacagattactgaacgaggtatcggtaacggtatctcaatcattatcttcgccggtatcgttgcgggtctcccgccggccatcgcccatactatcgagcaagcgcgtcaaggcgacctgcacttcctcctgttgctgttggttgcagtattagtatttgcagtgacgttctttgttgtcttcgttgaacgtggtcaacgccgcattgtggtgaactacgctaaacgtcagcagggtcgtcgtgtctatgctgcacagagcacacatttaccgctgaaagtgaatatggcgggggttatcccggctatcttcgcttccagtattattctgttcccggcaaccatcgcgtcatggttcgggggcggtactggttggaactggctgacaacaatttcgctgtatttgcagcctgggcaaccactttatgtgttactctatgcgtctgcgatcatcttcttctgtttcttctacacggcgttggtcttcaacccgcgtgaaacagcagataacctgaagaagtccggtgcatttgtaccaggaattcgtccgggagagcaaacggcgaagtatatcgataaagtaatgactcgcctgactttggttggtgcgctttatattacttttatctgcctgatcccggagttcatgcgtgatgcaatgaaagtaccgttctacttcggtgggacctcactgcttatcgttgtggtcgtgattatggactttatggctcaagtgcaaactctgatgatgtccagtcagtatgagtctgcattgaagaaggcgaacctgaaaggctacggccgctaa

SEQ ID NO: 118433 - DNA, 357 bp, Enterobacter cloacae
gtggcccgtatagcaggcattaacattcctgatcagaaacatgctgtgatcgcattaacttcgatctatggcgtcggcaagacccgttctaaagccattctggctgcagcgggtatcgctgaagatgttaagatcagtgagctgtctgaagaacaaatcgacacgctgcgtgacgaagttgccaaatttgtcgttgaaggtgatctgcgccgtgaaatcagcatgagcatcaagcgcctgatggatcttggttgctatcgcggtttgcgtcatcgtcgtggtctgccagtgcgcggtcagcgtactaagaccaacgcacgtacccgtaagggtccgcgcaaaccgatcaagaaataa

SEQ ID NO: 118434 - DNA, 381 bp, Enterobacter cloacae
atgagggatcggagtcacatcagtaatattcgtgatgcggaaaccagcggcgttcagagcgcgaacagtagattcacgacccggacccggacctttaaccataacttccagattcttgatgccgtattcttttacggcttcagcgcaacgctctgctgcaacctgagctgcgaacggagtggatttgcgagaaccacggaaaccggaaccaccggctgttgcccaacccaatgcgttaccctgacgatcagtaatagtaacgatggtgttgttgaaagaagcatggatatgagccacgccgtcagagacttgttttcttacacgtttacgtgcacgaactggtgcctttgccattattcaatcaccccgattatttcttga

SEQ ID NO: 118435 - DNA, 621 bp, Enterobacter cloacae
atggcaagatatttgggtcctaagctcaagctgagccgtcgtgagggcaccgacttattccttaagtctggcgttcgcgcgatcgataccaagtgtaaaattgaacaagctcctggccagcacggtgcgcgtaaaccgcgtctgtctgactatggtgtgcagttgcgtgaaaagcaaaaagttcgccgtatctacggtgtgctggagcgtcagttccgtaactactataaagaagcagcacgtctgaaaggcaacacaggtgaaaacctgctggctctgctggaaggtcgtctggacaacgttgtataccgtatgggcttcggcgcgactcgtgctgaatcacgccagctggttagccataaagcaatcatggtaaacggtcgtgttgttaacatcgcttcttatcaggttaaagcgaatgacgttgttagcattcgtgagaaagcgaaaaagcaatctcgcgtgaaagccgctctggagctggctgagcagcgtgaaaagccaacctggctggaagttgatgctggcaagatggaaggtacgttcaagcgtcagccagaacgttctgatctgtctgcggacattaacgaacacctgatcgtcgagctttactccaagtaa

SEQ ID NO: 118436 - DNA, 990 bp, Enterobacter cloacae
atgcagggttctgtgacagagtttctaaaaccgcgcctggtagatatcgagcaagtgagttcgacgcacgccaaggtgacccttgagcctttagagcgtggctttggccatactctgggtaacgcactgcgccgtattctgctctcatcgatgccgggttgcgcggtgaccgaggttgagattgatggtgtacttcatgagtacagcaccaaagaaggcgttcaggaagatatccttgaaatcctgctcaacctgaaagggctggcggtgagagttcagggtaaagatgaagttattcttactctgaataaatctggcattggccctgtgactgcagccgacatcacccacgacggtgatgttgaaatcgtcaagccgcagcacgtgatctgccacctgaccgatgagaacgcagctattagcatgcgtatcaaagttcagcgcggtcgtggttatgtgccggcttctgcccgaattcattcggaagaagatgagcgcccaatcggccgtctgctggtcgacgcatgttacagccctgtagagcgtattgcctacaatgttgaagcagcgcgtgtagaacagcgtaccgacctggacaagctggtcatcgaaatggaaaccaatggcacaatcgatcctgaagaggcgattcgtcgtgcggcaaccatcctggcagaacaactggaagctttcgttgacttacgtgatgtacgtcagccggaagtgaaagaagagaaaccagaattcgatccgatcctgctgcgccctgttgacgatctggaattgactgtccgctctgctaactgcctcaaggcagaagctatccactatatcggtgatctggtacagcgtaccgaggttgagttgctgaaaacgccgaacctgggtaaaaaatctcttaccgagattaaagacgtgctggcttcacgtggtctgtctctgggcatgcgcctggaaaactggccaccggcaagcattgctgacgagtaa

SEQ ID NO: 118437 - DNA, 384 bp, Enterobacter cloacae
atgcgccatcgtaagagtggtcgtcaactgaaccgcaacagcagccatcgccaggctatgttccgcaacatggcaggttcactggttcgtcatgaaatcatcaagacgaccctgcctaaagcgaaagagctgcgtcgcgtagttgagccgctgattactcttgccaagactgacagcgttgctaatcgtcgtctggcattcgcccgtactcgtgataacgagatcgtggcaaaactgtttaacgaactgggcccgcgtttcgcgagccgtgccggtggttacactcgcattctgaagtgtggcttccgtgcaggcgacaacgcgccgatggcttacatcgagctggttgatcgttcagagaaagcagaagctgctgcagagtaa

SEQ ID NO: 118438 - DNA, 369 bp, Enterobacter cloacae
atgtggttgctcgatcagtgggctgaacgccatatttgcgatgcccaaaacaaaggcgagttcgaaaatcttcccggtagcggtgagccgctgattctggacgatgattcacatattccccctgaattacgggccggttatcgcttactgaaaaacgcaggttgtttaccgcctgaacttcagcaacgcaatgaagccgtcgagcttgccgatctgcttaaaggcattcataagaatgacccgcggtactccgaaatcagtcgtcggttggcgctcatcgagctaaaattgcgccagacgggaatgaatactgactttttgcatggtgagtacagtgaaaggttaatgcaaaaaataaacgaggagtag

SEQ ID NO: 118439 - DNA, 426 bp, Enterobacter cloacae
atgtaccgcataggtgaacttgcgaagcttgctaacgtaacgccggatactatccgctactacgaaaagcagcagatgatcgatcatgaggtcagaacggaaggtggatttcgcctttatacggataacgacctgcaacgccttcgttttatccgctatgcacggcaactcggcttcacgctggagtcgatccgtgaactgctgtcgatccgtatcgatcctgaacatcatacgtgtcaggaatctaaaagcatcgttcaggcccggctggatgaagttgaaggacgcattcaggagctgcaagccatgcagcgatctctgcaaaggttaaatgacgcatgctgcggtaccgctcatagcagtgtttattgctcaatactggaagctcttgaacagggcgccagtagtgaaactcagggttgttga

SEQ ID NO: 118440 - DNA, 216 bp, Enterobacter cloacae
atgagccgctatcagcatacgaagggacaaattaaggataacgccattgaggcattgcttcacgacccgcttttcagacagcgtgttgagaagaacaagaaaggaaaagggagttatctacgtaaaggtaaacatgcacaacggggtaactgggaggccagtggcaagcaagctaatcgcttttttaccactggcctttctgtttctgtcgcctga

SEQ ID NO: 118441 - DNA, 414 bp, Enterobacter cloacae
atgagttttattaaagagtttcgcgaatttgcgatgcgcgggaatgtggtggatttggctgtgggtgtcattattggtgcggcgttcggtaagatcgtttcatcattagtcgccgacattattatgccgccgttaggactgttgattggaggcattgatttcaaacagttcgccttcacccttcgggaggctcagggcgatatccctgcggttgtaatgcactatggcgtattcattcagaacgtatttgatttcgtgatcgtggcatttgccattttcatggcgatcaaacttatcaacagacttaaccgtaaaaaagaagaaccggctgctgccccgccagcaccaactaaagaagaagtcttactgactgaaattcgcgatctgttaaaagagcagaacaaccgcgtttga

SEQ ID NO: 118442 - DNA, 1377 bp, Enterobacter cloacae
atgaaaattatcattctgggcgcagggcaagttggcggaacgctggcggaaaatctcgtgggcgaaaacaacgatatcaccattgtggataccaatggcgatcgcctgcgcgttttgcaggacaagtttgatcttcgtgttgtacaggggcacggctctcacccacgtgtgcttcgggaggcgggcgcggacgatgccgacatgctggttgcagtaaccagttctgatgaaaccaacatggttgcatgtcaggtggcctactcgcttttcaacacaccgaaccgcatcgcccgcattcgctccccggactatgtccgggatgcggaaaagctgtttaattccgaagcagtacctatcgaccatcttattgcccctgaacagctggttatcgacagtatttatcgtctgattgagtacccgggcgcgttgcaggttgtgaactttgcggaaggaaaagtaagcctggcggttgtgaaggcttattacggcggcccgctgattggtaatgccctgtcgacaatgcgcgagcatatgccacatatcgatacgcgtgttgcggcgattttccgtcacgacagacctattcgtccgcaagggtccaccattgtcgaagccggggatgaagtcttctttattgcggcttctcagcatatccgtgcggtgatgagtgaacttcagcgtctcgaaaaaccgtataaacgtattatgctggttggcggcggtaatattggcgcaggtctggcgagacggctggaaaaagactacagcgtgaagctgatcgaacgagatcaacagcgcgcgtcggagctggctgaaaagcttcagaatactatcgtgttttatggcgatgcttcggatcaggaattgctggccgaagagcatatcgatcaggttgatctttttattgccgtcaccaacgacgacgaagcgaatattatgtccgccatgctcgctaaacgtatgggggcgaaaaaagtaatggtgcttatccagcgtaaggcttatgtcgacctggtacagggtagcgtaattgatattgctatttcgcctcagcaagccaccatttctgccctgctaagccatgtacgtaaagcggatattgtcggcgtgtcgtctcttcgtcgtggtgttgctgaagccattgaagccgtcgctcatggggatgaaacgacgtcgcgcgttgttggtcgcgcgatcgacgaaattaaacttccaccaggcaccattatcggcgccgtagtgcgaggtaacgatgtcatgatcgccaatgataatttacgtattgagcagggtgaccacgttattatgttcctgaccgataaaaaatttattaccgacgtcgagcgtttattccagccaagcccgttcttcctgtaa

SEQ ID NO: 118443 - DNA, 1263 bp, Enterobacter cloacae
atggcggctcaggccgttgagcaggttatcgagcagggccagtcactgagtaatgtcctgcctccactgcaacaaaaggtttccgataaagacaaagccctgcttcaggagctgtgctttggcgtgctgcgcaccctctctcagcttgagtggttaattaataagctgatgtcacgcccgatgagcggcaagcagcgtaccgtgcattatttgatcatggtcggtttttaccagcttcttcatacccgcattccacctcatgctgcgctggctgagacagtggagggtgccgttgcgattaaacgtccccagctgaaaggattgattaacggcgtgctgcgtcagttccagcgtcagcaggacgaactgctggcagaatttgcgcaaagcgaagcgcgcttcctgcatcctgaatggctgctgaatcgccttaaaaaagcctaccctcagcaatggcaagacattgtggatgccaataaccaacgtccgccgatgtggttacgcgtcaatcgtaaccatcatacccgcgacgcatggctggccctgctggaagaggccggaatgagcggcttcacacacgctgcttatcctgatgcggtacgtttagcctcccctgcaccggtacatgcattacccggttttgaagagggctgggtaacggtacaggacgcatccgctcagggctgcatgacctggcttgaaccgaaagacggggagcagatccttgatctctgtgcagcgccaggggggaaaacaacgcacattctggaagtggcgccgcaggccagcgtgatggccgtggatgttgatgagcagcgtctttcacgcgtctatgacaacctcaagcgtctgggtatgaaagctcaggttaagcaaggcgatggacgtaaacccgcagactggtgtggtgataccaggttcgatcgtattttgctggacgccccttgctcagcaactggcgtgattcgtcgtcatcccgatatcaaatggctgcgtcgcgatcgtgatatcaaggagcttgcccagttgcaatccgaaattctggatgccatctggccgcatctcaaacccggcggaaccctggtgtatgcaacctgctctgttcttccggaagagaaccgtcagcaaattgcggctttcctgaaacgcaccccggacgctacgctgcatgatacgggaacacctgagcacccgggtctgcaaaacctgccgggcgcagaagagggtgatggtttcttttacgctaagctaatcaaagagtga

SEQ ID NO: 118444 - DNA, 948 bp, Enterobacter cloacae
gtgtctacatcactacgtataatcttcgcgggtacccctgattttgcagcgcgtcatctcgacgcgctgctatcgtctggtcatcagattgttggcgtatttactcagccggaccgtccggctggccgcggtaaaaaactgatgcctggcccggttaaagtgctggcagaaacgcatggtttaccggtattccagcctgcgtcattacgacctcaggaaaaccagcagttagtggcagatctgaacgctgacgtgatggtagttgtggcttacggcctcattctgccgaaagcggtactcgatatgccccgcctgggctgtgttaacgttcatggttctttgctcccacgctggcgtggtgcagcccctattcagcgcgctctgtgggcaggcgatgctgaaactggcgtgacaatcatgaagatggacgtaggtttagacacgggcgacatgctgtataaactggcgtgtcccatcaccgcaggagataccagcgccacgctgtatgacaagctggcggatctcggcccacaggggctgattgagacgctgcaacagcttgctgacaatacagcgacacctgaagtgcaggatgaggcacaggtgacctatgctgaaaaactgagtaaagaagaagcccggatcgactggtccctgtcagcagctcaactcgaacgctgcatccgcgcctttaatccgtggccgatgagctggttgatgattgatgagcagccagtgaaagtctggaaagcttcagtaattaacggcaatacttcggcagagcccggtacgattatcgacgccagcaaaaacggtatccaggttgcgaccggagaagggatcctgaatcttgaatcgctgcaaccggccggtaaaaaggcaatgagcgcgcaggatctattaaattctcgtcgtgaatggttcatccctggcaatcgccttgcctga

SEQ ID NO: 118445 - DNA, 510 bp, Enterobacter cloacae
atggcagttttgcaagtgttacatattcctgacgagcgccttcgcatcgtcgcggaaccggttaaagaagtgaatgcagaaattcagcgtatcgtcgatgatatgttcgataccatgtacgctgaagaaggcattggccttgccgcgacccaggtagacattcacaaacgtattattgtgatcgacgtttctgaaaatcgcgatgagcgcctggtgctgattaaccctgagctgctggaaaaaagcggcgaaacaggtattgaggaaggctgtctgtctatccctgaacagcgcgctttggtgccacgtgccgaaaaagttaaaatccgcgcactggatcgtgacggcaatccgtttgagctggaagccgacgatctgctggcgatttgcattcagcatgagatggatcacctggtcggtaaactgtttatcgattacctctcaccactgaagcaacagcgtattcgtcagaaagttgagaaactggatcgtttgcgttctcgcgcttaa

SEQ ID NO: 118446 - DNA, 1140 bp, Enterobacter cloacae
atggcagagaaaaggatgacgtccacagagatatggttacggcttataaacatcgggtcgttatacggtgacgcgatgctggagattgcgcagaggctgcttcgccaggcaaccgtcgatgctgaagctgtcaacgcgtcagggctttcgcccaaacatgccgtaaagtttttttcgttcagtgagagtgagcttgaacgtagtctggaatggctggaacacaccgacaaccaccttctcacagcggatgatcctcgctttccgccattgttacgttctatacctgattttcccggggcgctatttgtgcgaggccgcgttgacgtgcttaatagcatgcagcttgcggttgtgggcagccgtgcgccctcgtggtatggcgagcggtgggggaaaatgctgagtgaacagctgtcccaatgtggctttacgatcaccagtggcctggcttgcggcatcgatggtgtggcacatcatgcggcgttgtcagcaaaagggcgaagtgtcgctgtgcttggcaatggtctttttagtctctatccgcgtcgtcatcacattctggctgagcaacttatcgcttcagagggggcgatagtgtctgagttttcactttcgacatcgcccagaccgggtaactttccacggcgtaaccggatcatcagtgggttaagccagggcgtgctggtggtcgaagctgcgattcggagtggatcgctggttaccgcaaggtgcgcactggagcaggggcgtgaagtttttgcgctacccggcccgttggggaaccctggctgcgaaggccctcactggctgataaaacagggggcgacgctggtgacctgtaaagaggatatcctggaaaatttgcagtatggattgcattggttgcaggatgatctccaaaagcgacatatttcatcggatcaggaggcagtagcattgccatttcccaagctcctggctaacgtaggagatgaggtaacacctgttgacgttgtcgctgaacgtgccggccaacctgtgccagtaacggtagcacagctactcgaactggagttagcagggtggatcgcagctgtacccggcggctatgtccgattaaggagggcatgccatgttcgacgtactgatgtatttgtttga

SEQ ID NO: 118447 - DNA, 474 bp, Enterobacter cloacae
atgttcgacgtactgatgtatttgtttgagacttacatccacaacgaagcagaaatgcaggtggatcaggacaaattaacacgggatctgaccgacgcaggttttgagcgggaagatatttataatgcgttgatgtggctggataagttggctgattatcaggacggcctcgccgaaccgatgcagcttgcttctgacccattgtctgtgcgcatctatacagctgaagagtgtgaaaggctggatgccagctgccggggattcattttattccacgagcagattcaggtgctaaacctcgaaacgagagagatggtgatagagcgcgtcatggcgctggatactgctgagtttgaactggaagatctcaaatgggtgatcctgatggttctgttcaacatcccaggctgtgaaaatgcctatcagcaaatggaagaattactctttgaagtgaatgaaggtatgctgcattaa

SEQ ID NO: 118448 - DNA, 555 bp, Enterobacter cloacae
atggccaaatcagcactcttcacggtgcataaaaacgagccctgcccacagtgtggggctgaacttgttattcggtccgggaaacacggtccgtttctcggttgttcacactatccggaatgtgattatgtccgtcccctgaaaagccaggcggacggacatatcgtcaaaattctggagggacagctttgtccactctgtggcggcgaactggcgctgcggcaggggcggttcgggatgtttatcggatgcagccgctatccggaatgtgaacatacggaacaaattgataaaccagatgaaacggcaattgcctgccctcagtgccagcgtggtcaattggtgcagcgccgctctcgttatggcaagaccttccattcgtgcgatcgctatcctgaatgtcagttcgttatcaatttcaaaccagtagcgggcgtctgccctcattgcgattatccgttacttatagaaaagaaaaccgcgcaaggcttgaaacgcttttgcgccagtaaacaatgtggaaagccggtttcggcggatcaaatcagtgaataa

SEQ ID NO: 118449 - DNA, 573 bp, Enterobacter cloacae
gtgaataataacctgccatcaggctccatcgcgcaggcggtggacatcctgaaaaaagaagaagtcatcgcctatccaacagaagccgttttcggggtcgggtgcgatcctgacagcgaagtcgccgttaaccgtctgctggcgctaaaacagcggcctgtcgaaaaaggattgattttgatcgctgcgaactacgagcagcttaagccttatattgatgattccatgctgacacctgcacagcgggaaaccattttctctgcgtggcctggtcccgtgacgtttgttttccctgcacaaccgacaacgccgcgctggctaaccgggcgtttcgattcactcgcggtacgcgttaccgaccatcccttggtggtggagttatgccaggcatttggtaaacccctggtttcaaccagcgccaacctgaccgggcttcccccttgtcggacaacagaagaagttctggcgcagttcgggaatgatttccctgtagccgtgggtgaaaccgggggtcgtcttaacccgtcagaaattcgcgatgccttgaccggcgaacgttttcgccagggataa

SEQ ID NO: 118450 - DNA, 819 bp, Enterobacter cloacae
atggaaacctatgctgtttttggtaacccgatcgcgcacagcaagtcgcctctgatccatcagctgtttgcagagcaattgcagatagatcacccgtatggtcgggttcttgcgcctgttgatgcatttataccgacgctgaatagcttttttgatgcgggtggtaaaggtgcgaacgtcacggtgccttttaaagaagaggctttcgggcgtgcggatgagctgaccgagcgtgcgtcgctcgctggtgccgtcaatacccttaagcggcttgaagatggtcgccttctgggcgataacaccgatggcataggtttactcagcgatctggaacgactgtcgtttattaaaccaggctttcggatcctgctgatcggcgcgggtggcgcgtcgcgcggcgtattgcttcctcttctttcgctggattgtgcggtgacaatcaccaaccgtaccttctccagagcagaagaactggcggcgttgttcgcacacacaggcagcgtaactgcggtagcacttgacgatctcgcgagtcacgaatttgatcttgtgattaatgccacctcaagcggcattaatggagagatcccggcgattcctgcatccctggttcattcccacatctacggctatgacatgttttatcaaaaagggaaaacgccatttctgacctggtgtgaacaacagggggcaaaacacgtggctgatggtctgggcatgctggtggggcaggcggctcatgcggtgctactctggcatggcgtgttacctgctgtagaaccggtgatcgaaaagctgaaacaggaactgatggcatga

SEQ ID NO: 118451 - DNA, 249 bp, Enterobacter cloacae
atgaatcaggcgattcattttcccgacagagaaatctgggatgaaaataagcaagcggtttgtttcccggtgctggtgcatggaatgcagctcacctgtgcgattaaaggggagacgttgcatcagcgctttggtggttcagatccgttagcggtcttttgcgaaaatcgctgggatctggaagaggaagccagcgatttgatccgcgatcagcaggaagacgatcagggttgggtctggttatcctga

SEQ ID NO: 118452 - DNA, 555 bp, Enterobacter cloacae
atgtttgcagtattacgtccttataaagatctgttcccccaaaaaggcgatcgcgtgatgatcgataccagcagcgtggtcattggtgatgttcgcatggccgaggatgtcagcatctggccactcgtcgcgatccggggcgatgttaactacgttgcgatcggtgcacgcaccaatattcaggacggcagcgtgctgcatgtgactcataagtcatcttataaccctgagggcaatccgctcatcattggggaagatgtcaccgtcggtcataaagtgatgctccacggctgcacaatcggtaacagggtgctcgttggcatgggatcgattttgctggatggcgtcatagtagaagatgacgtaatgattggcgcaggaagccttgttccgcaaaacaaacgtctggaaagtggctatctctatttaggcagtccggttaaacagatccgccccctaaaagaggcggagatcgaaggattgaaatactcagcgaacaattacgttaaatggaagaatgactatctggatcaggataaccagacccaaccctga

SEQ ID NO: 118453 - DNA, 504 bp, Enterobacter cloacae
atgatacccgtattagcgatctctgcctggagtggcaccgggaagactacgctgctaaaaaaactaatacctgcactttgcgccaaaggcattcgtcccggattgattaagcatacgcaccataacatggatgtcgataagccggggaaagatagctacgagctgcgtaaggctggcgctgcacaaacgatggtggcgagtaaccagcgctgggcgttaatgacagaaacaccggatgaagcaccgctggatctcgcttatcttgtcagccggatggatcactccacgctggatcttgtgctggttgagggatttaagcatgaggccgtgcctaagatcttgctgttcagaaacggcgccgggcatgatgttagcgaactaatgctggatgagcatgtgattgccgtggccagtgacgttgcattgtcgctggaagtaccggttctggatttgaataatgtggaggggattgcagcgtttattttggcgtggtgtgcagtctga

SEQ ID NO: 118454 - DNA, 585 bp, Enterobacter cloacae
gtgaatcaatgccaggaaatcatcggagttgttctggccgggggcagggcaacgcgaatgggcggaaaggataaggggcttcagctcctgaacaacacaccattatggcagcatgttgctgatacgcttgcagatcaggtgtcctcgatggcgatcagcgctaaccgacatgttgatatttatcagcgcagcgggtatccggtttatcaggataacctggtggactaccccggtccgctggcgggaatgctttccgttatgcagcagtcgcatggagagtggtttctcttttgttcatgtgatacgcccttcatcccgtcctgcctggttgaacgtctggtgcagcggcgcggtggtgctcccgtcgtctgggtacacgacggtgaacgcgaccatccaacgatcgcattgattaatcgctcgttaatatccgcgctggaagattacctggccgcaggagagcggcgcgtcatggtatttatgcgtcagtccggagggcattccgttgatttcagcgacatgaaatcggcgtttgtgaatgtaaacacgacggaagatttgcagataatgcaggagaagaaatga

SEQ ID NO: 118455 - DNA, 270 bp, Enterobacter cloacae
atgaaatgtaaacgtcttaatgaagtcattgagcttctccagccggcctggcaaaaagagccagagctgaatctgatgcaatttttacagaaactggcgaaagagtcaggttttgatggcgaactggcagacctttctgacgacatcctgatctaccacctgaaaatgcgtgactcggctaaagatgctgttattcctggcattcagaaagattatgaagaggattttaaaaccgcattactgcgtgcccgaggcgtaattaaaaagtaa

SEQ ID NO: 118456 - DNA, 987 bp, Enterobacter cloacae
atgaacgaccaggcttttactttccagacactacacccggataccattatggatgcgctgttcgaacagggtattcgggtggattccgggttaacccctttaaacagctacgaaaaccgtgtctaccaatttcaggacgaagagcgccagcgctttgtcgtaaagttttaccgtccacagcgctggtccgcagaacaaattcaggaagagcatcagtttgcccacgatctgctggatgacgatgttcccgttgcggcacccattaaattcaataaccaaacgctgctgacccatcagggcttttactacgcggtatttccgagcctgggcggaagacagtttgaggcagataatatcgatcagatggaatgggttgcccgctatctggggcgcattcatcagacgggacgtaaaaaaccgtttgttgcccgtccgacgattggtgttcaggaatatcttattgagccgcgacaggtattcgaaacatcggcgctgatcccgaatgcgctaaaggataatttcctcacggcgaccgataagcttattgatgctgtaaaagcctgctggctggatgatattactactctgcgcctgcacggtgactgccacgccgggaatattctctggcgcgatggcccactatttgtcgatcttgatgacgcacgtatgggacccgcggtgcaggatctgtggatgctgctcaacggtgataaagccgagcagcgcatgcagcttgagaccataattgaagcttatgaagaatttagcccctttaattcagacgaaattgccttgatagaacctttacgtgcgatgcgatttgtttattatctcgcgtggttaatcaggcgttgggaagacccggcttttccccgaaatttcccctggcttaccggggaggattactggcgcaaccagatatccacatttaccgcgcaggttaaggttctacaggaaccccctttgcaattaacgccgatgtattaa

SEQ ID NO: 118457 - DNA, 624 bp, Enterobacter cloacae
atgaaaaaaatttggctggcgctggctggtatgattctggcatttagcgcaactgctgcgcagtttaccgacggcaagcagtacattacgctggacaagcctgttgctggcgagcctcaggtgttggagttcttctccttctactgcccgcactgctacgagtttgagcaggtacttcatgtttctgacaacgtgaagaaaaagctgccggaaagcaccaaaatgacgaaataccacgttgagttccttggcccactgggtaaagatctgactcaggcatgggcggtcgcgattgcgctgggtgtggaagataagatcaccgcgcctatgtttgaagccgtacagaaaacccagaccgtacaaactacggcagatatccgtaaagtgttcgtggatgccggtgttaaaggtgaagactacgacgctgcctggaacagtttcgtggtgaaatctctcgtggcacagcaggaaaaagctgccgctgacttccagttgcagggcgtgccggcgatgtatgttaacggcaaataccaggtgaatatgcgtggtatggacacgaccagcatggatatcttcgtacaacagtacgctgataccgtgaaatacctggttgagaaaaagtaa

SEQ ID NO: 118458 - DNA, 1053 bp, Enterobacter cloacae
atgcaaaaattcgctgcctggcaggaaaagccgcagcctcctggtgtgaaaccgccctggtctgagcgaatttctgataagatcggcgcccagcaccggatagccggctgctcaattacagctaactatctgaataaattcattatgtcgagaatactcgcagcgataacattatggttaagcgtcattttaactattctggttaccatcgcctgttctgtgccaatcatcgttgccggaataattaaacttctgctgcctgtccctccggtatggcgcgcggtgtctgctttttgtaattttatgatgtactgctggtgtgaagggctggcgatcctgctgcatctgaacccctggctgaagtgggatgttcaggggctggagaagctgaacaaaaagaactggtatctgctgatctgcaatcaccacagctgggccgacatcgttgtattgtgcgtactgtttcgcaaacacattccgatgaacaaatactttctgaaacagcagctggcctgggtgcctttcattggactggcctgctgggcgctggatatgccgtttatgaaacgctattcacgcagctatttaattcgtcatccggaacgccgcggtaaggacgtggaaaccacgcgccgttcttgcgagaagtttcgcgcgcatcccaccaccattgttaacttcgtcgaaggatcgcgctttaccgaagagaagcgccagcaaactcgctctccttatcagaacctgttgccgccaaaggctgcgggcatcgcaatggcgctcaacgtgctgggtgagcagttcgataaattgttgaacgtaacgctctgctatccggaaaacgacaggacgccattctacgatatgctcagcggcaggctgacgcgtatcgttgtccgcgttgatctgatgcccgtcaacactgaactgcacggggattatgtcaacgataaaaacttcaaacgtcgtttccagctttggcttaatacactctggaaagagaaagacgagcagatagctaagattaaatcttcatacaaaaacgccggtcagtga

SEQ ID NO: 118459 - DNA, 2793 bp, Enterobacter cloacae
atggttcagatcccagaaaacccacttatactcgtcgatggctcttcttacctgtatcgggcgtatcatgcgtttcctcctctgaccaacagcgcaggggaacctaccggcgcaatgtacggcgtgctgaatatgcttcgcagcctgattctgcaataccacccaacccatgcggccgtggtgtttgatgcgaagggtaaaaccttccgcgatgaattatttgagcattacaaatctcaccgtccccctatgcctgacgatctgcgtgcgcaaattgaaccgttgcacgctatggtgaaagcgatggggctgccactgctggcggtctcaggcgttgaagctgatgacgtaattggtaccctggcgcgcgaagcggaaaaagcaggccgcccggttctgatcagtaccggtgataaagacatggcgcagctggtaacgcccgggatcacgctgatcaacaccatgacaaacaccattcttggcccggaagaagtggtcgccaaatatggcgtgccgccagagctcattattgatttcctcgccctgatgggcgattcctcggataacattcctggcgtaccgggcgtaggcgaaaaaacagctcaggcgctgctgcaagggctgggcgggctggatacgctgtatgcagaacccgacaaaattgccggtcttaccttccgtggcgcaaaaaccatggccggaaagctcgccgataacaaagaggtggcttatctctcctatcagttggccaccatcaaaactgacgtagagctggagcttacctgcgagcagctggaagtgcaggaacccgccgccgacgaactgcttggcctgttcagaaaatacgaatttaaacgctggaccgcggatgttgaagccgggaaatggcttcaggcgaaaggggctaaacctgcggcgaagccgaaagagaccatcgttgtcgatgccgaagagcaggcagaagaagaggcggcagcgctctccttcgacaactatgaaaccatccttgaagagtcacggctcgtcgcctggattgaaaagctgaaaaaagcgccagtatttgctttcgataccgaaacggacagcctcgataacattacggccaatatggtgggcctgtcattcgcaacggagccgggtattgcagcctatgttccggtggctcacgactatctggatgcgccggagcaaatctcccgcgagcgcgccttagaactgctgaagccgattctggaagacgagaaagcgctgaaggtcgggcaaaacctgaagtacgaccgcggtattctgcaaaactacggcattgagctgcgtggtatcgcttttgacaccatgctggaatcttacattctggacagcgtggcgggccgccatgatatggattccttatccgatcgttggctgaaacacaaaaccatcacctttgaagaaattgccgggaagggcaaaaatcagctgacctttaaccagatcgcgctggaagaagcaggccgctacgccgcggaagacgctgacgtcacgctacagctgcatctcaaaatgtggccgaaattgcagaagcacgaagggccgctgaatgtgttccagaacattgagatgccgctggtgcctgtgctgtcccgcattgagcgcaatggcgttaaaatcgacccaacggtgctgcataaccactctggtgagctggcgcagcgcctgaccgagcttgaacagaaagcgcatgagcttgctggcgaggcatttaacctgtcttcaccgaaacagctgcaaaccatcctgtttgaaaaacagggtatcaagccgctgaagaaaaccccgggtggcgccccttcaacgtctgaagaggtgctggaagagctggcgctggactatccgctgccaaaagttattctgcaataccgtggtctggctaagctgaaatcgacctataccgacaaactgccgttgatgatcaacccgaaaacgggccgcgtgcacacctcctatcaccaggctgtggcggcgaccgggcgactttcgtcaaccgatcccaaccttcaaaacattccggtgcgtaatgaagagggccgtcgtattcgccaggctttcattgcgccagaggattacctgattgtctccgcggactactcgcaaatcgaactgcgtattatggcgcacctgtcacgcgacaaaggcctgctgacggcctttgccgaagggaaggacatccaccgggcaaccgctgccgaagtgtttgggctgccgctggagagcgtgacaaacgagcagcgtcgtagtgcaaaagcgatcaacttcggtctgatttacggcatgagtgcctttggtctttcacgccagctcaatatcccgcgtaaagagtcgcagaagtatatggatctctacttcgagcggtatccgggcgtgctggaatatatggaacgtacccgcgcacaggcgaaagagaaaggctacgttgaaacgctggatggccgtcgtctctaccttccggacatcaaatccagcaacgccgcgcgccgggctggtgctgaacgtgctgcgatcaacgcccctatgcagggcactgcggcggacatcattaaacgcgcaatgattgccgtcgatgcctggctcgaaaaagagaaaccgcgcgtgaaaatgatcatgcaggtacacgatgaactggtctttgaagttcataaagacgatctggagacggtctctcagaagatccatgaactgatggaaaacagcatgaagctggacgtaccattgctggtggaagtgggtagcggcgaaaactgggatcaggctcactaa

SEQ ID NO: 118460 - DNA, 630 bp, Enterobacter cloacae
gtgactacctggaactaccaacagacgcattttgtcaccagtgcgcccgatattcgccacctgccctcagacacagggattgaagtggcatttgctggccgctccaatgcgggaaaatccagtgccctgaatacgctcaccaatcagaaaaacctggcgcgtacctcgaaaacacctggccgtactcagctgattaacctgtttgaagtggctgaaggcaaacgcctggtcgatttaccgggctacggttacgcgcaggtaccggaagagatgaagatcaaatggcagcgtgcgctgggcgaatacctggaaaaacgcatgtgtctgaaaggtctggtggtgctgatggatattcgtcatccgctaaaagatctcgaccagcagatgattgactgggcggtggcaagcgatattgcggtgctggtgctgctgacaaaagcggataagctggcaagcggcgcgcgcaaggcgcaggtgaacaaggttcgtgaagcggtgctggcattcaacggtgatgtacaggttgaaccgttctcctcgctgaaaaagcagggcgtggataaactgcgacagaagctcgacagctggtttaacgatctggaaccggcgactgaagcggaagcagagtaa

SEQ ID NO: 118461 - DNA, 516 bp, Enterobacter cloacae
atgaaaaaaccgacctccgctgcgggcgtgaaacgccctgcaaaagcacgccgcaaaacgcgcgaagaactgaatcaggaagcgcgcgatcgcaaacgcgataaaaaacatcgtggccatgctgcgggtagccgtgctaacggtggcggtgccgcaggcgcttctgcaaaaggcaaacagcagaaagatcctcgtatcggcagtaaaactcccattccactgggcgtgacagacacgccggtcactaagcagcacaaaccaaagagcgagaaacctatgctttcaccgcaggctgagctggatatgctggagaacgatgagcgcctggatgcgctgctggaacgtcttgaagagggtgaaaccctgaccgctgaagagcagtcctgggtggacgccaaactggaccgcattgatgaactgatgcagaagctgggtctgtcctacgatgatgaagaagacgaagaggaagatgaaaagcaggaagatatgatgcgtctgctgaaaggtggaaactaa

SEQ ID NO: 118462 - DNA, 1374 bp, Enterobacter cloacae
atgtctgtaccatctatcgactgggatttggccctgatccagaaatataactattccgggccgcgttatacctcataccccaccgcgctggagttttctgacgctttcggcgaggcggattttcagcaagctgtggcgcgctatcccgagcgcccgctgtcgctctacgtccatattccgttctgccataagctctgctacttctgcggctgcaataaaatcgttacccgccagcagcacaaagccgatcaatacctcgatgcgctcgaacaggaaattctgcaccgcgcaccgctgtttaaagggcgtcacgtcagccaacttcactggggcggtggtacgccaacttatctgaataaagcgcagatcagccgcctgatggcgctgctgcgcggcaattttagttttaacgacgacgccgaaatttcgatcgaggtcgatccgcgtgaaatcgagctggatgtgctggatcatttacgtgccgaaggtttcaaccgcctgagtatgggcgtacaggacttcaacaaagaagtacagcgcctggtaaaccgcgagcaggacgaagcgtttatctttgccttactcaaccatgcgcgtgaaatcggctttacctcaacgaatatagacctgatttacggcctgccgaagcagacgccggagagcttcgcctacacgcttaaacgcgtggctgagcttaacccggaccgtctgagcgtctttaactatgcgcacctgccgacgctgttcgccgctcagcgcaaaatcaaagatgcggatctgccttccgcccagcagaagctggacattttgcaggagaccatcgcctcgctgaccgaaaccggctatcagtttatcggaatggatcactttgcccgccctgacgatgagctggcgattgcccagcgcgaaggtgttctccaccgtaacttccagggctacaccacccagggcgataccgatctgctcggaatgggcgtctccgccatcagcatgattggcgactgctacgcccagaatcagaaagagctgaagctgtactatcagcagatagacgaaaccggcaacgcgctgtggcgcggcattgcgctaacgcgcgacgactgcatccgtcgggacgtgattaaggcgcttatctgcaacttccgtctcgaatttcgcgaggtggagtcgcaatgggatctgcaattcagcgattactttgccgaagacctgaagcttctggcgccgctggcgaaagacgggctggtggatgtgtcggagagtgcggttgtcgtcacgccgaaaggacgtctgttgattcgtaatatctgcatgtgcttcgatgcctatctgcgtcagaaggcgcgtttacagcagttctcgcgggtgatttga

SEQ ID NO: 118463 - DNA, 1413 bp, Enterobacter cloacae
atgcaacgagggatagtctgggtagtcgatgacgatagctccatccgttgggtgcttgaacgcgcgctcacaggagcgggattaagctgcacgacgtttgagagcggcagcgaggtgctcgacgcactcaccaccaaaacgccggacgttctgctctcggatattcgcatgccgggcatggacggactggcgctcttaaagcagatcaaacagcgccaccctatgcttccggtcatcataatgaccgctcactccgacctggatgccgccgttagcgcctaccagcagggggcgtttgattatctgccaaaaccgtttgatatcgacgaagccgttgccctggtcgaacgcgccatcagccactatcaggagcaacagcagccccgtcacgcgccggatttcgggcctacgacggacatcatcggtgaagcgccagccatgcaggacgtgtttcgcatcatcgggcgtctgtcgcgctcgtctatcagcgtcttgattaacggtgaatcagggaccggtaaagagctggttgcgcacgccctgcatcgccacagcccgcgggcgaaagcgccctttatcgccctgaacatggcggcgatccccaaagatttgattgaatctgagctgttcggccacgaaaaaggggcgtttaccggggcaaataccattcgtcagggacgctttgaacaggctgacggcggaacgctattcctggatgaaatcggcgatatgccgctggatgttcagacccgactgctgcgcgtgctggcagatggccagttttaccgcgtgggcggctatgcgccggtgaaggtggacgtgcgtattattgccgcgacgcaccagaacctggagctgcgcgtgcaggaggggaaattccgtgaggatttattccatcgtctgaacgtgatccgcgtccacctcccgccgctgcgcgagcgtcgggaagatatcccgcgtctggcgcgccatttcctgcaagtggcggcccgcgagctgggcgtggaagccaagcagcttcatccggaaacggatgccgccctcacccgtctggcgtggccgggcaacgtgcgtcagctggaaaacacctgtcgctggctgaccgtgatggccgccggacaggaagtgttgattcaggatctccccgccgagctgtttgaagccaccgtgcccgaaagcaccgccggacatgcgctgccggacagctgggcgacgctgctggcgcagtgggcagatcgcgcgctgcgttccggtcatcaaaatctgctctccgaagcgcagcctgagatggagcgcacgctgttgactaccgcgcttcgtcatacccagggccacaaacaggaagcggctcgcctgttgggatggggtcgaaacaccctgacgcgcaagctgaaagagctgggaatggagtga

SEQ ID NO: 118464 - DNA, 1050 bp, Enterobacter cloacae
atggcaactggcacgctgcccgatgctgggcagatcctcaattctttgattaacagtatcttgctggtcgacgacgagctggcggtgcattacgccaacccggcggcgcagcagctgctcgctcaaagcgcccgtaaactgtttggcacgccgctgcctgaactgctgagctatttctcgctgaatattggtctgatgcaggagagtttgcaggcgggtcagggcttcaccgataacgaagtgacgctggtgattgacggacgctcgcatattttatccctcaccgcacagcgcctgccagatggcatgattctgctggaaatggcgccgatggataaccagcgtcgtctcagccaggagcagctacagcatgctcagcagattgcggcgcgcgacctggtacgcgggctggctcatgaaattaaaaacccgctgggcggcttacgcggtgcggcacagcttttgaccaaagcgctgcctgaccctgccctggcggagtataccaacgtcattatcgagcaggcggaccgtctgcgtaatctggtcgatcgcctgctcgggccgcagcagccggggatgcatgtttcagaaagcattcacaaggtcgcggagcgggtggtgaaactcgtctctatggagctgccggataacgtcacgctggtgcgtgattacgacccaagcctgccggagctggcgcacgatccggaccagattgaacaggtgctgttgaacattgtgcgtaacgcgttgcaggcgctgggcccggagggtggcgaaattattctgcgtacccgcaccgcgttccagctgacgctgcacggcgtgcgttatcgtctggcggcacgtattgatgtggaagataacgggccggggatcccgccgcatctccaggacaccctgttctacccgatggtcagcggtcgcgaaggcggcaccgggctggggttatccatagcccgtaatttgattgaccaacactccggcaaaattgaatttaccagttggccgggacataccgagttttcggttttcctgccgattaaaaaataa

SEQ ID NO: 118465 - DNA, 1410 bp, Enterobacter cloacae
atgtccgctgaacacgttttgacgatgctgaacgaacatgaagtgaagtttgttgatctgcgcttcaccgataccaaaggtaaagaacagcacgtcacgatccctgctcatcaggtgaacgccgaattctttgaagaaggcaaaatgtttgacggctcctccattggcggctggaaaggcattaacgaatccgacatggttctgatgccagatgcaaccactgcgctcattgacccgttctacgaagaacctacgctgatcatccgctgcgatatcctggaacctggcacgctgcaaggctatgaccgtgacccacgctccatcgcaaaacgcgctgaagagtacctgcgttctaccggtatcgcagacaccgttctgttcgggccagagccagagttcttcctgttcgatgacatccgttttggtgcttccatttctggttcccacgtcgctatcgatgacatcgaaggcgcatggaactcttccaccaaatacgaaggtggtaacaaaggtcaccgtccgggcgtgaaaggcggttacttcccggttcctccggtcgattcttcacaggacatccgttctaccatgtgtctgatcatggaagagatgggcctggttgttgaagcgcaccaccacgaagtggcaacggctggccagaacgaaatcgcaacccgcttcaacaccatgaccaagaaagcggatgagattcagatctacaaatacgttgtgcacaacgttgcgcaccgtttcggtaaaaccgcgaccttcatgccaaaacccatgttcggcgacaacggttccggcatgcactgccacatgtccctgtccaagaacggcaccaacctgttctctggcgacaaatacgcgggtctgtctgagcaggcgctgcactacatcggcggtgttatcaaacacgctaaagcgatcaacgccctggcgaacccgaccaccaactcctacaagcgtctggtcccaggctacgaagcaccggtgatgctggcttactctgcccgtaaccgttctgcttctatccgtatcccggtggtggcgtctccgaaagcgcgtcgtatcgaagtgcgcttcccggacccggcggctaacccatacctgtgcttcgcagcactgctgatggccggtctggacggtatcaagaacaagatccacccgggcgaagccatggacaaaaacctgtacgacctgccgccagaagaagcgaaagagatcccacaggttgctggctctctggaagaagccctgcaagcgctggacgcagaccgtgagttcctgaccgctggcggggtgttcaccgatgaagctatcgacgcttacatcgcgctgcgtaccgaagaaaacgaccgcgttcgcatgacgccgcacccggttgagttcgaactgtactacagcgtttaa

SEQ ID NO: 118466 - DNA, 1824 bp, Enterobacter cloacae
gtgatcgaaaaattgcgtaatatcgccatcatcgcgcacgtcgaccatggtaaaactaccctggttgataagctgctacagcagtccggtacgtttgatgctcgtgccgaaactcaagagcgtgtgatggactccaacgatttggagaaagagcgtgggattaccatcctcgccaaaaacaccgctatcaaatggaatgactaccgtatcaacatcgttgataccccagggcacgccgacttcggtggtgaagttgagcgcgtgatgtccatggtggattccgtgctgctggtggttgacgcatttgatggccctatgccgcaaacgcgcttcgtgaccaaaaaagcatttgcccacggcctgaaacctatcgttgtgatcaacaaggttgaccgtcctggcgcgcgtcctgactgggttgttgaccaggtcttcgacctgttcgttaacctcgacgcgaccgacgaacagctggacttccctatcgtttatgcgtctgcgctgaacggtatcgccggtctggatcacgaagacatggcggaagacatgactccgctgtaccagacgattgttgaccgcgttcctgcgccaaacgttgacctggaaggcaccctgcaaatgcagatctctcagctcgactacaacaactacgttggcgtaatcggcattggtcgtatcaagcgcggtaaagtgaagcctaaccagcaggtcactatcatcgatagcgaaggcaaaacccgtaacggtaaagtcggtaaagttctgactcacctgggtcttgagcgtatcgagagcgacatcgctgaagcgggcgacatcatcgccatcaccggtctgggtgaactgaacatctccgacaccatctgcgatccgcagaacgtcgaagcgctgccagccctgtccgttgatgaaccaaccgtatccatgttcttcaacgtcaacacctctccgttctgtggtaaagagggtaagtttgttacctctcgtcagatccttgaccgcctgaacaaagagctggtgcacaacgttgcgctgcgcgttgaagaaaccgaagacgctgatgcattccgcgtttcgggtcgtggtgagctgcacctgtctgttctgattgagaacatgcgtcgtgaaggtttcgagatggcggtttcccgtccgaaagttatcttccgcgaaatcgatggccgtaaacaagagccattcgaaaacgtaacgctggacgttgaagagcagcaccagggttctgtgatgcaggcactgggtgagcgtaaaggcgacctgaaaaacatgaatccagatggcaaaggccgcgtacgtctcgactacgtgatcccaagccgtggcctgatcggcttccgttctgagttcatgaccatgacttccggtactggtctgctgtactccaccttcagccactacgacgatgttcgtccgggcgaagtgggccagcgtaacaacggcgtgctgatctccaacggtcagggtaaagcggttgcgtttgcgctgttcggtttgcaggatcgcggtaagctgttcctgggccacggtgctgaagtttacgaaggccagatcatcggtattcacagccgttctaacgacctgacggtaaactgcctgaccggtaagaaactgaccaacatgcgtgcgtccggtactgacgaagcaacggttctggttccaccgatcaagatgacgctggagcaggctctggaattcatcgatgatgacgaactggtcgaagtgacgcctcagtcaattcgtatccgtaaacgtcacctgaccgagaacgatcgtaaacgtgcaatgcgcggtgcgaaagaagagtaa

SEQ ID NO: 118467 - DNA, 744 bp, Enterobacter cloacae
atgtccttcctgtttatcaggagggaggcctttctgtacctgatacatggacaaattatgaaaagaatcatcaccgtactgatcgtgtcgtctgtgtcctgcccggtttttgccggggcctatgtcgaaacgcgcgaagcctacaacaccgcctctgagctgcacgaagtgatcctgcgtgcgggctataacttcgatatgggcgcgggactgatgttcaccaacgcttataacgtggggaaatgggacgaactgaagcacagctataacgaaattgaggggtggtatccactcttcaaaccgaccgacaaactgaccttccagcccggcggcttgattaatgacagcagcgcaggatcaggtggcgcggtttatttagatactaactataaatttacggactggtttaatctgacgttccgctatcgctataaccataacaattacgatacgccggactataacgggcagatggataagaacgacacacatgaatttgccaactactggaatttcaaagtgacggatgcgtttttctacacctttgagccgcactttttccagcgggtgaatgattaccacagcaaaaatggcaaagatcatcactgggaaattaccaataaattcagctataagatcgacagaaactggctgccgtatcttgagctacagtggctggaccgatggaatgattacaaccgcgagcagtaccggatccgtttagggttgcggtattcgttctaa

SEQ ID NO: 118468 - DNA, 294 bp, Enterobacter cloacae; identical to SEQ ID NO: 32300

SEQ ID NO: 118469 - DNA, 405 bp, Enterobacter cloacae; identical to SEQ ID NO: 105556

SEQ ID NO: 118470 - DNA, 204 bp, Enterobacter cloacae; identical to SEQ ID NO: 105555

SEQ ID NO: 118471 - DNA, 858 bp, Enterobacter cloacae; identical to SEQ ID NO: 105554

SEQ ID NO: 118472 - DNA, 309 bp, Enterobacter cloacae; identical to SEQ ID NO: 105553

SEQ ID NO: 118473 - DNA, 816 bp, Enterobacter cloacae
atgagagagccaagaccccgccataccttgcaggtcattcgagtgccttctctggaggttcaggatctggggctgaccagctttgatagctggcttgacgagaacggttatgacaaaacgaatgccagaaataaccgtaccatctgggcgagagaaggcggatggcatctgaaacgttgcagaaatctggaaactggcacggacgatttctggtttatcgctttcgatggtaaaggcggaaagatatacccgctgaaaacccaaagagactaccgggctgcatatcgtaagctggaagcagaaggttatgcacctgcggtcatcgagcaaatgaccacaggcgcagcatataacctggcctatccacgttccaccctaaaacaagctgagacggccaccagcgaaccaaagcggaaacctgacgtagatatccagggtgagcactgcgagcgcgtagtgacgcaacgtagtggcgtggcacagggtaaatttaaagctctgctcatcgagaatttcgcgggccgttgtgcggtaaccggttgggttaatggcggtgtcctggatgcggcacacattgaacatggaacccggtacaatccgtctaatggcatcctgatgactccaacaatgcatgctctgtttgatgccgatcttatgggcatagatccggccaccctgaccgttcattttaagccaggcattgagctgggcgagctgtttgaaggccgtaaaatcacaccgctggtgtacgatctggacttagagcggctggccgtacgctgggcaggataccagggcctggctcatgaacaatga

SEQ ID NO: 118474 - DNA, 411 bp, Enterobacter cloacae; identical to SEQ ID NO: 105551

SEQ ID NO: 118475 - DNA, 207 bp, Enterobacter cloacae; identical to SEQ ID NO: 105550

SEQ ID NO: 118476 - DNA, 1086 bp, Enterobacter cloacae
atgagccggaaacagcagcgtctggcaatctggatgaacggaatcaaagtcggatactgggaaaaaagtaaaggggtagacagcttacaataccttcctgactggagtgcagacgaacagggaaggccgctgtcattgtcccttccttttactcccgggaaccaggtctggcgtggaaatgtggtacgtgactattttgataatttactcccggacagcgaaggcatacgcagacgtctggcaatgcgttacaaggccgatagcctggagccttttgatcttctgacggagctgggaaaagactgcgtgggcgcgatacagctgcttcatgacggagatgaacccacagatttatattccgtgaagtatcacccgcttactgaatcagaaattgcggcaactttgcgtaataccacggagacattgctaccgggcaggccagaagataacgacgacttacgtttatctattgccggtgctcaggagaaaacagccctactgtggcatgaagatcggtggtgtatgccggagggtaatacaccaacgacgcatatattcaagctaccgctcggacttgtggggaacatgaaagccgacatgcgctcgtcggttgaaaatgaatggctctgctcggtacttctcgaacagtacgggctccccgtggcaagaacgcagattgctcactttgaagatcagaaagcgctggtggtagaacgttttgaccgaaaatggtcaggaaacggacaatggatcattcgtttaccccaggaggatatgtgtcaggccctgggcatttcgccattacgaaaatatcaggcggacggcgggccaggtatatcggaaattatggaagttctgagtaattcagaccgtgctgagcgtgacaaagcgcagttttttatgacgcagatagttttctggatgatggccgcaacagatggccacgctaaaaatttcagtatttctattgggccacagggacgttatcaccttacaccactctatgatgtgttgtcggctcggtcatgggaacaatcagatatcctggcagaagtgcaaactggcgatggccgtacgtggcagtag

SEQ ID NO: 118477 - DNA, 297 bp, Enterobacter cloacae; identical to SEQ ID NO: 105548

SEQ ID NO: 118478 - DNA, 1389 bp, Enterobacter cloacae; identical to SEQ ID NO: 105547

SEQ ID NO: 118479 - DNA, 498 bp, Enterobacter cloacae; identical to SEQ ID NO: 105546

SEQ ID NO: 118480 - DNA, 657 bp, Enterobacter cloacae; identical to SEQ ID NO: 31747

SEQ ID NO: 118481 - DNA, 393 bp, Enterobacter cloacae
atggacgataaagagcaatttacgaatcttgtggcaaagcatgcctccggactcaccgaagagcagctggccggttacgatgcctgttccctggatggtgaatgcgtcacgccttcatacgaggttttccgggggtatcgtccccgccataccctggatgaatttctggagatggccatatcgctgaatgccatccacccggatgaatatttaacggatatgctgcttaagcctcatgaggtgatcggcgctctggccgatgaaggcgaccagctgaacaacgccaccccggtttatttcttcccggataccggcgtctatgcagcggccgtcagtgaaacccgggtgctcgatgcctggctttgctggccatgctacccggcgaactggtaa

SEQ ID NO: 118482 - DNA, 987 bp, Enterobacter cloacae; identical to SEQ ID NO: 105543

SEQ ID NO: 118483 - DNA, 2040 bp, Enterobacter cloacae; identical to SEQ ID NO: 105542

SEQ ID NO: 118484 - DNA, 192 bp, Enterobacter cloacae; identical to SEQ ID NO: 31746

SEQ ID NO: 118485 - DNA, 456 bp, Enterobacter cloacae; identical to SEQ ID NO: 31745

SEQ ID NO: 118486 - DNA, 489 bp, Enterobacter cloacae
atgaacgaatttacgacacttcttcagcaaggcaacgcatggtttttcatccccagcgccattctgcttggcgcgcttcatggactggagcccgggcactccaaaacaatgatggcagcattcatcattgctataaaaggcaccgtacgtcaggccgtgatgctgggtgtcgcggcaacattgtcgcacactgcagtcgtatggctgattgcttttggagggatgtatatcagtaataaatttaccgcagaatcagccgaaccctggctacagatggtctcttcagtgatcatccttggtacggctttttggatgttctggcgaacctggagcggtgagaaaaactggctggagggaatgcaggagaatgaacatcatcaccatgacgaaacaaggttgatcgatactggccatggaaaagttgaactgtccatttttgaagaaggacaacttccccactggcggctacgcaggcactgttgcaaatag

SEQ ID NO: 118487 - DNA, 273 bp, Enterobacter cloacae; identical to SEQ ID NO: 31728

SEQ ID NO: 118488 - DNA, 168 bp, Enterobacter cloacae; identical to SEQ ID NO: 31729

SEQ ID NO: 118489 - DNA, 819 bp, Enterobacter cloacae; identical to SEQ ID NO: 105710

SEQ ID NO: 118490 - DNA, 1206 bp, Enterobacter cloacae; identical to SEQ ID NO: 105711

SEQ ID NO: 118491 - DNA, 204 bp, Enterobacter cloacae; identical to SEQ ID NO: 105712

SEQ ID NO: 118492 - DNA, 1320 bp, Enterobacter cloacae; identical to SEQ ID NO: 105713

SEQ ID NO: 118493 - DNA, 168 bp, Enterobacter cloacae; identical to SEQ ID NO: 105714

SEQ ID NO: 118494 - DNA, 1428 bp, Enterobacter cloacae; identical to SEQ ID NO: 105715

SEQ ID NO: 118495 - DNA, 516 bp, Enterobacter cloacae
atgtttttttttacaaagttacttttgcccatcatgattgttgtattcccagtggcgtcctgggggaactcaacaacttttgaggcaaaggtggttaagattgttgacggtgacaccataactgcgttggatgctcaaaacacaaccatcaaaatacggatgtatggtatagacgctcctgaatctaaacaggcttttggccaaaaagcaaaacaggccttaaccacagctatagcaactaaaatcgttaccgtgatagaccatggtacggatatctatggccgtatgttaggtaccatctggttagatggatatgatatcaatgcctctatggtggacagtggatatgcgtgggtttatcggttcgaagataacgccattgtccctggctatatcaaatatgaatccgcagcacaaaaggaggcaaaagggttatgggcagacaccaaccctgtcccaccatggcagtggagacaggcaaacgaaaagcccagaaaggtgaaagggaagaaataa

SEQ ID NO: 118496 - DNA, 897 bp, Enterobacter cloacae
atgatgaaagagcctcatccgttacttcagttggtactaaacgattccggtcgtctaaccatgcctgtttattatagagatcaacagtattgcccgacttgccttacaaaggtgttgaagagtgaggatggaagtttggcgcacctcggggaaataaatcaaaatacatgtagaccttctatttcagtagttgtgacaaaagcaattattgaaatgttatgtgacggggaaaaaatatttgtaaatccaatacgataccgaggccgggtgctggcaccctcagtaattttttctcccgacactcacactttcaaaccgtttataaatacagactatcagcctgtgggagcaaactggaaaagtgaaaagggatataaactcggtctgttttatctcaaagatcgagccaactctatcaataaagaggaatttgatttcattgccgttatagaccctaaggcaatgcagaaagaatttatttcggcctggtctgaggttgatgaaaaaaatccattggaaacgctgaagcagatcttacgatctaaaaacaactcttctttatgggtaaaatggcctggcaaaattgagcatgcgcaaaaaggaaattgcaacgaaaattactggttcgattatcaatctgataatcaggaagtgaactgtacggtctctgttgtaggtatcgaaggtaacagttccggtgagacaatttatagattgcaaactttgctaaagcgtaagctcaatgaatatcaactggttcggtctttagggactattatgcttcttgataataccgggaatatgattccatcaaaccatccttattttgaagtcatctcaaaagcatgtataaatggagtgcgtgactttgttcgtcaaaacccgtgggtagtctga

SEQ ID NO: 118497 - DNA, 258 bp, Enterobacter cloacae; identical to SEQ ID NO: 105717

SEQ ID NO: 118498 - DNA, 255 bp, Enterobacter cloacae; identical to SEQ ID NO: 31731

SEQ ID NO: 118499 - DNA, 198 bp, Enterobacter cloacae; identical to SEQ ID NO: 31733

SEQ ID NO: 118500 - DNA, 276 bp, Enterobacter cloacae; identical to SEQ ID NO: 31734

SEQ ID NO: 118501 - DNA, 1479 bp, Enterobacter cloacae
atgttgctgtcctcgacgcgtaaggactggctgggtaacgtccgtggtgacgttctggccggtattgttgtcgcgctcgcactcattccagaagcgatcgccttttccattatcgccggtgttgatccccaggtgggcctctactcggcgttctgtattcctctcgttatggccttctttggcggacgtccggcgatgatttcgtcctccaccggtgcaatggctctcctgatggtgacgctggtgaaagatcatggcttacagtatttactggctgcctccatactgaccggggtattccagctgatagccggatatctgaagcttggcgggctgatgcgttttgtttcacgctcagtggtcacggggtttgttaatgcactggcaatactgatttttatggcccagttgcctgagctgaccaatgtgacatggcatgtttatgccatgactgcggcagggctggggatcatctatctcttcccttatatcaacaaaaccattccttcaccgcttgtgtgcatcgtggtgctgactgggattgccatgtggctgcatctggatgtgcgaaccgtcggggatatggggaaacttcccgacagtctgccggtcttcctgctcccggacgtgcctttaaatcttcagacgctgctcatcatcctgccatattctgcggggcttgcggtggttggcctgcttgagtcgatgatgaccgccactatcgtggatgacatgaccgacacgccaagcgacaaaaacagggagtgcaaagctcagggcatcgcgaacatctgcacatcctttatcggaggaatggcaggctgcgcgatgattgggcaatctgttatcaacgtaaaatccggtggacgcggacgactttcaaccctcacggcgggcgtggtgctgctttgcctgattgtgttcctgcgcaactgggtctcccaaattccgatggcagcgctggtcgcggtgatgattatggtttccatcgggacattctcctggcgctccattgccaacctgcggacacaccccctttcaaccagcgtggtcatgcttgccaccgtcgcggttgtggtggcaacacataatctggccttcggtgtgctgaccggtgtactgattgcttcgctcaattttgccactaaagtatcccggttcatgcgtgtaacctcagttctggaggggacgagccggacgtataccgtcaccggccaggtattctttgcatcagcagaccgctttacgagccactttgatttccgtgaagcgattgagaatgtggtgatagacgtttcacatgcccatttctgggacatcacgtccgtcagcgccctggataaggtggtcattaagttccgtagagagggcgccggggttgaaatacgtgggatgaatgaagccacccgcaccatcgttgaccggtttggtgttcacgataaacctgaagaagtcgaaaaactgatgggcggtcattaa

SEQ ID NO: 118502 - DNA, 828 bp, Enterobacter cloacae; identical to SEQ ID NO: 105721

SEQ ID NO: 118503 - DNA, 426 bp, Enterobacter cloacae; identical to SEQ ID NO: 23459

SEQ ID NO: 118504 - DNA, 1290 bp, Enterobacter cloacae; identical to SEQ ID NO: 105722

SEQ ID NO: 118505 - DNA, 321 bp, Enterobacter cloacae; identical to SEQ ID NO: 105723

SEQ ID NO: 118506 - DNA, 705 bp, Enterobacter cloacae; identical to SEQ ID NO: 105724

SEQ ID NO: 118507 - DNA, 1404 bp, Enterobacter cloacae
atgacggctctcgcagcggagtttttcacattggatgaagttaaccgactcaaaatcattcaggatgtcatcgaccggcgtctgacaacacaaatggcagctcagcggcttggtatctccgaccgtcagtgccgtcgtctgcttgcgcgttatcgtgaagatggtccgattggcatgaccagccgccgtcgtggtaaatccagtaacaaccagttgcctcagggactggccgcatacgcgctgaacattattcgcgaacgctataacgatttcggtccgacgctggcctgtgaaaaactgtctgaggtgcacggtgttcatctttccaaagaaaccgtccgtaagctgatgactcaggccagtctgtgggtcccacgtaagcaacgtgcgccaaaaattcagcaacctcgttaccgccgtgcctgtgccggtgaactcatacaaatcgacggctgcgaccaccactggtttgaaaatcggggacctaagtgtacggcactggtttacgttgatgacgcaaccagtcgtttaatgcagcttcttttcgtgaaatctgagtctactttcacctattttgaagcgacccggggctatattgaaaaacatggcaaaccgcttgcgctgtacagcgacaaagccagcgtattcaggatcaacaataaaaatgcaaccggcggcgacggcgatacccagtttggccgtgcgatgcatgaactgaacattcagaccatttgtgcagaaaccagtgctgccaaaggccgcgttgaacgggcgcacctgacgcttcaggaccgactggtcaaggagctcaggctccagggcatcagttccatggaagctgcgaacgcatttgccgaagagttcatgaacgattacaaccgtcgtttcgcaaaagcgcctcgccaggcgtttgatgttcatcgggaactggatgtcgatgacgatcttgatatggtatttaactggcgtgaagctcgtaaagtgtcgaaatcactcacagtgcaatacgacaaagtcctttatctgattgaagacagcgaattcagtcgtcgggcgattggtaaatacatcgatgtctggcattacccggatggacataaagagctccggcttaatggcgtatcacttccctactccacctatgacaagctttctgaaatcgatcagggggccattgtggataacaaacgtctggggcgggccctggaaatggcgcagctggtccaggccgagcgggataataaccggtcgcaatccgtaccatccggagacggcccttctcgcaggcgtaaagctcccacgacgaagaaatcccagcgttccctggatcaggacgatatgttcaatgccctggtgaaacttcagtcacgctctgaagagatatttgggaagaaaccgatttaa

SEQ ID NO: 118508 - DNA, 570 bp, Enterobacter cloacae
gtgattgattccaccgggctgaaggtctttggtgaaggcgagtggaaagtcaaaaagcatggccaggaacgccgtcgtatatggcgaaagttgcatctggcagttgacagcaacacacatgaaatcatctgtgcagacctgtcgctgaacaatgtgacggactcagaagccttcccgggtcttatccggcagactcacagaaaaatcagggcagcatcggcagacggcgcttacgacacccggctctgtcacgatgaactgcggcgtaagaaaatcagcgcgcttatcccaccccgaaaaggtgcgggttactggcccggtgaatatgcagaccgtaaccgtgcagtggctaatcagcgaatgaccgggagtaatgcgcggtggaaatggacaacagattacaaccgtcgctcgatagcggaaacggcgatgtaccgggtaaaacagctgttcgggggttcactgacgctgcgtgactacgatggtcaggttgcggaggctatggccctggtacgagcgctgaacaaaatgacgaaagcaggtatgcctgaaagcgtgcgtattgcctga

SEQ ID NO: 118509 - DNA, 996 bp, Enterobacter cloacae
atgtttaataaactcgcatactcagccgtcgccctgaccgtttcacttggcaccgtgatgtcctgtcaggcagaagcgacaggtaaggattacgcgtcggcctttaatcaggttaaacagattaacgctggcgatttgaacgtcggttacgtcgatatcgggccaaaagaggggcaaccggtgatcctgctgcatggctggccgtacgacattcacagttatgcagaagtggcccccgcgctggccgcaaaggggtatcgtgtcattgtgccgtccctgcgcgggtacggcaccacgcgctttatttctgaaaaaacgccgcgaaacggccagcctgcggcgatggcaaaagacatcgtcaacctgatggacgccctgaatatcagacaggcggtgtttgccggttatgactggggggcgcgtacggcggatatcgttgcggcgctctggccggaacgcgtgaaatcgctggtctcggtgagtggctacctgatcagcagccaggcgattggcaaacagcctttaccgccgaaggcagaggttcagtggtggtatcagttctatttcgccacgccgcgcggtgcggaaggctatgctaaaaatacgcacgattttgcccggttgatttggtcccaggcttcgcctgactggaaattcagcgatgccaccttcaatgcgagcgccaaatccctcgataatccggaccacgttgccgtcacgctcagtaattaccgctggcgtctggggctggagaagggtgagcagaaatatgacgcctacgaacaaaagctggctacgctgccgaacattacggtgccgaccatcaccatcgagggcggtaacaacggagcaccacatcctgcacccgccgcctatgcggggaaattcaccggaaaatatgagcaccgtactttcggcgcaacggttggccacaacccgccgcaggaagatccgcaggactttgttaacgccgttgtcgacgcggataagctctga

SEQ ID NO: 118510 - DNA, 741 bp, Enterobacter cloacae
gtggagcatattgatcacatccttgtcgtcgatgacgacagggatattcgtgaactgattgtcgattacctcgtgaaatccggctaccacgcctctggcgcggcgaacgggaaagagatgcgcgcagtgctcgacaaacagcatatcgacctggtggtgctggacgtgatgatgcccggcgatgatggcctgacgctgtgtcggcagctgcgcagcagcaggcataaagatctgccgatcctgatgctcaccgcgcgcaacgaggactcggaccggatcctggggctggagatgggcgccgacgattacgtggtcaaaccgtttgtggcccgcgaactgctggcgcgtatcaaagctatcctgcgtcgttttcgtactatgccgcctaatcttcaggtgaccgaggcagggcgcctggtggtgttcggggaatggcagctggataccgtggcgcgtcatctgattgataacgaggggatggttgtggcgctcagcggggcggaatatcgccttttgcgcgtattcctcgatcatcctcaacgggtgctgacccgcgatcagctgctgaacctgacgcagggacgtgatgccgagctgtttgaacgttcgattgatctcctggtgagccgcgtgcgacagcgcctgaatgaagatgctcgcacgcccgcctacattaaaaccgttcgcagcgagggctacgtctttaccatgccggtgaccatcgtcgaggccaatgaatga

SEQ ID NO: 118511 - DNA, 1296 bp, Enterobacter cloacae
atgacgctgtggccccgcaccttactggcccggctgctgatcattgtgctgcttggactcttgctggctaacgcgctcagcctgacgctggtcatggttgagcgaatgcgcagcgcgcgtacggttatgctgggcaatcttgagaacgacgtggcgaccagcgtggctattctcgaccggcttccggccaaagagcggccagagtggctggaacggctcagtcgcggtaattatcgctatatccttggccccggcgaggcaggcgccgcgccaactgacaagcgctcgcgggatgcgattcgcaccctgaaagagacgctttcagcccaatatccgcttcagtttacggctgtgccagggccgatttcccatattcaggcccatctgacgctccgcgacggcgcaccgctcaccatcgatctgatcccgcgcatgccgcctgtcgccagctggttgcccgtggtgctggttcttcagctgttacttgtcgcgctctgctcctggattgccgtgcgccaggttgtccggcccttcctgcaattcacgcgcgcggttgattccctcgatcctgcggcccattctccgatgactgaacaaggtccggttgaggtgcgccaggcagcgcacgcttttaatgagatgcagtcgcggatacagacctatctgcgtgaacgcgcgcagattctggcgtccatttctcacgatctccagacgcccatcacgcgcatgaagctgcggatcgaaatggcggatcagcccgaactccgcgataagctgctgagcgacctggataatatgtcgcgccttgtacgggaagggattgcctatgcccggtcatcagaatccctggaagagaccacgctgaagctggaactgaacgcgtgggttaacagcatcgccagtgattatcaggacattggtaaaaacgtgcagtttcatgcacgcaatgcgcgtctgccgatcgtcactcgtccccaggcattgcgcagggtaatgaccaatctgctcgataatgcgctgaagtttggcgatagcgcggtaatagagattgatgaaaatgaaaggcaggtagcgatccgcattatggataacggccctggcatcccggaggcagaactggaggcggtgttacagccgttctaccgggttgaaacctcgcgcaaccgggaaacgggcggcaccgggttaggcctcgccattgccgcgcagctcaccgcccagcttgacgggaaattgcatcttgcaaaccgggcagagggagggctggccgtaagcgtgacccttccgcgcggttaa

SEQ ID NO: 118512 - DNA, 1191 bp, Enterobacter cloacae
atgtttctgataatcgcttttttaggcggcatgattagcctgctcagtccgtgcacgcttcccgtcattcctctgctgttcgctggctttcaggggcagcgcaaacacattctggcgcttctggcgggaatgattgtgatgttcacgttggtggcgatggtagtaacggttgccagcgagtggatcgctgacgccaccattatcggtcgctggattgcgctgctggtactgagcattgccgccctggccctgatctttccgcagttcgctcagcgcattgcccgcccggcggtcagcgcgggaaacgttctcaacacccacagcatgcagcgacgcggcctggtttcggcttttctggcagggctggccgtcgggctgctgtggtccccctgtgccggaccgattctcggggcgatcttcagcattaatattgcgggccactcggctatcgcaaccggagcgctgttagccgcttacggcagcgggtgcgcgttgatgctggggctgcttgtcgcggggggccgtaagttgataacccctctgagagccaaatccgcattgatggcgcgtttgcgtcagggagcgggagtgatgatgttagccgccgttgcgttcaacgccagcgggatgacctcagccctgaaaggcgccaacggtattgccgaccagctggaaaatgccctgttgagccttgcgcaacccacctccacgcaggtgaaactgcaaccggtcgctgacgcgacgccgggcagccagctaccgtcattaagcggcggtacgggttgggtaaacggtgaccctgtcacgtctgaggccttgcgggggaaagttgtgcttatcgatttctggacctgggactgtatcaactgccagcatacgcttccgcacgtgcgtgactgggcgaagaaatatcagtctgaaggtctggtagtgattggcgtccacaccccggaatacccctgggaaaagccgttatcatcggtgaaaaacgcggtcaacaaatggcagctgccgtaccgcgtagtgacggataataactacaaaatctggagcgcgttcggaaatcagtactggccagcacattactatttcgatgcgaaagggcaactgcgttacaccgcgtttggcgaggggaactacgacaagcaggaggccgtaattcagcagttgctcaaggaagcgcgttcctga

SEQ ID NO: 118513 - DNA, 759 bp, Enterobacter cloacae
atggccgactgggatccctctctttatctacagtacagcgcagaacgcacacgtcccgccgctgagttactcgcccgggtgccgcttgctgacataacctctggcgtggatttgggctgcgggccaggcaacagcaccgcgctgctgaaacagcgctggccttctgcgcagatcgccggcgtggataactccccggccatgctggaggaagcccgacaggccctgccagactgccactttgttgaggcggatatccggcactacaaacctgaccagccgctcagcctgatctacgccaacgcctcactgcaatggatcccggaccattaccaccttctgccacacctggtttcactgctccagttaaacggcgtgctggcggtgcaaatgcctgacaactggcttgagccgacgcacgcccttatgcgtgaagttgcctgggaacagggctaccccgatcgtggccgcgagccattgccgggtatccatgcctactacgatattctgacggaagctggatgcgacgtggatatctggcgcaccacctacttccatcagatgagctctcatcaggcgattattgactgggtcagcgcgacggggttacggccgtggttacaggaactcaacgaaagcgagcagaaaaactatctgaaacgctaccttgagctgctggaagagcagtatccgctccaggagaacgggcagatactgctggcttttccgcgcctgtttatggtcgctcagcgggttccgtaa

SEQ ID NO: 118514 - DNA, 585 bp, Enterobacter cloacae
gtgcaatcaaaacgtgcagatatacgcattatcaacagcgaaacgttgtccgacaactggtataacctgaaaaaatatacttttgacctccagcgcagcgatggcgactggcagcgacaagagcgtgaagtgtatgaccgggggaatggcgcgacgatcctgctctataatcgcgacagcaaaaccgtcattctgacgcgtcagttccgtttcccggtgtttataaatggtcacgaagaggatctcattgaggcggccgccgggttgctcgataaccttgacccggaaagccggattaaggccgaagcggaagaagaaaccgggtataaggtgacgcgcgtagagaaaatttttgaggcctatatgagcccgggctcggttaccgagaaactctacttctatctggcggaatatcacccgcaggatcggaccagcgcgggcggaggcgttaaagcagagggagaagatatcgacgtactggaaatgacgctggacgacgcgcttcggggcattgaaaatgggcagattgtcgacggaaaaaccatcatgctgctctatcacctggccctcaaaggcattttataa

SEQ ID NO: 118515 - DNA, 759 bp, Enterobacter cloacae
atgctcacaagccagcgtaaacagttgattctggaaaaactggaggcggaaggtcaggtccagtctactgcgctcagcctctttttctcggtgtctgaggacactatccgccgggatttacgtgaactggcggcagaagggcgtttgcagcgtgttcacggcggcgcactgccagcatcgtcagcgattgcgccttttgccgagcgtcagtccgttaaaatggatgcaaaaaaacgcgtggcacggcgaggcgcgcagctcatttcaccggggcaggtggtgatcattgatggcgggacgaccacctccgaacttattacgttcttaccacccgatttacggataaccgtggtgacgcacagcccgggtatcgctttggggctggtcgaccatccatgcatagaggtgatcctgattggtggtcgtttgtataaacactccatcgtcacggtcggcgcggccgctattgaaggcatcaataatattcatgcggatctgttcttcatgggggtcaccggcgtccatcctgaggccgggctgaccaccggagattacgaagaagcgtgcatcaaacgtgcattttccggtagagcggcggaaacggtggtattggcctcaccggaaaagatcaacacggcctcggcgtttgtgattggcgacctgtcgctggtgaatacgctggttgttgaaaacacaacggatgaacgctgggtgagcgctctgaaagaaaagggcgttgcggtgatcgcaagccagtaa

SEQ ID NO: 118516 - DNA, 1293 bp, Enterobacter cloacae
atgaaagcggtctccattctgacgtgcggcgcggacccaaccgcgcaacgcctgtcaacgtctgccattcagcaggccataaataccgctcaacagaacgatgtcattgttattccgcaaggccgttttctgaccggagcactgttcctgaaaagcggtgtttcgcttcgcctggacgctggcgcacagctcgttggaagccaggatctggctgattatccattgataaacacccgggtggccggcattgatatgcgctggccggcaggcattattaatatcatcgattgtgaaaacgtcagtattaccggtacaggcacaatagacgggcagggtgttatctggtggcaacgcttctggggcgatgacgagcgcagcggcatggtcggcgattacagcgccagaggattgcgctgggtggttgattacgactgtcagcgcccgcgcaatattctggtctttgaaagccagagcattctgctgcgtgattttaccagtcgggagtccggattctggaacatgcatctttgttattcgcgccatatcacggttgagggcgtgcaaatcagcaattctgcggggccgagcaccgacgggatcgatatcgattcctgtgaacaggtgcgggttgaacgctgcattgtttcctgtaatgacgacaatatctgcataaaatcaggacgaggacgcgaagcggcgcaaaaagcacgtaccgctagggatatagtggttcgcggttgtacgctgaataaggggtccgggatcacgctggggagcgaaacctcaggcggcattgaacgcgtcctgatagaagataatgcgtttaacggtacgggcgtcgggtttcgcattaagtcggcccgcaaccggggcggatttatccgtgatatcaccgtccaaaatttacatcttacggacgtgcgttttccggtgctgatccagctgaactggtttccgcagtacagctatggcgaccggggaaatttatctgataaaccagaacactggcgcaagctggctgaaggtgttgagggcgaagccggtcttactgcggtcagcggactgacgattaaaaatatgacggcgcgtcgctcagacaacaaatatttctcgcgggcatttttcattgaggggtatccggagcgtcctgtgaccgggttaacgctggacggaattttgattgacgcgtcagagttcgggaaaatttccggtgtggatgggttgcgctttaaggatgtgcaggtgactgccgtggagaacacgcaagaccgtaacgacagttatgagcgttga

SEQ ID NO: 118517 - DNA, 615 bp, Enterobacter cloacae
atgtattgcacggtgaaggcgttaacgttactgttagagagctacaagcaaagaaatcaggggcttaccgtgaagaaagagataaaaacactggaatcgagacagatttatcgtaaccgctggatgtcgctaaaggaagaccggattctgagagccaatgggagcgaggggctttattccgtcattgaaaaagatgatttcgtggtcatcattccggttgagaatgatgaaatctatctggttgaacaataccgataccctctgggccagagaaccacagaactccctcaaggaagttgggaatgttctcgcgacgctgcacctgaagacgttgccagaggcgagcttaaagaagaaaccgggttaaacgccgggaaaatggagtacgtcggttatcaaaagctcgcacagggttattcagcccagggttatcatatttaccttgccacggagctgacatttaccggccagcaactggaggaggaagaatacggcctgacggtgaaaaaacttaaaattagtgcctttgctcaattaatacgtgacggcaaaatcactgacgccacctcagttacggcattcctgctggcgagaacaaaaaatatgatctcttaa

SEQ ID NO: 118518 - DNA, 807 bp, Enterobacter cloacae; identical to SEQ ID NO: 31735

SEQ ID NO: 118519 - DNA, 441 bp, Enterobacter cloacae; identical to SEQ ID NO: 31736

SEQ ID NO: 118520 - DNA, 1362 bp, Enterobacter cloacae; identical to SEQ ID NO: 31737

SEQ ID NO: 118521 - DNA, 804 bp, Enterobacter cloacae; identical to SEQ ID NO: 31738

SEQ ID NO: 118522 - DNA, 1359 bp, Enterobacter cloacae; identical to SEQ ID NO: 31739

SEQ ID NO: 118523 - DNA, 570 bp, Enterobacter cloacae; identical to SEQ ID NO: 118508

SEQ ID NO: 118524 - DNA, 1254 bp, Enterobacter cloacae
atgtactatttaaaaaacacaaacttttggatgttcggtttattctttttcttttacttttttatcatgggagcctacttcccgtttttcccgatttggctacatgacatcaaccatatcagcaaaagtgatacgggtattatttttgccgctatttctctgttctcgctattattccaaccgctgtttggtctgctttctgacaaactcgggctgcgcaaatacctgctgtggattattaccggcatgttagtgatgtttgcgccgttctttatttttatcttcgggccactgttacaatacaacattttagtaggatcgattgttggtggtatttatctaggcttttgttttaacgccggtgcgccagcagtagaggcatttatcgagaaagtcagccgtcgcagtaatttcgaatatggtcgcgcgcggatgtttggctgtgttggctgggcgctgtgtgcctcgattgtcggcatcatgttcaccatcaataatcagtttgttttctggctgggttctggctgtgcattcatcctcgccgttttactctttttcgccaaaacggatgcgccctcttctgccacggttgccaatgcggtaggtgccaaccattcggcatttagccttaagctggcgctggaactgttcagacagccaaaactgtggtttttgtcactgtatgttattggcgtttcctgcacctacgatgtttttgaccaacagtttgctaatttctttacttcgttctttgctaccggtgaacagggtacgcgggtatttggctacgtaacgacaatgggcgaattacttaacgcctcgattatgttttttgcgccactgatcattaatcgcatcggtgggaaaaacgccctgctgctggctggcactattatgtcagtacgtattattggctcatcgttcgctacctcagcactggaagtggttattctgaaaacgctgcatatgtttgaagtaccgttcctgctggtgggctgctttaaatatattaccagccagtttgaagtgcgtttttcagcgacgatttatctggtctgtttctgcttctttaagcaactggcgatgatttttatgtctattctggcgggcaatatgtatgaaagcatcggtttccagggcgcttacctggtgctgggtctggtggcgctgggcttcaccttaatttccgtgttcacgcttagcggccccggcccactttctctgctgcgtcgccaggtgaatgaagtcgcttaa

SEQ ID NO: 118525 - DNA, 3075 bp, Enterobacter cloacae
atgacaatgattacggattcactggccgtcgtattacaacgtcgtgactgggaaaaccctggcgttacccaacttaatcgccttgcggcacatccccctttcgccagctggcgtaatagcgaagaggctcgcaccgatcgcccttcccaagagtcgcgcagcctgaatggtgaatggcgctttgcctggtttccggcaccagaagcggtaccagaaagctggctggagcgcgatcttcctgacgccgatactgtcatcgtcccctcaaactggcagatgcacggttacgatgcgcctatctacaccaacgtgacctatcccattgcggtcaatccgccgtatgttcccacggagaatccgacgggttgttactcgctcacatttaatgttgatgaaagctggctacaggaaggccagacgcgaattatttttgatggtgttaactcggcgtttcatttgtggtgcaacgggcgctgggtcggttacggacaggacagtcgtttgccgtctgaatttgacctgagcgcatttttacacgccggagaaaaccgcctcgcggtgatggtgctgcgctggagtgacggcagttatctggaagatcaggatatgtggcggatgagcggcattttccgtgacgtctcgttgctgcataaaccgagcacgcaaatcagcgatttccatgtagccactcactttaatgatgatttcagccgcgctgtactggaggcagacgttcagatgtacggcgagctgcgcgatgagctgcgggtgacggtttctttgtggcagggtgaaacgcaggtcgccagcggcaccgcgcctttcggcggtgaaattatcgatgagcgtggtggttatgccgatcacgtcaccctacgtctgaacgtcgaaaacccgaaactgtggagcgccgaaatcccgaatctctatcgtgcggtggttgaactgcacaccgccgacggcacgctgattgaagcagaagcctgcgatgtcggtttccgcgaggtgcggattgaaaatggtctgctgctgctgaacggcaagccgttgctgattcgcggcgttaaccgtcacgagcatcatcctctgcatggtcaggtcatggatgagcagacgatggtgcaggatatcctgctgatgaagcagaacaactttaacgccgtgcgctgttcgcattatccgaaccatccgctgtggtacacgctgtgcgaccactacggcctgtatgtggtggatgaagccaacattgaaacccacggcatggtgccaatgaatcgtctgaccgatgatccgcgctggctacccgcgatgagcgaacgcgtaacgcgaatggtgcagcgcgatcgtaatcacccgagtgtgatcatctggtcgctggggaatgaatcaggccacggcgctaatcacgacgcactctatcgctggatcaaatctgtcgatccttcccgcccggtacagtatgaaggcggcggagccgacaccttcgcaaccgatattatttgcccgatgtacgcgcgcgtggatgaagaccagcccttcccggctgtgccgaaatggtccatcaaaaaatggctttcgttgcctggagagacgcgcccgctgatcctttgcgaatacgcccacgcgatgggtaacagtcttggcggcttcgctaaatactggcaggcgtttcgtcagtacccccgtttacagggcggcttcgtctgggactgggtggatcagtcgctgattaaatatgatgaaaatggcaatccgtggtcggcttacggcggtgattttggcgatacgccgaatgatcgccagttctgcatgaacggtctggtctttgcagaccgcacgccgcatccggcgctgacggaagcaaaacaccagcagcagtttttccagttcagtttatccgggcgaaccatcgaagtgaccagcgaatacctgttccgtcatagcgataacgagctcctgcactggatggtggcgctggatggcaagccgctggcaagcggtgaagtgcctctggatgtcgctccacaaggtaaacagttgattgaactgcctgaactaccgcagccggagagcgccggacaactctggctaacggttcacgtagtgcaaccgaacgcgaccacatggtcagcagccggacacatcagcgcctggcagcagtggcgtctggcggaaaacctcagcgtgacactcccctccgcgccccacgccatcccgcaactgaccaccagcgaaacggatttttgcatcgagctggataataagcgttggcaatttaaccgccagtcaggctttctttcacagatgtggattggcgataaaaaacaactgctgacgccgctgcgcgatcagttcacccgcgcaccgctggataacgacattggcgtaagtgaagcgacccgcattgaccctaacgcctgggtcgaacgctggaaggcggcgggccattaccaggccgaagcagcgttgttgcagtgcacggcagatacgcttgccgacgcggtgctgattaccacggtccacgcgtggcagcatcaggggaaaaccttatttatcagccggaaaacctaccggattgatggaagtggtcaaatggcgattaccgttgatgttgaagtggcgagcaatacgccacatccggcgcggattggcctgacctgccagctggcgcaggtagcagagcgggtaaactggctcggattagggccgcaagaaaactatcccgaccgccttactgcggcctgttttgaccgctgggatctgccattgtcagacatgtataccccgtacgtcttcccgagcgaaaacggtctgcgctgcgggacgcgcgaattgaattatggcccacaccagtggcgcggcgacttccagttcaacatcagccgctacagtcaacagcaactgatggaaaccagccatcgccatctgctgcacgcggaagaaggcacatggctgaatatcgacggtttccatatggggattggtggcgacgactcctggagcccgtcagtgtcggcggaattccaccttagcgccggtagctaccattaccagttgctctggtgtcaaaaataa

SEQ ID NO: 118526 - DNA, 1149 bp, Enterobacter cloacae
atggcgcaaaacatttcgtggtatggcatgatagcacccgaagagagtcaattcagggtggtaaatgtgaaaccagtaacgctatacgatgtcgcagagtatgccggtgtctcttatcagaccgtttcccgcgtggtgaaccaggccagccacgtctctgcgaaaacgcgggaaaaggtggaagcggcgatggcgcagctgaactacattcccaaccgcgtggcacaacaactggcggggaaacagtcgttgctgattggcgttgctacctccagtctggccctgcacgcgccgtcgcaaattgtcgcggcgattaaatctcgcgccgatcaactgggtgccagcgtggtggtgtcgatggtagaacgaagcggcgtcgaagcctgtaaagcggcggtgcacaatcttctcgcgcaacgcgtcagtgggctgatcattaactatccgctggatgaccaggatgccattgctgtggaagctgcctgcgctaatgttccggcgttatttcttgatgtctctgaccagactcccatcaacagtattattttctcccatgaagacggtacgcgactgggcgtggagcatctggtcgcattgggtcaccagcaaatcgcgctgttagcgggcccattaagttctgtctcggcgcgtctgcgtctggcgggctggcataaatatctcactcgcaatcaaattcatccgatagcggaacgggaaggcgactggagtgccatgtccggttttcaacaaaccatgcaaatgctaaatgagggcatcgttcccactgcgatgctggttgccaacgatcagatggcgctgggcgcaatgcgcgccattaccgagtccgggttgcgcgttggtgcggatatctcggtagtgggatacgacgataccgaagacagctcgtgttatatcccgccgttaaccaccatcaaacaggattttcgcctgctggggcaaaccagcgtggaccgcttgctgaaactctctcagggccaggcggtgaagagcaatcagctgttgcccgtctcactggtgaaaagaaaaaccaccctggcgcccaatacgcaaaccacctctccccgcacgttggcagattccttaatgcagctggcacgacaagtttcccgacttgaaagcgggcagtga

SEQ ID NO: 118527 - DNA, 294 bp, Enterobacter cloacae
atgcgcaacggcttcaatggtctcgccgcaaaggtgcagacgatgctgaaagatgacccgatatccggccatgtcttcatcttccggggccgcagcggcagtaaggtcaaactgctgtggtccaccggcgacgggctgtgcctgctgaccaaacggctggaacgcggccgcttcgcctggccctctgcccgcgatggcaaagtgttcctgaccccggcgcagctggcaatgcttctggaaggcatcgactggcggcagcctaaaagactgcttacgtccctgaccatgttgtag

SEQ ID NO: 118528 - DNA, 768 bp, Enterobacter cloacae; identical to SEQ ID NO: 40324

SEQ ID NO: 118529 - DNA, 957 bp, Enterobacter cloacae
atgaaaattgcgctggtcattttcatcacccttgccctggcaggttgtgcgctgttatcactccatatgggggtgatccccgtgccgtggcgcgcgctgctgaccgactggcaggacggacgcgagcattattatgtattgatggagtaccgactgccgcgcttgctgctggcactgtttgtcggtgcagccctcgccgtggcgggcgtgctggtacaggggattgtgcgtaacccgctagcatcaccggatattctcggcattaaccatgccgccagccttgcctctgtgggagcactgcttcttatgccatcactatccgtgatggtgctgccgctgctggcctttgcgggcggtatggcggggttgatcttgctgaagatgctggcaaagacccaccagccgatgaagctggcgctcaccggcgtggcgctttccgcctgctgggcgagcctgacggattacctgatgctcctgcacccgcaggatgtaaacagtgccctgctgtggctgacgggtagcttatgggggcgcgactggcactttgtgaagattgccgtgccgttgctcattctgtttttgccgctgagcctgcgcttttgtcgcgatctcgacctgctggcgctgggcgatgcacgagcagccacgctcggcgtgtcggttcagcgcacccggttccaggggctgatgctggctgtcgcgatgacagcaaccggcgtggccgtctgtggcccgataagttttattggtctcgtcgtgccgcacatggtgcgcaggatcgccggcgggcgtcaccgctggctgatgcccgtttcggccctgacgggcgcgttgttgctggtcattgccgatctgctggcacgaatcattcatccgccgctggagcttccggcaggcgtgctgaccgccattatcggcgcaccgtggtttgtctggctgcttgtgagaatgcgataa

SEQ ID NO: 118530 - DNA, 999 bp, Enterobacter cloacae
atgaccgcgctaaaacacccggtgctgctgtgggggcttcccgttgcagtacttattattattttctggctgagtctgttttgctactcggccattcctgtttccggagcagacgcaatccgcgccctgctgcctggacacacgccaacgctaccagaagcgctggtgcaaaaccttcgtttgccgcgaagcctggtcgccgttctgatcggcgcaagcctggcgctcgcgggcacgctgctgcaaaccctgacccacaacccaatggcctctccttcactgctcggcattaacagcggcgcggcgctggctatggcgcttaccagcgcgctgagtccgacgccggttgcaggctattccctgtcgttcatcgcggcatgcgggggcgccgtgagctggctgctggtcatgaccgcaggaggcgggtttcgtcatacccaggacagaaacaaactgatcctcgcgggtatcgcgctgtcggccttttgtatggccctgacccgcatcaccctgctgctggccgaagatcatgcttacggcatcttttactggctggcaggcggagtgtcccacgcccactggcaggatgtctggcagctcttgccggtggtggtcactgcagtccctgtcgtgttgctgctggcgaatcaactgaacctgctcaacgtcagcgacagtaccgcccatacgctgggagtgaacctgccgagactacgtttgatcatcaatatgttagtgctgcttctggttggcgcgtgcgtcagtgtggcaggtccggtggcgtttatcggcctgctggtgccacatctggcgcgcttctgggcaggcttcgatcagcgcaacgtactgccggtgagcatgctgctgggggccacgctgatgctgatggcagatgtactcgcacgcgcgctggccttccccggcgatctgcccgcaggcgcagtgctggcgctgattggcagtccttgctttgtctggctggtgaggaggcgaggatga

SEQ ID NO: 118531 - DNA, 903 bp, Enterobacter cloacae
atgttggcatttatccgttttctttttgcaggcctgctgctggtgatcggccacgcctttgccgccacggttcaggacgaacacggcacgtttacactcgataaaacgccacaacggattgtggtgctggaactctcgttcgccgatgcgctggccgccgtggacgtcagcccgatcggtattgccgacgataacgatgcaaaacgcatcctgcccgaagtgcgtgcgcacctgaaaccgtggcagtccgtcggaacgcgcgcgcagccgagcctggaagccattgctgccctgaaaccagacctgatcattgccgacagcagtcgccatgcggggatttacactgccttgcagcaaatcgcgccggtactgctgcttaagtcccgcaacgaaacctacgctgaaaatttgcactcagcggctatcatcggcgaagtggtaggtaaaaaacgagagatgcaggcgcgtctggaacaacataaagagaagatggcgcagtggtccagccagcttcccacagggacacgcgtggcctttggcacatcacgcgaacagctattcaacctgcatacccaggagacctggaccggcagcgtgctggcttctctggggctgaacgttcccgctgcgatggcgggcgcgtccatgccgtccatcggcctggagcaactgctggcggtcaatcctgcctggctgctggttgcccactatcgcgaagagagcattgttaaacgctggcaacaagatccgctctggcagatattaaccgccgcgcagaagcagcaggttgcttcagtcgacagtaacgcctgggcgcggatgcgcggtatttttgccgcagagcgtattgccgctgacacggtaaaaatcttccaccatcagccgcttaccgatgtgaaatga

SEQ ID NO: 118532 - DNA, 2325 bp, Enterobacter cloacae
atgacgccgttacgcgtttttcgtaaaacaacacctttggttaacgccattcgcctgagcctgctgccgctggccggtctctcgttttccgcttttgctgcacaggttgatatcgcaccgggatcgctcgacaaagcgctcaatcagtatgccgcacacagcggaattaccctctcggttgacgccagcctgacgcgcggcaagcagagcaacggcctgcacggagattacgacgtcgagagcggcctgcaacaactgctggacggcagcggactgcaggtaaaaccgctgagaaataacagctggacgctggagaccgcgcccgcgccaaaagaagatgccctgaccgtggtcggcgactggctgggcgatgcgcgtgaaaacgacgtatttgaacatgctggcgcgcgtgacgtgatccgccgtgaggatttcgccaaaaccggcgcaaccaccatgcgtgaggtgcttaaccgcatccctggcgtcagcgcgccggaaaacaacggcaccggcagccacgacctggcgatgaactttggcatccggggcctgaacccacgcctcgccagccgctcgaccgtcctgatggacggcatccccgtcccctttgccccttacggtcagccgcagctttcactggctcccgtttcgctcggcaacatggatgccattgacgtggtgcgcggtggtggtgcggtgcgttacggaccgcagagcgtgggcggcgtggtgaactttgttacccgcgccattccgcaggactttggtatcgaggcgggggtggaaggtcagctcagcccaacctcttcacaaaacaacccgaaagagacgcacaacctgatggtgggcggcacagcggacaacggttttggcaccgcgctgctctactccggcacgcgcggcagtgactggcgcgagcacagcgccacccgcatcgacgacctgatgctgaaaagcaaatatgcgccgaatgaggtgcacaccttcaacagcctgctgcaatattacgatggtgaagccgacatgcccggcggcctgtcccgcgcggattacgacgccgatcgctggcaatccacccgcccgtatgaccgcttctggggccgtcgcaagctggcgagcctgggctaccagttccagccggacagccagcataaattcaacattcaggggttctacacccaaaccctgcgcagcggctacctggagcaaggcaaacgcatcaccctctcgccgcgtatctactgggtgcgcggtattgagccacgctacagccagagctttatgatcggcccttccgcgcacgaagtgggcgtgggctatcgctatgtgaatgaatcaacgcatgaaatgcgttactacaccgccaccagcagcgggcagttgccgtccggctcaagcccttacgaccgcgacacgcgttccggcaccgaggcgcacgcctggtatctggatgacaaaatcgacatcggcaactggaccatcacgccgggtatgcgtttcgaacatatcgagtcataccagaacaacgccatcaaaggcacgcacgaagaggtgagctataacgcaccgcttccggcgttgaacgtgctctatcacctgactgatagctggaatctttatgcaaacactgaaggctcgttcggcaccgtacagtacagccagattggcaaggctgtgcaaagcggcaatgtggaaccggaaaaagcgcgaacctgggaactcggtacccgctacgatgacggcgcgctgacggcggaaatggggctgttcctgattaactttaacaatcagtacgactccaaccagaccaacgacaccgtcactgcacgtggcaaaacgcgccataccgggctggaaacgcaggcacgttacgacctgggtacgctaacgccaacgcttgataacgtttccgtctacgccagctatgcgtatgtgaacgcggaaatccgcgagaaaggcgacacctatggcaatcaggtgccattctccccgaaacataaaggcacgctgggcgtggactacaagccgggcaactggacgttcaatctgaacagcgatttccagtccagccagtttgcggataacgccaatacggtgaaagagagcgccgacggcagtaccggccgcattcccggcttcatgctctggggcgcacgcgtggcgtatgactttggcccgcagatggcagatctgaacctggcgttcggtgtgaaaaacatcttcgaccaggactacttcatccgctcttatgacgacaacaacaaaggcatctacgcaggccagccgcgcacgctgtatatgcaggggtcgttgaagttctga

SEQ ID NO: 118533 - DNA, 954 bp, Enterobacter cloacae
atgaatccttcgttaaccgattcccgccgtcaggcgctgcgttcagcttcccactggtatgccgtgctaagcggcgagcgcgtcagcccacaacaggaagcgcgctggcaacagtggtatgaacaggatcaggataaccagtgggcctggcagcaggttgaaaacctgcgcaaccagcttggcggtgtgcctggcgacgttgccagccgggcgctgcacgatacccgcctcacccgccgtcacgtgatgaaaggattactgctgttgctcggcgctggcggaggctggcaactctggcagtcggaaaccggcgaaggtctgcgggcagattaccgcaccgccaaaggcgcagtcagccgtcagcaactggaagatgactccctgctcacgctgaatacccaaagcgcggcggatgtgcgttttgatgcgcatcagcgcaccgtccggctctggtacggtgaaatcgccattactaccgcgaaagatgcgcagcaacgccccttccgcgtcctgacccgtcagggccaactcaccgctttagggacagaatttaccgtccgccagcaggataatttcacgcagcttgacgtgcagcagcacgccgtggaagtgcttctcgccagtgcccccgcgcaaaaacgcatcgtgaacgctggtgaaagcctgcagttcagcgcctctgagtttggcgcagtgaaaccgctggatgacgagagtacaagctggacgaagggcatcctgagcttcagcgataaaccgctgggtgaggtgatagccacgctaagccgttaccgcaacggcgtgctgcgctgcgatcccgccgttgccgggctgcgcctgagcgggacgttcccgctgaaaaataccgatgcgatcctgaacgttatcgctcaaacgcttcccgttaaaattcagtctattacgcggtactggataaacatttcaccgctgtaa

SEQ ID NO: 118534 - DNA, 522 bp, Enterobacter cloacae
atgtctgaccgtgccacttccacagcttccttaacgttcgagtcgctttatggcacccatcacggctggttgaaaagttggctgacgcgcaaactccagtctgcctttgatgcagatgacattgcccaggacacttttttgcgggtaatgagcagcgaaacgctctcgacgatccgcgatcctcgctctttcctgtgcactatcgccaaacgcgtgatggtggacctgtttcgccgaaacgcgctggaaaaagcgtatctggagatgctggcgcttatgccggagggggtagcgccttcacctgaggaacgcgaaagccagctcgagaccctacaactcgtcgacagcatgctggacgggctaaacggaaaaacacgtgaagcgtttctgctttcgcaactggatggcctgacatacagcgagattgcgcacaaactcggtgtttccgtcagctccgtgaaaaaatacgtggcgaaagccgtcgagcactgcctgctgtttcgtctggagcatgggttatga

SEQ ID NO: 118535 - DNA, 609 bp, Enterobacter cloacae
gtggacacccatccaaagcatctgccggccgatgaacgtcgtgccgtaactgtcgagtccgtcgtggcgcttgccggttcacaaaacccaagcgagataaccactgcggctatcgctaaacacatgaacttgacccagggtgcgctgtttcggcacttcccgaacaaggaagccatttggcaggcggtcatggagtgggtagcagagcgcctattagccagaatcgatcgatccgcacaaggaatcgagtcgcccttggcagccatggaggcgatgttcatgagtcatatcgaattcgtagctgagcacccaggcgtgccaagaatgatgtttggtgagcttcagcgtgccgaatcgacaccggccaagcgcatggtgcaaaccttgattcagcgctacggcgaacgtttgcatcgtctcatcgagaaaggcaaggccagcggcgagttgtctccctcgcttgacaacgaggcggcggcaacgctgttcattggcacgatccagggcttggtcatgcaatcgctgttggcgggtgatgtgggacgtatgcaccgcgatgcgccgcgcgtctttgcaatttatcggcgtggcataaggagtgcgcaatga

SEQ ID NO: 118536 - DNA, 1152 bp, Enterobacter cloacae
atgaaaaagttacccttgcaaggccgcaccctggcactgcttgccgtcatcattcctttgctggtgctttttatttatgtcggtctgcgatcagggccgctcgccccggtcgctgtgacggtggcaagcgtggaatcacaggctatcacaccggcgctgttcggcatcggcacggtggaggcgcgctacacctacaagatcggaccgacgtttgccgggcgcgtcaaacgcctggaggtgcatgtaggcgaccaggtcaaggccggacaggtgctcggcgagatggagccggtcgaccttgatgatcgggtgcgctcacaggagtctgtattcaagcgggcggaagcggctttgcgcgaggcagaagcccggcaagcctacgcgcaaacccaggcgcgccgctatgagcaattgtttgcggtgcgctcgaccagcgaggaaatcgtcaccaccaagcggcaggaactgcagatcgccgatgccgccctatccgccgctcgggaagatattgcccgggcacgctccgaccgcgaagcactcgtcgcgcagcggagcaatctgcgcctgatcgcgccggtcgacggtgtagtcgccgtgcgcgatgccgatcccggcacgaccatcgtcgcgggccaggccgtggtggaagtgatcgaccccaagagtttgtggatcaatgtgcgcttcgaccagatcagcgcatcggggctggctggggggctgccggctcatatcgtcctgcgttcgcgtggtggccagaccttgaaaggtcgcgtgctgcgggtggaacccaaggccgacgcggtaaccgaggaaacgcttgccaaggtgacattcgataacaaaccagaacctttgccaccagtgggtgaactggccgaagtcacggttgacttgccggcgctcccggccgctccactgatccccaacgctgccgtccagcgtgaaggcgataaagttggtgtctggcaaatcgtggatggtgatctgcatttctccccggtcaagctcggcacttccgacctcaatggttacgtgcaggtgcgcgaagggctcaagaatggggaccaggttgtgacctatagcgaaaaggcactgacggcgcgcagccgcatccatgtggtcgagcatatcccgggagtttcacgatga

SEQ ID NO: 118537 - DNA, 1206 bp, Enterobacter cloacae
atgatcagcctggccggccgcgacattctccatgcctgggggaaattcgtcttcaccggcatcggtctgggtctgctgatcggcgtcaccctagtcatggctggggtgtaccgaggcatggtggacgacggcaaggcgttgctcgacaacagtggcgctgacctttgggtggtgcaaaaggatactctgggtccttatgcggagtcgtccagcctcaacgatgacgtgtatcgcgccattctcgccatgccgggagtctcacaggctgcgaacgcgacctacctgaccatgcaggtacgcaagggcgagagtgatgtacgcaccatggtggtcggcatcgcgcccggtgcgttgggggctacacccggatggcctccttatctcgtcgctggacgccagatcacgcgcggtcactacgaggctgtggccgacatcgccaccggcttcaaactgggagatcgtcttgccattcgccgcaatcattacaccgtcgtggggctgacacggcgcatggtgtcgtccagcggcgacccgatggtattcattccgctcaaagatgcccaggaggcccagttcctcaaggacaacgatgccatctggcaaagccggcgtcgcaccgaagccaacccggtcttcaatcgacccggtgatccaggtttgctggatgccgtgattgcttcacagagcagcaacgcgttcgtcaatgccgtgctggtcactctgaaacctggtcatgcgccggacgaggttgccgaatccatccagcgctggaagcgtttgacggtctacacccgggcacagatggaagacatcctcgtcggcaagctgatcgccacctcggccaagcagatcggcatgttccttgtgattctggccatcgttagcgcggccatcgttgccttcatcatctattcgctgacgatggacaaaatccgtgagatcgcggtgttgaagctcatcggcacacgcaaccgaaccatcgccgcgatgatcatgcagcaggcgctcgccctgggcgtgattggcttcgtggtcggcaagatcacagccaccttttcagcaccggcttttccaaaatatgtcctgctcacgccaatggattctgtcgccggtttttttgccgtgctcgtgatctgcgttctagctagcctcgtcgccattcgcatagcactcaaggtcgatccggccgaagccattggaggttga

SEQ ID NO: 118538 - DNA, 711 bp, Enterobacter cloacae
atgagtagcaaagggatacacatcgaaagtttaagcaagcggtatggcgatggtgacaccgctgtctttgccttgagagacgtgaatatgcatgttgcgcctggtgaagtggtgggactgatcggcccttccgggtccggcaagagcacgctgctcaagtgtctgggtgcggtgatcgaaccgaccgccggtcgcatgacgctgggcgatgaagtgatctacgccgatggctggaaagtccgcgacctgcgcgccttacggcgtgacaagatcggtttcgttttccaggcgccgtacctgattccgtttctcgatgtcaccgacaacgtggcgctgctgccgatgcttgcaggcgtcgcgaatggagagtcgcgcgcgaaggcactggaattgctcacagcgcttgatgtgcaacaccgagctcgcgcaatgccctcgcaactctccggtggcgagcagcaacgggtcgccatcgcgcgcggactggtcaatcgtccgccggtgatcctggccgatgaacccactgcgccgctggattccgagcgcgccatggctgtaatccgcatcctcaacgacatggcccggaagttcgagaccgccatcatcgtcgtcacccatgacgaaaagatcatccccacattcaagcgcatctaccacatccgcgacggcgtgacccatgaggaagctggcgaagggcgggagttcgaatga

SEQ ID NO: 118539 - DNA, 528 bp, Enterobacter cloacae
atgacccaccgcaaacacagccacgcatttggaactatcaccctgaccgttacggcctgcctgcttttatggggttttcagttgccagcttgggctggtgacgctacccaggttgagccactggcgctacgcaagatcatgcaggaactcgggcgcaacatgcaggctattaccggtgcgatttcgcaggaggaatgggttcaggtcgttcagctcgccccaaaagttgctgcacaccccgagccaccgcttactgaaaaaatgcgcatccttgcttacctcggcgctgatgcgaccaagttcagaaactttgacgcgcagactcacgaggcggcgctggccatgaagctggctgctgcgagcagcgacggcaaggcggtgatccaatcattcgccctatctgtccccgctggggtgggagcatatcaacctgaccggcgattacctatggcgcagcagtgccaaggtcggtgcggggaagttcaggccattgcgaccgctgccaccggcttagcgtgctttatttaa

SEQ ID NO: 118540 - DNA, 321 bp, Enterobacter cloacae
atgccaagacccagaattccccgtaacatctgtggccgccctgcggatacctgttttaagcccaatgcgcgaccgatgagccagcttgaacatgttcatttaaaagaagatgagtttgaagcgttacggctagtcgatttactgggcatgcaacagcaggaagcggctgttgcaatgggggtttcaaggcagacactggccaatgtcctgaaagcagcccgttttaaggttgtggactgtctcactcagggcaaggccttaataatgcactctgaaagggaaggagttacacaagatgatcacagccattccagtgaatga

SEQ ID NO: 118541 - DNA, 462 bp, Enterobacter cloacae
atgatcacagccattccagtgaatgacgaccgggtagcaaatcattttaccaaagcgagtcaccttgtcctggtggatgagcgcggtgtggagctcagccggacagaaaatcccgcgctgggcgcagattgttcaggtaaacggaagctggttgacctgctggttcaacagcaagtcagccgcgttgtggtccgtaacatcggggaacggatgctgggtaaattactggggcatcagatcgcggtgtaccagactgactgtggtcgtcgtttgttcactgaactgtgtgatccggatacccgtgttctgactgaactgaataagccggagcagggacgccagtcctttcatcatgaggtgaaagggaaaaaatgctgtcactctgacgggaacacagcagaaaatgcgtgccagggtgggcgtcagcatcatcacggaaacgggcgctgttgccattcatga

SEQ ID NO: 118542 - DNA, 168 bp, Enterobacter cloacae; identical to SEQ ID NO: 83459

SEQ ID NO: 118543 - DNA, 438 bp, Enterobacter cloacae
atgaattgttatcttgatgccagaaaggcccatacctgttgtatggtctgtagttcccgcgacaacaaccctgatacggtgaacttaatgttttcagagcacccggatggctctgtatgtgcggactacacggccaatcacaggcatcaggggtatacgggtcttttacatggcggaatgacgagtaccctgctggatgcagcaatgactcattgtttgttcatgcagggtgtgcaagccctgacggctgaactgacggtaagattcatttcacccgtttgtaccggagacaaactgatggtatgtgccagactgcttgggcaacgcagggggatttacctgcttgaagcatggctgacaaaaggacagcagacagtggcacgtgccacggcgaaattcattgttccgtcgcaggatattgctctggcgcatcgctag

SEQ ID NO: 118544 - DNA, 477 bp, Enterobacter cloacae
atgagtaaacaaatcattgatattggtattgctgaatcatcccgggtggagattgcagacggtctgtcccggcttcttgctgacacctataccctgtatataaaaacacattactatcactggaatgtaactggccccatgtttaatagcttacatttaatgtttgaaaatcaatacaatgagctggccaccgccgttgatgatattgctgaacgtatacgctcgctcggatgtttcgcgcccggcacatatcatgaattttcacgtttaactgcggttaatgaagacaaggatattccggcagcaaaaaacatgattgaaaatcttgtccagggccaggagaccgtggttaaaaccgcacgctctttattcccgatcgttaatagtgggaatgatgaagccactgcggatctgcttacacaacgtatccagttgcatgagaaaaccgcctggatgttgcgtagcctgcttgaatga

SEQ ID NO: 118545 - DNA, 264 bp, Enterobacter cloacae
atgatgtcacccggtagcagcagagataaacagtttgtcagccacaggccatttctgacgcagcagtatcactgcgtgcctgtggctcttttatctgaccggaatagtataaaaaccgataaatcaaccagtaaacctgtgagcgggcaagtgattaaacagtccggaaagggattgccggcgggtatatccgaatcactgtcgttttcccgttacagtttcgtccaggcacttcatagcctcaacaagtttatgatccactga

SEQ ID NO: 118546 - DNA, 351 bp, Enterobacter cloacae
atgcaaatgaatgaagacacaaaacgtcagactgatatgaaaaatgcggccctgagggcagcggatgttttacggggactagccaacagcgaccggttgctgttgatgtgccagttaagccagggagaagcgaatgtgtccgaactcgaagcggcggtcgggattactcagccgacgttgtctcagcagcttggcgtcatgcgccgcctgaagctggttgagacccgacgggctggtaaaatggtatattaccgtatcggggataaccggatcatgacgttgttaaataccttatatactctttactgtccgcaggccgggacaggtaaaggaaaccataacaacgaataa

SEQ ID NO: 118547 - DNA, 1659 bp, Enterobacter cloacae
atgaaaatagtgatagttggtggtgttgccggtggcgcatccgctgcagccagggctcgccggttgtcagaggatgtcagtattgttgtgtttgaacggggaagcgatgtctctttcgccaactgtggattgccttatcatataggcggaaatattcccttacggcagtcacttattcttaagactccggaggattttaaatcccgctttaacatagacgtccgtacctgccatgaagtgacgtcagtggatccggttaataaaactgtaacagttaataatttgatctcaggcgagatccataccgaagtatgggatcgtctgctcctcagtaccggagccgcgccggttgtccctcctttgcccgggctacagcaagagggagtctttacgctccgaaatcttactgacatggatgctatcctggcgtggattgagcaacataacgtagctcacaccacgcttgtcgggggggggttcatcggacttgaagtgatggaggctctgagcgaacgggggatccgtgtcactctgctggagatgggggaacaggttatggctccggttgatcctgaaatggcatcagtcctgcatcaggaaatccggaatcatggcgtggatctgcgtctcagaacggcactcaccgaggtactgcggacagaaacgggattccgcgttgcactgtctgacggtggctttgtgcagaccgacatggttattctcgccatcggggtaaaacctgagaacagccttgccacattagccgggctcgaagtgggtaaacgtggaggcataagtgtcaatgcctgtatgcagaccagtatccctgacatctacgccgtgggggatgcagttgaaacacctgaccttgtttttcaggaacccgctaatattcctctggctgggcccgccaaccgccagggacgcattgctgctgataacatgcttgatcaccacagcctttaccatggcagtcaggggacatccatttgtaaggtattttcgctgagtattggcagcgtcggtgcgaatgaaaagcaactgaaagcccacggcacccgatacgagaaggtttacgtccatgctgctgatcatgccggttactacccgggggcaacgatgatcagtcttaaactgctgttcagccccgatactggcaaaattctcggggcccaggcgtcagggaaaaaaggggttgataaacgcatcgatgtcctggctgtcgcacagcgtgcgggacttaccgtcaacgatcttgagcatctggagctgacttatgctcctccttttaacagtgcaagggacgttgttaaccaggctggaatggtggcggcaaatgtcatcaagggagatacggtcatctgtcatgtccgcgatgtgttacaacgggtaccgggtagttattgtttacttgatattcgctctcctgcagaactgaaacaatttggcgaatatcctgacgcgctatccattccactggattccctgcgggagaatcttgaaaaagtgcctaaagataaagagatttttatagggtgccagagtggcctgcgcgggcatgtggcataccgtattcttcaggcccacggcttcaggacatataatctgagtggtggctttataacctggcaggcggtaacggagtcaataagtaaataa

SEQ ID NO: 118548 - DNA, 303 bp, Enterobacter cloacae; identical to SEQ ID NO: 96991

SEQ ID NO: 118549 - DNA, 294 bp, Enterobacter cloacae
atgcccgccctgaactccgggcacactataggtcacatcaccgcaccacacctgatttggttccgttacggcgaactgtcgctcaagatgattcgggatagcaacgtgctcatgaccgccacgcttataccggtgagtcggctgctggcaactgaccagccccagctctttcatgagtctgccagcaagccagcgccccatctggtagcctctctgggttgccattgtggcgatgcttcttgctccggcagagccgtggctgatgccatgcagttcaagtacctgactgcgtaa

SEQ ID NO: 118550 - DNA, 423 bp, Enterobacter cloacae
atgaaattatttgagatggaaggttttctgcgtggcaagtgcattccacgcgatctgaaggttaacgaaaccaacgccgagtatcttgtgcgtaaatttgccgaagcagatgccatgtgcgcggcgctggctgcggagaatacggggatgaaggctaagggccgcgagcttctgggtgaagcgtgcgccgtgtacgcaaagttcaataaactgatcgacccggagatcggggattttatcgatggtcagacgcttcatgaattccagtatgtgctcgactgcgaaaccccggccaccgacgctttcctggcggaagtgcgggcgcagggcgtagagatgctcaccaaagagatgcatgcagatatcagcggtgatgatgcacgcgagttcgccgacaatcttcgcaaaggagtgcagtcatga

SEQ ID NO: 118551 - DNA, 576 bp, Enterobacter cloacae
atggacagcttaaaacaacgcatcgttgattacgtgggcgctaaccagcctgttaagcgcgctgacctcatcgtggtgattggcatcagtggcaaggggctggatcgggaaatcgctgcactgcgcggcctggggctgattttcagcatggctggctttggttacttcaccagtgaggctgactatcaggaatggcgaaaaggtgctggcgctctccacctgaagaaccgggcgatgaatggcgcattcagcagtgcagcagcacgaagagtgagcgatgagagctatccggcgcggatcgcatctgtactgagtgatggcagcaaactgggagcaactcaaattgctgaggccatgggtaccagttaccggagcatctccagcgttatctcggtgatggttaactctggcgagctgaagtttgaaggcccgaaaggccaccgcgtttattcgctggcacaggcaaaaaagaaaactggccgccgtgctgagtcggtgaacgtgatctgccaggagtgccggaacagtccggctatgagaagggtattgatggtttgggggagggtaggggtatga

SEQ ID NO: 118552 - DNA, 690 bp, Enterobacter cloacae
atgaaatctcttgcagagcagatgcgtaaccacgaccgcgagcagatgagccgcatggcccacaacctgccagagcagtaccaggagcgggcgccggtcgagcaggtggctcaggtattcaacaagctgttcaacgagctgcgcgccgcgttcccggccagcatggcgaacttccgcagtcaggacgacctgaacgaattccgccgtcagtggctgctggcgtttcaggagaacgggatccactcaatggcccaagtcgatgctggtatgcgcattgcccgccgccaggagcgtccattcctgccgtcgccgggccagttcgtagcatggtgcaaacagagcggcggggtgctgggcgtaaacgttgaccaggtgatcgccgaatactgggactggcgtaaccgctcgttcgagttcacttccagtgagcaattcccctggtcccagccggtcatgtaccacatctgcgttgagttgcgccaccgcagcacagagcgccagttgacgcatggcgagcttgcgcatgaagccggtgatctgctggacatgtgggagaagcgcgtcacagagggtaaaccagtgccgccagtgcgccgggcaattgcagcaccggctgccgagcacgggccgacgcctatccaactgcttcaggcgaagtacaaccgcaacaagtcgaacgggatggtgtga

SEQ ID NO: 118553 - DNA, 942 bp, Enterobacter cloacae
atggagaaccagaaatctggttacgtcccgttgtaccggagcatcaagaagaagtcctgggctaaggatgttttcctgcgcgcgctgtgggagaacctgctcattgacgcagccagacagccatacacggcattcttcaagggcaagcaatggcctctgcaacccggtcaactggtcgtcactgctgcggatctaggccttcagttgtgtgaccgccagggcaacccgacaagccgcgacgcagtggagagaatgctttctgttttcgtccgcgaagggatgatttccatcgagggagagaagcgaaaaggcagggtgatcaccatcacaaattacgtcgagtatgctcaaaaaatggacgatttacccgcacataaagccgcacatacaggcgcacatgacgaagtcagtaatggagcggcttcagaatggtatgccgcacataaggccgcacaattccccgcacatcatgaacaagaaggtaataacaacaataaaaacattaaaagatcttcgtccgagaattctgacgaatcctctgacgcacgtctgaagaaatttttatcagctcatccagaagctgcggtttacaccccatccggtgcgaagtggggatcggctgaagacctcgagatcgctaagtggatttcctccagggtgaagctgattaacccaacctgcaaagccccggacatgacctcctggtctaacaccgttcgcctgatgcgccagatagacaaccggtcgcaccaggacatctgcgcgctgtatgactgggcaagcaaacaccacttctggcagaccaacatcctgagcccggaaagcctgcgtaagcagtgggacaaactgacaatgcagcgtaattctggaggcgagcagcgcgcagctaagccggatctggactttaacaacactgactgggcctatgaggtgattcgatga

SEQ ID NO: 118554 - DNA, 594 bp, Enterobacter cloacae
gtgaagaacttctctatcgaaaacctcaagagggtgcctgaattcatcagttatgaccctgagacaggacatttccgccgcctcaaggccataggaaatcgatttaaggttggcgagattgcagggacggttaatcagcagggctatgtccgaatcatgatgttcggaatggggtttcaagctcaccgcctggcgttctatttcatgactggtgaattgcccactgatgatttagaggtagaccacatcaatggcgatcgcagcgataacaaatgggaaaacctccgattagttacgcacgccgtaaacatgcagaactcacgcacacctaaacataacaccagtgggcatcctggagttcgatacgtcaagactaaccagaaatgggcagctcgtatttcggttaatgggcgaatgcttcagcttggcgaatacgttgaaaaacaggatgccattgaaagttatctcaaggcaaaaaggaaaatgcatgaagggtttattgggattgaggcgaaagctgcggtgctcgaacaccaacagctttctggtgcaacaaacgtcagtcaattgcgaggtcattatgacaaacgctaa

SEQ ID NO: 118555 - DNA, 543 bp, Enterobacter cloacae
atgcattcacttgcgtatcaacacaataccggaatccacccgggagcggtgataaaccgcgctcaacctaaggcggcaccagaccacgaaaagatccgcgatgcggtccgggcatggtcgtcggcgctggacaatcaggacgtcgtttcggcgctgatcatcaacgaataccgggagcagggcgggaccgccatcagcttcccggaagacatcagcagggcgcgccagaaactttttcgctttctggataaccgtttcgactctgagcagtaccgcgagaacgtacgccagctgacgcccgcaatcatggccgtgctgcctgttgagtatcgcactcgcctgatcggtgccgattgcaaaatgtctcgtctggctgaagccgagaaagaactcgccgaggctaaacaggccgtgctgctggacgctccagagcatcagaagctcaaagaggtaagcgagggtatagcatcgctgttccgtctcatgcctgagcaggtaggcccactgatgacgatggttacatcgatgctgggggttatgtga

SEQ ID NO: 118556 - DNA, 216 bp, Enterobacter cloacae
atgaacaatatcgccaacgaacgtaagaagcttggcatcactcaatcagagttagcaggttcgtgcggctggaaccagtcccgccttgctaactatgaagctggcatacgagcaccagacctggattcgtgccgccgcctggttgaggcgatgaataagcttgggagcaatacatctctcgatgcgttgtttccaccaaaaaataacgccgcctga

SEQ ID NO: 118557 - DNA, 642 bp, Enterobacter cloacae
atgagaatgaatagaatcgaagatatagcgggccgcattaagcgacttcgcgaagataaagggctgtcacaaaaggctctcgcagagctttgcgggtgggcctcgcagtcacgcatagggaattacgagtcaggcaccaggagcgttagcgttgatgatgcaactgtaatagctaaggcgctgggggttgcgcctgccgagctgctttttggggatgactacaaaggcccttacaagccaggtgataaatacccagttataagcaaggtgcaggcaggagcatggtgcgaagctgttgagccgtacacccttaaagatatcgacctttggcttgaatcagatgctcacattcagggggaggcgttctggctgcaggttgatggtgactcaatgacagcaccggcgggtcttagcatcccagaaggaacctttgtcctcttcgatactgggcgcgaggcaatcaacggcagtctggtaatagcaaagctatccgattcgaacgaggcaacatttaagaagttagtgatcgacggtgcgcagaagtacctgaagggtttaaatccacagtggccattggtagcggtgaatggtaactgtcgaattatcggtgttgctgtagagacgaagatgcggctggtctga

SEQ ID NO: 118558 - DNA, 762 bp, Enterobacter cloacae
atgacacagtttcaacttgcgttaatcgccagggaagttgatggagaagtcatccatcttcgcaccaaagacggatacatcaatgccaccgcaatgtgcaagtctgcagggaaactgcttgctgactatacacgactaaaaacaacacaagatttttttgatgaattatcacgcgatatggggattcccatatcggagttaattcaatcatttaaaggcggaagagcagagaatcaagggacctgggttcatccagacatcgcaattaatttagcgcagtggctatctccaaaatttgcagtgcaagtttcaagatgggtacgtgagtggatgtcaggcgaaagagctcctgccgaacttcctattcatcttaagcggtatatgacaaaccgaggcagggttcctcatacgcacttttctatgcttaatgaactgacgtttaacttggttgcgccacttgagcaggccggatatacgctgccagaaaaaatggtccctgatatttcagaaggtagggttttctcgcaatggctccgtgacaaccggggaattgagccgaagacattcccaacatataaccatgagtatccagatggccggactttcccggtacgtctatacccaaacgaatatcttgcagatttcaaacaacacttcaatgaagtgtggctgcctcagtacgctcctaaatattttgctgaacgagaccaaagggctttgacgctgattgagaaaatcatgctgcctgatcttgattcctaa

SEQ ID NO: 118559 - DNA, 198 bp, Enterobacter cloacae
atggttctggatgaagagcgtataagcatgaaaattcaggcgatggggcgggcggtgatggaattgtcactggctgatttacccatgacccagcaaaacatcatcgacaagctgaagcagtaccggaaggaaacaggaaacgtgatagggaagggagctaacagggatgctgcggagttggtgaggaaggggcaataa

SEQ ID NO: 118560 - DNA, 576 bp, Enterobacter cloacae
atgggaagcgagttaacgtttcaggatcgcactgtcgtgccatttgataacggcgacgggaaaatctggttcacaacagaagcgctggccgaccttcttggttatgcaaacgccaataaggtttccaacatctacaaccgccacaaagatgagttcacggatagtatgacgaccgtgaccaaagtgaggaaggatgggataaacaatagcttacgtgaagttgaaatgcgtattttctccccgagaggtgcgcacctcatcggcatggtctcccgtaccaaagtagccaaagacctgcgtatctggatgcttgacctggtagaaaaagaatctggcattcagattgccccattgaatgtctcaggccttgccaaactgacagggcagcagattcacgatcagatcgcgtcattcgatgagttgtcttttaaacatcgcggacaaaaaggcagcggcttgctcgcgcagcgtaagaaagacaaaaagcgcgttaaggaagcgactctcctcgcactccagttaactcagttcagcattccagatcttggtgaattctcagaaggtttccctgtatga

SEQ ID NO: 118561 - DNA, 207 bp, Enterobacter cloacae
atgagcccgcaggagttcattcacaaaaacatcacgtccgaacttaaaaagctcggttatgacgagaatgcggcgatgactggcgcagatatggcggtcgatcattaccgcaggtgctcccaggccagtcgaaaaggtcgaatattcgacgactgtctttatatcgctaagcaatgggctggaaagcacaagtccaaacaaaaatag

SEQ ID NO: 118562 - DNA, 210 bp, Enterobacter cloacae
atgagtgacttggagtttggcttaaagatatacgccttatggtttgtcgggatgtttctgctcggcatagcaatcaactcgctgacgaaaaaagaacatcgccagccactttcaaaactagccattgaccatgtacgcatgtcttccgcaataaccattgtgggcctgattgtgtgcggtatgggctggttcttattcaaggtggtgtga

SEQ ID NO: 118563 - DNA, 159 bp, Enterobacter cloacae
atgaaagtcacccacaacggcaagcagtacaccgccaaaaagctcaacgataacgagtggcaactgacatcggtatcggcaccacgcgacaagctgactctgaatcgctggcagatgcatatcgctggcctcctaaaacaggttgaggtgaaggcatga

SEQ ID NO: 118564 - DNA, 141 bp, Enterobacter cloacae
atgatcaatcatcacctgctgcgcgccgcgcagagcaaagcagccattgccctgtttatcggtgatggcgccatgtggatggcagcctacgatgaaatgaaggttgctatcggttatccgtggcatagaaaagcagcctaa

SEQ ID NO: 118565 - DNA, 480 bp, Enterobacter cloacae
atgagcgggacggtagcgaaccggccagcgcttaaaaagcttctgcgaacactgaatgagggcgatacgctggtagtgtggaagctggatcgcctcgggcgaagcatgcggaacctggtactgctggtagacgaactccggcagcgcggcatccacttcaaaagtcttacggacagcatagacacctccagcccaatggggcgtttcatattccacatcatgtcagccctggccgagatggagagggagttaatcgtggaacgcacccgggcaggactggcggctgcccgggagaaggggcggataggtggaaggcgcccgaagttaacccctgagcaatgggcgcaggctggacggttgatcgcaaacggagtggacagaaagcaggtggcaattatctatgatgtggccgtatgtactttgtataaaaaattccctgcgtccagttttatcaatagcttatccactgaggaaaattga

SEQ ID NO: 118566 - DNA, 240 bp, Enterobacter cloacae
atgccacgcacagcagacatacatgccgcttttatcgcggcaatagaggttaacccaaaagggtaccgctatctacgaacagacagcttcatcaagaagttgcgggagtttaactggcactttagtcgcaccgaagcgaactcgtggatagagcgctaccagtccggctttgcagataagacaactgacggcagtgataatagatactggatactgcgtaacatgggtagggtgcactga

SEQ ID NO: 118567 - DNA, 318 bp, Enterobacter cloacae
atgggatttgcatcaccagctgctgattacgttgagcgccagctcactcccgaaattctgtgcaacatgggtgccgatagccgggtacttgagactgatattggctttgcagtcattgaaccagccacgaaaaaaactccaggtgatgtgttgttaattctgtgcgacggccacacacagtttgcaaagctcatgggtgaagcgctaattactaacgatggcgaagcgatagaaggttccgcgttggagtacgtagaggtattggggcgggttacatttttcatcaaccgcgtgataagtgatgattgtccgttctga

SEQ ID NO: 118568 - DNA, 1020 bp, Enterobacter cloacae
atgaagcagcgctctatgttaaaaaatgcacccaacatcgaaacgctaatgagtaacacccatcatgcgccgcaaaaaacacagtctgtttcgcctatggtcggtgacttgcagagcaaattgagttcgttgtccgggaacagtattacgctgcctgtttgcggtcgtaacgtggcctttaaactggaaaccattcctgctgataaggttgagatggccacaatggtttggctcggcaatgaacgagatcaggagttgctgaacgaatcagcgctggccgaccttattccgtcatttctcacttccgggcagcagaaccccgcgttcgccagaagaacgtcaggcattatagagattgccgatggctcacgccgccgcaaaacagccatcatcacgggcagcgagtatcgagttctcgtgggagagctggatgatgagcaaatgcagtggttatcgcaagtaggtaacgactatagaccgacgagtgcatacgagcgtggaaaacggtacttacgccgactgaaagaatttgatgggaatgtgaaagccctagctgaagcggagggtatcgacagaaatatcgtgaaccgctgcatgaatactgccggattgccgaaggagatcctgtctatcttcaaacatccgggggaactatcagctcgcgccggggatgcattgtcaaaagtttatcaggggaacgagcaggccatgctcgatactgcacgacagctgctccgtatgaagcaagcgggtgaagattttgaacccgcgagaattatacaaatactacaagacgtaattctggttgaaaagaaaggcgaacctaaatccgaaaaaacatatggagatggcgttatcgcaaaatataagggtaatttcgtcaccttaaaaatagataaccgtaagataccttctaatttaatgaaaaaaatagaagcattacttgaatcagaacttggtgccgagaaggttaaccagaatctcgataaattagaaaacctgataaaaaataaaaaataa

SEQ ID NO: 118569 - DNA, 1164 bp, Enterobacter cloacae
atgtcgttaatcaatttgctacatgactgcatcaatcgcggccaggaaatgacccgcgctatagccattgctcagttcggcgatgatagcccagaggctcgccgtataactcgccgctggggtatcacagaagttgctgacctgattggcgtaacacctcaggctatcagggatgcggaaaaagctggccgtctgcctgctcctgattttgagatgaggggccgagtagagcgtcgagctggctacactattgaccaaattagcaatatgcgaagcgtgtttggcaatccaaaccagcgaccagacgataaaaacccggttgttctcgccgtgatgtcgcataaaggcggggtttacaaaacctcttcagcagtacaccaggcgcaatggttagccttacaaggacaccgcgttcttcttgttgaagggaatgatcctcaaggaacggcatcgatgtaccacggctatgttcctgatttgcacattcacagagacgatactctgcttccgttttacctcggtgaacgtgacaacgctgaatatgcaattaagccgacatgctggccaggcctggacataatccctagttgccttgctcttcatcgcattgaaacggatttgatgcagcaccattcagagggtaagttgcctcatccccctcacctgatgcttcgtgctgctatcgagtctgtatgggataactacgacattatcgtcatagacagcgcaccgaacttaggaacgggaactattaacgttgtctgtgctgctgacgtcatcgttgtagcaaccccggcagagctgttcgactatgcatcagttcttcagtttttcacaatgctgctcgacctgcttgaaaccgttgatttgggaggatttgaacctatggttcgcttgctcctgacaaaatacagtctgacaaccggcaatcagtctcgatggatggaagaacaaatacggaacacttggggcgctatggtgttgcggcaggttgtgcgggtaactgatgaggttggaaaagggcagataaaaatgcgcaccgtatttgagcaagccgcaaaccaaagatcgacgctcaatgcctggagaaatgcggtggccatttgggaaccagtctgcaaagagattttcgaagacctaatcaaacctcggtgggaggactaa

SEQ ID NO: 118570 - DNA, 1164 bp, Enterobacter cloacae; identical to SEQ ID NO: 118569

SEQ ID NO: 118571 - DNA, 1020 bp, Enterobacter cloacae; identical to SEQ ID NO: 118568

SEQ ID NO: 118572 - DNA, 318 bp, Enterobacter cloacae; identical to SEQ ID NO: 118567

SEQ ID NO: 118573 - DNA, 240 bp, Enterobacter cloacae; identical to SEQ ID NO: 118566

SEQ ID NO: 118574 - DNA, 480 bp, Enterobacter cloacae; identical to SEQ ID NO: 118565

SEQ ID NO: 118575 - DNA, 1608 bp, Enterobacter cloacae
atgaagagtacaccagaaaccgttatcggcgtagacgtcggctccggcagcgttcgcgcgggcattttcgatctcagcggcaggctgctttcccacgcgacgcagaaaattgccaccgtgcaccgcagcggaagccgcgtggagcagtccagcgccgagatctggcaggccgtttgccgctgcatccgcgaggcgctggcgcgctccgggacgactccgcagagcgttgccggcatcgggtttgacgccacctgctcgctggtggtgttggacaacaatggcgaaccgctggcggtcagccctgacggtgaagcggaaaacaatatcatcgtctggatggatcaccgtgcgacagaccaggcggagcgcatcaacgccacccatcatccggtgctggactacgttggcgggaaaatatcgcccgaaatggagacgcccaagctgctgtggctgaaagaaaaccaccgagaggtctacgatcgcgcctggcaatttttcgatttggccgatttcctgacctggcgcgcgaccggcgatgtcacccgttccatctgtaccgtaacctgtaaatggacgtggctggcccatgagaatcgctgggacccggactatttccgcaccgttggcctggacgagctggccggagaagattttgtccgcatagggcagcatattgccgcccccggcaccccttgcggcgagggcttaacggagcaggccgcgcgtgagatgggcttgctgccaggcacgccggtggcggtagggttaattgatgcccacgctggcggcatcgggacgttgggcgttggcggcggcgcgctgaacaatcttgcgtatgtctttggcacctcatcgtgcaccatgaccagcgccgagagcgccgtttttgtgcccggcgtttgggggccttattttagcgcgatggtacctggactgtggctgattgagggcggacaaagcgccgcgggtgccgctatcgatcggttattaagtttccatcctgccgcaccgcaagcgcgccagctggcacaggagtcagacctgccgctgccggtttacctggcggacaggcttttacagaccttcgccaccgcctcagaggcggtgaacctggcagcaggactgcacgtggtacccgaatttctgggtaaccgcgcgccctttgccgatccccatgcgcgggccacgatctgcgggctgggcatggagaacgatatcaataacctgatggcactgtatgtggccggtctgtgtggtatcggttacggtttgcgacaaatcattgacgcccagcgtgaatgcggcgtacagaccgaaaatatcgttatcagcggcggcgcgggccagcaccctttcgttcgccagctgctggcagatacctgcgggctgccggtgttagcgacccaatgcagcgaaccggtattactgggttcggccattctcggggcggtggcgggaaatatagcgccttcagtgaccgatgccatgaaacaatttacccacgtggataaatatttctatccgcaagcgaactttcagtcccttcatctgcgtcgatacgaggcttataagcagttacaacaaactgcgacagtaatcagagaataa

SEQ ID NO: 118576 - DNA, 750 bp, Enterobacter cloacae
atgaatcactctgtcccctccatgaatagttcccttcagggcaaagtcgctgctatcactggcgccgcctcaggtattggcctggagtgtgcaaaaacgctgctcggcgctggcgctaaggtggtgttaatcgaccgggaaggcgaaaagcttcagcgccttgtcgccgagctgggcgagaacgcgtttgccctgcaaatcgatctgttcaaacccgagcaagtcgacgcgatgctgagcgacattgtcggcctcgccggcggcctggatatttttcacgccaatgcaggcgcctacatcggcgggccggttgctgaaggcgacccggacgtctgggatcgcgtactgaacctgaatatcaacgccgccttccgctgcgttcgcgccgtactgccgcatatgattgcgcagaagtcaggcgatattatcttcaccagctccattgcgggcgtggtgccggttatctgggagccgatctacaccgcgtccaaatttgccgttcaggcgttcgtgcataccacccgtcgtcaggtcgcggaacatggcgtacgcgtcggagccgttctgcctgggccggtagtgacggctctgctcgacgactggccgcaggccaaaatggatgaagcgctggcaaacggcagcctgatgcagccgattgaagtcgcagaatcggtgttgttcatggtgacccgttcgaagaacgttaccgtccgggatctggtgattctgcctaacagcgtcgatctttaa

SEQ ID NO: 118577 - DNA, 1032 bp, Enterobacter cloacae
gtgacgcgcgttgagaaaacgaagaaaacgaccatttacgatctggcggaactcaccggcgtttctgccagcgcggtgagtgctattttgaatggcaactggaagaaacgccgcatcagcgccagcctggcagagaaggtaacccgcattgcacaagagcagggctacgcggttaaccgtcaggcaagcctgctgcgcagcaagaaatcgaacgttatcggcatgattgtgccgaaatatgacaaccgctatttcggctctatagcggaaaaattcgaagagatggcgcgtgccagagggctgttgccgattattacctgcacacgccgacagccggaactcgagctggatgccgcccgtgccatgctctcctggcaggttgactgggtcattgccacgggggcgacacacccggacaaaattgctgaactctgtcatcaggcgggcgtacctacgctaaatcttgatctgccgggtaccctggcgccctctatcatttcggataactacggcggcgcgaagatgctgacagagcggatcctcgccagcagctttaaacggtttggttcgctggctccgctgaccttcgttggcggacgccggagtgataacaacaccgcagagcgcctgcgcgggttccttgatgcccatcaggcccatgggctgaccgttccggaacagcagctgctggtcaccgggtactcgtcatcgcgcgtggaggagcagctcagagccaccttcccgtcgccatcgacggcgctaaaggggctgtttgtcaattcgaccatttcgctggagggggtggtacgttggctggcccaatacgggcagaccggccaaaatcagccgccgatgggttgttttgactgggacccatttgtctctctgctgggacatgatatcgacatggtgcgccaggacgtcccggcgatgctggagaaggtatttgaaattctcgattccggtgatacctcggtcaggcgtattgagatcccaccggaactgattggcagccagagcgtcacggcctag

SEQ ID NO: 118578 - DNA, 948 bp, Enterobacter cloacae
gtgagcaaagaagatgacatcaggctcgatcaaaaagtgcgggcggcatggatgtattacatcgccgggcttaatcaaagcgaaattgccagccagctcggcacatcaagaccggtggtgcagcggctgattgccgccgcgaaagaggaaggcattgtctcgattgggcttcatcaccctgtcgctaactgcctcgattatgcgcaacttctcgcggaaaaatatcacctgacccactgcaacattgtgcccgtctaccgcaatgaaagcgcgctggatagcgtgacgtttggctgttatcagctgatggcccgctacctgcaaggtgataaacccacggttgtcggaattggctccggactgacgctaaaaaaaaccatcaagcgtatcgattttgacagccacaacacccgctgtgtcgccctgatcagcgccatgaacgagcacgggcaatgtaactattacgatgatgtgccgttgctgctggcgcgtaaaattcagggaaaatattaccagtggccggcgccgcgctatgctcagtccagcgaggagcatgagatgtggtgctcaaaccgcctgttccgtaacgtctgcgccgtggcggatgcagccgatgtgatttttgtcggcatcggggcgctgggcaggcagagccctatcttcaaagacgggtttatcgatgaggcacagctggaagagttgacccagcgcggtggcgttggcgaaatactcggacgctttatcgatgccgacggcaaggtcatcgacagccagattaatcgctttattaccagctacgatattcgccagagccagtgtccacgtattgcggccgcctgcggcgaggataaacgcccggcgatccttgccgccctcaaaggcggctgggtaaacggtctggtgacggatgaacagaccgcgcgctggctgctgacgcgtcagggctag

SEQ ID NO: 118579 - DNA, 1368 bp, Enterobacter cloacae
atgaccgagaaatacacatggctacatattggactggggtcttttcatcgtgcgcatcaggcgtggtatctgcaccgccttattgccggcggcgatacgcgctggcacatcgctgcgggcaacatacgcaacgatgctgaacatgtggtgcaggcgctggccgcgcagaaggggcgatatgtactggagaccgtcagcccggaaggcgagagagactatgaagagatcgcctcgattcagacgctgatcccgtggcaggcggatttgcagccgctgattgccgaaggggcgaacccgcagactcgggtcatcgcgtttaccgtgacggaggggggctactatatggataccagccacaggctggatgtggccaatgccgatctggcgagcgatattaagggcggctgtaaaaccatctacgggacaattgcccgcatcctcgaagcgcgtatggcgaacggagcgggtccggtaaccttgcttaactgtgacaacgtgcggcataacggcgagcgcttccacgacgggttgattgaattcttaaccctcagcggcaaacagagggtcatcgactggctgagcgctaatgcgacctgtccgaataccatggtggatcgcatcaccccgcgtccggcggccgatctcccggcgcgcattaaggcccggacgggcatagacgataacgccccggttatgggggaacgctttattcagtgggtggttgaagacaatttctgcgacgttcgtcccgcgctggaaacggtgggcgtggagctggtgggatccgtcatcccttatgaagaggcgaagatccgcatcctcaatgcctcccatagctgtatcgcctgggcgggtactctggtcgggcagcagtatatccatgaaagcacgctgacagagtttatctacaagattgccgaccgctacgtgacggaagatgtcattccctgcctgggagataatggcatcgatctgccagcctaccgcgacgtggtgcttaagcgttttaccaacccctggattcaggacaccaaccagcgcgtcgcggccgacgggttctcgaagatcccggcgatgatagccccaacgctgcgtgaatgttaccagcgcggcgtacgtcctgacgctaccgctatgctgcctgcgctgttctacgtctatatggagcagtggcatcacggcaagctgccatatgaataccaggacggtatcctcaacgcctctgcggtacatgcgatgttcgaatcggacgatccgatagcccgatatgccagcgataccgctctgtttggcgatctgaccggccgggaagattttgccgcgcttctgcgtgaaaaaatcgctgacgtctacgcgctgattaagtga

SEQ ID NO: 118580 - DNA, 1464 bp, Enterobacter cloacae
atgtatctgggcatcgatcttggcacatcagaagtaaaggcgctggtcattgacgaaaacaacggcgttgtcgccacccatagcgcgccgctgacgatacagcgtccgaagccgcactggtctgaacaatcgccggaagcctggtgggaggcaaccgaatacctgattgccaccctccgggagaagtgcggccaccactggcaggcgataaaagccattggcctttccgggcagatgcacggtgcggtactgctggatgccgcgggtgaacccctgcgtccggccatcctgtggaatgacacccgctgcgcgcaggagtgcgcagagctggaagagatggcgcccgaactgcaccaggtggcggggaacctggcaatgccggggtttacggcaccaaagctgctctgggtgcgccgtcatgagccgcagaacttcagccgtctcgccaccgtgctgctgccgaaggattatctgcgcttcaaaatgaccggaaaaaaaatctctgatatgtcggactcggccgggacgctgtggctggatgtgggaaaacgagactggtcggatgcactgctggaaaaatgtgagctgtcgcgtgccgccatgcctgcgctggtggaagggtgtgaggtctcggcgctactcgaacctgcggtagcgcagcggtggggtctgaacccctcggttatcgttgccggcggcgggggagataacgccgtcagcgcgataggggttggggccgtttcgccgggcgatgcgtttatttcgctgggcacctccggcgtgctgtttgtggtcacagatgcctaccgtccggcgccccagtctgccgtgcacgcgttctgtcacgtgctgccaaacctgtggcatcagatgagcgtgatgttaagcgccgccagttgtctacagtggttttgccgtctggtgggcgtcacggagctggcattgcttgaggagatcgcccagctaagcgatgcggagaaagcgagcgcgccgatgttcctgccctacctttccggggaacgtacgccgcataacgatccctgtgcacggggcatgttctgggggctaacgcactccagccagcgtgcgctgatggggtatgcggtgctggaaggcgtcagcttcggtattgccgatggccttcgcgtgttgcaggagagcggcacgcagattgaacagtgctccctcgtcggcggcggggcgcggagccccttctgggcccagctgctggccgatattctggcgatgccggtggtgacgcataagggcggcgaaaccggcggtgcgctgggggctgcacggctggcctgtctcgcagccggtaagccgctggcttccgtgtgcgaaaaacctgaagtctataaaacctggcgcagcgatccggcgcgccaccgtgcgctgatgacgcgttaccagcagtttaacgcgctttaccaaaacgacctgaactaccgaaacccataa

SEQ ID NO: 118581 - DNA, 246 bp, Enterobacter cloacae
atgagcgaaatatcaagctacccggcagtgcagcagattaacttctacatcaacgatgcgtctcctgaattgttaattgagcgaagggtttatttagaaaattacctccttccatgctggaaaggaagactggcagaaatgaagtcatggagcgaatacacagacgctgatttacaacttctcgctgcataccaaagaggcgttgattatctgacggctgcgttaatgcaggaggccgcccaatga

SEQ ID NO: 118582 - DNA, 483 bp, Enterobacter cloacae
atgagtattaaaaatttggtcgaaatgataaagcacaacggacttctgtcttcaatgtctcagcttgaaaagctgtatcaggctgcaatcgagaacgagcagaaacttgccgaacttgaagcccaatgcgcggcgctggctgctgagaatgcggggctgaagtcagcacaccctcagccattcggacctgtgatgatgaaggctcttgatgcgtacgaaaagcatcaggatgaagtgccggagacaggtatgctcgatgcattctttatcctgcgtgacagcatcctcgttgatacgacctacacagacgctttcctgactgaagttcgggctcagggtgtggagatgttcggtcagtggcttagggattcagcagacatatttgacaataactctcgccatgattgggctgaccagaacagagtgagcgcagataaggctggagagttcgccgcccagcttcgcaaaggagtgcagtcatga

SEQ ID NO: 118583 - DNA, 315 bp, Enterobacter cloacae
atgagtgctaagacgatgaaaggcaaacaggcaattctgcgttatctcgaaatgcaccggaccttcactgcgaaggatgtggccacagagtgcggcatgactatcaactgcatcacgaagaacgctatcgatctggagcgggcccggaagattgtccgggtgagcaaggtctggcgaacggtgacttatcgcctggcgactccggaagagcaggacgacaccgcgcgcagctgcaccaacggaatatttcaggagtgccggaacagtccggcaatgaagcgagtattgatggtttgggggagggtgggggtatga

SEQ ID NO: 118584 - DNA, 1374 bp, Enterobacter cloacae
atgagccgttttatcgatttgtacgttgagcaggtcgtcatcggcgggatcatgctcgcagcgggccgcacagacggcgttgacatggcgactgacgcgattgaggggctgactgaggaccacttcacagcaacgcctcacaaggtggctctgcggtcctacaaacgcctcaacgagtccggggagaagatagacctgctgacgttgaccagcgaccttgaacggcttggcgcgctggaaagtgccgggggattcgcttacctggctgaatgcagcaaaaatacaccgtcgttcgcgaaccttgcctcgtactgcgaaaagttgcgggaaatgcatctcggccgccggatgaccctggcgctacaggtagggatccagaagctgtccgaaccatccagtgagggtatcgctgacatcatcggcaacatacaggcggatatctcaggcatcgagcacaacaccgactacggcaccgagcacatcaccaccgggatcgacatgtccctcgagactatccagtcgattatcagcggcgatatctggaagcacaaaaccgagctgggcatggcaaccatcgatagcgctttcggaggattcaacaatacggattttatcgttgttggtggacgtcctggcatggggaaaaccatgttcagcaccaccgtgaccgagactgtcggcctgaaaaacaaaaagccggtgctgttcttcagtctcgagatgccagtggaacaaatctctgagcgagtcgcgttccaccgggcccgggtgagcaaagaggatttactcagcaagcagagcggcgtgatggatggtgcctggggaaaggtcggccactgcatgaaggatttcatcgaagccccgatctatatcaacgacaagccatccctcagcgttcatcaggtgcgagcggaagccaggcgaatgagcaagaaactgggtggacttggtgtggtcattgtcgattacctccagaagatgcgcatgtctgaccctgagaacatgaaccgcagcgtaggggagatcgcaaccggcctgaaaaacctggcgaaagagttgcgttgcccggtcatcgcactggctcagcttaaccgtaaggtcgaagaacgtgctaataagcgcccggtcgcagctgacctccgcgagtccggtgttatcgagcaggaagccgatgtgattttcatgatctaccgggatgagaaatacaacccgaacaccgaactgaaaggcatcaccgaaatcatctgtgtgaagtcccgccatgcgccgggggcagaaaagacctaccacttcagcagccgctactcaggcctggacccggtagatttcacctacagcggccagatgcaacaggaggctgactatgagtgctaa

SEQ ID NO: 118585 - DNA, 1086 bp, Enterobacter cloacae
atgggcgtcgttaagcatttagcagactacaggccgccgctggaggtcgtggagcatcgtgtggcgcaactggaagatgggttcactcgcgtcgcgaatgagattcttgatgccgttatggcttcaggtttgagcgaaactgagatgtgcattgtgctggctgtctggcgcaaaacatacggcttcaataaaaaaatggattgggtcagcaacgagcaactggagcagatggttggtaagcaccacacgcattgctctactgccaaaaacctgctgatcggcaagaaggtattcattcaggaaggccgcaaagtgggcatgaacactaatgtctccgagtggaaaacaaaggttaacggattctgcaaaacattagctaaacctgctaagaaaaccttagcggaagttgctaacagaactaagcagaaggtgctaaccacaaaagacaataatcaaaatacagaaagacaagatccccctaaatccccccagggggaaaaatcgctcgctcaggatgtgatggattacttcaacgagcttacaggaagccgctgcgctgccttagcgcctttcgaaaaagcgcttaccacggtgaagagcaaagaccagtgctacaccgccgaagagctgaagctggttatccgctgggcccatgtgaactggggtcacagcttcaagccagagaatctgtgccgtatgacccgctttgatggatacctgtcagacgccctggtatgggcagatggtcatggaagcaacccggcagcctgtccgcatgaagagatcatcaagctctggaatgaaaaattcccttcgaaggccgtttcgctgcatgagtggaaccgccgccgtccggcctatcgagacctggaagctgtgtggaacggcaaaaccacccagggcaactggcgagaactgaagcacatgggaatggccttcgagctgattagcaagtcttccctgttcggcaccagaggcgatcagccatggctgactctcgactggatactgaatccgaagaactggggatctgtctacgagcaggccatcaacgagcaccgtgagcgcaagggagtcaaagcatga

SEQ ID NO: 118586 - DNA, 168 bp, Enterobacter cloacae
atgtcaaaaactcgcaaaaagtaccaggaaaaagaggaacgtcgccatccagattcaccagatggcctggttgtcgctgcctcaaaaaaccgggcgttcgcggagcgcttcgttggcatggcaagactggcactgattcaggcaggggtgaagcatgggcgtcgttaa

SEQ ID NO: 118587 - DNA, 546 bp, Enterobacter cloacae
atgcattcacttgcgtatcaacaaggtaacaaattttcgccaacggcgatgatttaccagaatcgccgggaacctgattccaaggcgttaaacatcgatgggatccgcgcagcagttcgcgcctgggccgctgattgccgcagccgtgaatttgtcgctgcactgattgttgaagagtggcgggcaaccggcggcaacgggttggatatcccgactgactcgcaccgccagatgcagaaagtattccgctggatcgacggcgacaccgagtacgccgccaacaacattcgccagctggctccggcaatcatggccgtgctgccgctggagtaccgcaaccgcctggcgccgaagaacgacacgatgtcactaatcgcctctgcaatgaaagagtgcgccgaggctaaacaggcagtgcttctggacgctccagagcatcagaagctgaaagaggtaagcgaaggtatagcgtcgctgttccgcctcatgccggagcaggtagggccgctgatgacaatggtgacgtcgatgttgggggttatgtga

SEQ ID NO: 118588 - DNA, 252 bp, Enterobacter cloacae
atgaagaccccaacagtagagaagaactccgcagtagagaaagcgatcgccatcgctggcagccagaaagagctggcaaaacgttgcggtaaagcccagtccactatctgcgactggcttaacggaaagaaacgcatctccccggttcacgttcctgaactggtgaaagcggttggtggtgaaatccaggctcatgaattccgcccggacctgccgtccatctttccacaccctgacaaccatgccgcttaa

SEQ ID NO: 118589 - DNA, 693 bp, Enterobacter cloacae
atgggattctcggagcgcctggcgcaggcaatgaaacatgctggatatacacagggccgattagccaaggatgtcggcatggctcagtccagcgtcaataagctactcaaggaagctaacggctctcgtaagactgttgagatcgcctctgtactgggtgtgcggccggagtggctgtctactggtgaaggggaaatggcttcaagtagcgcaagagaaccgtctgcgctataccaggttaagccgtcaatgaatgggatttaccgcgtggatgtactcgacgttaaagccagcgctgggccgggcagcattgtcaccagcgatttcattgaaactatccgagccattgaatacacgactgagcaggcgcgagccttgttcggcaatcgtccagctgcgcatgtcaaagtgatcacagttaatggtgacagcatggacggcactatttcacctggtgatcagatcttcgttgataccggtgttacgcactttgatggtgacggtgtatacgtcttcgtatttgggaagacactgcacgttaagcgcctgcagatgcagcgagacaggctggcagtaatatccgataacccgatttacgaaaaatggtacgtcgagcctgaagatgaggacgtgttctacgtcatggctaaagtactgctgagacagtcagtcgattataaaagattcgcataa

SEQ ID NO: 118590 - DNA, 477 bp, Enterobacter cloacae
atgaaaaaattagcagctgtagttatcgcctctgcattgctcagcgcgtgtgcgcaaccaccttatgcccgtattgcttctgattacgatcagaagatggctgaggctaaaaaacatgatgccgagtttgccgagaaggtgagaaatatcaatcttgaaacagccgatgtcggtgaaaagcctaagaactataaagagctggttcaggcaacaatcaaggatgccttaaaggatcctgattccgcgaaattcagcgacttctctccactccgcaaagaggttatggttgagaacaggaactttgtttacggttactcaacgtgtgttttcgtgaacgcaaaaaattcttatggcggatacacaggtaagcaactctactgggcctttatccgtaatggacaggttcttaggtttaagaataccaatgacgagtacggagacttgatcttcgtaggcaggaaagttaactgcaactga

SEQ ID NO: 118591 - DNA, 180 bp, Enterobacter cloacae
atgagccaggaagaaaaagcaagatttgagagttgcagtccagtaatcactgccgccgatgcagcgctggaagcagcaagtgaagttttaaaagacgcgagcgctgatccatggtttcaccagaagctgatgagggcagcgctcgaggctgcccttgcttcaattgtgataattgattag

SEQ ID NO: 118592 - DNA, 222 bp, Enterobacter cloacae
atggaaattaacgtattcagaggtgacagaacaaaagagtctgtcgcttatgacctcgctcttgcgttagctgcaaaagaccccgccataacaactccatccgccttaattcaacgcattgctgatattcttccgctttgcagggaggccgctaataaaagacatggtgaagaggttccgccgcctgccggaattttcctgagcaagaaaatccttaagtag

SEQ ID NO: 118593 - DNA, 285 bp, Enterobacter cloacae
atggcagacgacgattatacaatgggcgagttttggcgagacatgaagccagaacttaaagagcggcgcaggatggcgcgcaattcggcacatgaagggatgaaggcattctttcagcgtaatggggttgagttcgaagagggagaaaacacactcatatttcgcacaccgcaaggtaccgttgcttattacccgccaagcaagcggatgcagcataaaaccacatggcgaacatgcagccctacagcatgcatgaattacgtcaataaactcagagccgcctaa

SEQ ID NO: 118594 - DNA, 786 bp, Enterobacter cloacae
gtgcgcgattcgacctacgtgctcgacggcctgctgtaccacgagtccgacttgcggatcgaggagcattacaccgacacggcgggcttcaccgatcacgtcttcgccctgatgcacctcctgggcttccgcttcgcgccgcgcatccgcgacctgggcgacaccaagctctacatcccgaagggcgacgccgcctatgacgcgctgaaacccatgatcggcggcacgctcaacatcaagcacgtccgcgcccattgggacgaaatcctgcggctggccacctcgatcaagcagggcacggtgacggcctccctgatgctccgaaagctcggcagctacccacgccagaacggcctggccgtggcgctccgcgagctgggccgcatcgagcgcacgctgttcatcctggactggctgcaaagcgtggaactgcgccgccgcgtgcatgccggcctgaacaagggcgaggcgcgcaatgcgctggccagggcagtgtttttcaaccgcctgggtgaaatccgcgaccgcagtttcgagcagcagcgctaccgggctagcggcctcaatctggtaacggctgccgtcgtgttgtggaacacggtctatctggaacgggctgcgcacgcgctgcgtggcaacggccatgccgttgatgacgcgctgttgcagtacctgtcgccgctcggttgggagcacatcaacctcaccggcgattacctctggcgcagcagcgccaagatcggcgcgggcaagttcaggccgctacgaccgctgcaaccggcttag

SEQ ID NO: 118595 - DNA, 1005 bp, Enterobacter cloacae; identical to SEQ ID NO: 9478

SEQ ID NO: 118596 - DNA, 177 bp, Enterobacter cloacae; identical to SEQ ID NO: 21678

SEQ ID NO: 118597 - DNA, 816 bp, Enterobacter cloacae; identical to SEQ ID NO: 6090

SEQ ID NO: 118598 - DNA, 303 bp, Enterobacter cloacae; identical to SEQ ID NO: 24284

SEQ ID NO: 118599 - DNA, 1494 bp, Enterobacter cloacae; identical to SEQ ID NO: 13713

SEQ ID NO: 118600 - DNA, 225 bp, Enterobacter cloacae; identical to SEQ ID NO: 13704

SEQ ID NO: 118601 - DNA, 738 bp, Enterobacter cloacae
atgcgcaggacgaagccagtagccgcgccgatggtggcgcgggtctatctgcgcgtcagcaccgacgcgcaggacttggaacgccaagaggcgatcactacggccgcgaaggccgccggctactacgtcgccggcatctaccgtgagaaggcatccggcgcacgcgccgaccggcctgagctgctgcgcatgatcggcgacctacagcccggcgaggtggtcattgccgagaagatcgaccgcatcagccgcctacctttgcccgaggccgagcgcctggtggcctcgatacaggccaaaggcgcaagcctggccgtccctggcgtggtcgatctatccgacctggcggccgaggcccagggcgtcgccaagatcgtgctggaagccgtgcagatcatgctttttcgcctggccttgcagatggcccgcgacgactacgaggacaggcgcgaacgccagcgccaaggcattgagttggcccgccaggccgggcggtacaagggccgccgtgctgatccgaagcgccgcgcccaagttgtcgcgctgcgcaagtccggctacagcatcaacaagaccgccgagctggccgggtacagtgcggcccaggtgaaacggatatgggccgaggtcagccaggccgaagcgaagcagcacggcgcgttcgtggaggacgcattgacggaagccgatgccctggccgctgtcggccaggatgagcgccaggaggaaagggcatga

SEQ ID NO: 118602 - DNA, 492 bp, Enterobacter cloacae; identical to SEQ ID NO: 15993

SEQ ID NO: 118603 - DNA, 606 bp, Enterobacter cloacae; identical to SEQ ID NO: 105661

SEQ ID NO: 118604 - DNA, 282 bp, Enterobacter cloacae; identical to SEQ ID NO: 31769

SEQ ID NO: 118605 - DNA, 177 bp, Enterobacter cloacae; identical to SEQ ID NO: 105663

SEQ ID NO: 118606 - DNA, 312 bp, Enterobacter cloacae; identical to SEQ ID NO: 105664

SEQ ID NO: 118607 - DNA, 201 bp, Enterobacter cloacae; identical to SEQ ID NO: 105665

SEQ ID NO: 118608 - DNA, 225 bp, Enterobacter cloacae; identical to SEQ ID NO: 105666

SEQ ID NO: 118609 - DNA, 204 bp, Enterobacter cloacae; identical to SEQ ID NO: 105667

SEQ ID NO: 118610 - DNA, 492 bp, Enterobacter cloacae; identical to SEQ ID NO: 105668

SEQ ID NO: 118611 - DNA, 312 bp, Enterobacter cloacae; identical to SEQ ID NO: 105669

SEQ ID NO: 118612 - DNA, 321 bp, Enterobacter cloacae; identical to SEQ ID NO: 31768

SEQ ID NO: 118613 - DNA, 228 bp, Enterobacter cloacae; identical to SEQ ID NO: 105671

SEQ ID NO: 118614 - DNA, 891 bp, Enterobacter cloacae; identical to SEQ ID NO: 105672

SEQ ID NO: 118615 - DNA, 219 bp, Enterobacter cloacae; identical to SEQ ID NO: 105673

SEQ ID NO: 118616 - DNA, 1047 bp, Enterobacter cloacae; identical to SEQ ID NO: 30071

SEQ ID NO: 118617 - DNA, 414 bp, Enterobacter cloacae; identical to SEQ ID NO: 30070

SEQ ID NO: 118618 - DNA, 810 bp, Enterobacter cloacae; identical to SEQ ID NO: 30069

SEQ ID NO: 118619 - DNA, 1356 bp, Enterobacter cloacae; identical to SEQ ID NO: 30068

SEQ ID NO: 118620 - DNA, 582 bp, Enterobacter cloacae; identical to SEQ ID NO: 30066

SEQ ID NO: 118621 - DNA, 246 bp, Enterobacter cloacae
atgaaaaacgtacgtatgcaatttgaccttccagaagatcggctgcaagagctcgacactctgatgagtaagtgcggcataagtactaggaaagagcttttcaattacgccttaactatgctcgagtgggctgttgacgagtcagaaaatggccacgatatcgctgctattgatagagcgaaaaaagagttctactccctacgtatgccaatcctgaaacgccaggtgaaaactgcctctcagtaa

SEQ ID NO: 118622 - DNA, 405 bp, Enterobacter cloacae
atgagtgaccctaatgatttagacggattttcagatgctaccggcggaaaggtacttgtcgtaaaagactttgttggtccgattatggcggcagaagaaagggctgacagaaggcatctccgatggtctaaaacgggcgtaacgtttgccatgactgtggtcgtcgcgctaatgaactggatggtcattgatatgcttggcacggtagttcagcaagagatgcatatgatttctatgggagtgcttccggcggagaacagaacagtaactactgacgtgtatttggctctgattgcgggtacggttgccgaagtatcagctttgtttttcatcatagtgaaatcaatgtttaagagtagcaatgagccaaaagatacggccgtaacagagagcacttcgacgtga

SEQ ID NO: 118623 - DNA, 324 bp, Enterobacter cloacae
atgctcaccatgtgggtgacggaggacgagcaccggcggctgcttgagcgctgcgacggcaggcagctggcagcgtggatgcggcagacctgcctggacgaaaagccggcacgttccggaaagcttccctcaatctcgccggcgctgctgcgccagcttgccggcatgggcaataacctgaaccagatagcccgccgtgttaacgccggcgggggtaccggccatgacagggtgcagattgttgcggcgctgatggccatcgatgccggacttgagcggctgcggcacgccgttcttgagaaaggaacggacgatgatcgttaa

SEQ ID NO: 118624 - DNA, 492 bp, Enterobacter cloacae
atgagcaatctttttacggcctcgagggacttcgaggagaaattgaaagcgcagcagcagagtaccggcgagatgctgaaagccgcattcagcgagcacgagcagtctgtcagagcggaactgagcgcaagcgcgaggagaatcagcgacgccatcagcgcccacgagcagaatatgagcgaggcgatggagaaaaaccggcggagcgtgctgctgacggccgggaggacatggctcaccatcctgatggtgtcagcgctgctgatcggcacgagcgggagcattctgtggtggcaggggcagcagataaccgacaattacacgcatcttcgtcagcaggaagataccctggcgaaaatgaccgcccggacgtggggagtgcgctatcaggagagcagcgacggccggagattccttatcctgccgccggggatgcaaaccgaagccatcccttacgacgggacgacatggatccgcctgaaacaggagtag

SEQ ID NO: 118625 - DNA, 216 bp, Enterobacter cloacae
atgacagagctggaaaagcagttgctgagcgcattagagcagctacagcaggactactcgcaaaggctggacgaatgggagagcgccttcgcggaatggcggagcatgtgtggtcttatgcaacgggagaacgcgatgctgaacgagcgcgtgtcggacttgagcacgcaggtgctgagtttaagcgagcagctgcgccgcttgtccgggaactga

SEQ ID NO: 118626 - DNA, 624 bp, Enterobacter cloacae
atgttctctgaacgctcagtacacttaatcacttcctgtacaaagggcaagaatcatcagggccacgtctggccgacattggacatagatccaaaacaaaccccggacgacgcagcatatgcctggagtaacattgtagacgacgccagaagtaatcaggcggtaccggcattgtccttgtattcaggtaatcactggtctacggcaaaggaaattttaaactcaaccagaaatctggagttgtggataatctctgccgggatggggtttttaaatagtcgagatcgggtgccctcttacgaggcgacatttcatcaagtaccattcaggcatgatctctggtggaaagccatcacaaaatcactaggaaagcataaccgttgcgcaactataagccagttaatgcagtccagtccgaatgatgaatatttgattgcggcttcgcctgtttatattgctgctgtccagaatgacatcctgaagggcattgagagtttgactcatcctcttacgcaactaacgatcgtgacatcaggggcatatgctggcccacttgaagaatacttaattaagagttcttctaggatgatgaaagagctagggaaggtgcgaacaagttcctga

SEQ ID NO: 118627 - DNA, 381 bp, Enterobacter cloacae; identical to SEQ ID NO: 105558

SEQ ID NO: 118628 - DNA, 936 bp, Enterobacter cloacae
atgcgttttgtcacgccagtgaaaacggtgaattctggccccaacagaaaatactttggttcagggcgcggcatcacctggtacaactttgtctctgaccaatattcgggttttcatggcatagtgattcctggaacactgcgggattccatctttgtgctggaagggctacttgagcaacaaacgggactaaacccggttgaaatcatgacggacacagcaggtaccagtgacattatctttggcctgttctggctactgggataccaattttcacctcgtctggcggatgcgggtgaggctgtgttctggcgggccgacaaagcagcgaattacggggcgttggacaaactggcgcggggttgtgttgacctttctaaaatcgaaagccactgggatgagatgatgcgggttgccggttcgctgaagctgggcactattcatgcgtcagaactcattcgatcgctattgagaagtacccgaccgtcagggcttgctcaggcaataatggaggtcggaagagttaacaagacactgtatcttctcaactatattgatgatgaggactatcgtcgccggatcctaacacagttgaaccggggtgaaggccgccatgccgttgcaagagccatctgctacggtcagcgtggcgagatcagaaaacgttaccgcgaggggcaggaagatcagttgggtgcgctgggtctggtgacaaacgcagtggtgctgtggaatacgctttatatgcaggaagccttgtcgcacctgcgcagcatcggggaagggccagaggatgaacatatcgcgcggctttcgcctctgatgcacggtcatatcaacatgctgggacattatacgttcacactaccggaggatattatgaagggggaattgaggccgttaaatctcaatttaaacaatgaattatctccttag

SEQ ID NO: 118629 - DNA, 141 bp, Enterobacter cloacae; identical to SEQ ID NO: 36145

SEQ ID NO: 118630 - DNA, 816 bp, Enterobacter cloacae
atgagccatattcaacgggaaacgtcttgctcgaggccgcgattaaattccaacctggatgttgatttatatgggtatagatgggctcgcgataatgtcgggcaatcaggtgcgacaatctatcgattgtatgggaagcccgatgcgccagagttgtttctgaaacatggcaaaggtagcgttgccaatgatgttacagatgagatggtcagactaaactggctgacggcatttatgcctcttccgaccatcaagcattttatccgtactcctgatgatgcatggttactcaccactgcgatccccgggaaaacagcattccaggtattagaagaatatcctgattcaggtgaaaatattgttgatgcgctggcagcgttcctgcgccggttgcattcgattcctgtttgtaattgtccttttaacagcgatcgcgtatttcgtctcgctcaggcgcaatcacgaatgaataacggtttggttgatgcgagtgattttgatgacgagcgtaatggctggcctgttgaacaagtctggaaagaaatgcataagcttttgccattctcaccggattcagtcgtcactcatggtgatttctcacttgataaccttatttttgacgaggggaaattaataggttgtattgatgttggacgagtcggaatcgcagaccgataccaggatcttgccatcctatggaactgcctcggtgagttttctccttcattacagaaacggctttttcaaaaatatggtattgataatcctgatatgaataaattgcagtttcatttgatgctcgatgagtttttctaa

SEQ ID NO: 118631 - DNA, 894 bp, Enterobacter cloacae; identical to SEQ ID NO: 32312

SEQ ID NO: 118632 - DNA, 1158 bp, Enterobacter cloacae; identical to SEQ ID NO: 32311

SEQ ID NO: 118633 - DNA, 585 bp, Enterobacter cloacae; identical to SEQ ID NO: 32310

SEQ ID NO: 118634 - DNA, 996 bp, Enterobacter cloacae; identical to SEQ ID NO: 16843

SEQ ID NO: 118635 - DNA, 534 bp, Enterobacter cloacae
atgaaaaacttagcaagctggcttctggccgcagcatttacgacagccgccctgcccgcctttgcggtggaaccatccgttcaggttggctactcgcctgaaggaagcgcccgcgttctcgtcctgagcgccattgactccgcaaaaacctcgatacggatgatggcttattcttttaccgccccggatattatgaaagcactggtagcagccaaaaaacggggagttgatgtgaaaatcgtaattgatgaaaggggcaatacggggcgcgccagcattgcggccatgaactacatagcgaacagcggcatccctttgcgtactgacagtgatttccctatccagcatgacaaggtgatcatcgtggataatgtgaccgttgaaactggcagctttaatttcaccaaagcggccgaaacgaaaaactcggagaatgcggtggtgatctggaacatgcctaagctcgctgaatcattcctcgaacactggcaagaccgctggaatcgggggagagactaccgttccagctactga

SEQ ID NO: 118636 - DNA, 315 bp, Enterobacter cloacae; identical to SEQ ID NO: 16841

SEQ ID NO: 118637 - DNA, 357 bp, Enterobacter cloacae; identical to SEQ ID NO: 16840

SEQ ID NO: 118638 - DNA, 402 bp, Enterobacter cloacae; identical to SEQ ID NO: 16839

SEQ ID NO: 118639 - DNA, 291 bp, Enterobacter cloacae
atgcgaccgtctgttgtgtttgacatgaagcgaagcgcagtgcgtgaagcggtaggccgctttcgcgccgcgaacccgcgcgtcttcggctcggtgctgcatggcaccgaccgggatggcagcgacctcgacctgttggtcgatgcgctgcccggtgccacgttgttggacttgggcgatttggaagaagaactgaaatcgctgctcggcgttgacgtcgatctgctgactcccggcgacctgccgccgaagttccgggccaaggtgctcgcggaggcgcaaccgatatga

SEQ ID NO: 118640 - DNA, 516 bp, Enterobacter cloacae
atgccccgccgttcgatcctctccgccgccgagcgcgaaagcctgctggcgttgccggacaccaaggatgagttgatccgtcactacacgttcagcgaaagcgacctctccatcatccggcagcggcgcggcccggccaatcggctgggcttcgcggtgcagctctgctacctgcgctttcccggcgtcatccttggcgctgatgagccaccgttcccgccattgctgagactggtcgccaaccagctcaaggtcggcatcgaaagctgggacgagtacgggcagcgtgagcagacccgacgcgagcacctggtcgagctgcaaacggtgttcggcttccagccgttcacgattggccactaccggcaggctgtccagttgctgaccgagctggccatgcaaaccgacaagggcatcgtgctggccagagccttgatggggacgatagagaaaacggaatctatggtcactcccgtttttgcaacaccgattttgacgacaagttggcttgcttga

SEQ ID NO: 118641 - DNA, 1206 bp, Enterobacter cloacae
atgcgtcagctatttcgttttatgtttcagcacggcagccatctgatttttggcgcgatcctgatggccatgtcgagctttggacagacctactttatttcgctttacggtcaggaattcaggcagacttttggactcagcgatggcggactgggcgggctgtacgccatcggcaccgtgatgagcgcggtgacgctgacctgggcaggcaggctgattgactacacgaccacccggcgttttacgctggccgttactctgctgttgaccattgcctgcctgctgatatcaggtgcgcaggcggcatggatgctcggcattggtttttattttcttcgttttggtggtcagggcctgatggtgcataccgcgcttacggcgacggcgcgccagtttccactcgatgcaggcaaggcgctcggggccattgcgctgggattatcgctggcgcaggctgttttccctgtcgtggcggtgcagataagtaatctgacaggctggcgtctcgcatggagcctcaacgccgccattcttatcgccggcatcgcgatcgcgctgatgttcctgccgcgcggtcgggaagccccgctgcgaaacttcagaaatcggggcgaggcggtgataaaggaagcgtccatatggaaaaaccgcaacctcctgctggcgctgccggtcgttctcgcctcgccatttatcaccacgggcttcttttttcatcaggccaggcttgcagaggaaaagggctgggcactgtcgtgggtggcagtgtggtttatcgcctacgctctgactcaggccgtatcgctgctctctttcggacctatgatcgacagactgacgccgcgccggctgctcccctggttcctgatgccgcaggcggtcgccatgtctgcgctctggctcagcaacggccagtgggtgacgcctttttacctcatcatgaccggaatatcctcggcgatcgcctcaacgctcgccaccgcgctctgggtacagctctttggtccggcgcagctggcgagggtgcgatcggcggttgaagccgggatggtagtagccagcggggcatcaccggtaattatgggcgtgctcattgaccaccaagtgacgctgcgactgcaggcgatgctctgtctgatttacattgtcagtgccagcctgctcgcaacccgcatcaaagcagatgtgccggatataaacttctag

SEQ ID NO: 118642 - DNA, 828 bp, Enterobacter cloacae
atgaataacaccgttattgcctgcgtggacggttcgccgtcaacccgttcggtctgtgagtatgcggcctgggcggccgggaaactggacgtgccccttgccctgatgcacgtgctggaaaaaaatgaccctcccgctgtgtccgacctgaccggcaccatcggtatcgacagccgggagcagctgactgaagagctggtccgcatcgagggcgagcgcagccgcctgatgatggcacagggaaaggccgtgctgactgactgtgcggcgctgctgaagcaggccggacagccggaggtccagctgatgcaaaagaacggcgcgctggatgagatcctggcagagctgggcgatatccgtctgatggtgctgggccgcagaggctcccggagtccggttggcagccacctggaaagcgtcatccggctgcagaagcgaccggtgctggtcgtgccggaaaccttttcgacgccgtcacgggtcatgtttgcgtatgacggcagtgaggcgagccgggaaaacctgatgcgcctgaccgtcagcccgctcctgagcggtctgacctgccatcttgtcatggttaacggcgaagcgtcgacgctgcaggatgcacaggcgatcctgcaggaggctggtatcgtcacggcagcccagctactggaggataaatctgtcaccggcgcgttatgccggtatgccgatgagaatggcatcgacctgacggtgatgggggcttatgggcattcacggttgcggcgattctttatcggcagccacaccactgagatgctctcagaaagtcgccaggctctgctgatgctgcgatga

SEQ ID NO: 118643 - DNA, 1479 bp, Enterobacter cloacae
atgttgctgtcctcgacgcgtaaggactggctgggtaacgtccgtggtgacgtcctcgccggtattgtggtcgcgctcgcgcttattccggaagcgatcgccttttccatcatcgctggcgtagatccgcaggtcggtctctactccgccttctgtattcccctggttatggccttctttggtggccgcccggcgatgatttcgtccgccaccggtgcgatggcgctgttgatgattacgctggtaaaagaccacggcctgcagtacctgcttgccgcctcggcactgaccggcgttcttcaactgattgccggctacctgaagctcggcagcctgatgcgctacgtgtcccgctcggtggtcaccggctttgtgaacgcgctggcgatactgatatttatggcgcagctgccggaactcaccaacgtaacctggcacgtatatgctctgaccgctgccggtcttggtataatctatcttttcccgtacctgaataaaaccatcccctctcccctggtctgcatcatcgtgctgaccgccatttccatgtggctgcacctcgacgtgcgcaccgtgggcgatatgggcaaactgccggacagcctgccggtattcctcattcctgacatcccgcttaaccttgacacgctgcggattattttgccgtattcagccgggcttgccgtggtggggctgctggagtcgatgatgaccgcaaccatcgtggacgacatgaccgacacgccaagcgacaagaaccgtgagtgcaaggcgcagggtattgccaatatctgcacctcgttcatcggcggcatggcgggctgcgccatgattggtcagtcggtgattaacgtgaagtccggcggacgtgggcgtctttccacgctcacggcgggcgtggtgctgctgttaatggtggtatttctgcgccagtgggtgtcacagataccgatggcggccttggttgcggtgatgattatggtttccatcggcaccttctcctggcgctccatcagcaacctgcgctctcatccgttctcaaccagcgtggtgatgctggcaaccgtggtggtggtggtggccaccgataacctggcatttggcgtgctgaccggcgtgctgattgccgcgctgaacttcgccaccaaggtcgcccgcttcatggcagtctcctctgagctgaagggcgatacccggacctacaccgtgactggccaggtcttctttgcctcgtctgaccggtttaccagccacttcgacttccgcgaggcgctggagcgcgtggtgatcgacgtgacgcacgcccacttctgggacattacgtcggtcagtgccctggaccgcatcgtgatcaagttccgccgcgagggcacggaggtggaaatcaggggcatgaacgacgcaacccgcactatcgttgaccgctttggcgtgcatgacaagcccgaagaagttgaaaagctgatgggcggccattaa

SEQ ID NO: 118644 - DNA, 1524 bp, Enterobacter cloacae; identical to SEQ ID NO: 32314

SEQ ID NO: 118645 - DNA, 741 bp, Enterobacter cloacae; identical to SEQ ID NO: 32313

SEQ ID NO: 118646 - DNA, 630 bp, Enterobacter cloacae
atgttacgcagcaacgatgttacgcagcagggcagtcgccctaaaacaaagttaggcatcacaaagtacagcatcgtgaccaacagcaacgattccgtcacactgcgcctcatgactgagcatgaccttgcgatgctctatgagtggctaaatcgatctcatatcgtcgagtggtggggcggagaagaagcacgcccgacacttgctgacgtacaggaacagtacttgccaagcgttttagcgcaagagtccgtcactccatacattgcaatgctgaatggagagccgattgggtatgcccagtcgtacgttgctcttggaagcggggacggatggtgggaagaagaaaccgatccaggagtacgcggaatagaccagttactggcgaatgcatcacaactgggcaaaggcttgggaaccaagctggttcgagctctggttgagttgctgttcaatgatcccgaggtcaccaagatccaaacggacccgtcgccgagcaacttgcgagcgatccgatgctacgagaaagcggggtttgagaggcaaggtaccgtaaccaccccagatggtccagccgtgtacatggttcaaacacgccaggcattcgagcgaacacgcagtgatgcctaa

SEQ ID NO: 118647 - DNA, 381 bp, Enterobacter cloacae
atgaaaaccgccactgcgccgttaccaccgctgcgttcggtcaaggttctggaccagttgcgtgagcgcatacgctacttgcattacagcttaccaaccgaacaggcttatgtcaactgggttcgtgccttcatccgtttccacggtgtgcgtcacccggcaaccttgggcagcagcgaagtcgaggcatttctgtcctggctggcgaacgagcgcaaggtttcggtctccacgcatcgtcaggcattggcggccttgctgttcttctacggcaaggtgctgtgcacggatctgccctggcttcaggagatcggaagacctcggccgtcgcggcgcttgccggtggtgctgaccccggatgaagggcactgttgcaaatag

SEQ ID NO: 118648 - DNA, 570 bp, Enterobacter cloacae; identical to SEQ ID NO: 34949

SEQ ID NO: 118649 - DNA, 501 bp, Enterobacter cloacae; identical to SEQ ID NO: 105788

SEQ ID NO: 118650 - DNA, 1542 bp, Enterobacter cloacae; identical to SEQ ID NO: 30088

SEQ ID NO: 118651 - DNA, 342 bp, Enterobacter cloacae; identical to SEQ ID NO: 16817

SEQ ID NO: 118652 - DNA, 792 bp, Enterobacter cloacae
gtgaatttgcctacgcccgaaacctacgatgaacttcagagagcctacgattttttcaatgagaagctattcagcaacgagctgccgccatgcctgataacgttgcagcgtgagaagcgaacgtatggctattgttcctttaagcgtttcgtcggccgtgagagtgggtacacggtagacgagatcgctatgaatccggtgtatttctcgatcagaaccataaaggccacgctttcaacactggtgcatgagatggttcatcagtggcaattccattttggcgagcctggccgccgtggctatcacaacaaacagtgggcggcccggatggaacgggtaggactaatgccttctgataccggcgaaccgggaggcaggaaagtgggccagagcatgacccattatattattgccggtggccctttcgatatggcctgtgatgaactgctgacaggccatttccagctttcctggatggacaggtttccgccttaccagcctaagcctggcgctgtgctaagccctacaggaaaaggctatattgacgacgaggaagatgatagcgaacacgaacaggaggtggaggaagggcgcgacccggttgaactcgacgacgagatcatagaggccatgcgatttgtaaccccaccgcctgaagcaccggtgaacaaaacaaaccgggaaaagtacagctgcccggtgtgtcatatcaatctctggggtaaaccggggatagtggtttactgtggtggcgagcactgtaataaagccgcgttagtagtcttaaaataa

SEQ ID NO: 118653 - DNA, 837 bp, Enterobacter cloacae; identical to SEQ ID NO: 22759

SEQ ID NO: 118654 - DNA, 420 bp, Enterobacter cloacae; identical to SEQ ID NO: 51548

SEQ ID NO: 118655 - DNA, 672 bp, Enterobacter cloacae
atggcggagtatggcgttttactgacgacgaccagcggggaagtatgggtgaccgcgaacagctcgccaatcgctctacaggaacgaaagacagtggcacttcagggaacatcggggtttaataccaaagtgacgcacacattccccgcaggtcagcctgttgtcgccttcgttcattgcacagtagaggtcgaaatcactcaaacgataagcgggaacaccatcacgattgattttctcagaccgaatgcaaccggcacagcgtacgtttattttttctctattttcccgcagacaaagccagactacgggctggctgtgtgggatgcatcagggacgctgattttaacaaacgaaacgcgcacgctgagcgatgttgtcaccctcggtaccgccggggtggatgccagctcaggatacaacatcaatacaactctggcggggaagtgggcctgcatgcctgccatgctgggactaattaccggggttgtatcggctggcggtcaaccgcagccctactcggccatatacaagagcatggcaaaacttgagggaagcaatacgcggatattcgccaggccgcagacaacccccggcggcaaccttcagaacgttacgtattcgaatctgaggaacgtgattatggccattaactgcgccaattatgattga

SEQ ID NO: 118656 - DNA, 234 bp, Enterobacter cloacae
atgaaaaatatgattctttgcctggcggtagcggtattgctctcgggttgcgctggcgttattgagaagcagcaacccgtatgcaccggaacagccctggtcggcggacaggaaagcagcgtccagatctacggagtccgtaaacaaaacaatcagacgcagtaccgcgccggttatccctttaactggtcatgggtgagcgccaacacattcaccagcaccacctgccactaa

SEQ ID NO: 118657 - DNA, 171 bp, Enterobacter cloacae; identical to SEQ ID NO: 34003

SEQ ID NO: 118658 - DNA, 333 bp, Enterobacter cloacae; identical to SEQ ID NO: 99331

SEQ ID NO: 118659 - DNA, 216 bp, Enterobacter cloacae
atgacggagctggaaaaacagttgctgagcgcattagagcagctacagcaggactactcgaaaaggctggacgagtgggagaacgccttcgcggaatggcggacgatgtctggtcttattcaacgggagaacgcggcgctgaacgagcgcgtcacggtcttgagcaggcaggtgcagagtttgagcgagcagctgcgccggttgtcgaaaggctga

SEQ ID NO: 118660 - DNA, 486 bp, Enterobacter cloacae; identical to SEQ ID NO: 99332

SEQ ID NO: 118661 - DNA, 345 bp, Enterobacter cloacae
ttggcagacaaacgcagcaaaatgctcaccatgtgggtgactgaggacgagcaccggcgtctgctggagcgctgcgagggtaagcaactcgcggcctggatgcggcagacgtgcctggacgagaagcccgcacgcgccggcaaacttccgtcgatctcgccggcgctgcttcgtcagcttgccggcatggggaacaaccttaaccagattgcccgccaggttaacgccggtggtggaagcggacacgaccgcgtgcagattgtcgccgcgctgatggccatcgatgccggactcgagcggttgcggcatgccgtactggaaaagggtgctgatgatgatcgttaa

SEQ ID NO: 118662 - DNA, 618 bp, Enterobacter cloacae
atgatggagcaacgcacccctgaatggtttgctgcgcgctgcggcaaggtcactgccagtcgcctggctgatgtcatggcccggactaagtcgggctactccaccagccgccagaactacatggccgagctcatttgccaacggctgaccgggaagctggaggaagggttttcgaatgccgcgatgatgcgcggcactgaacttgagccagtggcccgcgaaatgtacgcgctgaatgagttcgatgcggaaatcactgaagttggactcatcgatcacccaaccatacccggattcgcagccagcccggacggacttgttaacgacgacgggcttatcgaaatcaaatgccccaacacctggacacatcttgaaacgctgaagactggcgagccaaaacgccagtacatgctgcaaatgcatgcgcagatgatgtgcaccgggcggaaatggtgtgatttcgttagtttcgatgatcgtctgccgcctgacctcgcctatttcaagaagcgcattcatttcaatgaagagctggcgcgcgaaatcgagtctgaggttaagaacttccttgcagatctggaatcggaaattcagaaaatcacagagcgtgcagcatga

SEQ ID NO: 118663 - DNA, 747 bp, Enterobacter cloacae
atgagtactgcactttccaccatggccgggaaactggccgcacgcctcggtatggatgccggtacagacctgatgaatacgctgaagaacacagcattcaaaggtggcaacgtcacggacgagcaatttacagctctgttgatcgtcgccaaccaatacggcctgaacccatggaccaaagagatttatgccttcccagataaaggcgggattgtcccggtcgtcggcgttgatggatgggcccgcattatcaacgaacatccgcagttcgacggcatggagttctcttacgacaaagaagaaggcgcgtgcacctgcaagatttaccgcaaagaccgtaagcacccgaccattgtcactgagtacatgggagagtgtaaacgcaacactcagccatggcagtcccaccctacccgcatgcttcgccacaagacgcttatccagtgcgcgcggctggcctttggtttcgctggcatcttcgaccaggacgaggcagagcgagtgattgaaggaacaacggcagaggttcatgcgggccatgaatcagatagccgtcgcccggatctgatcgcaaaaggtgagtccgccgcgcgccttggaaccgttaagtatcaggaattctgggtagcgctgagcgctgaagagaagcaggtgatcggcgcagttgagaagcgacgcatgtatgacatgagtcttgctgtcgacaacgccgaacctgtccatgtcgtagagacggaggctgaatga

SEQ ID NO: 118664 - DNA, 285 bp, Enterobacter cloacae
atgaacgcattcctcacttacgaccgcatcgaagatcggcggtgggttgagcagcagctcaccgacgagaaagagaagtggatcgacgaccgcgctcgggaaatcatcgacatgatgccaaaagagccgtccagtctcttccacttcacggtcccgatcgacaccagcccatacgaaggacttcgcagcgataaagctggcgaggtctacaacgatttcatttcggcagttgcttacgcccaggcagaatacgactgggaacaccgtaccggctgcccgttttaa

SEQ ID NO: 118665 - DNA, 972 bp, Enterobacter cloacae
atgagcgaagtaacggatttaactgtcatcgaaatcaagccggagcaggcaccagtgctgtacgtagctggcggccttgacacttacctcgaacagatccgccaggcagtgaacgaagtgccggacctgtccacgaagaaaggccgtgaccgagtagcctctctggcggcgcaggtgtcccgcagcaagacggcaatcgaaaagcctggccgtgagtacctgaagcgactgaaagaagctgtgcgtcccgctgaggccgaaattaagcggttcgttgatgcatgcgacgaactgcgcgatgcgacccgccgcccattaaccgaatgggaagccgagcaggaacgcattaaggctgaagaagccatgaacgcgatgcacgccgaagcgctggaaatgaacatcaagttcgatcaagagctggaagccaagttcgaagcagaccacgaaatggctctgctgatgaacaaggatttcgaccgtgaccgcgaagagcagcgccgcctggcggaacaggctcaacgcgagcacgaagagcgcatcaagcaggaagcggcagagcaagcccgccgcgatgcagaagcgaagcacaaagcggagattgaagccgcagcgcgccgtgaagctgaagagaaagcacgtgcagagctggctgaacgccagcgcgtcgaagcggaacagcgtgcagctcgcgagaagcaggaagcggaagcccgggcggaacgcgaaaaagccgcggcggttgaggctgagcgcctgaaggcaagacaggcagaagataaacgcctggcggaagagaaacgcatcgccgacgaacaggcaaagcgcgaggctgacgtgaagcaccgcaagacagtcggcaccaacatcgttaacgcgctcaccagccataccagcttaactcgcgaacaggctatcgaagtgctaaccgctctgaaagatgacctgatcccctgcgcgaaaattcattactga

SEQ ID NO: 118666 - DNA, 1413 bp, Enterobacter cloacae
atggaaacgctccttcgaactgacccggagaaatacggttatcaggctggcctgagtcgtcttcagcgatttctttctaagatccagtacgactggagcctgcgggattatatcggtcgtaaagtgttcgaaggcggatatgtgcgtcttcaacccaatatcttttcttcgtccctgactgaacgtctttttcatgcctgttgcagccttgattatgttgaagcaagacgtgcggcagagcatcgcagaaagctactttccggcgaggttgacgatacggcttataaccgtcgtatggctgagccacaatttcggcttgtacaggaagcaaacgtgatccacgttgatttcctctggtcgttgcactgtttcaaccctcgcccgtttcgggcaattgagatctatcgcagggtctgggaagaggccgatctggaccttcttgaggatgagcctgacatgcagcctgtgccccgtacaccaatgccagctccactctggatgaaactgcccggaggccggttcggtacagcttatgatggactgactgatacgttgccgctgatgacctattttgacgggcaggctgaccccagggcttcacgtagcctaaagaccggagagagcagttctgtcgtcgtggcattcgaggaagaggatgagctgactgttgaagaagatacggcgtcctggattatctggcatgaatacgacgggttacgccagcgcatcgctgacggtgagtttactccaacgactgctgctcagtatcttcttcgttatggcgcggtccgaatttcaaaaggcaagggcgctgtctatcatcgtctcgcacagcggggacaaaccttttcccgcctggggataggcgacagagtgtcgcttccagagctggttgccagtcggcgttttaaaatactcagtgattctgcataccgtcaggttgtagcccggaaattgcgtggacagataaaaaagttcagattctgggcatgcgtagctgcctgtgttcagttgcacgtacacaacaagacggcactcggagaaagaattttaacgttactcgaaggtgagagggaacagcaacaaggtgcgatccaggcgaagctgaaggcgggaatgatggatgcagttctaactctgtgtaaccagcgactccgggtgaaagaaaatactaaccagccagaggagttccgctattaccgtgccgtaagagctcgtttcatgcgccatttatctgaatgccttaagccagaaaatggcggcgttatccgtgacgttatctgggaactgagggtgctgagcagtgctcacggtacgaccaaaacaggtttttactatgtcgatagcaatcgcccgacagcgaaaggactgttaaaccgccttctgatgaggatggtcaagcaggtcgtataa

SEQ ID NO: 118667 - DNA, 240 bp, Enterobacter cloacae
atgcaaaatcaaaatacacccgctcaggaaaaacacaccgtatacctttttaatgccgaacatgctgacaagacagccgccaagcaagccgggaaactcttcacgctggacattgaacacccaatgaccctcaacgatctctcgctgctgtgtgagtcggtcgcggacgctgtgggagcacctggcggaattaaatatgaaatcacaacagagcctaatggggttcaggaggaatactga

SEQ ID NO: 118668 - DNA, 312 bp, Enterobacter cloacae
atgactttgaaaatggaaagttcccggacttccaagcctgaggggccatttgtattaatcacttttgagggggacgaatttctttttgatgacagacataatgtcgtcaagataaatggcaggcctaaaaaaatggatgtaaagcgaaattattttgagtccgatctgggagaagggaaagcgaaatactggactttaaatatcgaagaggctcatcggttcaattcgattgatgaagcgacagaacaactttgtaaactgagtcgccctcatctgatcaaaattcgcaaagttgagggggtatctgaatga

SEQ ID NO: 118669 - DNA, 195 bp, Enterobacter cloacae
atgaccaaagagatgtttttacgcattttaaatgaggcacaggctcgtgtggataacgattcgcttccgcttgatgttcgtatccggtcacgcaccacggtaaatgattgcgtcatccgggcagataaagaggggtggcctattgagtataaacagaaggtctgggtagatgcagtcagtggctgttatctttag

SEQ ID NO: 118670 - DNA, 408 bp, Enterobacter cloacae; identical to SEQ ID NO: 105761

SEQ ID NO: 118671 - DNA, 177 bp, Enterobacter cloacae; identical to SEQ ID NO: 31741

SEQ ID NO: 118672 - DNA, 672 bp, Enterobacter cloacae; identical to SEQ ID NO: 105759

SEQ ID NO: 118673 - DNA, 306 bp, Enterobacter cloacae; identical to SEQ ID NO: 105758

SEQ ID NO: 118674 - DNA, 318 bp, Enterobacter cloacae; identical to SEQ ID NO: 31740

SEQ ID NO: 118675 - DNA, 168 bp, Enterobacter cloacae
atgtctgtagggttaccgctggatctgcgtgaattccagcagcagcaagagaaagactttctacaaaccagcttacagcaggcaaaatttaaccagaaaaaagccgctgaattactgggtctgacttaccatcagcttcgcgctttgctgaaaaaacaccagatttaa

SEQ ID NO: 118676 - DNA, 645 bp, Enterobacter cloacae
atggctctggcactcgttggcgaaaaaattaacagaaaccgcttcaccggtgagaaaattgaaaatagtacattttttaactgtgatttttcaggtgccgacctgagcggcactgaatttatcggctgtcagttctatgatcgtgaaagccagaaagggtgcaattttagtcgtgcgatgctgaaagatgccatttttaaaagctgtgatttatccatggcggattttcgcaatgccagtgcgcttggcattgaaattcgccactgtcgtgcgcaaggcgcagattttcgcggcgcaagttttatgaatatgatcactactcgcacctggttttgcagtgcatatatcactaacacaaatctaagctacgccaatttttcgaaagtcgtgttggaaaagtgtgagctgtgggaaaaccgttggatgggggcccaggtactgggcgcgacgttcagtggttcagatctctccggcggcgagttttcgactttcgactggcgagcagcaaacttcacacattgcgatctgaccaattcggagttgggtgacttagatattcggcgcgttgatttacaaggcgttaagttggacaactaccaggcatcgttgctcatggaacgtcttggcatcgcgattattggctag

SEQ ID NO: 118677 - DNA, 453 bp, Enterobacter cloacae
atgaataaattactgagccttgttgtttcacttgccctattgcctggagccgtttttgcagcgtcgactccagactgtgtgaaggtgaataaagcgcaaatcgaagcgctatttgataagtggaacgagtcattgaaaacaggtaacgcgcagacggtatctgaaaattatcttagcgatgcggtattgttgcctactgtatccaataaagcgcgtttaacggacgctgaacgtgttgattatttcgagcattttcttgcgaaaaagccgaccgggaaaattgacatgcgtaccattcgcctggggtgtaataaggcgatagacaccggtacctacacatttaccttcgcggacaaatcaacggtttcagcccgctacacattcacttatgcatgggacggtaaagagtggaaaatttccacacaccactcttcagcgatgcctgaagggtaa

SEQ ID NO: 118678 - DNA, 1326 bp, Enterobacter cloacae
atgaataaatatcaggcagttattattggttttggcaaggctggaaaaacattagccgtcacgctggcaaaagcaggttggcgtgtggctctcatcgaacaatcaaatgcaatgtatggcgggacctgtattaatatcggctgtatcccaaccaaaacattggttcatgacgcacagcagcacacagattttgtccgtgccatacagcgtaaaaatgaagtggttaattttttacgtaataagaattttcataatcttgcggatatgcccaatatcgacgtgatcgacggccaggcggagtttatcaataatcatagcctgcgtgttcatcggcctgagggaaatttggagattcatggcgagaaaatttttattaataccggtgcacaagccgtggttccgccaattcctggaattaccaccacgcctggtgtatatgacagcaccggattacttaatctaaaagaattgcctgggcatttaggtattttgggcggcggatatattggcgttgagttcgcctctatgttcgctaattttggcagcaaagtaaccattttagaggcagcttcgctgtttttgcctcgggaagatcgggatattgctgataatatcgcgacgattttacgcgatcagggcgtcgatattatcctcaatgcccatgtggagcgaatcagtcaccatgaaaatcaagtgcaagtgcatagcgagcacgcccaactggcggtggatgcactgttaatagcttccggtcgtcaaccggctaccgcttcgttacatccaaaaaatgccggtatcgcagtaaacgagcgcggggcaattgtcgttgacaagcgattacataccaccgcagacaatatttgggcgatgggagatgttaccggcgggctgcaatttacttacatatcactggatgattaccgcattgtacgtgatgagttactgggtgaaggcaaacgtagtactgatgatcggaaaaatgtgccttattccgtatttatgacaccgcccctgtccagggttggtatgacagaagaacaagccagagagagtggtgctgatattcaggtggtgacattgcctgtagctgcaattccgcgcgccagagtgatgaacgatacccgtggggtattaaaagcgattgttgataataaaacccaacgtatattaggagcatcactgctgtgtattgactcccacgagatgatcaatatagtgaaaatggtgatggatgccgggctgccttatagcatattacgcgatcagatatttactcatccgtcgatgagcgaatcactcaatgatctattttcattagtcaaataa

SEQ ID NO: 118679 - DNA, 279 bp, Enterobacter cloacae
atgagcggtaagcgttatcctgaagagtttaaaactgaagcagtcaaacaggttgttgatcgcggttattctgttgccagcgttgcaacacgtctcgatatcaccacccacagcctttatgcctggataaagaagtacggtccggattcttccactaataaagaacagtcagatgctcaggccgagatccgccgtctccagaaagagctgaaacgggttaccgacgaacgggacatattaaaaaaagccgcggcgtacttcgcaaagctgtccgactga

SEQ ID NO: 118680 - DNA, 477 bp, Enterobacter cloacae; identical to SEQ ID NO: 32316

SEQ ID NO: 118681 - DNA, 1620 bp, Enterobacter cloacae; identical to SEQ ID NO: 105781

SEQ ID NO: 118682 - DNA, 228 bp, Enterobacter cloacae; identical to SEQ ID NO: 10398

SEQ ID NO: 118683 - DNA, 186 bp, Enterobacter cloacae; identical to SEQ ID NO: 10399

SEQ ID NO: 118684 - DNA, 192 bp, Enterobacter cloacae; identical to SEQ ID NO: 10400

SEQ ID NO: 118685 - DNA, 1524 bp, Enterobacter cloacae
ttgataatcagcgaaatgcaacgcaagcttgccacatgggcggccaccgatccgtccctacggattcaacggctgctgcgtctgataacacaaccagaatggctggctgaagcggcgcggatcacgctttcatcaaagggggcgcatacccccggcgttgatggcgtgaacaaaacaatgctacaggccagactggctgttgagctgcaaatcctcagggatgaattactctcaggccactaccagcccttgcccgccagacgggtttacatccctaaaagcaacggcaaactgcgaccactgggtatccccgcgttgcgggatcgtattgttcagcgggccatgctgatggcgatggagccgatatgggagagtgattttcatacgctctcatatggcttccggcctgagcgcagtgtccaccacgcgatccgcacggtgaaattacagctcacagactgcggtgaaacccggggacgctgggtgattgaaggcgacctgtccagttacttcgacaccgtacatcatcgactgctgatgaaggctgtacgccgcaggatcagtgacgcacgtttcatgactctgctgtggaaaaccatcaaggcgggacatatcgatgtcggtctctttcgggcggccagtgaaggtgtgccacagggcggtgttatatcgccgctattatcgaacatcatgctgaatgagttcgatcaatacctgcatgagcgctacctgagcgggaaagccagaaaagatcggtggtactggaataacagtatccaacggggccgaagtacggcggtcagagaaaactggcagtggaaacccgcggtggcgtactgccgctatgccgatgattttgtcctcatcgtcaaaggcaccaaagcacaggcggaagccatcagggaggagtgtcggggtgtgctcgaaggcagtctgaaactcaggctgaacatggataagactaaaatcacccatgttaatgacggctttatctttctggggcacaggatcattcgcaaacgcagtcgttatggcgagatgcgagtggtctcaacgatcccgcaggagaaagccagaaacttcgccgcatcgctgacagcactgttatcaggcaactacagtgaaagcaaagtcgatatggctgaacaactcaaccgaaaactgaaaggctgggccatgttctatcagttcgttgattttaaggccaaagtcttcagttatatcgaccgtgtcgtgttctggaagctggctcactggctggcccgcaaataccgtacaggtatcgcttccctgatgaggtggtggtgtaaatcaccgaaaccgggtcagagcaaaacgtgggttttatttggtaaaaccaatcacggcaagctcagcggcgaaatactgtaccggttggtggggcaaggcaagaagctgttccgctggcggctacccgaaggtaatccctatctgaggacggagaccagaaacacgtatacatcgcgctttacagaagtggcaatggcgttcgccagcatttaa

SEQ ID NO: 118686 - DNA, 561 bp, Enterobacter cloacae
atggatacacgattatttgcattcgtcggcggagacagcggtctttggcggatcgttggaaccgaaaccatagttggcaagtcactgcctgaagccaaaaggctcaacgtaatatctgcctcagagttgcagcccgaaaccaatgcaccctgggtacttcgcggaataacaagcaatgaacggtatgtcatgcgcgaagagaagaacgaaattgtggtgaagcagcaagggctagcgcgcccagaagcaacttgcgctgcgttgataccgatccgaaaaaacgcagcttggtgggaattcacgcaagacgagcgccggagcgttttcgaaaagtcaaagcacatccaaatcgggctcaactacttgcctgcagtagcgcgcaagctccaccactgccgcgacctctctgaaaatgaaccgttcgattttctcaattggttcgagttcgcgccaacccatgaggctgagttcaacgcattgctttccgaactgcgtgcaacagaggaatggaagtacgttgacagagaagtcgatatccgtctcgtgcgagaggcggcgtag

SEQ ID NO: 118687 - DNA, 1134 bp, Enterobacter cloacae; identical to SEQ ID NO: 26635

SEQ ID NO: 118688 - DNA, 375 bp, Enterobacter cloacae; identical to SEQ ID NO: 115962

SEQ ID NO: 118689 - DNA, 315 bp, Enterobacter cloacae
atgggtatgaactctgacgcagaatggggtgggattgatggcgggtttgatatccctaaagatcgcaatggacaagccctgatctggctggactatgaggttaatgccgacgggtcagtgctggtaaaaacattccaccgggaatacccgacagcgccggcatttgcgaggaactcacgggaaggttacgcggatagagacccggccgatattccggccgatcagtttgtcagtgtccgtgtagagatgccgcaaaacagtatctggaatcagcgtgcggctatggctgaagtacctgactcatccgctgattaa

SEQ ID NO: 118690 - DNA, 606 bp, Enterobacter cloacae
atgttcggcatgacgattcttcattcaggatttggttatgcacttcaatatgctgcacgcaatctgagcggatttcactggagaactctcgaaaacggagttaaaaatccatggattaaggtttatgacacgaataataccactaaatccagcgatggtaccctgaaagcagcatctccggtcgctcgtatcgttgcgagtgctgatacatgcctgcgctcagatattgctgaggatggtttttcatggtgcggctgcggtactgcgaacaccgaagctgaaggaatcaaaatttcccggctcgatgttggtgtttatgtgctgaccggttcggcaggcctggcgtctgatggatggcagttactgccgccaatggaccctggcggcatgggggaactgggtgtagttgaggcagagcaaaccgaaaacggcggactgactatccgcctgtttaagcgaaaatacctgctgggtgatgacggggagattgtcaaaacgaaaggggaaccgatggacgtgccggtgaacagctggatcgatgttcgcgtggatatgcctgatgattctgcctttaatcagcggatgagtcaggtacttcagccatag

SEQ ID NO: 118691 - DNA, 321 bp, Enterobacter cloacae
atgggtatgaactcagatgcggcgtggggtgggattgatggcgggttcgatatccctaaagatcgcaatggtcaggccctaatctggctggattatgaggttaacgccgatggttcggtactggtaaaaacctatcaccgtactcaccctgatgcgccagcgttcgccaggaacgaaatagacggcgtaggtgatggagaaccggtcgacatcccccatgaccagtttgtgtccgtgcgtgtcgaaatgcctgccgattctttatacaaccagaaaatcagagcagcagagctggtcatgactgccgatgcgggtgaataa

SEQ ID NO: 118692 - DNA, 1419 bp, Enterobacter cloacae
atgcgcacgccctggtatgcaaaacgtaagagctatcgagttctgttctggcgtgaaatcaccccccttgccgtgcctattttcctggagaatacctgcgtcctgctaatgggggtgctgagcacctttctggtgagctggctcggtaaagaagccatggccggggtagggctggcggacagtttcaacatggttgtgatgtccttctttgccgctatcgatctcggtacgacggtggtggtggcgtttagcctgggcaagcttgatccgaagcgtgcccgcgaagcggccagacagtcgctaatgatcatgaccctcttttcgatcatccttgcggcggttatccattattacggcaaagaaattatcgacattgtcgcgggagaagcgaccagcgaggtgaaggatctggctctcacctacctggaaatgacggtgctgagttatccggcggctgccatcgcgctgattggtagcggtgcgcttcgtggagcaggaaataccaaaattccgctgctgatcaacggcggcatgaacatcctgaatatcattatcagcagcgttttgatttacggcgtcttttcctgggaggggctgggctttgtcggcgcgggtttagggctgaccatttcccgctatattggtgcggcggcgataattggcgtactgatggcgggaattacgccatcgctgcgcctgacgctgaaaagctatttccgtccgcttaacttcgccattatctgggaagtgatggggatcgggattccggccagcatcgaatccgtgttgtttaacggtgggaaactgctgacgcagatgtttgttgccgggatgggaacagacgtcatcgccggcaactttattgccttctccatcgcctcgctcattaacctgcccggaaacgcgctggggtcggcgtcgacgatcatcaccggcagacgtctcggaaaggggcagatagggcaggcggaacggcaacttcggcacgtcttctggctttcaactattggactgacggcgattgcgtggggaactgcgccttttgccgggctgatggcctcgttctatacgcatgaaaatgacgtgaaagaggtcgtgaaggtgctcatttggctcaacgcggcgtttatgccaatttgggccgcgtcctgggtacttcctgccgggctgaaaggggcgcgcgatgcccggtttgcgatgtgggtctccatgctcggcatgtggggctgtcgcgttgtggcgggctacacgctgggggtaatgttgggtatgggcgttgtcggcgtctggctggggatgttccttgactgggccgtgcgcggggcgctgttctactggcgcatggtgagcgggcgctggctgtggaaatatccgcgaaaaaaaccggagcaggaggtttcggaaacggcaagtgcctga

SEQ ID NO: 118693 - DNA, 1128 bp, Enterobacter cloacae
gtgcaggaaatcgaagtcctcgggctgcgcaagcttctgcgcttcggtgacgctctcggcgaaggcatcccaggacatgacggcctcgatggcggcgaacggatcgcggcccgcctgcttggcctcgatcagcgcctggccgatgcggccgaacagccgcaccttggcgttgatcgccttgccggacgcctggaattgctgctgatgcttgttcttggcggcgttgaacagcttgcccaggatgcggtcgtgcaggtcgatgatttcgtcggtgacggtggccatgccctcgatggcaagcgccaccagggtggcatagcgtcgctgcgcctcgaacttggccaggtcggcgggcgtcatctggccaccctcacgggcgatcttgagcaggcggttctggtgcaccgaccgctcgatgccagaaggcaggtcgagcgcctgccacgctttgaggcgttcgatgtgttccagcatgtgccgcgaattcggtttgacgggcgattggcgcagccaggccagccaggtcgttttgccgttgtcccgacgcttgagcagatcgtcgaggcggcggcgatgcgcgtccgacagcggttcggccaaggcatcgtagatgcgccggttggcgcgggtgattgcttcggcgctcgcccgctcgacggcgttgagggcaggcagaatgaccgactgctgccgcaggtgctcgatcaaggtgctggccagcacgatgcccttgtcggtctgcaaggccatctcggtcagcaactggacggcctgccggtagtggcccatggtaaagggctggaagccgaacaccgtttgcagttcgaccaggtgctcgcgccgggtctgctcccgctgcccgtattcgtcccagctttcgacgctgaccttgagctggtcggcgaccagtttcaacaagggcggaaacggcggctcatcgacgcccaggatgacaccaggaaagcgcaggtaacagagctgcacggcgaagcccagccggttggccgggccgcgccgctgccggatgatggagaggtcggtttcgctgaacgtgtagtgacggatcaactcatccttggtgtccggcaacgccagcaggctttcgcgctcggcggcggacaggattga

SEQ ID NO: 118694 - DNA, 435 bp, Enterobacter cloacae; identical to SEQ ID NO: 31726

SEQ ID NO: 118695 - DNA, 642 bp, Enterobacter cloacae; identical to SEQ ID NO: 105789

SEQ ID NO: 118696 - DNA, 501 bp, Enterobacter cloacae; identical to SEQ ID NO: 38943

SEQ ID NO: 118697 - DNA, 852 bp, Enterobacter cloacae
gtgaaagtactcaacgagctaaggcagttttaccctcttgatgagcttctcaaggcagcggagataccgcgcagtacgttttattaccatctaaaggctctcagcaagcctgataagtatgcggatgttaaaaagcgtattggtgagatttatcacgagaataaaggtcgttacggataccgtagggtaacgttgtctctccatcgagacggggaacggattaaccataaagccgttcagcgcctgatgggaaccctctcgcttaaggcagcgattaaggtcaagcgatacagctcctacagaggagaggtagggcaaaccgcccccaatgttctccaaagggatttcaaggctacacggccaaacgagaagtgggttaccgacgttactgaatttgcagtcaatgggcgaaagctgtatttgtctccagtaatagatctcttcaacaacgaagttatttcttacagcctgtcggaaagacctgtgatgaacatggtcgagaatatgctcgatcaggcattcaaaaagcttaagcctcacgagcatcctattctgcactctgaccagggatggcagtatcgtatgagaaggtatcaaaacatccttaaagaacaaggcattacacagagcatgtccagaaaaggcaattgtctggataatgcagtcgtggaatgtttctttggaaccttaaagtcggagtgtttttatcttgacgagttcagtaatataagcgaactgaaggatgctgttacggaatatattgactactacaacagcagaagaattagcctgaaattaaaaggtctgagtccaattgaatatcgaacccagacctatgtgcctcgtgtttaa

SEQ ID NO: 118698 - DNA, 522 bp, Enterobacter cloacae; identical to SEQ ID NO: 92461

SEQ ID NO: 118699 - DNA, 1347 bp, Enterobacter cloacae
atgcttacggtatggtggttatcaagttttatcctgattagcacccttaatggctatttcgataatcaggaccgcgattttctgacaggtaaacttcagctcaccgaagagtttcttaaaacagagacgttcaggaacaaaacggatattaagtcattatcagaaaaaataaacgatgcgatggtggggcacaatggcttattcatttctataaaaaacatggaaaatgaaaaaattgttgaactctatgccaaaaattctgttgttccagcggtcctgcttaataagtcgggtgatattctcgactatatgatccagacggaagaaaataacaccgtgtaccgcagtatctcgcggcgggttgccgtgacgccggaacagggtaaaagcaaacatgtcatcattacggttgccacggatactgggtatcacaccctgtttatggacaaactcagtacctggctgttctggttcaatatcggtctggtctttatttctgtttttctgggctggctgaccacacgtattggtctgaaaccgctacgggaaatgaccagtctggcttcctccatgaccgtacacagcctggatcagcgtctaaatcccgatctggctccgccggaaatctctgagaccatgcaggagttcaataatatgtttgatcgcctggagggggcattccggaaactgtcagatttctcgtctgacatcgcgcatgagctgcgcacaccagtcagtaatctgatgatgcagacgcagtttgcactggctaaggaaagggatgtttcgcattaccgcgaaatcttattcgctaacctggaagaactgaaaaggttgtcacgaatgaccagtgacatgctttttctggcacgttcagagcatggtctgctgcggctggataaacatgatgtggatctggcagccgaactgaatgaattacgtgagttgttcgagcccctggcagacgaaacaggaaagacaatcacggttgaaggagagggcgttgttgccggagacagcgatatgctccgacgtgctttcagtaacctgctttccaatgcaatcaagtattctcccgataacacctgtacagcgatacaccttgagcgtgacagtgactgtgtgaacgtgatgattacgaatacgatgtccggccaggttcccgctaatctggaacgtttgtttgaccggttctatcgcgcagactcatcaaggttctacaacacggaaggcgcggggctgggattatcaattacaaggtcgatcattcatgctcacggcggcgagctgtcagcagaacagcaggggcgtgaaattgtgttcagagtgcgcctgttaatggattaa

SEQ ID NO: 118700 - DNA, 249 bp, Enterobacter cloacae; identical to SEQ ID NO: 32317

SEQ ID NO: 118701 - DNA, 576 bp, Enterobacter cloacae; identical to SEQ ID NO: 32318

SEQ ID NO: 118702 - DNA, 1023 bp, Enterobacter cloacae; identical to SEQ ID NO: 78996

SEQ ID NO: 118703 - DNA, 1005 bp, Enterobacter cloacae
atggaaaacattgcgctcattggtatcgatctgggtaaaaactctttccatattcattgccaggatcgtcgcgggaaggctgtttaccgtaaaaaatttacccggccaaagttgatcgaatttttggcgacatgccccgctacaaccatcgcaatggaagcctgtggcggttctcactttatggcacgcaagttggaagggttggggcattccccaaagctgatatcaccacaatttgtccgtccattcgttaaaagtaacaaaaacgactttgtcgacgccgaagctatttgtgaagctgcatcgcgtccgtctatgcgttttgtacagcccagaactgaatctcagcaggcaatgcgtgcgctgcatcgtgtccgtgaatccctggttcaggataaggtaaaaacaaccaatcagatgcatgcttttctgctggaatttggcatcagcgttccacgaggagctgccgttattagccgactgagtacccttcttgaggacaatagtttgcctctatacctcagccagttattgctgaaattacaacagcattatcactatcttgttgagcagattaaagatttggaatcccagttgaaacgaaagttggacgaagatgagattggacagcgcttgctgagcattccctgcgtcggaacactgacagcgagtactatttcaactgagattggcgacgggaagcagtacgccagcagtcgtgactttgcggcggcaacagggctagtgcctcgacagtacagcacgggaggtcggacgacattgctgggaattagtaagcgaggtaacaaaaagatccgaactttgttggttcaatgtgccagggtattcatacaaaaactggaacaccagtctggcaaattggccgattgggtcagggatctactgtgtaggaaaagcaactttgtcgtcacttgtgctctggcaaacaagctggccagaatagcctgggccctaacggcacgacagcaaacttatgtagcataa

SEQ ID NO: 118704 - DNA, 453 bp, Enterobacter cloacae
atgatcaccttcaccaaagaacagcttatcgcttctgcgcacgcgcgtattgagtttgcagagatgatgctggctggagagttagagcccctcaaagagcgcacatggtcaattgaactggagctggcgcgtatcgcgctggcatcgctcgaagcggagcctgtggcattcaatcctgcaattctggatgtggcatctgaacgccaaagacaaatgtccatcgagggatggacttctgagcatgacgacgcctatcaaaatagtgagctggcagatgcggcagcttgctatgcgattaacgcacacaatcaaggcttctcaacgcctgcgcattggccgtgggatcctgaatggtggaagcaatctggggctcgtcgtgaccttgtgaaagcaggtgcacttattctggctgaaattgaacgcatagaccgagcagccaaaggagaaaagtga

SEQ ID NO: 118705 - DNA, 288 bp, Enterobacter cloacae
atggtgttcagtgaaaacgaagtgcgtgacgctgcgttcatcgccgccgctaaccccgccaccgtgctggcgctgctggatgagctggaagccaaagaccgtcgcatcgaagaagagattgcccgagctaaccgcgagcatcaccgtggtttcatgatggcgtgcgggcatcttaaagagcattcaaacgttcattatgctgatgctgccgagatggagatagcagcccttcgcaatcgcatcaatgagttggagtccgccgcagccggtaaaggaggtgcatcatga

SEQ ID NO: 118706 - DNA, 1014 bp, Enterobacter cloacae; identical to SEQ ID NO: 5004

SEQ ID NO: 118707 - DNA, 900 bp, Enterobacter cloacae
atggagcagattctgccatggcagaatatgaccgctgtcatcgagccgttttatcccaaggcgggcaatggccgacggccctatccgctggagaccatgctgcgtattcactgcatgcagcattggtacaacctgagcgacggtgccatggaagatgccctgtacgaaatcgcctccatgcgcctgtttgcccgattatccctggatagcgccctgccggatcgcaccaccatcatgaatttccgccacctgctcgagcagcatcaactggcccgtcaattgttcaagaccatcaatcgctggctggccgaagcaggcgtcatgatgacccaaggcactttggtggatgccaccatcattgaggcacccagctctagcaagaacaaagagcagcaacgcgatccggagatgcatcagaccaagaaaggcaatcagtggcactttggcatgaaggcccacattggtgtcgatgccaagagtggcctgacccacagcctagtcaccaccgcggccaacgagcatgacctcaatcagctgggtaatctgcttcatggagaggagcaatttgtctcagccgatgccggctaccaaggagcgccacagcgcgaggagctggccgaggtggatgtggactggctgatcgccgagcgtcccggcaaggtaaaaaccttgaagcagcatccgcgcaagaacaaaacggccatcaacatcgaatacatgaaagccagcatccgtgccagggtggagcacccgtttcgcatcatcaagcggcagttcggcttcgtgaaagccagatacaaggggctgctgaaaaacgataaccaactggcgatgttattcaccctggccaacctgtttcgggtggaccaaatgatacgtcagtgggagagatctcagtaa

SEQ ID NO: 118708 - DNA, 840 bp, Enterobacter cloacae; identical to SEQ ID NO: 6027

SEQ ID NO: 118709 - DNA, 291 bp, Enterobacter cloacae
atgcatgtgcgttggggttttgacgctgcgcagggataccatggcgatgactccccccgccagacaaaacgccagtgccagccacagggtgcccatctccccgatgtgcggaatggtaaagctaggaatgtagctgccgaacacgccgatgccgatagagtaaaccgcccagaaccagcccagcgccgcgctggtactgccactgcgaacgttatgcacaatggcgacgataaaggcatagaggaacagcggataggccaagccgcggatcccgtagaacagcagaattaa

SEQ ID NO: 118710 - DNA, 780 bp, Enterobacter cloacae; identical to SEQ ID NO: 56175

SEQ ID NO: 118711 - DNA, 786 bp, Enterobacter cloacae
gtgcgcgactcgacctacgtgctcgacggcctgctgtatcacgaatccgacctgcggatcgaggagcactacaccgacacggcagggttcacggaccacgtcttcgcgttgatgcacctgctgggcttccgcttcgccccgcgcattcgtgacctgggcgacaccaagctctacatcccgaagggcgatgccacctacgaggcgttgaaaccgatgatcggcggcacgctcaacatcaagcacgtccgcgcccattgggatgaaatcctgcggatggccacctcgatcaagcagggcacggcgacggcctcgctgatgctcaggaagcttggcagctacccgcgccagaacggcctggccgtcgccctgcgtgagctgggacgcatcgagcgcacactgttcatcctggactggctgcaaagcgtcgagctgcgccgccgcgtgcatgccgggctgaacaaaggcgaggcgcgcaacgcgctggcccgcgccgtgttcttcaaccgcctgggggaaatccgcgaccgcagcttcgagcagcagcgctaccgggccagcggcctcaacctggtgacggcggccatcgtgctatggaacacggtctatctggagcgggccgcgaacgccttgcgtggccacggtcaagccgtcgatgacggcctgttgcagtacctgtcgccgctcggctgggagcacatcaacctgaccggcgattacctctggcgcagcagcgccaagatcggcgcgggcaagttcaggccgctacggccgctgcaaccggcttag

SEQ ID NO: 118712 - DNA, 705 bp, Enterobacter cloacae; identical to SEQ ID NO: 8686

SEQ ID NO: 118713 - DNA, 321 bp, Enterobacter cloacae
atgggtatgaactcagatgcggcgtggggtgggattgatggcgggttcgatatccctaaagatcgcaatggtcaggccctaatctggctggattatgaggttaacgccgatggttcggtactggtaaaaacctatcaccgtactcaccctgatgcgccagcgttcgccaggaacgaaatagacggcgtaggtgatggagaaccggtcgacatcccccatgaccagtttgtgtccgtgcgtgtcgaaatgcctgccgattctttgtacaaccaaaaactcagtgcggcagagctggccatgactgccgatgcaggtgaataa

SEQ ID NO: 118714 - DNA, 276 bp, Enterobacter cloacae
atgggggatgtcgaccggttctccatcacctacgccgtctatttcgttcctggcgaacgctggcgcatcagggtgagtacggtgataggtttttaccagtaccgaaccatcggcattaacctcatagtccagccagatcagggcttgtccattgcgatctttagggatatcaaacccgccatcaatcccaccccattctgcgtcagagttcatacccatgcagccctcgatcagatactctccggctttcatgcgagttacggtacagccttctga

SEQ ID NO: 118715 - DNA, 501 bp, Enterobacter cloacae; identical to SEQ ID NO: 83644

SEQ ID NO: 118716 - DNA, 276 bp, Enterobacter cloacae
gtggcttctgtttctatcagctgtccctcctgttcagctactgacggggtggtgcgtaacggcaaaagcaccgccggacatcagcgctatctctgctctcactgccgtaaaacatggcaactgcagttcacttacaccgcttctcaacccggtacgcaccagaaaatcattgatatggccatgaatggcgttggatgccgggcaaccgcccgcattatgggcgttggcctcaacacgattttacgtcacttaaaaaactcaggccgcagtcggtaa

SEQ ID NO: 118717 - DNA, 369 bp, Enterobacter cloacae
atgcacaagcgcgacgacggttttgtggtggtggacgaggatgtctgcatcggctgtcgctactgccacatggcctgcccgtacggcgcgccgcagtacaatgccgccaaaggccacatgaccaagtgcgacggctgccatagccgcgtagcggacggcaaaaagcccatctgcgtcgaatcctgcccgctgcgcgcgctggactttggcccgattgaagagctgcgcaaaaaacacggtcagcttgctgccgtcgcgccgctgccgtctgcgcacttcacgaagccgagtattgtgattaaacctaacgccaacagccgtccgacgggtgacaccaccggctacctggcaaacccgaaggaggtgtga

SEQ ID NO: 118718 - DNA, 198 bp, Enterobacter cloacae
atggaaactttattcgcgctcgtcctgaccgtggcaatgaccaacggtgattatcaggacgtcattctcggcgtttacgacagccaacaggaatgcagccaggcagcaacagagcagaaagtaacagcagaattctggccggtagaaagcatccttcgcaacggcgagttcccggcgaaatccatcgcgcaacagtaa

SEQ ID NO: 118719 - DNA, 141 bp, Enterobacter cloacae; identical to SEQ ID NO: 36145

SEQ ID NO: 118720 - DNA, 1200 bp, Enterobacter cloacae
atgaaaaaaacaacgttaatggcgattgccatcgcgatagctgccgttggcggctattttgtcggacagaagcagacgcatcagccggatgcggcttcacaaccctcagaacgcaaggtgctttactggtacgaccccatggtgcccggtcagcgcttcgataagccgggtaaatccccctttatggatatggatctggtcccacgctacgccgatgaagcgcaggcggcgtcaggcgtggccatcagcactcaacagcagcaaaacctggggatgaaaaccgccaacgttgagatgcgccagctggtttcgccgttctcggcctttgccacggttgcaacggatgaacgtaacgtctcggtgttgtcagccccggccaatggcgtggtgtcaaaattgtttgttaatgcgccgcagcagcaggtaaaagccggagaggcgctggcgcaactgtggatcccgcagtggaccgccgcccagcaggagtatctcgcggttcgtcagcttggcgatgccgcattgacccgcgccgcacgcgagcggctggcgttgcagtttatgccagaagaggtcattcgtttgctggagcgtagcggtaagccgcagaccacgctcattctgcgcaccaaccgggcgggctatgtggtgaagctggacgtgcgggaaggggcgcaaatcaccgcaacggcgccgctgtttgagatcgccagcctcgatccggtctggctggtggtcgactacccgcaaacgcaggcgcagtctctggcggtgggcagcaaggtggtagcaacctcagaaagctggccgggggagcagttccacggcacggtcagcgaattgctgccgcagatggaggcggccacgcgaaccctgaaagcccgtatcgtgctggaaaattccgcacataagctgaagccgggcatgtacctctccgtcaggcgtgcggaagagctgaaaggcccgccggtgctggcggtgccggaagaagcggtgattaacagcggagagtctgcgcgtctgctgctggctaccggggacggttatttccagcctgtgacggtgaaaaccggcctgacggcgcagggctggacggcgatcctgtccggggtcaaagagggcgataaggtggtgacgtccgggcaattcctgattgattccgaagccagcctgcgtagcgtgatgccggaggtgacgccatga

SEQ ID NO: 118721 - DNA, 1368 bp, Enterobacter cloacae
atgcttacttttctcgaactcctcattggagtcgtggtcattgtcggtgtagcacgctacatcattaaaggttactcagccaccggcgtgctatttgtcggcggcctgacgctgctgatcattagcgcgctaatgggtcatcaggttttacccgccagcgaagccagcaccggatataccgctaccgatattgtggaatatataaaaattctgctgatgagccgcggcggcgacctgggcatgatgatcatgatgctctgcggatttgctgcctatatgacccatatcggtgcgaatgatatggtggtgaagctggcttctaagccgctgcaatatattaactccccctatctgctgatggtcgcggcttatttcctggcctgtctgatgtcattagccgtttcctcagcaacgggccttggcgtgctgttaatggcgacgttattcccggtaatggttaacgtcgggatcagccgtggcgcagcggcggctatttgcgcctctccggcggcgattattctctcccctacttccggtgacgtggtgctggccgcgaaagccgcggaaatgtcgctgattgacttcgccttcaaaactacactgccaatctccatcaccgctattctcggcatgggcgtggcgcatttcttctggcaacgctacctcgataagaaagagaacgtcagccatgagatgatggacgtcagtgaaatcaccactaccgccccggcgttttattccatcctgcccttcacgccgattattggcgtgcttatttttgacggcaaatggggccctcagctgcacatcatcactatcctggtgatctgtatgctgctggcggccatcctggaatttgttcgtggctttaatacccagaaggtgttcacgggtcttgaagtcgccttccgcggcatggcggatgccttcgcgggcgtggtgatgctgctggttgccgcaggggtgtttgctcaggggctgagcacaatcggctttatccagagcctgatctctatcgccacctcgttcggctcggccagcattatcctgatgctggtgctggtggtactgaccatgctggcggcgatgactaccggctccggtaacgcgccgttctatgcgtttgttgagatgatccctaagctggcacactcctccggcatcaacccagcttacctgtccattccgatgctccaggcctccaacctgggtcgtaccatttctccggtatcgggcgtggtggttgcggttgcagggatggcaaaaatctctccgtttgaagtggtaaaacgcacgtcagtaccggtgctggttggcctgattatcgttattatcgccaccgaagtgctggttcccggcgctgcctaa

SEQ ID NO: 118722 - DNA, 810 bp, Enterobacter cloacae
atgttcaggaaggatatcgttatcccgtctggcgcagtagcgcttgcactctgtgtcttctcaattcaggcagatccgcttaagccaacccagtacggcgatttcgatcgctacgttctggctctttcctggcaaacgggattttgccagagtatggtcgaacgcaaccgtgacgaaccggaagagtgtcgcctgcaaaaagagagcagcaacaaaaccgattttctgaccgtccacggcttatggccagcgctgccgaaatctattgccgctcgcggagtggatgaacgccgctggatgcgcttcggctgtgccactcgtccggttccgaatttgccggaagcaaaagccagccgcaaatgtgacgccgcagagaccggactatcgctaacgggcgcggcgaagctgaacagcgtgatgcccggcgcgggcggcaactcctgccttgaacgttatgaatacgcgaaacacggcgtctgctttggttttgatcccgacgcttacttcggcaccatggtgcgcatgaaccaggaagtgaaaaatagtgcggttggggaatttctggcggaaaactatggcaagaccgtccgccgtagcgattttgatgcagccgtggccaaaagctgggggaaacagaacgtaaaagcgttcaagcttacctgccatggcaatccggcttatctgaccgagatgcagatctcgctaaaatccagcaccattaacaactcgctctcagccagcacctttgcgccacagccgcatccgggcaactgcggcaaacagtttgttatcgataaagctggttactga

SEQ ID NO: 118723 - DNA, 225 bp, Enterobacter cloacae
atggcttcagtttactcggatgaataccagcgtgttatcaatgcgttgaagaaagcgcgtaaagagaaggggatgactcaggcgcagcttgcggaggcactgggaaaaccacaatcgtttattgctaaagtggaaaacggtgagcgtaggttggacgtggtggagtttgtgcatctggcgaggctggttggcgcagatgtgcagaggattatcgccagtatttaa

SEQ ID NO: 118724 - DNA, 1065 bp, Enterobacter cloacae
atgaaaaagattgcgctctctttggtagctcttgggctactcacttctctgccgggcctggcggctacccccgcgccggttccgaccgccattgccagccatgacggcccgatccgcatcgcggtgatccgcaacctgggctcggacgacaacaccacgcagtttgttgccggggcgattcaggaagggaaaaagctcggctttaaggtcagcacctttttaagtaacggggacgacgccaaattccaggatttcgttaaccaggccatcagccagaaatacgacgggattattctctctcaggggcgcgatccgtactccaccgcgctggtgaagaaggcggtggatgccgggatcaaagtttcggtgtttgataccgctgtgaacggcgagatcccgggcgtaaccgttacccagcaggacgatgcctccctgaccaacctctctttcggccagctggcgaaagatttcaacggcaaggccaatatcgtcaagctatgggtcgcgggcttcccgccgatggagcgccgtcaggcggcctacaaagaactgcaaaagcagtacccggagattaaagagctggagtccatcggcgcggtctcctctgacgtgcagggcgacactgccaacaaggtgggcgcgatcctcgcgaaatacccgaaaggtaaaatcgatgccatctggggtacctgggatgccttcagccagggcgcgtataaggcgctgaaagagaacggccgaaccgagatcaaactctacagcatcgacatctccaaccaggatttacagctgatgcgcgagccgggtagcccatgggcagtgagcgtggcggtggatccgaagctgattggcgcgaccaacgtacgcctgattgccaataagattgccggagaagcgacgcctgccacttacgatttcaaggcggcggccattccgcaggcgctgctgaccgcccagccgggcgcggtgaacgtggcgtctctggggaaaatcattccgggctggggccagacggaagattttgttgcgccgtggtttgcgacgctggaagccaggtcaaaataa

SEQ ID NO: 118725 - DNA, 2106 bp, Enterobacter cloacae
atgaacaactcagggaaataccttatatgggcagggctctccgttgtgggagcctttgccctgggctacatcgccctcaaccggggggagcagatcaatgcgctctggatcgtggtcgcctccgtctgcatttatctgatcgcataccgtttttatggccgttatatcgcgaagacggtactgggcgtagacggcacgcgcatgacgccggccgtgcgtcataacgatggtctggactacgtgccgaccgataaaaaagtgctgttcggtcaccatttcgcggcgattgccggggcaggcccgctggtggggccggtactggccgcgcagatgggctacctgccggggatgatctggatcctcgcgggggtggtgctggcgggcgcggtgcaggacttcatggtgctgttcgtctccacccgtcgcgacggtcgttcgctgggtgagctggtgaaagaggagatgggggcaactgccggggtgattgcgctggtggcgacctttatgatcatggtcatcatcctcgcggtattggcgatgattgtggtgaaagccttgacccacagcccgtggggaacctataccgtcgccttcaccattccgctggcgctgttcatggggatctacattcgctatctgcgtccgggacgcattggtgaagtttcagtcattggcctggtgttcctggtgtttgctattatctccggcggctgggtggcggaaagcccgacctgggcaccgttcttcgacttcaccggcgtgcagctgacctggatgctggtgggttacggcttcgtggcggcggtgctgccggtatggctcctgctggccccgcgtgactacctctctacgttcctgaaaattggtaccatcgtcgggctggcgatcggcattctgattatgcgcccgaccctgaccatgcctgccctgaccaaattcattgacggtaccggcccggtctggaccggcaatctgttcccgttcctgtttatcaccatcgcctgtggggcagtgtctggcttccatgcgcttatcgcctccgggaccacgccgaagatgctggcgaatgaaaatcaggcctgcctgattggctatggcggcatgctgatggaatccttcgtggcgattatggcgctggtctcggcctgtattatcgacccgggcgtgtacttcgcgatgaacagcccgatggcggtactggccccggccggcactgttgacgtggtcgcctctgccgcgcaggtggtgagcggctggggctttgcgattacccctgaaacgttgacgcatatcgctaacgaggtcggcgagcagtcgattatctcccgtgcgggcggggcgccgacgctggcggtgggcatggcctacatcctgcacggtgcgctgggcgggctgatggatgtctcgttctggtatcacttcgccattctgttcgaggcgctgtttatcctgacggcggtggatgccggtacgcgcgcggcgcgctttatgttgcaggatctgctgggggtgatctccccgaatctgaaacgtaccgattcactcccggctaacctgctggcgacggcactgtgcgtgctggcgtggggctacttcctgcatcagggcgtggtcgatccgttgggcgggattaacaccctgtggccgctgttcggtatcgccaaccagatgctggcgggcatggcgctgatgctttgtgccgtagtcctgttcaagatgaagcgccagcgttacgcatgggtggcgctggtgccaacggcgtggctgctgatctgtaccctgacagcaggctggcagaaagccttcagcccggacaacaaggtgggcttcctggccattgccaacaagttccaggcgatgatcgacagcggcaagatcccggcgcagtacaccgaatctcagctgtcccagctggtgtttaacaaccgtctggacgccgggctgaccatcttctttatggtggtggttgtggtgctggcgttgtattctctgaaaaccgcgctggcggcgttgaaagtcgacacgccaacggcgaaagagacgccgtatgagccaatgcctgagaacctggacgagattgtcacccaggcgaaaggggcgcattaa

SEQ ID NO: 118726 - DNA, 696 bp, Enterobacter cloacae
atgaacagttcagtacctcaggatagtcaggtcgggccgggcgcgtacttcgcgctggcgtttgcagccgttttcttctcgggtctgttaggtggacaagagtggtacggcgtctttgatttcaccaccctcaacggcgcatttggcaaagtggtcagcaaagccagtctggatgacggtacgttaaccacagccagcagcgcctttcgcggcaccggcggcagcggcgcgatggacgggtttatcttcgcgctcggtttaattcccgcggtgatgttcgccctggggatgatcaacgtgctggagcactatggcgccctgcgtgccgcgcgaaaactcttaactcctctgctgcgcccgctattggggatccctggcaccaccgggctggcgctgattggcagcctgcaaagtaccgacgtgggcgcgtcgcttacccgtaatctctctgatgaagggcaaatcagcgaaaaagagaaagacgttttcgccatgttccagttctccgccggggcgatgatcaccaactttttctcttccggggcgatcctcttcacgctgctcgccgttgacggcacggcggcggtgcccacctccatcggggcctgtatcgcggtgatgtttatcatgaaaattgtcggcgccaatctgctgcgcctgatcctgacgtttacccataaaggagacgccgcatga

SEQ ID NO: 118727 - DNA, 465 bp, Enterobacter cloacae
atgagtgccccacagtccaatcccgtcattaccgatgtgtttatcgaaggcgcgcgcaaaggctggagcattgccaccagcagcacgctgcccaacgtggtgatggcctttatcatcatcaaggcgctggaaattaccggcgcgctgaaagggctgggcacgatcttctccccgctgatgggcctgtttggcctgccgggcgaagcggccgccgtgctgattggcggctggatgtcgatgggcggcgggatcggcgttgccatcggcctgtttgataaaggcatcctcaccggcgagcacctggcgatcctggcgcccgccatctacctgatgggctcgcaggtgcagtacctgggccgcattctgggggtgattggcacccgcgccaaacgtattccgctgatgatcgccctctcggtggtcaacgctttcttagccatgctgctgatgcgcattattctctga

SEQ ID NO: 118728 - DNA, 1113 bp, Enterobacter cloacae
atgaaccttgaccattatatcgaagagctgaaaaccctggtgaacgtagactgcggcacccagacgattgacggcgtcgccgctgttgcaggcatcatgcagcaactgtggcagcgcgaaggctggcatacggagcaggtgaacctgggcgacaaggtgggccccggcgtcttcgtcagtaacaagccgcaggcggaacggttcgacgtgctgctggtcgggcatctggataccgtatttcccgccggcaccgtagccgcgcgtccgctgagcgaggatgaaacccgcctgtacggccccggcgtctcggatatgaagagcggacttctgaatattttgtgggcaatgcgcgcgcttgacgccgcagacaacgatcgtctcgcgattgccgttgcgatgaacccggacgaagagaccggatctgtccattcccatgagtggattggcgagctggctaagcgttcccgctgcgtgctggtgtgcgaagccgcccgcgccgacggttcgctggtgaaagcgcgtaaagggatggcgggctatcacctcacctttagcggcgtggcggcacacgcgggcaatgacccggaaaaaggccgctcggcgatcaccgcgctggcaaagagcgttatcgccatcaatgcgctgacggactgggatcgcggcactacacttaacgtcggcgtgattcagggcggcagcgcggcgaacgtggtcgcggacagcgctgtggcagaactggacgttcgcttctgggaaaacgacgagtatgaccgggtgaaccaggcgctggagttgttatgtgaacaaggctttttagacggcgtgaccaccacgctgacgcgggttaatcacaaaccggcgatggccgcgagcgacgcgacgcaggcgctgatgcagcaggttgaagcggcgggtaaagcggaaggcatcgacattacctggcaggcagtcggcggcggcagcgacgccaaccacaccgccgcgctcggcatccccacgcttgacggcttcgggccggttggcgccgggttccacagcccggcggaatggctggataaagcgtccattgcgccgcgagttcggctgttgaagcgggtggtatcgatgttgtaa

SEQ ID NO: 118729 - DNA, 855 bp, Enterobacter cloacae
atggctattccaaaattaaccgcatatgcgctgccaaccgccgccgaactgccgaccagtaaagtaagctgggcgtttgaaccggaacgcgccgcgctgctgatccacgatatgcaggagtacttcctgaatttctggggcgaaaatagcgatatgatgcagcaggtagtggcgaacatcgctaaactgcgcgcgtactgcaaagagcacaatattccggtgtattacaccgcgcagccgaaagatcagagcgatgaagaccgcgccctgctgaacgatatgtgggggccgggtctgactcgctcaccggagcagcagcgcatcgtcgctgagctgaccccggacgaagcggacaccgtgctggtgaagtggcgctacagcgcgtttcaccgctccccgctggagcagatgctgaaagagaccggccgcaaccagcttttgatcaccggcgtgtacgcccacatcggctgcatgaccaccgccaccgacgcctttatgcgcgacatcaaaccgttctttatcgccgacgcgctggcggatttcacccgcgacgagcacctgatgtcgctgaaatacgtggccggacgttcgggccgcgtggtgatgaccgacgagttgctgccgtctgttccggcaacgaaagccgcgctgcgtgagctgatcctgccgctgctggacgagtccgacgagccgatggatgacgaaaacctgatcgactacggtctggattcagtacggatgatggcgctggccgcccgctggcgcaaagtgcacggcgacattgatttcgtgatgctggcaaaaaatccgaccctcgatgcctggtgggcgctgctctcccgcgaggtgaagtga

SEQ ID NO: 118730 - DNA, 285 bp, Enterobacter cloacae
atgagtatttttaatgaattaaaatcttcgcttgaagaggccgttgagatccataacggaagaaaagccgcttcccgggtaacccgctatgaagttgctgatgtgcgcgccatcagagagcagctcaatatcacgcaaagcgaaatggcgaaggcgcttggcacgagcgtcgatacgataaagagctgggagtctaaacgtcgcaacccaaccgggctggcggcgaaggtacttaatgtgattcgggagaatcctgcattttataaggcacttgccgggcagtga

SEQ ID NO: 118731 - DNA, 450 bp, Enterobacter cloacae
atgcagcaagagcctgatgctgaagcattcgggcttttgctgcgtttagggaaggaactatggatgagtcatgcgatagagtttatcgaaacatcactctttacccgacagattaaaagcattgctacggatgatgaattaaaggatctgcaaaaggaacttattgcctggcctgataaaggtgacctgatccagcagacggggggtttacgtaaaataaggatggcggcaggctcaaagggaaagagaggggggatcagagtgatttactttcttgccacagaggaggtgatctatttcattatggcctatccaaaatgcataaaggacagcctgacagagacagagaaagcagaacttaaaaagctgacttccattctgaaaaatactgcttccagtgccgtaaatttgaggtgtactatgtaccctaatcaggcaggtggaggctga

SEQ ID NO: 118732 - DNA, 453 bp, Enterobacter cloacae
atgaaaacgttaatctctcttactgccctcctcggactagcctctgcttctgcctttgctgccactgcaccagagtgcgtaaaagctgacaatcagcagattgaagcgctcttcgataaatggaatgcatcgcttcagacaggcgatgcccataaagtggcggataattacctgagcgatgcggtattgctgccgacaatatcaaaccaggtcaggctgacggataaggagcgtgtggattacttcgaggattttctgaagaagaagccgttcggtaaaattgacagccgcaccattcgtctcggctgtaataaagccattgataccgggacatacacttttactttcgcggataaaacatccgtaaccgcacgctatacctttacctacgcatgggacggaaaagcgtggaaaatctcatcgcaccactcttctgcgatgccagaagggtaa

SEQ ID NO: 118733 - DNA, 144 bp, Enterobacter cloacae
atgcttgcacacctgtgcgttttcagcgaagcagtaaattcttatgtaaataaagttttcattgtaacttattgtatattagcatttttgttgggtgtgttttacttgtttgtatatcatttcaccttgtttatctttatgtaa

SEQ ID NO: 118734 - DNA, 1374 bp, Enterobacter cloacae
atgtgctttatacttaaccgcactctcgttcctggcgctttacggcaaagaactgatgaagacaacaacatgactacttttcgcgtcagagacatttttattctgggctttctcaactttgctctgtttgtcggggcgggtaatatcatctttccgccgttgatcgggctacaggcaggcacatccgtctggtttgcggcaatgggttttctgttgacgggcgtcggattgccggtgattaccgccattgccatggcgaaagcgggcggttcgctgtcggccatcacccgtcccaccgggcgcatctgcggtatggcattgactcttgcctgttatctttgtatcggtccgatctttgctattccacgtaccgccaccgtctcttacgaactggcattgcagcattatcatgtgaataaaagcgggttgcccctgtggagcttaatcttttttagcctggtgattctggtgtccctctatcccggacgtcttctcgataccgtagggaaatttttatcacccttgaaaatcattgccctgctggtcctgacggtcacggccgtgctcatcccggcaggagcgccaatgccaccccagggactgtacgcaacctcccccttttctcaggggatcactaacggttatctgacgatggatacgctggcggctctggtctttgggctggtgattgtcagggcaattcagtccaggggcgtgacctccccacgtcttatcacccgctacgcgctatactccggtctgattgcgggtgtggggctggtcgtcgtttatgccggcttgttccgtctggggctaagcagcagcgggctgattgagggcgcaacgaacggagcacaggtcatcagcgcctatgtgcattttagctacggggctgccggagatatttttctgggcgtgctgatgacccttgcctgcctggtcaccgcgatcggtctgacatcggcctgcggctcctggtttagcgatcacacccgcttcagctatcgcacctgcatctggttttttgccatcgtctcaatgctgatctccaatattgggcttacccaactgattaatctgtcagtgccggtcctgacggcaatttacccggtattcgtggtgctcatcctgacatttttctttcgtgaaaaattccattccacgaccctggtcattatccccgccgcgttcgttaccttcctgttcggtctggcagaggcgctcaactcttcaggcggtccacggtggctggcctcgctcaccgccagcatgccgctgcataatcaggggctggcctggctgcttcccgccgccagcatagttttcgtcatgtccattattgaccatgtccggtataaacgagaatctcgctag

SEQ ID NO: 118735 - DNA, 423 bp, Enterobacter cloacae
atgtttgaagacaatcaaaaaaaactctatatcgttgttaaccgtatgatggagccggctttacttttgaatgccaccgcccacctcgcagctgggatcatgcgtaaagcggatgacgcgctctttcatgactattcgaatgaagaaagcggtttacaggcctatcttagccattatccggttgtcatccttcaggcaaaaaacagcaatcagctcaaaacagcgctgctaaaatgtcagggcgcggatataacgtttaactacttcagcacgacgatgcttggcgcgtcgtctgaagcccagattcaggcgacgaaagaaacctctctggagtctctggagtttatagccattgcgctttacggggataccgaacgaatgttgcccgtcacgaaaaaattctccgtctttaaaatggtataa

SEQ ID NO: 118736 - DNA, 345 bp, Enterobacter cloacae
atgcgtctggcatcatatgctattgcgttactattcatcacttcactgacgggctgtaaaccggaaaatggaaaggcttttgttggaaattggattgaggaaacaaattcaaagatcccggttaaaatttctatagcagacatgaaatcagggcaacgtcatttctatgcggtaaaaataaccgatctcatatgggataaagaaacgggcgtccattacaacacgaaaaaaatcaatgccatgctggataaggaaaacttcctgtgggcgaataatggggataacttcatcatttttgacgatcatcttatgtacaacggagatcgctacaaacgcgttcagtag

SEQ ID NO: 118737 - DNA, 1137 bp, Enterobacter cloacae
atgcattattgtataaagcaaagaggtggtgatatgtacaggcttgtattaactgttttgcttttgtatccattctcaacctttgccacatgcgtgttaaatacgagtgatacaagcatgttgcaacaggagcaaacagttcaaattccattgaatcatcagatgatatcggttgggcaggatatgcctgtgggttccgtaatatacagtcaaacttatcgatcagggttaagtaattataaagtatcctgtgccagtagtggtggttattttcgagtcagtcgacaaatagtttatacgcctatgcctgtttcaggatattctggaggggcatatacaaaagtatacgagacgggtattcctggagtaggtgttagtatatggaatggtggtatgaatatgtggcccaatgagtcgataacatgtaccgggcttgatgggattaattgtacgataagtgacccttatagcgttaacgccttcgacataacatttataaaaacgggcgatatcaccccaggactcctcgatgcttcgagtttgccgacggtttcgataagtcttggaaagcaaacagagaattatgtaaaaattgcaacttactcatttatcggcagcattcaggttagtacttcaacctgcacgacacccgattataccgtcccattggggaactggtcacaaacaagatttaagagtaaaggatctgccagcgcgtgggtgaccgccagtattgttttaacaaactgtaccagggccattggaaatacaacgactggaaatgtctggtcggaaaatgcctcagtcatagccgtaggaaccatacaacctaacccctggactgtttctttttcctccgtcagcggcgttattgatgctgataacggcatcatcgctacggacacgtcagcaacagatgctgcacaaggggtagggatacagctcagccagggtctacctgacagcgcaggaactaaccttataaaaatcagtgatagtgcaataaccggaacgttacctacaacgggagaaacgtcatatgtcattccattatcggcgcgtattattcagaccgaagattctgttgtggcaggtaacataacgggaaaggtggtttacactttaaattatctgtag

SEQ ID NO: 118738 - DNA, 537 bp, Enterobacter cloacae
atgaaagttttagtctgtgtatttactgataatgagtttttattttcagcaatggtggaattgctctcctcccatccgcttttagcggaaaaatatggactacgcaaaatccgttcagatgaaattgtagcgtggatgcgtacggcagatgatcggaatatgattatggccgggcctgatatggagcctctggtcagagctttttgccttgataaacagttggattatttgacgaccagattcaatgccagtgaaatccaggattttttggtgcacgggataagccctcatcatgagagaaatacgaatcttgttcgggcaagaaaaaccatgaggctttcaaaacaggaattaagagtactgtcatggtttatgctcgggttaacgcctcatagtatgtccagatattatggtttatcgattaaaacaatcagtacctataagagacgcctgatggaaaagctttgcattacatccgatgccgagctttttaaggtggggatcacctatcaaacgtatcgtaatcattttggctaa

SEQ ID NO: 118739 - DNA, 2484 bp, Enterobacter cloacae
atgaaaaagggattatcggtatggcctgcgctttcaaccgtggcttatggggttttctctgcactgttttacgctttcggagttcatgctgatgatgacatacagtttgacagtaattttttgcgcatctcccatcctgaaaacgttgatctctcggcttatatgaataatgcgatgcctgccggcagataccgggccgatatctatctgaacgataagcttgtcatgatcgatgatattcgcatcagcggaaaagatgcccgctctcagcgcattttgctatcgcaggcgaccgtcacaggattgcagttaaaaaaaagcaggctgtgcgccagtaatgccgggcagtggtgcgatctccaggccgtcctgccagaaagccagctgaaatttaacggaggcagacagcgccttgacgtcagtatcccccaggccatgttgcagcatgtcgcacgcggcagcgtgagcccggtgctctgggatgctgggatccccgcgctgctgctggggtataacgtgaatggctatcgcagcgaaaatagcagtggggaatataacaacctctacgcggcgctgaacggcgggctgaatatcggagcttggtattttcgacataacgggacgttaagctggcagcagcagaatggtacgcagcagaaaaaatatacggtgcttaacagctacgttcagcatccgctggcgggtattgaagggaacctgattctgggggagtcaaacacctccggacagttatttgactccgtgtcatttaccggcgcatcggtagccagtgatgaccggatgttgcccgcttcgcgtcggggctatgcgccggagatccgcggggtcgcgcaaaccaacgcgaaagtgacgatccgtcagaacggaaaagtcatttatgaaacaacagtatcgcccggggcatttgttatcaacgatctctatccgagcgggtatggcggcgatctgaacgttacggtgctggaggctgacggctcgcagcatttttttgacgtcccctatgcatcggttgcacagctgctccgcccgggaacaagccgttacagcgcgacggcgggcaggctgaggggagactatctcagcgagcgcccggcatttagtgaagtgacgtatcagcgggggctgacaaatagcgtcaccggttctgggggcattcaagccacgtcattttatcaggctatgcaggcaggccttgctgtgggaacacctgtcggagcagtgtctctcgataccacatggtcgcaaacccggctaagagaaaaaacactccggggagaaagcatcaggctgagctacagcaaatatattcccgcaagccggacgcagttttcactggccacctggcgatactcaacggggaattatctttctctgatggatgccaccctactacatcagcagcggcctgatgagataacagacggtcaaaccggtagaacccgtaaccgggtgacgctgaccctcaaccaggggctgcctgacaagtggggacagctttatgtgacgggcattcttcaggactactgggggcggaaaggctatgaccagcagtatcaggcgggctataccctgacaacgggcagggtgaactggagcctgggtgtcaaccgaagccgctcggcggggggagaatttcagaatatctggacgttgagttttaacatgcctttgggtagcgccagcacaccgctgcttaccgggcaggtgtcgcgagacgggcaaagacatttcagcgagcaggttgcgctttccggcagcgccggcgagcgacagcagttcagctggaatgccggggcgtcacatcagtatcagtcgggggattccgggcaaataggcgggagctggaccgggccagtttctacccttacagcaaactatgctcaggggaaagcatggaagagtggctcagtgggagtgagcggcacggccgtcgcgcattccggcggggtcactttctcaccctggacaggcaacacctttgcgctggttgaggcgaagggtgcggaaggtgctgaaattcccggctatgccggaacgcgcgtggatggatcgggctatgcgttggtaccaaacctgatgccctatcagaaaaatgccgtatcgatagataccacctcggtagaggatgatctcgatctcgacagcaccagcaagcaagtgatcccatacgctggcgccgtagtgaaagtgaaatatcgcgccactgagggtgtaccggtactgataaaagtacgcaggagtaacggtgagggtgtgccattttctgctcgtgcgacagatgccagcaataatatcgtggggtatgtggggcaggggggccgcctgtatgcccgtctggcgcagcaaagtgggatactggaactacgctgggctgaaggcgaagggtcacgctgcaaaatgaagtattcacttccgtccacagcgggaaaaaaattgctcatcttcgattcaatttgtaattaa

SEQ ID NO: 118740 - DNA, 699 bp, Enterobacter cloacae
atgaaatttaaaattttctgtacgtttatatcactctgtttttttagccatctcactgtggccgctgtctcgctttccggaacgcgagtaatttatccgcagggtaaaaaagagatttcgctggagattaaaaatcacggtccccaaccggtattgactcaaaactggattgatgacggaaatattcatgcgtcacccgatatactgaatataccttttgtcattacgccacccattgccagaattaatcctgaacaggggcaaacgttgcgcatttctattctggagaacatgctgccgcgggataaggaatctgttttttgggtaaacgtgctggaaattcctgccgtcaataaaacggcggaaaataaacttcagatggctttccgtacgcgcattaaattactttatcggccggaaggactcgcagggcaaccggagtcagcagcgcagcaactcacctggagacgaatatcctccacacagcttgaagcggtaaataataccccatggaacgtatcccttgccggggtagtttccggccgctggaaggctatgggggatttagtgcccgcttacggtaaaaaaaatttcacggttaaacgcggatcttctctgtcatctaatggcgacataacctggacgtacatcaacgattatggagctgaacgttccgcaagaggtcgcttgaataattaa

SEQ ID NO: 118741 - DNA, 549 bp, Enterobacter cloacae
atgtctgaatatattaaggtatttctggcgttatgctcttttgttttcactggtacgctcgcccatgcggccagttcaggtacgatcacctttaccggttcggtgaacagtgaaacctgtgcggcggtggtaaataatggtaatgccgatgcgacagtaacattacccgccgtaccgacatcagcattaagtgcggcaggagcgacagcgggggcaaccacatttacgattaatttaacgggctgtgatgcagcaaataccaaaacccgcgcatactttgaagcagggggacaggttaacagcaccggacgtttaaataactcgaatactgccggggcgacaaatgttgaactggagctccttgatgtggatgacaacagctccgttattgttgccggtgactatgcttcacagtctacctccggaaccaaagtcgatgcctcgtccggtactggtacgctgaattatgcagtccgttattatgctaccggtgcggcgacatccggtgcagtagccagctcagtgacgtacagtattatttatctctaa

SEQ ID NO: 118742 - DNA, 285 bp, Enterobacter cloacae
atgcgctttcagaagacaaagatgaatctctttgcttatcttcttgaacatgctgttcgaaaagaggtcagccgtgatgaattattacatcaggtatgggaaaaatatggccttaagtcatccagcagacaactttggcatgcaattggccagcttaaactgagtctgtttacgctgggtattccttacgaatttattcagtcgaataaaggtaagacctattctctggaaaaagtaaaggttttctttattacgcaatccgatattaatgataatgcatattaa

SEQ ID NO: 118743 - DNA, 126 bp, Enterobacter cloacae
atgaacgttgatcgtaaaaaaaacactgaatggggcaagtggacggagcgaggcctggtcttcaccgtcattatgttttgcatcattaactatgcttatcaactctaccgcatattttctgcttga

SEQ ID NO: 118744 - DNA, 357 bp, Enterobacter cloacae
atgaaatttttgactgtgattgtggctataacactcctgacggcatgccagctggtacgcccttttggcgatgctaccacctataaaccatttaccgtttcagcgcatcccggactggagggacggtatcactgtatgcgaagcacgcttgacgctgaaggctacgaagtggaatacatcttcccggaacgcgatacgcctaacttttttgatatctccagagagcacaggctgattgcccaggtcgatatgtatcataccaccggggcaaactttctggatattacgcttatctccggttcgaaacagaccaatgaagatcttgcccgtgtcatagcccattgtgtcagcagatga

SEQ ID NO: 118745 - DNA, 669 bp, Enterobacter cloacae
atgaaatcagattacgccaaacagattgaactgatttccgggccgctggaagcggcaatggaagcactcgcaggtacgttgtcagcgaaccaggagatagtcctgcataacctcaccacgccagagcagtccgtggtaaaaatcattaatgggcacgtcagcggcagaaaagcgggcgacaatcttttatctggtcctgaaaaagacaaaggattcgctctgctgcttaaaaacaataaggacagcaccccggttacggttaaaaattataaaaccactacggcgtccggacggatcctgaacagcgcctcgacaatttactacagcgaggaaggggtaccgttgatggctttttgcatcaatatcgatacctctccttatgagcaaatgcgcaagtgcctcgacgcaataacaggcaacccgcttgccgattcagacccgcaggatatgaacctgggtggcatcattgagcagtcaatccaggaaatcatcgataaacattcggttccgggcaaaaaggtacagaaagcgcagcggcttaaaatagtcgctgaaatgcacgctaaaggcattttcaaaatgcggggcggcgtgcagcacgcggcgcaggccctgggcgtaacccgctatacggtatataacgatcttgaggtgatgggtgaaaaataa

SEQ ID NO: 118746 - DNA, 804 bp, Enterobacter cloacae
gtgaaaaataacagtccccggcgcattccgttttaccaggttgacgccttttctgacggcccctttacgggtaatcccgccgccgtctgcctgctggacgcctggccggaacaaaaagtgctccagcatatcgcgacggaaaacaacctttccgagaccgcatttgtggttcaacaggatggcggcttcgcgcttcgctggttcacccctgcagtggaagtggatctctgcggccatgcgacgcttgctgccgcgagcgttctcttaagccgtgacgacgcctgcgaaagcgtgcattttttcacccgcagcggcgaactgaccgtgacctcgcatggtgagcaatatacgctcgatttcccccaggtgctcccatcccgaattgccgcgccggaaggattgcttaaggccctgggtctggaggaaaacgacgtagaagtctggcaggcatccgaccttattgtcgtcatcgacgatgaagacaagctggatgccctgaagcctgatttcaacgcgctggcaaggtttaacacacgcggcgtggtggtgactgcgtcctcaagcacttttgattttcgctcccgctggttcggcccgcaggtgggggtaaatgaagatccggtgacaggttcggctcatacctttctggcaccgctttggagtgaaaaactgtcgaaaaagagattacacgcgcaacagggcgggagccgtaaaggcgaactgatttgctttgttaaagataacggacgtatcgaactttcgggcaaagcgtgcctgatgattgaaggcgtctttattctgtaa

SEQ ID NO: 118747 - DNA, 339 bp, Enterobacter cloacae
atgacgttaacgaaaagctttgctgcactcatggttgcagtatccattgaagttatcgccacaaccttgttatcgctatcaaacagttttcagcgccccgttgtgggactgtcagcgataataagctatggcataagttattattttttatcgattgcattacgccgaattcatctcggcgtggcctacgctatctggtcagcggtcggcttattcagcattaccgttatacaatcccgcttttttgactatattgtatcgcagagggcatggctgggtttggggattgttatcgctggaacaatcacactcaacctggcgatcaagcaaaacaaataa

SEQ ID NO: 118748 - DNA, 324 bp, Enterobacter cloacae
atgtatatcatactgaactgcctttgttggctgattatttctgtcaccatggaagtcactggcacgctattactccctgagaccagacattttaaaaatattccattaacaattcattgcctgatttgctacgttatttctttttattctttatcaatgcttatggggtatattttgccagtcattgcttactccatctgggcggggctggggattgtactgattaccgtgatgagcagcttattttatcgattaaaaagcagcattctggaaaagatcgggattggctgcatcgtgaccgggctggcgatcatcgccttttaa

SEQ ID NO: 118749 - DNA, 2382 bp, Enterobacter cloacae
atgacaacagagatactttccttgcgcgtggtgcagcttcgtgaatcctatcttcaggcaaaacctttcgtctcggcgcatcgggccgtgagcgtaacccaggtctataaagacaatccgggaatgaacaacagtctgctcagggccctggcctttcggcgtgcctgtgagactgcgcctctgcatgtggcgcaaaatgaactgatcgtcagccatccggctggcggcgcacgcgggggagaagtttcgcctgaaatcagttggcgctggctggccgaagagctggaaacccttcccacgcgagcgcaggatccttatcagattgatgagaaaacaaagcgtctgcttcgcgaagaagtattcccatactggcagggccgttccctcgatgaaatggcgcaaacgcagttaaagactcacggcctatggcagtggtgtcatgatgatggcatctgcgatgtcacgatcaaaacgcaaaacggtggcggcgattcctgtccgggttatgacaatattttactaatcaaaggaataaaggggatccgtgaagaagcggcagcactgctgctcgcgcttgatcctgctacccccgagggctgtgatgccttcaatttttataccgccatgctgcatacctgtgacggggtggtgacttatgcccgacgttatgctcactatctgaatgcgcttgcggaaaaagaaggcgatccgctgcgtcgcgatgagctgctgcaactgtccgggatatgcagccgtgtgcctgaacagccaccacagcatttccatgatgcgttgcaggcgatatggttcgtgcattctctctttatgctggaagaaaatcagaccggcatatcactcggccgcgtcgaccaatatctttggccactgctggaacgcgatctgaacgacggcacgctcgatcttcaacaggctgaggaactcctctgctgctggctcataaaaatggccgaaaccctgtggatttgtagcgaatctacagccatgtattttgctggctaccagccgtttatcaacctcgtggttggcggccagaaacgtgaaggtggcgatgcgaccaacccgctgacgctgatgataatggattgttcagcccgtttaaaaatttaccagccgggtttagcagtacgtatacataatcagtcccctcagccgtttatgcgcaaagtggtcgaagtggtacgcagtggcatgggttttccagcctgtcatttcgacgatgcgcatatccggatgatgcttcataaagggtttagctatgaagatgcccgggactactgtctgatgggctgcgtcgagccccaaaaatcagggaaaatgtaccagtggacgtcggtaggctataccacctgtactgcggctatcgagctggctttgcataatggtcgaacccaaaatgggaaacagtgcggccccgccactggtgatgtatctcagttcagtcgttatgaagacgttgaatccgcggttcggactcagctctctgctatcgtcagaaaagccgcagaagcgacgcttatcgtacaaaagctacatgcagaacatgcccgaaaacccctgatgtcatgcctgattgagggatgtattgccacagcaaaagatgtcacgcagggaggcgcgcgcctcaacgcggggccaggtctcatctggaccgggcttgctgattgtgtaaattcgctgatggccatcaggacgctggttttcgacaccgcgcgcttcacgctgcggcagctcgtggaggcactcgaacataattttgtcggttatcaggaaatacttactgcctgtcagcgagcaccgaaatatggcaatgatattcgtgaggtggatgatatcgcccgcgagctggtgcgttttcttgagcaggagcaccgccagtaccggatgctgtatgcgccgtttgcgttcggcacactctctatttcaaacaacaccccgtttgggcttatcactggtgcgctgccttctggccgactggcgggtaagccgctggctgatggcatcagcccggctcagcaaacggattacctcggacctactgcaataatcaactccgttagtcggatcaacgtcgaagagatggatattggcatggtgcataacatcaagctcatgttcggcatgcttgaaacacctgaaggtcagaacagcctgatccacctgctgcgtacagcgagcattctgggtaatgctcaactccagttcagctacgtggacgatgagacgctgagaaaagcacaaaaacaccccgctgaatatcgcaacctgatgatccgggtggcgggctacagtgctttcttcgttgaattaagcaaagaggtgcaggatgagattatcagcagaacgacgcagcggcatttctga

SEQ ID NO: 118750 - DNA, 960 bp, Enterobacter cloacae
atgagattatcagcagaacgacgcagcggcatttctgaacaggcgtatggctggatctcaaacattcagcggttttcgttacatgacgggccgggtatccgcagcatcatcttttttaaaggctgccagatgcgttgtgcctggtgcgcaaatccggaaggacaaactgccgaacaggatgtttttttccatgccgaccgctgtctgcattgtggcaactgcgccgacctgtgcccgacggggctccacagcatgaatcaaaatgtgcatgttcttgaacgtgaccgcagatgcgttggctgtcaattatgtgaagagcgttgtcctgccgccgcgctcaatattgtcggagaacatgttagcgcacaaaacgcatttgaaagggtcatggctgatgaaatctggtttcgccagtccggaggcggtgtgacgctcagtggcggcgaggtggcaatgcagcctgaatttgctcgcgttttaattgaacagctcaaagcggaggatattcacaccgccattgaaaccgctggctacgcttcctggcacgctattcatcaggcaacggcgggctgcgatctgattctgtacgatttaaagagcgcggaagatgcgctgcatacccgttttactggtgtcagtaataaaacgattctgcggaatcttgcacggctattacagggagggcaacagattattatccgtatccccgtgatcccgcattttaacgatgcaccggatcaggctgataaattactggcgctcatttctgcactcacacaaggaaaaaagaattttcagggtgtggaattactcccctatcacctttttggtacaggaaaatacaaattactcaacatggagtacgactggaacagaggttcagcaaatgtcgataacttcttatgtatggcacatcactatcgtctgccattaaaagtgtcgggtacgctcgcaggttaa

SEQ ID NO: 118751 - DNA, 219 bp, Enterobacter cloacae
atgaaaaaattggttgcaataatgagtctggcactgatgaccctcacggttgcagggtgctccagcgactatgtattacaaaagaaaaatggggaaatgattattacccacggaaagccggaagtcgatgatgacaacggtttaattacctatgaggacgttgcgggcaatgaacatgctatcaaccgcgaccaaattatccagatgatcgagaaataa

SEQ ID NO: 118752 - DNA, 696 bp, Enterobacter cloacae
gtgcccgaaatcaatcaacatggtcaaaccgttaacgatatcgtccccgactggaaatgtgcccgagcgctaactcgcacgccgctaaccggccagtattgtcgtctggaaccgttggacgcagaacgccacgcggcggatctgtttgaagcttacgcactgggcgatgacagcgactggacgtggcttgccagcacccagcctgtgagcgttgaggctactgcgcactgggtgctcggaaaggtgctggatgacgacctggtgccctttgccgttatcgatctgcgcaccgaaaaggcggtagggctggtgagctatatggcgattgaacgctttctgggatcggtggaaattggccacgtcacctggtcgcgcaagatgaaaggcacccgcattggcaccgaagcggtgtggctactgctgaaaaatgcctttgagcataaatatcgtcggctggagtggaaatgcgattcgatgaacaccgcctcacgcaacgcggcggagcggctggggtttgtctgggaagggcgcctgcgccagaagctggtgcgcaaaggacgcaaccgcgacagcgatatgctctctattattgacggcgagtggccggaaagggacgcggagctgcgcgcctggctggcggcggagaattttgacgcggaagggcggcagattaagcggttagaggaatttcgctag

SEQ ID NO: 118753 - DNA, 897 bp, Enterobacter cloacae
atggaacttcgttatctgcgctattttgtcgcggttgcacgcgagcgacacttcaccagggcggccaaagcgctgggtatttcacagcctccactgagccagcagattaaacggcttgaggaggaagtgggcacaccgctgttcaggcgcctgacgcggggcgtggagctgaccgaggcgggagaagccttctatgaggacgcctgtaagatcctggcgctgagcgacgctgcgctggagaaagcccggggcatcgcgcgcggcctgaacggcagcctgtcgattggcatcaccagctccgacgcctttcatcccaaaattttcgcgctgattcgtcagtttcaggtgcagaacattgcggtgcaggttcaccaggtggaagccaatatgtcttcgctgacgacaatgctggcggagggtgaactggatatcgcctttgtgcgcctgccgtgcgaaagcagcaaggtgttcgagctaaaaatcctcgaccgggagccgatggtggtggcgctgcatcgcgatcatcctctggctgcgtgcgattcgctggcgttagagcagcttcgggatacaccggtggtgctgttcccccaggaggtcgcgccggggctgtatgaccgcgtttacggcagctgcgagcgggccggagtcgatatgcaacacacgctgcaatcttcacaactttcctcttctctgagcatggtctccgctggcggcgggttcgcgctggtgccgaaatcgatggccgctatttctccgccgaatgtcacctaccacgcgctgagctcaccggagctttataccgatatcgcgctctgctggcggcgctttgaacgctcacggacggtgaaacggtttctggcgatgatgagcgagggggaacgggagcagggatga

SEQ ID NO: 118754 - DNA, 213 bp, Enterobacter cloacae
atgtctaataaaatgactggtttagtaaaatggttcaacgcagataaaggttttggctttatcacccctgacgacggcagcaaagatgtattcgtacatttctctgcaattcagagcgacaacttcaaaacgcttgatgaaggtcagaaagtttcctttaccattgagaatggcgcaaaaggtccagcagctggaaacgtttctccactgtaa

SEQ ID NO: 118755 - DNA, 129 bp, Enterobacter cloacae
atgtactacaaaatgtctacgctttcactgtgccgggagtttggggtgttttgttcacaggcgggaaaatcctcccgcgccacgcagacgttattagaagggatgctcaaaatgaaaaggtctgcgtaa

SEQ ID NO: 118756 - DNA, 456 bp, Enterobacter cloacae
atggctactacacctaacttttcttatgcgctctctgaagaaagcgctgttcatcagctcatcaacgcttcaatttccgattttgcgaatcttttcgagctggctgatacctgcgccgcgtatgtcagcgtgctggtggaaactgacgacacagtgacgtttaccacgctctgcaagcgattgctggccgcgctgaagcggctgcgtgagtgctgtgactcagagcttccgtcgtatctggttgagcaattgattgcaggtgaaaagattacttcctgcgtgccggactgctggcaggaaacggtgttgcaggtggattatgccgtggcattaacgctggcggtgatgggcgggacactgcctgcgagcgtggcgaaagaactcaccgggctactgcatgatatggtctggttgctggcagagtttgtgaaggagccgtatataacgacgcactga

SEQ ID NO: 118757 - DNA, 411 bp, Enterobacter cloacae; identical to SEQ ID NO: 109632

SEQ ID NO: 118758 - DNA, 219 bp, Enterobacter cloacae
atgagtgcgaacactgtaagaggtgactgtgaaagaaatgtccactttgtgccaggagcggacattgttattaatagcagcagacgccagccggactctctcgtcttacagcacttcaaccacttcaaattcttctgcgatcaactccatatctttagaaaaatgaccttcgcgggtaaaaaatcgctgatgctcatttcgccagtattgaaggcttaa

SEQ ID NO: 118759 - DNA, 312 bp, Enterobacter cloacae
atgcccgcagtctcaagagcgcctttcgacgcggccaccagacattttcctattcaagaactcgctctggaagatctttactgggtactaaaaggagagcactacccatcaccagacgacatgcgaaagcgcttccccagccgggagaggatgaaataccgggaaaaatggtgggtcattgacgtaggtggcgggtatttaagagtaatgttatttactgattttgagcgcggaaagctcttcatcaaacacaccagcactcacgcagattatgacaagctcacggacctctaccggagaaagaaagaatga

SEQ ID NO: 118760 - DNA, 420 bp, Enterobacter cloacae
atgaacttttcagcagccatcaaagcggcaaacgatctaacaagggagctccctttcctgggctcaagcccgtcgcgacaagattatgaggatgctatggggttggtggagtatctaattgagcatgaccccgatagtccgctggtagagatgctcaccgctaaaatcgataaatacgaaaacgagtctccggagtttgcagaatttaacgcgcgtgttgccagcattccgtcaggcgttgcgttattgcgaacgctgatggatcagtaccatctcactcagagcgatttcgaaaacgaaataggtaagaagtctctggtgagtcggatcctcaacggacagcgcacgttaacgctggatcatatgcgcgcgctggcgaagcgttttggcgtgcaggtaagtgcatttgtggggaattga

SEQ ID NO: 118761 - DNA, 159 bp, Enterobacter cloacae
atgatgatgtgcctctacaattaccgtaaggttttagacgcgacatggctagcctgtttgccgtactgtatggtgatgctgatccatttcgagcagatggcacaattgttgtgccaacgttcaacggcgaacagaatagctgtgtcgctttttacttaa

SEQ ID NO: 118762 - DNA, 552 bp, Enterobacter cloacae
atgttaaatgatgtaaaggaaaaaataattgataatgattttgttaatattgttagaattaatatgattttcaatgatgccatcaaaaccatggagaggctcttaatgacgctcgatgatgaaatcaggaaggaaatatctttgcttcctgaacaaccagaaattgtggatgactgggaacacattgcggatgagttatccgatagttatagttgggctggttcaaaaattgactggtcaaagaccagtgctcataggtctttagaactacatggagactataaggattggttggtagatataaagaaattcattcatgaaactgatgttcatgacgtgatttcaaatagtgatgagatttactatataaatgattcgtctcttgatttttctgtcagattgaatcccgcgcagttctttttattttttgatgtggctatagaaaatattcctcagcatcattatttttttgatagggaaaataaatggtgtctagtgatcagtgcagagggatatattgacttcggtttctcatgtttagataaaaaatga

SEQ ID NO: 118763 - DNA, 483 bp, Enterobacter cloacae
atgagtaattttaaattttgggcatgggagaaaaaaccaagaaccatgcttcgctatgttaagcctggcgatgtattttgtttcaaggttgatggagggatgtatcgttttggccgtattatgtcattaatgtcagtagggcatatagctgaaatttttgatattttatctgatacacctaaaataaccgagggtgaaattgagaatgctaaaagaatcatttcgccactgattatagatacctattctctactggataagaaaattgaaccagaaagtgattggagaataattggacaccaagataattattcccccgataatgttgatgatgtttattttgcattcggtattggtgactcttgcaaaaagaaagatttttacgggaatgtttttccaatcgacgaaaaagaatggaatgatcttcctaaactttcaccgaaaagtaattttgatataaagaatatattaagaaaagtttag

SEQ ID NO: 118764 - DNA, 876 bp, Enterobacter cloacae
atgaaatacgaccactggggcaacctggtcagcccccgcaacgggctgtatgaacagcattatgcgtatgacgccgagaaccgtctggtatccgcccggggaaccgggccggaagggcggtttgaggcgcgctaccactacgacgcgctgggccgccgtacgcgcaaaatcgtcaccacgacgcacggcaccaccaacacccgcttcctgtggcagggctaccgcctgttgcaggagcagcaggagagcgggctgcgcagcacctatgtatacgacccgaatgaagcctggagcccgctggcgcgggtggatcaccttcgtgaccagagcaacggtgagatttactggttcaacaccgatctgaacggcgcgccgctggaggtcacagacgagcgcggcgcggtgcgctggagcggccagtacggcagctttggcgaagtgcgccatcagagcgaagggttctcacgggttgtgaatcgcacagcgatggcacaccagccgcttcgctatgccgggcagtacgctgacggtgagacgggactgcactataacctgttccgctactacgacccgcaggtcgggcggtttattgtgcaggatccgattgggctgaatggcgggtggaacctttatcagtatgcgccgaacccgttggggtggattgatccccttggattaacggccttagatactacaggatataacgtttatggattatttgatccgggagcatcaaaaccttattacgttggtataactgatgatcttctcaggagagcgggagaacatagggattctgggcgattaactccgggtgctcagttgcttcctttagatgagaatgtgacctatgcacaagctagaggttacgaataa

SEQ ID NO: 118765 - DNA, 198 bp, Enterobacter cloacae
atgtttctgaaaaataagttaagaactaataaaggattacctgaagagaatttccctgagaaacctgaactacttaatctttatgatgattatggtggtgctgatgtaagtgtaataaattctttaataaaaaaggttatcaatttcttttttaaaggttttttactcctgtcgctgggggagtgtaattgtttttga
